United States Patent Application Publication US 2024/0327476 A1 - sequence listing, part 82

SEQ ID NO: 156358 - DNA, 1980 bp, synthetic construct
  misc_feature 1..1980: note = Description of Artificial Sequence: Synthetic coding sequence
  source 1..1980: mol_type = other DNA
atggcccacaccttccggggctgcagcctggccttcatgttcatcatcacctggctgctgatcaaggccaagattgatgcctgcaagagaggagatgtgacagtgaagcccagccacgtgatcctgctgggcagcacagtgaacatcacctgcagcctgaagccccggcagggctgcttccactacagcagaagaaacaagctgatcctgtacaagtttgaccggcgcatcaacttccaccacggccacagcctgaacagccaggtgacaggcctgcccctgggcaccaccctgtttgtgtgcaagctggcctgcatcaacagtgatgagatccagatctgtggggctgagatctttgtgggcgtggcccctgagcagccccagaacctgagctgcatccagaagggggagcagggcaccgtggcctgcacctgggagcggggccgggacacccacctgtacacagagtacaccctgcagctgagcggccccaagaacctgacctggcagaagcagtgcaaggacatctactgtgactacctggactttggcatcaacctgaccccagagagccctgagagcaacttcaccgccaaggtgacagctgtgaacagcctgggcagcagcagcagcctgcccagcaccttcaccttcctggacatcgtgcggcccctgcccccctgggacatccgcatcaagttccagaaggcctctgtgagccgctgcaccctgtactggagagatgagggcctggtgctgctgaaccggctgcgctaccggcccagcaacagccggctgtggaacatggtgaatgtgaccaaggccaagggcagacatgacctgctggacctgaagcccttcacagaatatgagttccagatcagcagcaagctgcacctgtacaagggctcctggagcgactggagcgagagcctgcgggcccagaccccagaggaggagcccaccggcatgctggatgtgtggtacatgaagaggcacatcgactacagccggcagcagatcagcctcttctggaagaacctgtctgtgtctgaggcccggggcaagatcctgcactaccaggtgaccctgcaggagctgaccggcggcaaggccatgacccagaacatcaccggccacacctcctggaccaccgtcatccccaggacaggcaactgggccgtggccgtgtctgctgccaacagcaagggcagcagcctgcccacccgcatcaacatcatgaacctgtgtgaggccggcctgctggccccccggcaggtgtctgccaacagcgagggcatggacaacatcctggtgacctggcagccccccaggaaggaccccagcgctgtgcaggagtatgtggtggagtggagggagctgcaccctggaggagacacccaggtgcccctgaactggctgcggagccggccctacaacgtgtctgccctgatcagcgagaacatcaagagctacatctgctatgagatccgggtgtatgccctgagcggggaccagggcggctgcagcagcatcctgggcaacagcaagcacaaggcccccctgagcggcccccacatcaatgccatcacagaggagaagggcagcatcctgatctcctggaacagcatccctgtgcaggagcagatgggctgcctgctgcactaccgcatctactggaaggagcgggacagcaacagccagccccagctgtgtgagatcccctacagagtgtcccagaacagccaccccatcaacagcctgcagccccgggtgacctacgtgctgtggatgacagccctgacagctgctggggagagcagccatggaaatgaaagagagttctgcctgcagggcaaggccaactggatggcctttgtggcccccagcatctgcatcgccatcatcatggtgggcatcttcagcacccactacttccagcagaagaggaggcacagctgcccctggacaggcagctag

SEQ ID NO: 156359 - DNA, 693 bp, synthetic construct
  misc_feature 1..693: note = Description of Artificial Sequence: Synthetic coding sequence
  source 1..693: mol_type = other DNA
tgacagaagggggagcagggcaccgtggcctgcacctgggagcggggccgggacacccacctgtacacagagtacaccctgcagctgagcggccccaagaacctgacctggcagaagcagtgcaaggacatctactgtgactacctggactttggcatcaacctgaccccagagagccctgagagcaacttcaccgccaaggtgacagctgtgaacagcctgggcagcagcagcagcctgcccagcaccttcaccttcctggacatcgtgcggcccctgcccccctgggacatccgcatcaagttccagaaggcctctgtgagccgctgcaccctgtactggagagatgagggcctggtgctgctgaaccggctgcgctaccggcccagcaacagccggctgtggaacatggtgaatgtgaccaaggccaagggcagacatgacctgctggacctgaagcccttcacagaatatgagttccagatcagcagcaagctgcacctgtacaagggctcctggagcgactggagcgagagcctgcgggcccagaccccagaggaggagcccaccggcatgctggatgtgtggtacatgaagaggcacatcgactacagccggcagcagatcagcctcttctggaaggtgtccttcaagaggcagctgaagacccagggcaacaagacagagggctag

SEQ ID NO: 156360 - DNA, 1980 bp, synthetic construct; identical to SEQ ID NO: 156358
  misc_feature 1..1980: note = Description of Artificial Sequence: Synthetic coding sequence
  source 1..1980: mol_type = other DNA

SEQ ID NO: 156361 - DNA, 2331 bp, synthetic construct
  misc_feature 1..2331: note = Description of Artificial Sequence: Synthetic coding sequence
  source 1..2331: mol_type = other DNA
atggcccacaccttccggggctgcagcctggccttcatgttcatcatcacctggctgctgatcaaggccaagattgatgcctgcaagagaggagatgtgacagtgaagcccagccacgtgatcctgctgggcagcacagtgaacatcacctgcagcctgaagccccggcagggctgcttccactacagcagaagaaacaagctgatcctgtacaagtttgaccggcgcatcaacttccaccacggccacagcctgaacagccaggtgacaggcctgcccctgggcaccaccctgtttgtgtgcaagctggcctgcatcaacagtgatgagatccagatctgtggggctgagatctttgtgggcgtggcccctgagcagccccagaacctgagctgcatccagaagggggagcagggcaccgtggcctgcacctgggagcggggccgggacacccacctgtacacagagtacaccctgcagctgagcggccccaagaacctgacctggcagaagcagtgcaaggacatctactgtgactacctggactttggcatcaacctgaccccagagagccctgagagcaacttcaccgccaaggtgacagctgtgaacagcctgggcagcagcagcagcctgcccagcaccttcaccttcctggacatcgtgcggcccctgcccccctgggacatccgcatcaagttccagaaggcctctgtgagccgctgcaccctgtactggagagatgagggcctggtgctgctgaaccggctgcgctaccggcccagcaacagccggctgtggaacatggtgaatgtgaccaaggccaagggcagacatgacctgctggacctgaagcccttcacagaatatgagttccagatcagcagcaagctgcacctgtacaagggctcctggagcgactggagcgagagcctgcgggcccagaccccagaggaggagcccaccggcatgctggatgtgtggtacatgaagaggcacatcgactacagccggcagcagatcagcctcttctggaagaacctgtctgtgtctgaggcccggggcaagatcctgcactaccaggtgaccctgcaggagctgaccggcggcaaggccatgacccagaacatcaccggccacacctcctggaccaccgtcatccccaggacaggcaactgggccgtggccgtgtctgctgccaacagcaagggcagcagcctgcccacccgcatcaacatcatgaacctgtgtgaggccggcctgctggccccccggcaggtgtctgccaacagcgagggcatggacaacatcctggtgacctggcagccccccaggaaggaccccagcgctgtgcaggagtatgtggtggagtggagggagctgcaccctggaggagacacccaggtgcccctgaactggctgcggagccggccctacaacgtgtctgccctgatcagcgagatcccctacagagtgtcccagaacagccaccccatcaacagcctgcagccccgggtgacctacgtgctgtggatgacagccctgacagctgctggggagagcagccatggaaatgaaagagagttctgcctgcagggcaaggccaactggatggcctttgtggcccccagcatctgcatcgccatcatcatggtgggcatcttcagcacccactacttccagcagaaggtgtttgtgctgctggccgccctgcggccccagtggtgcagccgggagatcccagaccctgccaacagcacctgtgccaagaagtaccccatcgccgaggagaagacccagctgcccctggaccggctgctgattgactggcccaccccagaggaccctgagcccctggtgatcagcgaggtgctgcaccaggtgacccctgtgttccgccaccccccctgcagcaactggccccagcgggagaagggcatccagggccaccaggccagcgagaaggacatgatgcacagcgccagcagccccccaccaccccgggccctgcaggccgagagccggcagctggtggacctgtacaaggtgctggagagccggggcagtgaccccaagccagagaacccagcctgcccctggacagtgctgcctgctggggacctgcccacccatgatggctacctgcccagcaacattgatgacctgcccagccatgaggcccccctggccgacagcctggaggagctggagccccagcacatcagcctgagcgtcttccccagcagcagcctgcaccccctgaccttcagctgtggggacaagctgaccctggaccagctgaagatgagatgtgacagcctgatgctgtag

SEQ ID NO: 156362 - DNA, 681 bp, synthetic construct
  misc_feature 1..681: note = Description of Artificial Sequence: Synthetic coding sequence
  source 1..681: mol_type = other DNA
atgagcagccccacagccagcagcaccaccccccgctgtggcaccagcgctggccctgccagccccacctggcgctgccgggccacagccctgcacctgcaccaccctgtggaccagctgccccaccaggtgctgcagcccaccaccggccagaggcagcccggcaccggcctgccctggcacagcaccccagcccagctggccctggccggcctgcggcaggcccagccccacccccagcagcagaggctgcaccagcccggcctgcggggcgtggatgcccacggcagcgctgcccacgtgccccaggccgtgccccaggccgtgcgggcccaccccccaggccagctgctgtcctgggccgctgctgtgtgcctgctgtgccagcaccacctgcagctgcccgggaagaagaggaacagcaccctgtacatcaccatgctgctgattgtgcctgtgattgtggccggggccatcatcgtgctgctgctgtacctgaagaggctgaagatcatcatcttcccccccatcccagaccccgggaagatcttcaaggagatgtttggagaccagaatgatgacaccctgcactggaagaagtatgacatctatgagaagcagaccaaggaggagacagacagcgtggtgctgattgagaacctgaagaaggccagccagtag

SEQ ID NO: 156363 - DNA, 840 bp, synthetic construct
  misc_feature 1..840: note = Description of Artificial Sequence: Synthetic coding sequence
  source 1..840: mol_type = other DNA
atggagtggccagcccggctgtgtggcctgtgggccctgctgctgtgtgccggcggcggcggcggcggcggcggggccgcccccacagagacccagccccctgtgaccaacctgtctgtgtctgtggagaacctgtgcaccgtcatctggacctggaaccccccagagggcgccagcagcaactgcagcctgtggtacttcagccactttggagacaagcaggacaagaagatcgcccctgagaccaggaggagcattgaggtgcccctgaatgaaagaatctgcctgcaggtgggcagccagtgcagcaccaatgaaagtgagaagcccagcatcctggtggagaagtgcatcagccccccagagggggaccctgagagcgctgtgacagagctgcagtgcatctggcacaacctgagctacatgaagtgctcctggctgcccggcaggaacaccagcccagacaccaactacaccctgtactactggcacaggagcctggagaagatccaccagtgtgagaacatcttccgggagggccagtacttcggctgcagctttgacctgaccaaggtgaaggacagcagctttgagcagcacagcgtgcagatcatggtgaaggacaatgctgggaagatcaagcccagcttcaacatcgtgcccctgaccagccgggtgaagccagaccccccccacatcaagaacctgtccttccacaatgatgacctgtatgtgcagtgggagaacccccagaacttcatcagccgctgcctcttctatgaggtggaggtgaacaacagccagacagagacccacaacgtgttctacgtgcgcttctag

SEQ ID NO: 156364 - DNA, 1284 bp, synthetic construct
  misc_feature 1..1284: note = Description of Artificial Sequence: Synthetic coding sequence
  source 1..1284: mol_type = other DNA
atggagtggccagcccggctgtgtggcctgtgggccctgctgctgtgtgccggcggcggcggcggcggcggcggggccgcccccacagagacccagccccctgtgaccaacctgtctgtgtctgtggagaacctgtgcaccgtcatctggacctggaaccccccagagggcgccagcagcaactgcagcctgtggtacttcagccactttggagacaagcaggacaagaagatcgcccctgagaccaggaggagcattgaggtgcccctgaatgaaagaatctgcctgcaggtgggcagccagtgcagcaccaatgaaagtgagaagcccagcatcctggtggagaagtgcatcagccccccagagggggaccctgagagcgctgtgacagagctgcagtgcatctggcacaacctgagctacatgaagtgctcctggctgcccggcaggaacaccagcccagacaccaactacaccctgtactactggcacaggagcctggagaagatccaccagtgtgagaacatcttccgggagggccagtacttcggctgcagctttgacctgaccaaggtgaaggacagcagctttgagcagcacagcgtgcagatcatggtgaaggacaatgctgggaagatcaagcccagcttcaacatcgtgcccctgaccagccgggtgaagccagaccccccccacatcaagaacctgtccttccacaatgatgacctgtatgtgcagtgggagaacccccagaacttcatcagccgctgcctcttctatgaggtggaggtgaacaacagccagacagagacccacaacgtgttctacgtgcaggaggccaagtgtgaaaatcctgagtttgaaagaaatgtggagaacaccagctgcttcatggtgcctggggtgctgcctgacaccctgaacacagtgcgcatccgggtgaagaccaacaagctgtgctatgaagatgacaagctgtggagcaactggagccaggagatgagcatcggcaagaagaggaacagcaccctgtacatcaccatgctgctgattgtgcctgtgattgtggccggggccatcatcgtgctgctgctgtacctgaagaggctgaagatcatcatcttcccccccatcccagaccccgggaagatcttcaaggagatgtttggagaccagaatgatgacaccctgcactggaagaagtatgacatctatgagaagcagaccaaggaggagacagattctgtggtgctgattgagaacctgaagaaggccagccagtag

SEQ ID NO: 156365 - DNA, 1143 bp, synthetic construct
  misc_feature 1..1143: note = Description of Artificial Sequence: Synthetic coding sequence
  source 1..1143: mol_type = other DNA
atggcctttgtgtgcctggccatcggctgcctgtacaccttcctgatcagcaccaccttcggctgcaccagcagcagtgacacagagatcaaggtgaaccccccccaggactttgagatcgtggaccccggctacctgggctacctgtacctgcagtggcagccccccctgagcctggaccacttcaaggagtgcaccgtggagtatgagctgaagtacagaaacatcggcagcgagacctggaagaccatcatcaccaagaacctgcactacaaggatggctttgacctgaacaagggcatcgaggccaagatccacaccctgctgccctggcagtgcaccaatggaagtgaggtgcagagctcctgggccgagaccacctactggatcagcccccagggcatccctgagaccaaggtgcaggacatggactgtgtgtactacaactggcagtacctgctgtgctcctggaagccaggcattggagtgctgctggacaccaactacaacctcttctactggtatgagggcctggaccacgccctgcagtgtgtggactacatcaaggcagatggccagaacatcggctgccgcttcccctacctggaggccagtgactacaaggacttctacatctgtgtgaatggcagcagcgagaacaagcccatccgcagcagctacttcaccttccagctgcagaacatcgtgaagcccctgccccctgtgtacctgaccttcacccgggagagcagctgtgagatcaagctgaagtggagcatccccctgggccccatcccagcccgctgctttgattatgaaattgagatccgggaggatgacaccaccctggtgacagccaccgtggagaatgagacctacaccctgaagaccaccaatgagacccggcagctgtgctttgtggtgcgcagcaaggtgaacatctactgcagtgatgatggcatctggagcgagtggagcgacaagcagtgctgggagggggaggacctgagcaagaagaccctgctgcgcttctggctgcccttcggcttcatcctgatcctggtgatctttgtgacaggcctgctgctgaggaagcccaacacctaccccaagatgatccctgagttcttctgtgacacctag

SEQ ID NO: 156366 - DNA, 1143 bp, synthetic construct; identical to SEQ ID NO: 156365
  misc_feature 1..1143: note = Description of Artificial Sequence: Synthetic coding sequence
  source 1..1143: mol_type = other DNA

SEQ ID NO: 156367 - DNA, 465 bp, synthetic construct
  misc_feature 1..465: note = Description of Artificial Sequence: Synthetic coding sequence
  source 1..465: mol_type = other DNA
atggccccccggcgggcccggggctgcaggaccctgggcctgcctgccctgctgctgctgctgctgctgcggcccccagccacccgggagcctgctgccagcagccccagcagcaacaacacagctgccaccacagctgccatcgtgcccggcagccagctgatgcccagcaagagccccagcacaggcaccacagagatcagcagccatgagagcagccacggcacccccagccagaccacagccaagaactgggagctgacagccagcgccagccaccagcccccaggagtgtacccccagggccacagcgacaccaccgtggccatcagcaccagcacagtgctgctgtgtggcctgtctgctgtgtccctgctggcctgctacctgaagagccgggcctctgtgtgcagctgccaccccaggtctgctggccacacctgcagcgtgggctctgtgtgctag

SEQ ID NO: 156368 - DNA, 804 bp, synthetic construct
  misc_feature 1..804: note = Description of Artificial Sequence: Synthetic coding sequence
  source 1..804: mol_type = other DNA
atggccccccggcgggcccggggctgcaggaccctgggcctgcctgccctgctgctgctgctgctgctgcggcccccagccacccggggcatcacctgccccccacccatgtctgtggagcacgccgacatctgggtgaagagctacagcctgtacagccgggagcgctacatctgcaacagcggcttcaagaggaaggccggcaccagcagcctgacagaatgtgtgctgaacaaggccaccaacgtggcccactggaccacccccagcctgaagtgcatccgggaccctgccctggtgcaccagaggcctgccccacccagcacagtgaccacagctggggtgaccccccagcctgagagcctgagccccagcggcaaggagcctgctgccagcagccccagcagcaacaacacagctgccaccacagctgccatcgtgcccggcagccagctgatgcccagcaagagccccagcacaggcaccacagagatcagcagccatgagagcagccacggcacccccagccagaccacagccaagaactgggagctgacagccagcgccagccaccagcccccaggagtgtacccccagggccacagcgacaccaccgtggccatcagcaccagcacagtgctgctgtgtggcctgtctgctgtgtccctgctggcctgctacctgaagagccggcagaccccacccctggcctctgtggagatggaggccatggaggccctgcctgtgacctggggcaccagcagcagagatgaggacctggagaactgcagccaccacctgtag

SEQ ID NO: 156369 - DNA, 612 bp, synthetic construct
  misc_feature 1..612: note = Description of Artificial Sequence: Synthetic coding sequence
  source 1..612: mol_type = other DNA
atgtctgtggagcacgccgacatctgggtgaagagctacagcctgtacagccgggagcgctacatctgcaacagcggcttcaagaggaaggccggcaccagcagcctgacagaatgtgtgctgaacaaggccaccaacgtggcccactggaccacccccagcctgaagtgcatccgggaccctgccctggtgcaccagaggcctgccccacccagcacagtgaccacagctggggtgaccccccagcctgagagcctgagccccagcggcaaggagcctgctgccagcagccccagcagcaacaacacagctgccaccacagctgccatcgtgcccggcagccagctgatgcccagcaagagccccagcacaggcaccacagagatcagcagccatgagagcagccacggcacccccagccagaccacagccaagaactgggagctgacagccagcgccagccaccagcccccaggagtgtacccccagggccacagcgacaccaccgtggccatcagcaccagcacagtgctgctgtgtggcctgtctgctgtgtccctgctggcctgctacctgaagagcagtggagctgtgctgagctacagcggctag

SEQ ID NO: 156370 - DNA, 696 bp, synthetic construct
  misc_feature 1..696: note = Description of Artificial Sequence: Synthetic coding sequence
  source 1..696: mol_type = other DNA
atgtctgtggagcacgccgacatctgggtgaagagctacagcctgtacagccgggagcgctacatctgcaacagcggcttcaagaggaaggccggcaccagcagcctgacagaatgtgtgctgaacaaggccaccaacgtggcccactggaccacccccagcctgaagtgcatccgggaccctgccctggtgcaccagaggcctgccccacccagcacagtgaccacagctggggtgaccccccagcctgagagcctgagccccagcggcaaggagcctgctgccagcagccccagcagcaacaacacagctgccaccacagctgccatcgtgcccggcagccagctgatgcccagcaagagccccagcacaggcaccacagagatcagcagccatgagagcagccacggcacccccagccagaccacagccaagaactgggagctgacagccagcgccagccaccagcccccaggagtgtacccccagggccacagcgacaccaccgtggccatcagcaccagcacagtgctgctgtgtggcctgtctgctgtgtccctgctggcctgctacctgaagagccggcagaccccacccctggcctctgtggagatggaggccatggaggccctgcctgtgacctggggcaccagcagcagagatgaggacctggagaactgcagccaccacctgtag

SEQ ID NO: 156371 - DNA, 510 bp, synthetic construct
  misc_feature 1..510: note = Description of Artificial Sequence: Synthetic coding sequence
  source 1..510: mol_type = other DNA
atggccccccggcgggcccggggctgcaggaccctgggcctgcctgccctgctgctgctgctgctgctgcggcccccagccacccgggagcctgctgccagcagccccagcagcaacaacacagctgccaccacagctgccatcgtgcccggcagccagctgatgcccagcaagagccccagcacaggcaccacagagatcagcagccatgagagcagccacggcacccccagccagaccacagccaagaactgggagctgacagccagcgccagccaccagcccccaggagtgtacccccagggccacagcgacaccaccgtggccatcagcaccagcacagtgctgctgtgtggcctgtctgctgtgtccctgctggcctgctacctgaagagccggcagaccccacccctggcctctgtggagatggaggccatggaggccctgcctgtgacctggggcaccagcagcagagatgaggacctggagaactgcagccaccacctgtag

SEQ ID NO: 156372 - DNA, 609 bp, synthetic construct
  misc_feature 1..609: note = Description of Artificial Sequence: Synthetic coding sequence
  source 1..609: mol_type = other DNA
atggccccccggcgggcccggggctgcaggaccctgggcctgcctgccctgctgctgctgctgctgctgcggcccccagccaccaggggggaccctgccctggtgcaccagaggcctgccccacccagcacagtgaccacagctggggtgaccccccagcctgagagcctgagccccagcggcaaggagcctgctgccagcagccccagcagcaacaacacagctgccaccacagctgccatcgtgcccggcagccagctgatgcccagcaagagccccagcacaggcaccacagagatcagcagccatgagagcagccacggcacccccagccagaccacagccaagaactgggagctgacagccagcgccagccaccagcccccaggagtgtacccccagggccacagcgacaccaccgtggccatcagcaccagcacagtgctgctgtgtggcctgtctgctgtgtccctgctggcctgctacctgaagagccggcagaccccacccctggcctctgtggagatggaggccatggaggccctgcctgtgacctggggcaccagcagcagagatgaggacctggagaactgcagccaccacctgtag

SEQ ID NO: 156373 - DNA, 759 bp, synthetic construct
  misc_feature 1..759: note = Description of Artificial Sequence: Synthetic coding sequence
  source 1..759: mol_type = other DNA
atggccccccggcgggcccggggctgcaggaccctgggcctgcctgccctgctgctgctgctgctgctgcggcccccagccacccggggcatcacctgccccccacccatgtctgtggagcacgccgacatctgggtgaagagctacagcctgtacagccgggagcgctacatctgcaacagcggcttcaagaggaaggccggcaccagcagcctgacagaatgtgtgctgaacaaggccaccaacgtggcccactggaccacccccagcctgaagtgcatccgggaccctgccctggtgcaccagaggcctgccccacccagcacagtgaccacagctggggtgaccccccagcctgagagcctgagccccagcggcaaggagcctgctgccagcagccccagcagcaacaacacagctgccaccacagctgccatcgtgcccggcagccagctgatgcccagcaagagccccagcacaggcaccacagagatcagcagccatgagagcagccacggcacccccagccagaccacagccaagaactgggagctgacagccagcgccagccaccagcccccaggagtgtacccccagggccacagcgacaccaccgtggccatcagcaccagcacagtgctgctgtgtggcctgtctgctgtgtccctgctggcctgctacctgaagagccgggcctctgtgtgcagctgccaccccaggtctgctggccacacctgcagcgtgggctctgtgtgctag

SEQ ID NO: 156374 - DNA, 564 bp, synthetic construct
  misc_feature 1..564: note = Description of Artificial Sequence: Synthetic coding sequence
  source 1..564: mol_type = other DNA
atggccccccggcgggcccggggctgcaggaccctgggcctgcctgccctgctgctgctgctgctgctgcggcccccagccaccaggggggaccctgccctggtgcaccagaggcctgccccacccagcacagtgaccacagctggggtgaccccccagcctgagagcctgagccccagcggcaaggagcctgctgccagcagccccagcagcaacaacacagctgccaccacagctgccatcgtgcccggcagccagctgatgcccagcaagagccccagcacaggcaccacagagatcagcagccatgagagcagccacggcacccccagccagaccacagccaagaactgggagctgacagccagcgccagccaccagcccccaggagtgtacccccagggccacagcgacaccaccgtggccatcagcaccagcacagtgctgctgtgtggcctgtctgctgtgtccctgctggcctgctacctgaagagccgggcctctgtgtgcagctgccaccccaggtctgctggccacacctgcagcgtgggctctgtgtgctag

SEQ ID NO: 156375 - DNA, 705 bp, synthetic construct
  misc_feature 1..705: note = Description of Artificial Sequence: Synthetic coding sequence
  source 1..705: mol_type = other DNA
atggccccccggcgggcccggggctgcaggaccctgggcctgcctgccctgctgctgctgctgctgctgcggcccccagccacccggggcatcacctgccccccacccatgtctgtggagcacgccgacatctgggtgaagagctacagcctgtacagccgggagcgctacatctgcaacagcggcttcaagaggaaggccggcaccagcagcctgacagaatgtgtgctgaacaaggccaccaacgtggcccactggaccacccccagcctgaagtgcatcaagccagctgccagcagccccagcagcaacaacacagctgccaccacagctgccatcgtgcccggcagccagctgatgcccagcaagagccccagcacaggcaccacagagatcagcagccatgagagcagccacggcacccccagccagaccacagccaagaactgggagctgacagccagcgccagccaccagcccccaggagtgtacccccagggccacagcgacaccaccgtggccatcagcaccagcacagtgctgctgtgtggcctgtctgctgtgtccctgctggcctgctacctgaagagccggcagaccccacccctggcctctgtggagatggaggccatggaggccctgcctgtgacctggggcaccagcagcagagatgaggacctggagaactgcagccaccacctgtag

SEQ ID NO: 156376 - DNA, 660 bp, synthetic construct
  misc_feature 1..660: note = Description of Artificial Sequence: Synthetic coding sequence
  source 1..660: mol_type = other DNA
atggccccccggcgggcccggggctgcaggaccctgggcctgcctgccctgctgctgctgctgctgctgcggcccccagccacccggggcatcacctgccccccacccatgtctgtggagcacgccgacatctgggtgaagagctacagcctgtacagccgggagcgctacatctgcaacagcggcttcaagaggaaggccggcaccagcagcctgacagaatgtgtgctgaacaaggccaccaacgtggcccactggaccacccccagcctgaagtgcatcaagccagctgccagcagccccagcagcaacaacacagctgccaccacagctgccatcgtgcccggcagccagctgatgcccagcaagagccccagcacaggcaccacagagatcagcagccatgagagcagccacggcacccccagccagaccacagccaagaactgggagctgacagccagcgccagccaccagcccccaggagtgtacccccagggccacagcgacaccaccgtggccatcagcaccagcacagtgctgctgtgtggcctgtctgctgtgtccctgctggcctgctacctgaagagccgggcctctgtgtgcagctgccaccccaggtctgctggccacacctgcagcgtgggctctgtgtgctag

SEQ ID NO: 156377 - DNA, 2601 bp, synthetic construct
  misc_feature 1..2601: note = Description of Artificial Sequence: Synthetic coding sequence
  source 1..2601: mol_type = other DNA
atgggcgccgcccggagccccccatctgctgtgcccggccccctgctgggcctgctgctgctgctgctgggcgtgctggcccctgggggcgccagcctgcggctgctggaccaccgggccctggtgtgcagccagcccggcctgaactgcaccgtgaagaacagcacctgcctggatgacagctggatccaccccaggaacctgacccccagcagccccaaggacctgcagatccagctgcactttgcccacacccagcagggcgacctcttccctgtggcccacatcgagtggaccctgcagacagatgccagcatcctgtacctggagggcgctgagctgtctgtgctgcagctgaacaccaatgaaaggctgtgtgtgcgctttgagttcctgagcaagctgcggcaccaccaccggcgctggaggttcaccttcagccactttgtggtggaccctgaccaggagtatgaggtgacagtgcaccacctgcccaagcccatcccagatggagaccccaaccaccagagcaagaacttcctggtgcctgactgtgaacatgccaggatgaaggtgaccaccccctgcatgagcagcggcagcctgtgggaccccaacatcaccgtggagaccctggaggcccaccagctgcgggtgtccttcaccctgtggaatgaaagcacccactaccagatcctgctgaccagcttcccccacatggagaaccacagctgctttgagcacatgcaccacatcccagcccccaggcctgaggagttccaccagaggagcaatgtgaccctgaccctgaggaacctgaagggctgctgccgccaccaggtgcagatccagcccttcttcagcagctgcctgaatgactgcctgcggcacagcgccaccgtgtcctgcccagagatgccagacaccccagagcccatcccagactacatgcccctgtgggtgtactggttcatcaccggcatcagcatcctgctggtgggcagcgtcatcctgctgattgtgtgcatgacctggaggctggccggccctggcagcgagaagtacagtgatgacaccaagtacacagatggcctgcctgctgctgacctgatccccccacccctgaagcccaggaaggtgtggatcatctacagcgctgaccaccccctgtatgtggatgtggtgctgaagtttgcccagttcctgctgacagcctgtggcacagaggtggccctggacctgctggaggagcaggccatcagcgaggccggcgtgatgacctgggtgggccggcagaagcaggagatggtggagagcaacagcaagatcatcgtgctgtgcagccggggcacccgggccaagtggcaggccctgctgggccgcggggcccctgtgcggctgcgctgtgaccacggcaagcctgtgggggacctcttcaccgctgccatgaacatgatcctgcctgacttcaagaggcctgcctgcttcggcacctacgtggtgtgctacttcagcgaggtgtcctgtgatggagatgtgcctgacctgtttggagctgccccccgctaccccctgatggacagatttgaggaggtgtacttccgcatccaggacctggagatgttccagcccggccgcatgcaccgggtgggggagctgagcggggacaactacctgcggagccctgggggccggcagctgcgggccgccctggaccgcttccgggactggcaggtgcgctgcccagactggtttgaatgtgagaacctgtacagcgcagatgaccaggatgcccccagcctggatgaggaggtgtttgaggagcccctgctgcccccaggcactggaattgtgaagagggcccccctggtgcgggagcccggcagccaggcctgcctggccatcgaccccctggtgggggaggagggcggcgctgctgtggccaagctggagccccacctgcagccccggggccagcctgccccccagcccctgcacaccctggtgctggccgctgaggagggcgccctggtggccgctgtggagcccggccccctggctgatggagctgctgtgcggctggccctggccggggagggggaggcctgccccctgctgggcagccctggagctggaagaaattctgtgctcttcctgcctgtggaccctgaggacagccccctgggcagcagcacccccatggccagcccagacctgctgcctgaagatgtgcgggagcacctggagggcctgatgctgagcctgtttgagcagagcctgagctgccaggcccagggcggctgcagcaggcctgccatggtgctgacagacccccacaccccctatgaggaggagcagaggcagagcgtgcagagcgaccagggctacatcagccgcagcagcccccagcccccagagggcctgacagagatggaggaggaggaggaggaggagcaggaccccgggaagccagccctgcccctgagccctgaggacctggagagcctgcggagcctgcagaggcagctgctcttccggcagctgcagaagaacagcggctgggacaccatgggcagcgagagcgagggccccagcgcctag

SEQ ID NO: 156378 - DNA, 2445 bp, synthetic construct
  misc_feature 1..2445: note = Description of Artificial Sequence: Synthetic coding sequence
  source 1..2445: mol_type = other DNA
atgggcgccgcccggagccccccatctgctgtgcccggccccctgctgggcctgctgctgctgctgctgggcgtgctggcccctgggggcgccagcctgcggctgctggaccaccgggccctggtgtgcagccagcccggcctgaactgcaccgtgaagaacagcacctgcctggatgacagctggatccaccccaggaacctgacccccagcagccccaaggacctgcagatccagctgcactttgcccacacccagcagggcgacctcttccctgtggcccacatcgagtggaccctgcagacagatgccagcatcctgtacctggagggcgctgagctgtctgtgctgcagctgaacaccaatgaaaggctgtgtgtgcgctttgagttcctgagcaagctgcggcaccaccaccggcgctggaggttcaccttcagccactttgtggtggaccctgaccaggagtatgaggtgacagtgcaccacctgcccaagcccatcccagatggagaccccaaccaccagagcaagaacttcctggtgcctgactgtgaacatgccaggatgaaggtgaccaccccctgcatgagcagcggcagcctgtgggaccccaacatcaccgtggagaccctggaggcccaccagctgcgggtgtccttcaccctgtggaatgaaagcacccactaccagatcctgctgaccagcttcccccacatggagaaccacagctgctttgagcacatgcaccacatcccagcccccaggcctgaggagttccaccagaggagcaatgtgaccctgaccctgaggaacctgaagggctgctgccgccaccaggtgcagatccagcccttcttcagcagctgcctgaatgactgcctgcggcacagcgccaccgtgtcctgcccagagatgccagacaccccagatggcctgcctgctgctgacctgatccccccacccctgaagcccaggaaggtgtggatcatctacagcgctgaccaccccctgtatgtggatgtggtgctgaagtttgcccagttcctgctgacagcctgtggcacagaggtggccctggacctgctggaggagcaggccatcagcgaggccggcgtgatgacctgggtgggccggcagaagcaggagatggtggagagcaacagcaagatcatcgtgctgtgcagccggggcacccgggccaagtggcaggccctgctgggccgcggggcccctgtgcggctgcgctgtgaccacggcaagcctgtgggggacctcttcaccgctgccatgaacatgatcctgcctgacttcaagaggcctgcctgcttcggcacctacgtggtgtgctacttcagcgaggtgtcctgtgatggagatgtgcctgacctgtttggagctgccccccgctaccccctgatggacagatttgaggaggtgtacttccgcatccaggacctggagatgttccagcccggccgcatgcaccgggtgggggagctgagcggggacaactacctgcggagccctgggggccggcagctgcgggccgccctggaccgcttccgggactggcaggtgcgctgcccagactggtttgaatgtgagaacctgtacagcgcagatgaccaggatgcccccagcctggatgaggaggtgtttgaggagcccctgctgcccccaggcactggaattgtgaagagggcccccctggtgcgggagcccggcagccaggcctgcctggccatcgaccccctggtgggggaggagggcggcgctgctgtggccaagctggagccccacctgcagccccggggccagcctgccccccagcccctgcacaccctggtgctggccgctgaggagggcgccctggtggccgctgtggagcccggccccctggctgatggagctgctgtgcggctggccctggccggggagggggaggcctgccccctgctgggcagccctggagctggaagaaattctgtgctcttcctgcctgtggaccctgaggacagccccctgggcagcagcacccccatggccagcccagacctgctgcctgaagatgtgcgggagcacctggagggcctgatgctgagcctgtttgagcagagcctgagctgccaggcccagggcggctgcagcaggcctgccatggtgctgacagacccccacaccccctatgaggaggagcagaggcagagcgtgcagagcgaccagggctacatcagccgcagcagcccccagcccccagagggcctgacagagatggaggaggaggaggaggaggagcaggaccccgggaagccagccctgcccctgagccctgaggacctggagagcctgcggagcctgcagaggcagctgctcttccggcagctgcagaagaacagcggctgggacaccatgggcagcgagagcgagggccccagcgcctag

SEQ ID NO: 156379 - DNA, 1509 bp, synthetic construct
  misc_feature 1..1509: note = Description of Artificial Sequence: Synthetic coding sequence
  source 1..1509: mol_type = other DNA
atgagcctggtgctgctgagcctggccgccctgtgccgctctgctgtgccccgggagcccaccgtgcagtgtggcagcgagaccggccccagccctgagtggatgctgcagcacgacctgatccctggggacctgcgggacctgcgggtggagcctgtgaccacctctgtggccactggagactacagcatcctgatgaatgtgtcctgggtgctgcgggcagatgccagcatccggctgctgaaggccaccaagatctgtgtgacaggcaagagcaacttccagagctacagctgtgtgcgctgcaactacacagaggccttccagacccagacccggcccagcggcggcaagtggaccttctcctacatcggcttccctgtggagctgaacacagtgtacttcatcggggcccacaacatccccaatgccaacatgaatgaagatggccccagcatgtctgtgaacttcaccagccctggctgcctggaccacatcatgaagtacaagaagaagtgtgtgaaggccggcagcctgtgggaccccaacatcacagcctgcaagaagaatgaggagaccgtggaggtgaacttcaccaccacccccctgggcaaccgctacatggccctgatccagcacagcaccatcatcggcttcagccaggtgtttgagccccaccagaagaagcagacccgggcctctgtggtgattcctgtgactggagacagcgagggcgccaccgtgcagctgaccccctacttccccacctgtggcagtgactgcatccgccacaagggcaccgtggtgctgtgcccccagacaggagtgcccttccccctggacaacaacaagagcaagccaggcggctggctgcccctgctgctgctgagcctgctggtggccacctgggtgctggtggccggcatctacctgatgtggaggcatgagcgcatcaagaagaccagcttcagcaccaccaccctgctgccccccatcaaggtgctggtggtgtaccccagcgagatctgcttccaccacaccatctgctacttcacagagttcctgcagaaccactgccgctctgaggtgatcctggagaagtggcagaagaagaagattgctgagatgggccctgtgcagtggctggccacccagaagaaggctgctgacaaggtggtgttcctgctgagcaatgatgtgaacagcgtgtgtgatggcacctgtgggaagtctgagggcagccccagcgagaacagccaggacctcttccccctggccttcaacctcttctgcagcgacctgcggagccagatccacctgcacaagtatgtggtggtgtacttccgggagattgacaccaaggatgactacaatgccctgtctgtgtgccccaagtaccacctgatgaaggatgccacagccttctgtgccgagctgctgcacgtgaagcagcaggtgtctgctgggaagaggagccaggcctgccatgatggctgctgcagcctgtag

SEQ ID NO: 156380 - DNA, 2376 bp, synthetic construct
  misc_feature 1..2376: note = Description of Artificial Sequence: Synthetic coding sequence
  source 1..2376: mol_type = other DNA
atgcctgtgccctggttcctgctgagcctggccctgggccgcagccctgtggtgctgagcctggagcggctggtgggcccccaggatgccacccactgcagccctgtgtccctggagccctggggagatgaggagcggctgcgggtgcagttcctggcccagcagagcctgagcctggcccctgtgacagctgccacagccaggacagccctgagcggcctgtctggagcagatggccggcgggaggagcggggccggggcaagtcctgggtgtgcctgagcctgggcggcagcggcaacacagagccccagaagaagggcctgagctgccgcctgtgggacagcgacatcctgtgcctgcccggggacatcgtgcctgcccctggccctgtgctggcccccacccacctgcagacagagctggtgctgcgctgccagaaggagacagactgtgacctgtgcctgcgggtggccgtgcacctggccgtgcacggccactgggaggagccagaagatgaggagaagtttggaggagctgctgacagcggcgtggaggagcccagaaatgccagcctgcaggcccaggtggtgctgtccttccaggcctaccccacagcccgctgtgtgctgctggaggtgcaggtgcctgctgccctggtgcagtttggccagagcgtgggctctgtggtgtatgactgctttgaggccgccctgggcagcgaggtgcgcatctggagctacacccagcccaggtatgagaaggagctgaaccacacccagcagctgcctgactgccggggcctggaggtgtggaacagcatccccagctgctgggccctgccctggctgaatgtgtctgcagatggagacaacgtgcacctggtgctgaatgtgtctgaggagcagcacttcggcctgagcctgtactggaaccaggtgcagggcccccccaagccccgctggcacaagaacctgaccggcccccagatcatcaccctgaaccacacagacctggtgccctgcctgtgcatccaggtgtggcccctggagccagattctgtgaggaccaacatctgccccttccgggaggacccccgggcccaccagaacctgtggcaggccgcccggctgcagctgctgaccctgcagagctggctgctggatgccccctgcagcctgcctgctgaggccgccctgtgctggagggcccctggaggagacccctgccagcccctggtgccccccctgtcctgggagaatgtgacagtggacaaggtgctggagttccccctgctgaagggccaccccaacctgtgtgtgcaggtgaacagcagcgagaagctgcagctgcaggagtgcctgtgggccgacagcctgggccccctgaaggatgatgtgctgctgctggagacccggggcccccaggacaacagaagcctgtgtgccctggagcccagcggctgcaccagcctgcccagcaaggccagcaccagggctgcccggctgggggagtacctgctgcaggacctgcagagcggccagtgcctgcagctgtgggatgatgacctgggcgccctgtgggcctgccccatggacaagtacatccacaagcgctgggccctggtgtggctggcctgcctgctgtttgctgctgccctgagcctcatcctgctgctgaagaaggaccacgccaagggctggctgcggctgctgaagcaggatgtgcgctctggagctgctgcccggggccgggccgccctgctgctgtacagcgcagatgattctggctttgagcggctggtgggcgccctggccagcgccctgtgccagctgcccctgcgggtggccgtggacctgtggagccggcgggagctgagcgcccagggccctgtggcctggttccacgcccagaggcggcagaccctgcaggagggcggcgtggtggtgctgctcttcagccctggagctgtggccctgtgcagcgagtggctgcaggatggagtgtctggccctggggcccacggcccccatgatgccttccgggccagcctgagctgtgtgctgcctgacttcctgcagggccgggcccctggcagctatgtgggcgcctgctttgaccggctgctgcacccagatgctgtgcctgccctcttcagaacagtgcctgtgttcaccctgcccagccagctgcctgacttcctgggcgccctgcagcagccccgggcccccaggagcggccgcctgcaggagcgggcagagcaggtgtcccgggccctgcagcctgccctggacagctacttccaccccccaggcaccccagcccctggccggggcgtgggccctggagctggccctggagctggagatggcacctag

SEQ ID NO: 156381 - DNA, 2118 bp, synthetic construct
  misc_feature 1..2118: note = Description of Artificial Sequence: Synthetic coding sequence
  source 1..2118: mol_type = other DNA
atgcctgtgccctggttcctgctgagcctggccctgggccgcagccctgtggtgctgagcctggagcggctggtgggcccccaggatgccacccactgcagccctggcctgagctgccgcctgtgggacagcgacatcctgtgcctgcccggggacatcgtgcctgcccctggccctgtgctggcccccacccacctgcagacagagctggtgctgcgctgccagaaggagacagactgtgacctgtgcctgcgggtggccgtgcacctggccgtgcacggccactgggaggagccagaagatgaggagaagtttggaggagctgctgacagcggcgtggaggagcccagaaatgccagcctgcaggcccaggtggtgctgtccttccaggcctaccccacagcccgctgtgtgctgctggaggtgcaggtgcctgctgccctggtgcagtttggccagagcgtgggctctgtggtgtatgactgctttgaagctgccctgggcagcgaggtgcgcatctggagctacacccagcccaggtatgagaaggagctgaaccacacccagcagctgcctgccctgccctggctgaatgtgtctgcagatggagacaacgtgcacctggtgctgaatgtgtctgaggagcagcacttcggcctgagcctgtactggaaccaggtgcagggcccccccaagccccgctggcacaagaacctgaccggcccccagatcatcaccctgaaccacacagacctggtgccctgcctgtgcatccaggtgtggcccctggagccagattctgtgaggaccaacatctgccccttccgggaggacccccgggcccaccagaacctgtggcaggccgcccggctgcagctgctgaccctgcagagctggctgctggatgccccctgcagcctgcctgctgaggccgccctgtgctggagggcccctggaggagacccctgccagcccctggtgccccccctgtcctgggagaatgtgacagtggacaaggtgctggagttccccctgctgaagggccaccccaacctgtgtgtgcaggtgaacagcagcgagaagctgcagctgcaggagtgcctgtgggccgacagcctgggccccctgaaggatgatgtgctgctgctggagacccggggcccccaggacaacagaagcctgtgtgccctggagcccagcggctgcaccagcctgcccagcaaggccagcaccagggctgcccggctgggggagtacctgctgcaggacctgcagagcggccagtgcctgcagctgtgggatgatgacctgggcgccctgtgggcctgccccatggacaagtacatccacaagcgctgggccctggtgtggctggcctgcctgctgtttgctgctgccctgagcctcatcctgctgctgaagaaggaccacgccaagggctggctgcggctgctgaagcaggatgtgcgctctggagctgctgcccggggccgggccgccctgctgctgtacagcgcagatgattctggctttgagcggctggtgggcgccctggccagcgccctgtgccagctgcccctgcgggtggccgtggacctgtggagccggcgggagctgagcgcccagggccctgtggcctggttccacgcccagaggcggcagaccctgcaggagggcggcgtggtggtgctgctcttcagccctggagctgtggccctgtgcagcgagtggctgcaggatggagtgtctggccctggggcccacggcccccatgatgccttccgggccagcctgagctgtgtgctgcctgacttcctgcagggccgggcccctggcagctatgtgggcgcctgctttgaccggctgctgcacccagatgctgtgcctgccctcttcagaacagtgcctgtgttcaccctgcccagccagctgcctgacttcctgggcgccctgcagcagccccgggcccccaggagcggccgcctgcaggagcgggcagagcaggtgtcccgggccctgcagcctgccctggacagctacttccaccccccaggcaccccagcccctggccggggcgtgggccctggagctggccctggagctggagatggcacctag

SEQ ID NO: 156382 - DNA, 2163 bp, synthetic construct
  misc_feature 1..2163: note = Description of Artificial Sequence: Synthetic coding sequence
  source 1..2163: mol_type = other DNA
atgcctgtgccctggttcctgctgagcctggccctgggccgcagccctgtggtgctgagcctggagcggctggtgggcccccaggatgccacccactgcagccctggcctgagctgccgcctgtgggacagcgacatcctgtgcctgcccggggacatcgtgcctgcccctggccctgtgctggcccccacccacctgcagacagagctggtgctgcgctgccagaaggagacagactgtgacctgtgcctgcgggtggccgtgcacctggccgtgcacggccactgggaggagccagaagatgaggagaagtttggaggagctgctgacagcggcgtggaggagcccagaaatgccagcctgcaggcccaggtggtgctgtccttccaggcctaccccacagcccgctgtgtgctgctggaggtgcaggtgcctgctgccctggtgcagtttggccagagcgtgggctctgtggtgtatgactgctttgaagctgccctgggcagcgaggtgcgcatctggagctacacccagcccaggtatgagaaggagctgaaccacacccagcagctgcctgactgccggggcctggaggtgtggaacagcatccccagctgctgggccctgccctggctgaatgtgtctgcagatggagacaacgtgcacctggtgctgaatgtgtctgaggagcagcacttcggcctgagcctgtactggaaccaggtgcagggcccccccaagccccgctggcacaagaacctgaccggcccccagatcatcaccctgaaccacacagacctggtgccctgcctgtgcatccaggtgtggcccctggagccagacagcgtgaggaccaacatctgccccttccgggaggacccccgggcccaccagaacctgtggcaggccgcccggctgcagctgctgaccctgcagagctggctgctggatgccccctgcagcctgcctgctgaggccgccctgtgctggagggcccctggaggagacccctgccagcccctggtgccccccctgtcctgggagaatgtgacagtggacaaggtgctggagttccccctgctgaagggccaccccaacctgtgtgtgcaggtgaacagcagcgagaagctgcagctgcaggagtgcctgtgggccgacagcctgggccccctgaaggatgatgtgctgctgctggagacccggggcccccaggacaacagaagcctgtgtgccctggagcccagcggctgcaccagcctgcccagcaaggccagcacccgggccgcccggctgggggagtacctgctgcaggacctgcagagcggccagtgcctgcagctgtgggatgatgacctgggcgccctgtgggcctgccccatggacaagtacatccacaagcgctgggccctggtgtggctggcctgcctgctgtttgctgctgccctgagcctcatcctgctgctgaagaaggaccacgccaagggctggctgcggctgctgaagcaggatgtgcgcagcggggctgctgcccggggccgggccgccctgctgctgtacagcgcagatgacagcggctttgagcggctggtgggcgccctggccagcgccctgtgccagctgcccctgcgggtggccgtggacctgtggagcagaagagagctgagcgcccagggccctgtggcctggttccacgcccagaggcggcagaccctgcaggagggcggcgtggtggtgctgctcttcagccctggagctgtggccctgtgcagcgagtggctgcaggatggagtgtctggccctggggcccacggcccccatgatgccttccgggccagcctgagctgtgtgctgcctgacttcctgcagggccgggcccctggcagctatgtgggcgcctgctttgaccggctgctgcacccagatgctgtgcctgccctcttcagaacagtgcctgtgttcaccctgcccagccagctgcctgacttcctgggcgccctgcagcagccccgggcccccaggagcggccgcctgcaggagagagctgagcaggtgtcccgggccctgcagcctgccctggacagctacttccaccccccaggcaccccagcccctggccggggcgtgggccctggggccggccctggagctggagatggcacctag

SEQ ID NO: 156383 - DNA, 1641 bp, synthetic construct
  misc_feature 1..1641: note = Description of Artificial Sequence: Synthetic coding sequence
  source 1..1641: mol_type = other DNA
atggcctaccccacagcccgctgtgtgctgctggaggtgcaggtgcctgctgccctggtgcagtttggccagagcgtgggctctgtggtgtatgactgctttgaggccgccctgggcagcgaggtgcgcatctggagctacacccagcccaggtatgagaaggagctgaaccacacccagcagctgcctgccctgccctggctgaatgtgtctgcagatggagacaacgtgcacctggtgctgaatgtgtctgaggagcagcacttcggcctgagcctgtactggaaccaggtgcagggcccccccaagccccgctggcacaagaacctgaccggcccccagatcatcaccctgaaccacacagacctggtgccctgcctgtgcatccaggtgtggcccctggagccagacagcgtgaggaccaacatctgccccttccgggaggacccccgggcccaccagaacctgtggcaggccgcccggctgcagctgctgaccctgcagagctggctgctggatgccccctgcagcctgcctgctgaggccgccctgtgctggagggcccctggaggagacccctgccagcccctggtgccccccctgtcctgggagaatgtgacagtggatgtgaacagcagcgagaagctgcagctgcaggagtgcctgtgggccgacagcctgggccccctgaaggatgatgtgctgctgctggagacccggggcccccaggacaacagaagcctgtgtgccctggagcccagcggctgcaccagcctgcccagcaaggccagcaccagggctgcccggctgggggagtacctgctgcaggacctgcagagcggccagtgcctgcagctgtgggatgatgacctgggcgccctgtgggcctgccccatggacaagtacatccacaagcgctgggccctggtgtggctggcctgcctgctgtttgctgctgccctgagcctcatcctgctgctgaagaaggaccacgccaaggctgctgcccggggccgggccgccctgctgctgtacagcgcagatgacagcggctttgagcggctggtgggcgccctggccagcgccctgtgccagctgcccctgcgggtggccgtggacctgtggagcagaagagagctgagcgcccagggccctgtggcctggttccacgcccagaggcggcagaccctgcaggagggcggcgtggtggtgctgctcttcagccctggagctgtggccctgtgcagcgagtggctgcaggatggagtgtctggccctggggcccacggcccccatgatgccttccgggccagcctgagctgtgtgctgcctgacttcctgcagggccgggcccctggcagctatgtgggcgcctgctttgaccggctgctgcacccagatgctgtgcctgccctcttcagaacagtgcctgtgttcaccctgcccagccagctgcctgacttcctgggcgccctgcagcagccccgggcccccaggagcggccgcctgcaggagagagctgagcaggtgtcccgggccctgcagcctgccctggacagctacttccaccccccaggcaccccagcccctggccggggcgtgggccctggggccggccctggagctggagatggcacctag

SEQ ID NO: 156384 - DNA, 2124 bp, synthetic construct
  misc_feature 1..2124: note = Description of Artificial Sequence: Synthetic coding sequence
  source 1..2124: mol_type = other DNA
atgcctgtgccctggttcctgctgagcctggccctgggccgcagccctgtggtgctgagcctggagcggctggtgggcccccaggatgccacccactgcagccctggcctgagctgccgcctgtgggacagcgacatcctgtgcctgcccggggacatcgtgcctgcccctggccctgtgctggcccccacccacctgcagacagagctggtgctgcgctgccagaaggagacagactgtgacctgtgcctgcgggtggccgtgcacctggccgtgcacggccactgggaggagccagaagatgaggagaagtttggaggagctgctgacagcggcgtggaggagcccagaaatgccagcctgcaggcccaggtggtgctgtccttccaggcctaccccacagcccgctgtgtgctgctggaggtgcaggtgcctgctgccctggtgcagtttggccagagcgtgggctctgtggtgtatgactgctttgaagctgccctgggcagcgaggtgcgcatctggagctacacccagcccaggtatgagaaggagctgaaccacacccagcagctgcctgactgccggggcctggaggtgtggaacagcatccccagctgctgggccctgccctggctgaatgtgtctgcagatggagacaacgtgcacctggtgctgaatgtgtctgaggagcagcacttcggcctgagcctgtactggaaccaggtgcagggcccccccaagccccgctggcacaagaacctgaccggcccccagatcatcaccctgaaccacacagacctggtgccctgcctgtgcatccaggtgtggcccctggagccagacagcgtgaggaccaacatctgccccttccgggaggacccccgggcccaccagaacctgtggcaggccgcccggctgcagctgctgaccctgcagagctggctgctggatgccccctgcagcctgcctgctgaggccgccctgtgctggagggcccctggaggagacccctgccagcccctggtgccccccctgtcctgggagaatgtgacagtggacaaggtgctggagttccccctgctgaagggccaccccaacctgtgtgtgcaggtgaacagcagcgagaagctgcagctgcaggagtgcctgtgggccgacagcctgggccccctgaaggatgatgtgctgctgctggagacccggggcccccaggacaacagaagcctgtgtgccctggagcccagcggctgcaccagcctgcccagcaaggccagcacccgggccgcccggctgggggagtacctgctgcaggacctgcagagcggccagtgcctgcagctgtgggatgatgacctgggcgccctgtgggcctgccccatggacaagtacatccacaagcgctgggccctggtgtggctggcctgcctgctgtttgctgctgccctgagcctcatcctgctgctgaagaaggaccacgccaaggccgccgcccggggccgggccgccctgctgctgtacagcgcagatgattctggctttgagcggctggtgggcgccctggccagcgccctgtgccagctgcccctgcgggtggccgtggacctgtggagccggcgggagctgagcgcccagggccctgtggcctggttccacgcccagaggcggcagaccctgcaggagggcggcgtggtggtgctgctcttcagccctggagctgtggccctgtgcagcgagtggctgcaggatggagtgtctggccctggggcccacggcccccatgatgccttccgggccagcctgagctgtgtgctgcctgacttcctgcagggccgggcccctggcagctatgtgggcgcctgctttgaccggctgctgcacccagatgctgtgcctgccctcttcagaacagtgcctgtgttcaccctgcccagccagctgcctgacttcctgggcgccctgcagcagccccgggcccccaggagcggccgcctgcaggagcgggcagagcaggtgtcccgggccctgcagcctgccctggacagctacttccaccccccaggcaccccagcccctggccggggcgtgggccctggagctggccctggagctggagatggcacctag

SEQ ID NO: 156385 - DNA, 213 bp, synthetic construct
  misc_feature 1..213: note = Description of Artificial Sequence: Synthetic coding sequence
  source 1..213: mol_type = other DNA
atgcctgtgccctggttcctgctgagcctggccctgggccgcagccctgtggtgctgagcctggagcggctggtgggcccccaggatgccacccactgcagccctggcctgagctgccgcctgtgggtgacctacagcgcctgcctgggcaccagctgcctgctgcgggccccctgctggaggctgcggacctgccggcagagctggtgctag

SEQ ID NO: 156386 - DNA, 2067 bp, synthetic construct
  misc_feature 1..2067: note = Description of Artificial Sequence: Synthetic coding sequence
  source 1..2067: mol_type = other DNA
atgcctgtgccctggttcctgctgagcctggccctgggccgcagccctgtggtgctgagcctggagcggctggtgggcccccaggatgccacccactgcagccctggcctgagctgccgcctgtgggacagcgacatcctgtgcctgcccggggacatcgtgcctgcccctggccctgtgctggcccccacccacctgcagacagagctggtgctgcgctgccagaaggagacagactgtgacctgtgcctgcgggtggccgtgcacctggccgtgcacggccactgggaggagccagaagatgaggagaagtttggaggagctgctgacagcggcgtggaggagcccagaaatgccagcctgcaggcccaggtggtgctgtccttccaggcctaccccacagcccgctgtgtgctgctggaggtgcaggtgcctgctgccctggtgcagtttggccagagcgtgggctctgtggtgtatgactgctttgaagctgccctgggcagcgaggtgcgcatctggagctacacccagcccaggtatgagaaggagctgaaccacacccagcagctgcctgccctgccctggctgaatgtgtctgcagatggagacaacgtgcacctggtgctgaatgtgtctgaggagcagcacttcggcctgagcctgtactggaaccaggtgcagggcccccccaagccccgctggcacaagaacctgaccggcccccagatcatcaccctgaaccacacagacctggtgccctgcctgtgcatccaggtgtggcccctggagccagattctgtgaggaccaacatctgccccttccgggaggacccccgggcccaccagaacctgtggcaggccgcccggctgcagctgctgaccctgcagagctggctgctggatgccccctgcagcctgcctgctgaggccgccctgtgctggagggcccctggaggagacccctgccagcccctggtgccccccctgtcctgggagaatgtgacagtggatgtgaacagcagcgagaagctgcagctgcaggagtgcctgtgggccgacagcctgggccccctgaaggatgatgtgctgctgctggagacccggggcccccaggacaacagaagcctgtgtgccctggagcccagcggctgcaccagcctgcccagcaaggccagcacccgggccgcccggctgggggagtacctgctgcaggacctgcagagcggccagtgcctgcagctgtgggatgatgacctgggcgccctgtgggcctgccccatggacaagtacatccacaagcgctgggccctggtgtggctggcctgcctgctgtttgctgctgccctgagcctcatcctgctgctgaagaaggaccacgccaagggctggctgcggctgctgaagcaggatgtgcgcagcggggctgctgcccggggccgggccgccctgctgctgtacagcgcagatgacagcggctttgagcggctggtgggcgccctggccagcgccctgtgccagctgcccctgcgggtggccgtggacctgtggagcagaagagagctgagcgcccagggccctgtggcctggttccacgcccagaggcggcagaccctgcaggagggcggcgtggtggtgctgctcttcagccctggagctgtggccctgtgcagcgagtggctgcaggatggagtgtctggccctggggcccacggcccccatgatgccttccgggccagcctgagctgtgtgctgcctgacttcctgcagggccgggcccctggcagctatgtgggcgcctgctttgaccggctgctgcacccagatgctgtgcctgccctcttcagaacagtgcctgtgttcaccctgcccagccagctgcctgacttcctgggcgccctgcagcagccccgggcccccaggagcggccgcctgcaggagagagctgagcaggtgtcccgggccctgcagcctgccctggacagctacttccaccccccaggcaccccagcccctggccggggcgtgggccctggggccggccctggagctggagatggcacctag

SEQ ID NO: 156387 - DNA, 2220 bp, synthetic construct
  misc_feature 1..2220: note = Description of Artificial Sequence: Synthetic coding sequence
  source 1..2220: mol_type = other DNA
atggccccctggctgcagctgtgcagcgtcttcttcaccgtgaatgcctgcctgaatggcagccagctggccgtggccgccggcggcagcggccgggcccggggagctgacacctgtggctggaggggcgtgggccctgccagcagaaattctggcctgtacaacatcaccttcaagtatgacaactgcaccacctacctgaaccctgtgggcaagcacgtgattgctgatgcccagaacatcaccatcagccagtatgcctgccacgaccaggtggccgtgaccatcctgtggagccctggggccctgggcatcgagttcctgaagggcttccgggtcatcctggaggagctgaagtctgagggccggcagtgccagcagctgatcctgaaggaccccaagcagctgaacagcagcttcaagaggacaggcatggagagccagcccttcctgaacatgaagtttgaaacagactactttgtgaaggtggtgcccttccccagcatcaagaatgaaagcaactaccaccccttcttcttccgcacccgggcctgtgacctgctgctgcagcctgacaacctggcctgcaagcccttctggaagcccaggaacctgaacatcagccagcacggcagtgacatgcaggtgtcctttgaccacgccccccacaactttggcttccgcttcttctacctgcactacaagctgaagcatgagggccccttcaagaggaagacctgcaagcaggagcagaccacagagaccaccagctgcctgctgcagaatgtgtcccctggggactacatcatcgagctggtggatgacaccaacaccaccaggaaggtgatgcactacgccctgaagcctgtgcacagcccctgggccggccccatccgggctgtggccatcaccgtgcccctggtggtgatcagcgcctttgccaccctcttcaccgtgatgtgcaggaagaagcagcaggagaacatctacagccacctggatgaggagagcagcgagagcagcacctacacagctgccctgccccgggagcggctgcggccccggcccaaggtgttcctgtgctacagcagcaaggatggccagaaccacatgaatgtggtgcagtgctttgcctacttcctgcaggacttctgtggctgtgaggtggccctggacctgtgggaggacttcagcctgtgccgggagggccagcgggagtgggtgatccagaagatccacgagagccagttcatcatcgtggtgtgcagcaagggcatgaagtactttgtggacaagaagaactacaagcacaagggcggcggccggggcagcggcaagggggagctgttcctggtggccgtgtctgccatcgccgagaagctgcggcaggccaagcagagcagcagcgctgccctgagcaagttcatcgctgtgtactttgactacagctgtgaaggagatgtgcccggcatcctggacctgagcaccaagtaccgcctgatggacaacctgccccagctgtgcagccacctgcacagccgggaccacggcctgcaggagcccggccagcacacccggcagggcagcagaagaaactacttccgcagcaagagcggccgcagcctgtatgtggccatctgcaacatgcaccagttcattgatgaggagccagactggtttgagaagcagtttgtgcccttccaccccccacccctgcgctaccgggagcctgtgctggagaagtttgacagcggcctggtgctgaatgatgtgatgtgcaagccaggccctgagagtgacttctgcctgaaggtggaggccgctgtgctgggcgccactggacctgctgacagccagcacgagagccagcacggcggcctggaccaggatggagaggcccggcctgccctggatggcagcgctgccctgcagcccctgctgcacacagtgaaggccggcagccccagcgacatgccccgggacagcggcatctatgacagctctgtgcccagcagcgagctgagcctgcccctgatggagggcctgagcacagaccagacagagaccagcagcctgacagaatctgtgagcagcagcagcggcctgggggaggaggagcccccagccctgcccagcaagctgctgagcagcggcagctgcaaggctgacctgggctgccgcagctacacagatgagctgcatgctgtggcccccctgtag

SEQ ID NO: 156388 - DNA, 1788 bp, synthetic construct
  misc_feature 1..1788: note = Description of Artificial Sequence: Synthetic coding sequence
  source 1..1788: mol_type = other DNA
atggagagccagcccttcctgaacatgaagtttgaaacagactactttgtgaaggtggtgcccttccccagcatcaagaatgaaagcaactaccaccccttcttcttccgcacccgggcctgtgacctgctgctgcagcctgacaacctggcctgcaagcccttctggaagcccaggaacctgaacatcagccagcacggcagtgacatgcaggtgtcctttgaccacgccccccacaactttggcttccgcttcttctacctgcactacaagctgaagcatgagggccccttcaagaggaagacctgcaagcaggagcagaccacagagaccaccagctgcctgctgcagaatgtgtcccctggggactacatcatcgagctggtggatgacaccaacaccaccaggaaggtgatgcactacgccctgaagcctgtgcacagcccctgggccggccccatccgggctgtggccatcaccgtgcccctggtggtgatcagcgcctttgccaccctcttcaccgtgatgtgcaggaagaagcagcaggagaacatctacagccacctggatgaggagagcagcgagagcagcacctacacagctgccctgccccgggagcggctgcggccccggcccaaggtgttcctgtgctacagcagcaaggatggccagaaccacatgaatgtggtgcagtgctttgcctacttcctgcaggacttctgtggctgtgaggtggccctggacctgtgggaggacttcagcctgtgccgggagggccagcgggagtgggtgatccagaagatccacgagagccagttcatcatcgtggtgtgcagcaagggcatgaagtactttgtggacaagaagaactacaagcacaagggcggcggccggggcagcggcaagggggagctgttcctggtggccgtgtctgccatcgccgagaagctgcggcaggccaagcagagcagcagcgctgccctgagcaagttcatcgctgtgtactttgactacagctgtgaaggagatgtgcccggcatcctggacctgagcaccaagtaccgcctgatggacaacctgccccagctgtgcagccacctgcacagccgggaccacggcctgcaggagcccggccagcacacccggcagggcagcagaagaaactacttccgcagcaagagcggccgcagcctgtatgtggccatctgcaacatgcaccagttcattgatgaggagccagactggtttgagaagcagtttgtgcccttccaccccccacccctgcgctaccgggagcctgtgctggagaagtttgacagcggcctggtgctgaatgatgtgatgtgcaagccaggccctgagagtgacttctgcctgaaggtggaggccgctgtgctgggcgccactggacctgctgacagccagcacgagagccagcacggcggcctggaccaggatggagaggcccggcctgccctggatggcagcgctgccctgcagcccctgctgcacacagtgaaggccggcagccccagcgacatgccccgggacagcggcatctatgacagctctgtgcccagcagcgagctgagcctgcccctgatggagggcctgagcacagaccagacagagaccagcagcctgacagaatctgtgagcagcagcagcggcctgggggaggaggagcccccagccctgcccagcaagctgctgagcagcggcagctgcaaggctgacctgggctgccgcagctacacagatgagctgcatgctgtggcccccctgtag

SEQ ID NO: 156389 - DNA, 2148 bp, synthetic construct
  misc_feature 1..2148: note = Description of Artificial Sequence: Synthetic coding sequence
  source 1..2148: mol_type = other DNA
atgccccgggccagcgccagcggcgtgcctgccctgtttgtgtctggagagcagggcgtgggccctgccagcagaaattctggcctgtacaacatcaccttcaagtatgacaactgcaccacctacctgaaccctgtgggcaagcacgtgattgctgatgcccagaacatcaccatcagccagtatgcctgccacgaccaggtggccgtgaccatcctgtggagccctggggccctgggcatcgagttcctgaagggcttccgggtcatcctggaggagctgaagtctgagggccggcagtgccagcagctgatcctgaaggaccccaagcagctgaacagcagcttcaagaggacaggcatggagagccagcccttcctgaacatgaagtttgaaacagactactttgtgaaggtggtgcccttccccagcatcaagaatgaaagcaactaccaccccttcttcttccgcacccgggcctgtgacctgctgctgcagcctgacaacctggcctgcaagcccttctggaagcccaggaacctgaacatcagccagcacggcagtgacatgcaggtgtcctttgaccacgccccccacaactttggcttccgcttcttctacctgcactacaagctgaagcatgagggccccttcaagaggaagacctgcaagcaggagcagaccacagagaccaccagctgcctgctgcagaatgtgtcccctggggactacatcatcgagctggtggatgacaccaacaccaccaggaaggtgatgcactacgccctgaagcctgtgcacagcccctgggccggccccatccgggctgtggccatcaccgtgcccctggtggtgatcagcgcctttgccaccctcttcaccgtgatgtgcaggaagaagcagcaggagaacatctacagccacctggatgaggagagcagcgagagcagcacctacacagctgccctgccccgggagcggctgcggccccggcccaaggtgttcctgtgctacagcagcaaggatggccagaaccacatgaatgtggtgcagtgctttgcctacttcctgcaggacttctgtggctgtgaggtggccctggacctgtgggaggacttcagcctgtgccgggagggccagcgggagtgggtgatccagaagatccacgagagccagttcatcatcgtggtgtgcagcaagggcatgaagtactttgtggacaagaagaactacaagcacaagggcggcggccggggcagcggcaagggggagctgttcctggtggccgtgtctgccatcgccgagaagctgcggcaggccaagcagagcagcagcgctgccctgagcaagttcatcgctgtgtactttgactacagctgtgaaggagatgtgcccggcatcctggacctgagcaccaagtaccgcctgatggacaacctgccccagctgtgcagccacctgcacagccgggaccacggcctgcaggagcccggccagcacacccggcagggcagcagaagaaactacttccgcagcaagagcggccgcagcctgtatgtggccatctgcaacatgcaccagttcattgatgaggagccagactggtttgagaagcagtttgtgcccttccaccccccacccctgcgctaccgggagcctgtgctggagaagtttgacagcggcctggtgctgaatgatgtgatgtgcaagccaggccctgagagtgacttctgcctgaaggtggaggccgctgtgctgggcgccactggacctgctgacagccagcacgagagccagcacggcggcctggaccaggatggagaggcccggcctgccctggatggcagcgctgccctgcagcccctgctgcacacagtgaaggccggcagccccagcgacatgccccgggacagcggcatctatgacagctctgtgcccagcagcgagctgagcctgcccctgatggagggcctgagcacagaccagacagagaccagcagcctgacagaatctgtgagcagcagcagcggcctgggggaggaggagcccccagccctgcccagcaagctgctgagcagcggcagctgcaaggctgacctgggctgccgcagctacacagatgagctgcatgctgtggcccccctgtag

SEQ ID NO: 156390 - DNA, 1788 bp, synthetic construct; identical to SEQ ID NO: 156388
  misc_feature 1..1788: note = Description of Artificial Sequence: Synthetic coding sequence
  source 1..1788: mol_type = other DNA

SEQ ID NO: 156391 - DNA, 222 bp, synthetic construct
  misc_feature 1..222: note = Description of Artificial Sequence: Synthetic coding sequence
  source 1..222: mol_type = other DNA
atggagagccagcccttcctgaacatgaagtttgaaacagactactttgtgaaggtggtgcccttccccagcatcaagaatgaaagcaactaccaccccttcttcttccgcacccgggcctgtgacctgctgctgcagcctgacaacctggcctgcaagcccttctggaagcccaggaacctgaacatcagccagcacggcagtgacatgcaggtgtcctag

SEQ ID NO: 156392 - DNA, 1671 bp, synthetic construct
  misc_feature 1..1671: note = Description of Artificial Sequence: Synthetic coding sequence
  source 1..1671: mol_type = other DNA
atgggcttctggatcctggccatcctgaccatcctgatgtacagcacagctgccaagttcagcaagcagagctggggcctggagaatgaggccctgattgtgcgctgcccccggcagggcaagcccagctacacagtggactggtactacagccagaccaacaagagcatccccacccaggagaggaacagagtgtttgccagcggccagctgctgaagttcctgcctgctgctgtggccgacagcggcatctacacctgcatcgtgcgcagccccaccttcaacagaacaggctacgccaacgtgaccatctacaagaagcagagcgactgcaatgtgcctgactacctgatgtacagcacagtgtctggcagcgagaagaacagcaagatctactgccccaccatcgacctgtacaactggacagcccccctggagtggttcaagaactgccaggccctgcagggcagccgctaccgggcccacaagagcttcctggtgattgacaacgtgatgacagaagatgctggggactacacctgcaagttcatccacaatgaaaatggagccaactacagcgtgacagccaccaggagcttcaccgtgaaggatgagcagggcttcagcctcttccctgtgattggagccccagcccagaatgagatcaaggaggtggagatcggcaagaatgccaacctgacctgcagcgcctgcttcggcaagggcacccagttcctggccgctgtgctgtggcagctgaatggcaccaagatcacagactttggagagccccgcatccagcaggaggagggccagaaccagagcttcagcaatggcctggcctgcctggacatggtgctgagaattgctgatgtgaaggaggaggacctgctgctgcagtatgactgcctggccctgaacctgcacggcctgcggcggcacacagtgcggctgagcaggaagaaccccatcgaccaccacagcatctactgcatcatcgctgtgtgcagcgtcttcctgatgctgatcaacgtgctggtgatcatcctgaagatgttctggattgaggccaccctgctgtggagggacatcgccaagccctacaagaccagaaatgatggcaagctgtatgatgcctacgtggtgtaccccaggaactacaagagcagcacagatggagccagccgggtggagcactttgtgcaccagatcctgcctgatgtgctggagaacaagtgtggctacaccctgtgcatctacggccgggacatgctgcccggggaggatgtggtgacagctgtggagaccaacatcaggaagagccgccgccacatcttcatcctgaccccccagatcacccacaacaaggagtttgcctatgagcaggaggtggccctgcactgtgccctgatccagaatgatgccaaggtgatcctgattgagatggaggccctgtctgagctggacatgctgcaggccgaggccctgcaggacagcctgcagcacctgatgaaggtgcagggcaccatcaagtggagggaggaccacatcgccaacaagaggagcctgaacagcaagttctggaagcacgtgcgctaccagatgcctgtgcccagcaagatccccaggaaggccagcagcctgacccccctggccgcccagaagcagtag

SEQ ID NO: 156393 - DNA, 513 bp, synthetic construct
  misc_feature 1..513: note = Description of Artificial Sequence: Synthetic coding sequence
  source 1..513: mol_type = other DNA
atgaactgccgggagctgcccctgaccctgtgggtgctgatctctgtgtccacagctgagagctgcaccagccggccccacatcaccgtggtggagggggagcccttctacctgaagcactgcagctgcagcctggcccatgaaattgagaccaccaccaagtcctggtacaagagcagcggcagccaggagcacgtggagctgaaccccaggagcagcagccgcatcgccctgcatgactgtgtgctggagttctggcctgtggagctgaatgacaccggcagctacttcttccagatgaagaactacacccagaagtggaagctgaatgtcatcagaagaaacaagcacagctgcttcacagagcggcaggtgaccagcaagatcgtggaggtgaagaagttcttccagatcacctgtgaaaattcctactaccagaccctggtgaacagcaccagcctgtacaagattggcccccccatctgcaggaagaccagcagcggcctgcactag

SEQ ID NO: 156394 - DNA, 1626 bp, synthetic construct
  misc_feature 1..1626: note = Description of Artificial Sequence: Synthetic coding sequence
  source 1..1626: mol_type = other DNA
atgaactgccgggagctgcccctgaccctgtgggtgctgatctctgtgtccacagctgagagctgcaccagccggccccacatcaccgtggtggagggggagcccttctacctgaagcactgcagctgcagcctggcccatgaaattgagaccaccaccaagtcctggtacaagagcagcggcagccaggagcacgtggagctgaaccccaggagcagcagccgcatcgccctgcatgactgtgtgctggagttctggcctgtggagctgaatgacaccggcagctacttcttccagatgaagaactacacccagaagtggaagctgaatgtcatcagaagaaacaagcacagctgcttcacagagcggcaggtgaccagcaagatcgtggaggtgaagaagttcttccagatcacctgtgaaaattcctactaccagaccctggtgaacagcaccagcctgtacaagaactgcaagaagctgctgctggagaacaacaagaaccccaccatcaagaagaatgctgagtttgaggaccagggctactacagctgtgtgcacttcctgcaccacaacgggaagctgttcaacatcaccaagaccttcaacatcaccatcgtggaggacaggagcaacatcgtgcctgtgctgctgggccccaagctgaaccacgtggccgtggagctgggcaagaatgtgcggctgaactgcagcgccctgctgaatgaggaggatgtgatctactggatgtttggagaggagaatggaagtgaccccaacatccacgaggagaaggagatgaggatcatgaccccagagggcaagtggcacgccagcaaggtgctgagaattgaaaatattggagagagcaacctgaatgtgctgtacaactgcaccgtggccagcactggaggaacagacaccaagagcttcatcctggtgaggaaggctgacatggctgacatccctggccacgtgttcacccggggcatgatcatcgctgtgctgatcctggtggccgtggtgtgcctggtgacagtgtgtgtgatctacagagtggacctggtgctcttctaccgccacctgaccaggagagatgagaccctgacagatggcaagacctatgatgcctttgtgtcctacctgaaggagtgcaggccagaaaatggagaggagcacacctttgctgtggagatcctgccccgggtgctggagaagcacttcggctacaagctgtgcatctttgaaagagatgtggtgcctggaggagctgtggtggatgagatccacagcctgattgagaagagcagaagactcatcatcgtgctgagcaagagctacatgagcaatgaggtgcgctatgagctggagagcggcctgcacgaggccctggtggagaggaagatcaagatcatcctgattgagttcacccctgtgacagacttcaccttcctgccccagagcctgaagctgctgaagagccaccgggtgctgaagtggaaggctgacaagagcctgagctacaacagccgcttctggaagaacctgctgtacctgatgcctgccaagacagtgaagccaggaagagatgagcctgaggtgctgcctgtgctgtctgagagctag

SEQ ID NO: 156395 - DNA, 1626 bp, synthetic construct; identical to SEQ ID NO: 156394
  misc_feature 1..1626: note = Description of Artificial Sequence: Synthetic coding sequence
  source 1..1626: mol_type = other DNA

SEQ ID NO: 156396 - DNA, 1800 bp, synthetic construct
  misc_feature 1..1800: note = Description of Artificial Sequence: Synthetic coding sequence
  source 1..1800: mol_type = other DNA
atgctgtgcctgggctggatcttcctgtggctggtggccggggagcgcatcaagggcttcaacatcagcggctgcagcaccaagaagctgctgtggacctacagcaccaggtctgaggaggagtttgtgctcttctgtgacctgcctgagccccagaagagccacttctgccacaggaaccggctgagccccaagcaggtgcctgagcacctgcccttcatgggcagcaatgacctgagtgatgtgcagtggtaccagcagcccagcaatggagaccccctggaggacatcaggaagagctacccccacatcatccaggacaagtgcaccctgcacttcctgaccccaggagtgaacaacagcggcagctacatctgccggcccaagatgatcaagagcccctatgatgtggcctgctgcgtgaagatgatcctggaggtgaagccccagaccaatgccagctgtgagtacagcgccagccacaagcaggacctgctgctgggcagcacaggcagcatcagctgccccagcctgagctgccagagtgatgcccagagccctgctgtgacctggtacaagaatggcaagctgctgtctgtggagaggagcaaccgcatcgtggtggatgaggtgtatgactaccaccagggcacctacgtgtgtgactacacccagagcgacacagtgtcctcctggacagtgcgggctgtggtgcaggtgaggaccatcgtgggggacaccaagctgaagccagacatcctggaccctgtggaggacaccctggaggtggagctgggcaagcccctgaccatcagctgcaaggccaggtttggatttgagagggtcttcaaccctgtgatcaagtggtacatcaaggacagcgacctggagtgggaggtgtctgtgcctgaggccaagagcatcaagagcaccctgaaggatgagatcattgaaagaaacatcatcctggagaaggtgacccagagggacctgcggaggaagtttgtgtgctttgtgcagaacagcatcggcaacaccacccagagcgtgcagctgaaggagaagaggggcgtggtgctgctgtacatcctgctgggcaccatcggcaccctggtggccgtgctggccgccagcgccctgctgtaccgccactggattgagatcgtgctgctgtaccgcacctaccagagcaaggaccagaccctgggggacaagaaggactttgatgcctttgtgtcctatgccaagtggagcagcttccccagcgaggccaccagcagcctgtctgaggagcacctggccctgagcctcttcccagatgtgctggagaacaagtatggctacagcctgtgcctgctggagagagatgtggcccctggaggagtgtatgcagaagatattgtgtccatcatcaagaggagcagaagaggcatcttcatcctgagccccaactacgtgaatggccccagcatctttgagctgcaggccgctgtgaacctggccctggatgaccagaccctgaagctgatcctgatcaagttctgctacttccaggagcctgagagcctgccccacctggtgaagaaggccctgcgggtgctgcccaccgtgacctggaggggcctgaagtctgtgccccccaacagccgcttctgggccaagatgagataccacatgcctgtgaagaacagccagggcttcacctggaaccagctgcgcatcaccagccgcatcttccagtggaagggcctgagcaggacagagaccaccggccgcagcagccagcccaaggagtggtag

SEQ ID NO: 156397 - DNA, 1374 bp, synthetic construct
  misc_feature 1..1374: note = Description of Artificial Sequence: Synthetic coding sequence
  source 1..1374: mol_type = other DNA
atgatcctggaggtgaagccccagaccaatgccagctgtgagtacagcgccagccacaagcaggacctgctgctgggcagcacaggcagcatcagctgccccagcctgagctgccagagtgatgcccagagccctgctgtgacctggtacaagaatggcaagctgctgtctgtggagaggagcaaccgcatcgtggtggatgaggtgtatgactaccaccagggcacctacgtgtgtgactacacccagagcgacacagtgtcctcctggacagtgcgggctgtggtgcaggtgaggaccatcgtgggggacaccaagctgaagccagacatcctggaccctgtggaggacaccctggaggtggagctgggcaagcccctgaccatcagctgcaaggccaggtttggatttgagagggtcttcaaccctgtgatcaagtggtacatcaaggacagcgacctggagtgggaggtgtctgtgcctgaggccaagagcatcaagagcaccctgaaggatgagatcattgaaagaaacatcatcctggagaaggtgacccagagggacctgcggaggaagtttgtgtgctttgtgcagaacagcatcggcaacaccacccagagcgtgcagctgaaggagaagaggggcgtggtgctgctgtacatcctgctgggcaccatcggcaccctggtggccgtgctggccgccagcgccctgctgtaccgccactggattgagatcgtgctgctgtaccgcacctaccagagcaaggaccagaccctgggggacaagaaggactttgatgcctttgtgtcctatgccaagtggagcagcttccccagcgaggccaccagcagcctgtctgaggagcacctggccctgagcctcttcccagatgtgctggagaacaagtatggctacagcctgtgcctgctggagagagatgtggcccctggaggagtgtatgcagaagatattgtgtccatcatcaagaggagcagaagaggcatcttcatcctgagccccaactacgtgaatggccccagcatctttgagctgcaggccgctgtgaacctggccctggatgaccagaccctgaagctgatcctgatcaagttctgctacttccaggagcctgagagcctgccccacctggtgaagaaggccctgcgggtgctgcccaccgtgacctggaggggcctgaagtctgtgccccccaacagccgcttctgggccaagatgagataccacatgcctgtgaagaacagccagggcttcacctggaaccagctgcgcatcaccagccgcatcttccagtggaagggcctgagcaggacagagaccaccggccgcagcagccagcccaaggagtggtag

SEQ ID NO: 156398 - DNA, 135 bp, synthetic construct
  misc_feature 1..135: note = Description of Artificial Sequence: Synthetic coding sequence
  source 1..135: mol_type = other DNA
atgctgtgcctgggctggatcttcctgtggctggtggccggggagcgcatcaagggcttcaacatcagcggctgcagcaccaagaagctgctgtggacctacagcaccaggtctgaggaggagtttgtgctgtag

SEQ ID NO: 156399 - DNA, 534 bp, synthetic construct
  misc_feature 1..534: note = Description of Artificial Sequence: Synthetic coding sequence
  source 1..534: mol_type = other DNA
atgaagctgcagtgtgtgtccctgtggctgctgggcaccatcctgatcctgtgcagcgtggacaaccacggcctgcggcgctgcctgatcagcacagacatgcaccacatcgaggagagcttccaggagatcaagagggccatccaggccaaggacaccttccccaacgtgaccatcctgagcaccctggagaccctgcagatcatcaagcccctggatgtgtgctgcgtgaccaagaacctgctggccttctacgtggacagagtcttcaaggaccaccaggagcccaaccccaagatcctgaggaagatcagcagcatcgccaacagcttcctgtacatgcagaagaccctgcggcagtgccaggagcagaggcagtgccactgccggcaggaggccaccaatgccaccagggtcatccatgacaactatgaccagctggaggtgcatgctgctgccatcaagagcctgggggagctggatgtgttcctggcctggatcaacaagaaccacgaggtgatgttcagcgcctag

SEQ ID NO: 156400 - DNA, 648 bp, synthetic construct
  misc_feature 1..648: note = Description of Artificial Sequence: Synthetic coding sequence
  source 1..648: mol_type = other DNA
atgtgcacagaaggagccttcccccacaggtctgcctgcagcctgcccctgacccacgtgcacacccacatccacgtgtgtgtgcctgtgctgtggggctctgtgccccggggcatgaagctgcagtgtgtgtccctgtggctgctgggcaccatcctgatcctgtgcagcgtggacaaccacggcctgcggcgctgcctgatcagcacagacatgcaccacatcgaggagagcttccaggagatcaagagggccatccaggccaaggacaccttccccaacgtgaccatcctgagcaccctggagaccctgcagatcatcaagcccctggatgtgtgctgcgtgaccaagaacctgctggccttctacgtggacagagtcttcaaggaccaccaggagcccaaccccaagatcctgaggaagatcagcagcatcgccaacagcttcctgtacatgcagaagaccctgcggcagtgccaggagcagaggcagtgccactgccggcaggaggccaccaatgccaccagggtcatccatgacaactatgaccagctggaggtgcatgctgctgccatcaagagcctgggggagctggatgtgttcctggcctggatcaacaagaaccacgaggtgatgttcagcgcctag

SEQ ID NO: 156401 - DNA, 792 bp, synthetic construct
  misc_feature 1..792: note = Description of Artificial Sequence: Synthetic coding sequence
  source 1..792: mol_type = other DNA
atggacagctacctgctgatgtggggcctgctgaccttcatcatggtgcccggctgccaggccgagctgtgtgatgatgaccccccagagatcccccacgccaccttcaaggccatggcctacaaggagggcaccatgctgaactgtgagtgcaagaggggcttccgccgcatcaagagcggcagcctgtacatgctgtgcaccggcaacagcagccacagctcctgggacaaccagtgccagtgcaccagcagcgccaccaggaacaccaccaagcaggtgaccccccagcctgaggagcagaaggagaggaagaccacagagatgcagagccccatgcagcctgtggaccaggccagcctgcccggccactgccgggagcccccaccctgggagaatgaggccacagagcgcatctaccactttgtggtgggccagatggtgtactaccagtgtgtgcagggctaccgggccctgcaccggggccctgctgagagcgtgtgcaagatgacccacggcaagacccgctggacccagccccagctgatctgcacaggagaggagaagccccaggccagccctgagggccggcctgagagcgagaccagctgcctggtgaccaccacagacttccagatccagacagagatggccgccaccatggagaccagcatcttcaccacagagtaccaggtggccgtggccggctgtgtgttcctgctgatctctgtgctgctgctgagcggcctgacctggcagaggcggcagaggaagagcaggaggaccatctag

SEQ ID NO: 156402 - DNA, 603 bp, synthetic construct
  misc_feature 1..603: note = Description of Artificial Sequence: Synthetic coding sequence
  source 1..603: mol_type = other DNA
atggacagctacctgctgatgtggggcctgctgaccttcatcatggtgcccggctgccaggccgagctgtgtgatgatgaccccccagagatcccccacgccaccttcaaggccatggcctacaaggagggcaccatgctgaactgtgagtgcaagaggggcttccgccgcatcaagagcggcagcctgtacatgctgtgcaccggcaacagcagccacagctcctgggacaaccagtgccagtgcaccagcagcgccaccaggaacaccaccaagcaggtgaccccccagcctgaggagcagaaggagaggaagaccacagagatgcagagccccatgcagcctgtggaccaggccagcctgcccggggaggagaagccccaggccagccctgagggccggcctgagagcgagaccagctgcctggtgaccaccacagacttccagatccagacagagatggccgccaccatggagaccagcatcttcaccacagagtaccaggtggccgtggccggctgtgtgttcctgctgatctctgtgctgctgctgagcggcctgacctggcagaggcggcagaggaagagcaggaggaccatctag

SEQ ID NO: 156403 - DNA, 819 bp, synthetic construct
  misc_feature 1..819: note = Description of Artificial Sequence: Synthetic coding sequence
  source 1..819: mol_type = other DNA
atggacagctacctgctgatgtggggcctgctgaccttcatcatggtgcccggctgccaggccgagctgtgtgatgatgaccccccagagatcccccacgccaccttcaaggccatggcctacaaggagggcaccatgctgaactgtgagtgcaagaggggcttccgccgcatcaagagcggcagcctgtacatgctgtgcaccggcaacagcagccacagctcctgggacaaccagtgccagtgcaccagcagcgccaccaggaacaccaccaagcaggtgaccccccagcctgaggagcagaaggagaggaagaccacagagatgcagagccccatgcagcctgtggaccaggccagcctgcccggccactgccgggagcccccaccctgggagaatgaggccacagagcgcatctaccactttgtggtgggccagatggtgtactaccagtgtgtgcagggctaccgggccctgcaccggggccctgctgagagcgtgtgcaagatgacccacggcaagacccgctggacccagccccagctgatctgcacaggagagatggagaccagccagtttcctggagaggagaagccccaggccagccctgagggccggcctgagagcgagaccagctgcctggtgaccaccacagacttccagatccagacagagatggccgccaccatggagaccagcatcttcaccacagagtaccaggtggccgtggccggctgtgtgttcctgctgatctctgtgctgctgctgagcggcctgacctggcagaggcggcagaggaagagcaggaggaccatctag

SEQ ID NO: 156404 - DNA, 489 bp, synthetic construct
  misc_feature 1..489: note = Description of Artificial Sequence: Synthetic coding sequence
  source 1..489: mol_type = other DNA
atggtgcccggctgccaggccgagctgtgtgatgatgaccccccagagatcccccacgccaccttcaaggccatggcctacaaggagggcaccatgctgaactgtgagtgcaagaggggcttccgccgcatcaagagcggcagcctgtacatgctgtgcaccggcaacagcagccacagctcctgggacaaccagtgccagtgcaccagcagcgccaccaggaacaccaccaagcaggtgaccccccagcctgaggagcagaaggagaggaagaccacagagatgcagagccccatgcagcctgtggaccaggccagcctgcctgacttccagatccagacagagatggccgccaccatggagaccagcatcttcaccacagagtaccaggtggccgtggccggctgtgtgttcctgctgatctctgtgctgctgctgagcggcctgacctggcagaggcggcagaggaagagcaggaggaccatctag

SEQ ID NO: 156405 - DNA, 330 bp, synthetic construct
  misc_feature 1..330: note = Description of Artificial Sequence: Synthetic coding sequence
  source 1..330: mol_type = other DNA
tgaatcccccacgccaccttcaaggccatggcctacaaggagggcaccatgctgaactgtgagtgcaagaggggcttccgccgcatcaagagcggcagcctgtacatgctgtgcaccggcaacagcagccacagctcctgggacaaccagtgccagtgcaccagcagcgccaccaggaacaccaccaagcaggtgaccccccagcctgaggagcagaaggagaggaagaccacagagatgcagagccccatgcagcctgtggaccaggccagcctgcctgacttccagatccagacagagatggccgccaccatggagaccagcatctag

SEQ ID NO: 156406 - DNA, 1110 bp, synthetic construct
  misc_feature 1..1110: note = Description of Artificial Sequence: Synthetic coding sequence
  source 1..1110: mol_type = other DNA
atggaccccaggaaggtgaatgagctgcgggcctttgtgaagatgtgcaagcaggaccccagcgtgctgcacacagaggagatgaggttcctgcgggagtgggtggagagcatgggcggcaaggtgcccccagccacccagaaggccaagtctgaggagaacaccaaggaggagaagccagacagcaagaaggtggaggaggacctgaaggcagatgagcccagcagcgaggagagtgacctggagattgacaaggagggcgtgattgaaccagacacagatgccccccaggagatgggagatgaaaatgctgagatcacagaggagatgatggaccaggccaatgacaagaaggtggccgccatcgaggccctgaatgatggagagctgcagaaggccatcgacctcttcacagatgccatcaagctgaacccccggctggccatcctgtatgccaagagggcctctgtgtttgtgaagctgcagaagcccaatgctgccatccgggactgtgaccgggccatcgagatcaacccagattctgcccagccctacaagtggaggggcaaggcccaccggctgctgggccactgggaggaggccgcccatgacctggccctggcctgcaagctggactatgatgaagatgccagcgccatgctgaaggaggtgcagccccgggcccagaagattgctgagcacaggaggaaatatgaaaggaagcgggaggagcgggagatcaaggagagaattgagcgggtgaagaaggcccgggaggagcacgagcgggcccagcgggaggaggaggcccggcggcagagcggggcccagtatggcagcttccctgggggcttccctgggggcatgcctggcaacttccctgggggcatgcctggcatgggcggcggcatgcctggcatggccggcatgcctggcctgaatgagatcctgagtgaccctgaggtgctggccgccatgcaggaccctgaggtgatggtggccttccaggatgtggcccagaacccagccaacatgagcaagtaccagagcaaccccaaggtgatgaacctgatcagcaagctgagcgccaagtttggaggccaggcctag

SEQ ID NO: 156407 - DNA, 441 bp, synthetic construct
  misc_feature 1..441: note = Description of Artificial Sequence: Synthetic coding sequence
  source 1..441: mol_type = other DNA
atggccgccccagccctgtcctggaggctgcccctgctgatcctgctgctgcccctggccacctcctgggccagcgctgctgtgaatggcaccagccagttcacctgcttctacaacagccgggccaacatcagctgtgtgtggagccaggatggagccctgcaggacaccagctgccaggtgcacgcctggccagacagaagacgctggaaccagacctgtgagctgctgcctgtgtcccaggcctcctgggcctgcaacctgatcctgggcgccccagacagccagaagctgaccaccgtggacatcgtgaccctgcgggtgctgtgccgggagggcgtgcgctggagggtgatggccatccaggacttcaagccctttgagaacctgcggctgatggcccccatcagcctgcaggtggtgcacgtggagacccactag

SEQ ID NO: 156408 - DNA, 267 bp, synthetic construct
  misc_feature 1..267: note = Description of Artificial Sequence: Synthetic coding sequence
  source 1..267: mol_type = other DNA
atggccgccccagccctgtcctggaggctgcccctgctgatcctgctgctgcccctggccacctcctgggccagcgctgctgtgaatggcaccagccagttcacctgcttctacaacagccgggccaacatcagctgtgtgtggagccaggatggagccctgcaggacaccagctgccaggtgcacgcctggccagacagaagacgctggaaccagacctgtgagctgctgcctgtgtcccaggcctcctgggcctgcaacctgtag

SEQ ID NO: 156409 - DNA, 567 bp, synthetic construct
  misc_feature 1..567: note = Description of Artificial Sequence: Synthetic coding sequence
  source 1..567: mol_type = other DNA
atggccgccccagccctgtcctggaggctgcccctgctgatcctgctgctgcccctggccacctcctgggccagcgctgctgtgaatggcaccagccagttcacctgcttctacaacagccgggccaacatcagctgtgtgtggagccaggatggagccctgcaggacaccagctgccaggtgcacgcctggccagacagaagacgctggaaccagacctgtgagctgctgcctgtgtcccaggcctcctgggcctgcaacctgatcctgggcgccccagacagccagaagctgaccaccgtggacatcgtgaccctgcgggtgctgtgccgggagggcgtgcgctggagggtgatggccatccaggacttcaagccctttgagaacctgcggctgatggcccccatcagcctgcaggtggtgcacgtggagacccaccgctgcaacatctcctgggagatcagccaggccagccactactttgagcggcacctggagtttgaggcccggaccctgagccctggccacacctgggaggaggcccccctgctgaccctgaagcagtag

SEQ ID NO: 156410 - DNA, 297 bp, synthetic construct
  misc_feature 1..297: note = Description of Artificial Sequence: Synthetic coding sequence
  source 1..297: mol_type = other DNA
atggagccccccaaccccctgggggagcagtacttcaagaggaccatgccccgcatccccaccctgaagaacctggaggacctggtgacagagtaccacggcaacttcagcgcctggagcggcgtgtccaagggcctggccgagagcctgcagcctgactacagcgagcggctgtgcctggtgtctgagatcccccccaagggcggggccctgggggagggccctggggccagcccctgcaaccagcacagcccctactgggccccaccctgctacaccctgaagccagagacctag

SEQ ID NO: 156411 - DNA, 474 bp, synthetic construct
  misc_feature 1..474: note = Description of Artificial Sequence: Synthetic coding sequence
  source 1..474: mol_type = other DNA
atgctgaagcccagcctgcccttcaccagcctgctcttcctgcagctgcccctgctgggcgtgggcctgaacaccaccatcctgaccccaaatggaaatgaagacaccacagctgacttcttcctgaccaccatgcccacagacagcctgtctgtgtccaccctgcccctgcctgaggtgcagtgctttgtgttcaacgtggagtacatgaactgcacctggaacagcagcagcgagccccagcccaccaacctgaccctgcactactggtacaagaacagcgacaatgacaaggtgcagaagtgcagccactacctgttcagcgaggagatcaccagcggctgccagctgcagaagaaggagatccacctgtaccagacctttgtggtgcagctgcaggacccccgggagccccggcggcaggccacccagatgctgaagctgcagaacctgggcaccatcagcggcctgtag

SEQ ID NO: 156412 - DNA, 1110 bp, synthetic construct
  misc_feature 1..1110: note = Description of Artificial Sequence: Synthetic coding sequence
  source 1..1110: mol_type = other DNA
atgctgaagcccagcctgcccttcaccagcctgctcttcctgcagctgcccctgctgggcgtgggcctgaacaccaccatcctgaccccaaatggaaatgaagacaccacagctgacttcttcctgaccaccatgcccacagacagcctgtctgtgtccaccctgcccctgcctgaggtgcagtgctttgtgttcaacgtggagtacatgaactgcacctggaacagcagcagcgagccccagcccaccaacctgaccctgcactactggtacaagaacagcgacaatgacaaggtgcagaagtgcagccactacctgttcagcgaggagatcaccagcggctgccagctgcagaagaaggagatccacctgtaccagacctttgtggtgcagctgcaggacccccgggagccccggcggcaggccacccagatgctgaagctgcagaacctggtgatcccctgggcccctgagaacctgaccctgcacaagctgtctgagagccagctggagctgaactggaacaaccgcttcctgaaccactgcctggagcacctggtgcagtacagaacagactgggaccacagctggacagagcagagcgtggactaccgccacaagttcagcctgcccagcgtggatggccagaagcgctacaccttccgggtgcgcagccgcttcaaccccctgtgtggcagcgcccagcactggagcgagtggagccaccccatccactggggcagcaacaccagcaaagaaaaccccttcctgtttgccctggaggccgtggtgatctctgtgggctccatgggcctcatcatcagcctgctgtgtgtgtacttctggctggagaggaccatgccccgcatccccaccctgaagaacctggaggacctggtgacagagtaccacggcaacttcagcgcctggagcggcgtgtccaagggcctggccgagagcctgcagcctgactacagcgagcggctgtgcctggtgtctgagatcccccccaagggcggggccctgggggagggccctggggccagcccctgcaaccagcacagcccctactgggccccaccctgctacaccctgaagccagagacctag

SEQ ID NO: 156413 - DNA, 540 bp, synthetic construct
  misc_feature 1..540: note = Description of Artificial Sequence: Synthetic coding sequence
  source 1..540: mol_type = other DNA
atgggcatgaagaccccccagctggagcagagcgtggactaccgccacaagttcagcctgcccagcgtggatggccagaagcgctacaccttccgggtgcgcagccgcttcaaccccctgtgtggcagcgcccagcactggagcgagtggagccaccccatccactggggcagcaacaccagcaaagaaaaccccttcctgtttgccctggaggccgtggtgatctctgtgggctccatgggcctcatcatcagcctgctgtgtgtgtacttctggctggagaggaccatgccccgcatccccaccctgaagaacctggaggacctggtgacagagtaccacggcaacttcagcgcctggagcggcgtgtccaagggcctggccgagagcctgcagcctgactacagcgagcggctgtgcctggtgtctgagatcccccccaagggcggggccctgggggagggccctggggccagcccctgcaaccagcacagcccctactgggccccaccctgctacaccctgaagccagagacctag

SEQ ID NO: 156414 - DNA, 1662 bp, synthetic construct
  misc_feature 1..1662: note = Description of Artificial Sequence: Synthetic coding sequence
  source 1..1662: mol_type = other DNA
atgagggcccctggccgcccagccctgcggcccctgcccctgccccccctgctgctgctgctgctggccgccccctggggccgggctgtgccctgtgtgtctgggggcctgcccaagccagccaacatcaccttcctgagcatcaacatgaagaatgtgctgcagtggaccccacctgagggcctgcagggcgtgaaggtgacctacacagtgcagtacttcatctacggccagaagaagtggctgaacaagtctgagtgcaggaacatcaacagaacctactgtgacctgtctgctgagaccagtgactatgagcaccagtactatgccaaggtgaaggccatctggggcaccaagtgcagcaagtgggccgagagcggccgcttctaccccttcctggagacccagatcggccccccagaggtggccctgaccacagatgagaagagcatctctgtggtgctgacagcccctgagaagtggaagagaaatcctgaggacctgcctgtgtccatgcagcagatctacagcaacctgaagtacaacgtgtctgtgctgaacaccaagagcaacagaacctggagccagtgtgtgaccaaccacaccctggtgctgacctggctggagcccaacaccctgtactgtgtgcacgtggagagctttgtgcccggccccccaagaagagcccagcccagcgagaagcagtgtgcccggaccctgaaggaccagagcagcgagttcaaggccaagatcatcttctggtacgtgctgcctgtgtccatcaccgtcttcctgttctctgtgatgggctacagcatctaccgctacatccacgtgggcaaggagaagcacccagccaacctgatcctgatctatggaaatgaatttgacaagcgcttctttgtgcctgctgagaagatcgtcatcaacttcatcaccctgaacatcagtgatgacagcaagatcagccaccaggacatgagcctgctgggcaagagcagtgatgtgagcagcctgaatgacccccagcccagcggcaacctgcggcccccccaggaggaggaggaggtgaagcacctgggctacgccagccacctgatggagatcttctgtgacagtgaagaaaatacagagggcaccagcctgacccagcaggagagcctgagcaggaccatccccccagacaagacagtgattgaatatgaatatgatgtgaggaccacagacatctgtgccggccctgaggagcaggagctgagcctgcaggaggaggtgtccacccagggcaccctgctggagagccaggccgccctggccgtgctgggcccccagaccctgcagtacagctacaccccccagctgcaggacctggaccccctggcccaggagcacacagattctgaggagggccctgaggaggagcccagcaccaccctggtggactgggacccccagacaggccgcctgtgcatccccagcctgagcagctttgaccaggacagcgagggctgtgagcccagtgaaggagatggcctgggggaggagggcctgctgagccggctgtatgaggagcccgccccagaccggcccccaggagaaaatgagacctacctgatgcagttcatggaggagtggggcctgtatgtgcagatggagaactag

SEQ ID NO: 156415 - DNA, 630 bp, synthetic construct
  misc_feature 1..630: note = Description of Artificial Sequence: Synthetic coding sequence
  source 1..630: mol_type = other DNA
atgagggcccctggccgcccagccctgcggcccctgcccctgccccccctgctgctgctgctgctggccgccccctggggccgggctgtgccctgtgtgtctgggggcctgcccaagccagccaacatcaccttcctgagcatcaacatgaagaatgtgctgcagtggaccccacctgagggcctgcagggcgtgaaggtgacctacacagtgcagtacttcatctacggccagaagaagtggctgaacaagtctgagtgcaggaacatcaacagaacctactgtgacctgtctgctgagaccagtgactatgagcaccagtactatgccaaggtgaaggccatctggggcaccaagtgcagcaagtgggccgagagcggccgcttctaccccttcctggagacccagatcggccccccagaggtggccctgaccacagatgagaagagcatctctgtggtgctgacagcccctgagaagtggaagagaaatcctgaggacctgcctgtgtccatgcagcagatctacagcaacctgaagtacaacgtgtctgtgctgaacaccaagagcaacagaacagtgtccctgaagtggaatggagcctacatccacgtgcccctgtgcagctag

SEQ ID NO: 156416 - DNA, 1329 bp, synthetic construct
  misc_feature 1..1329: note = Description of Artificial Sequence: Synthetic coding sequence
  source 1..1329: mol_type = other DNA
atgagctacaacggcctgcaccagagggtcttcaaggagctgaagctgctgaccctgtgcagcatcagcagccagatcggccccccagaggtggccctgaccacagatgagaagagcatctctgtggtgctgacagcccctgagaagtggaagaggaaccctgaggacctgcctgtgtccatgcagcagatctacagcaacctgaagtacaacgtgtctgtgctgaacaccaagagcaacagaacctggagccagtgtgtgaccaaccacaccctggtgctgacctggctggagcccaacaccctgtactgtgtgcacgtggagagctttgtgcccggccccccccggcgggcccagcccagcgagaagcagtgtgcccggaccctgaaggaccagagcagcgagttcaaggccaagatcatcttctggtacgtgctgcctgtgtccatcaccgtcttcctgttctctgtgatgggctacagcatctaccgctacatccacgtgggcaaggagaagcacccagccaacctgatcctgatctatggaaatgaatttgacaagcgcttctttgtgcctgctgagaagatcgtcatcaacttcatcaccctgaacatcagtgatgacagcaagatcagccaccaggacatgagcctgctgggcaagagcagtgatgtgagcagcctgaatgacccccagcccagcggcaacctgcggcccccccaggaggaggaggaggtgaagcacctgggctacgccagccacctgatggagatcttctgtgacagcgaggagaacacagagggcaccagcctgacccagcaggagagcctgagcaggaccatccccccagacaagacagtcatcgagtatgaatatgatgtgaggaccacagacatctgtgccggccctgaggagcaggagctgagcctgcaggaggaggtgtccacccagggcaccctgctggagagccaggccgccctggccgtgctgggcccccagaccctgcagtacagctacaccccccagctgcaggacctggaccccctggcccaggagcacacagacagcgaggagggccctgaggaggagcccagcaccaccctggtggactgggacccccagacaggccgcctgtgcatccccagcctgagcagctttgaccaggacagcgagggctgtgagcccagtgaaggagatggcctgggggaggagggcctgctgagccggctgtatgaggagcccgccccagacaggcctcctggagaaaatgagacctacctgatgcagttcatggaggagtggggcctgtatgtgcagatggagaactag

SEQ ID NO: 156417 - DNA, 1515 bp, synthetic construct
  misc_feature 1..1515: note = Description of Artificial Sequence: Synthetic coding sequence
  source 1..1515: mol_type = other DNA
atgaagaatgtgctgcagtggaccccacctgagggcctgcagggcgtgaaggtgacctacacagtgcagtacttcatctacggccagaagaagtggctgaacaagtcagaatgtagaaacatcaacagaacctactgtgacctgtctgctgagaccagtgactatgagcaccagtactatgccaaggtgaaggccatctggggcaccaagtgcagcaagtgggccgagagcggccgcttctaccccttcctggagacccagatcggccccccagaggtggccctgaccacagatgagaagagcatctctgtggtgctgacagcccctgagaagtggaagaggaaccctgaggacctgcctgtgtccatgcagcagatctacagcaacctgaagtacaacgtgtctgtgctgaacaccaagagcaacagaacctggagccagtgtgtgaccaaccacaccctggtgctgacctggctggagcccaacaccctgtactgtgtgcacgtggagagctttgtgcccggccccccccggcgggcccagcccagcgagaagcagtgtgcccggaccctgaaggaccagagcagcgagttcaaggccaagatcatcttctggtacgtgctgcctgtgtccatcaccgtcttcctgttctctgtgatgggctacagcatctaccgctacatccacgtgggcaaggagaagcacccagccaacctgatcctgatctatggaaatgaatttgacaagcgcttctttgtgcctgctgagaagatcgtcatcaacttcatcaccctgaacatcagtgatgacagcaagatcagccaccaggacatgagcctgctgggcaagagcagtgatgtgagcagcctgaatgacccccagcccagcggcaacctgcggcccccccaggaggaggaggaggtgaagcacctgggctacgccagccacctgatggagatcttctgtgacagcgaggagaacacagagggcaccagcctgacccagcaggagagcctgagcaggaccatccccccagacaagacagtcatcgagtatgaatatgatgtgaggaccacagacatctgtgccggccctgaggagcaggagctgagcctgcaggaggaggtgtccacccagggcaccctgctggagagccaggccgccctggccgtgctgggcccccagaccctgcagtacagctacaccccccagctgcaggacctggaccccctggcccaggagcacacagacagcgaggagggccctgaggaggagcccagcaccaccctggtggactgggacccccagacaggccgcctgtgcatccccagcctgagcagctttgaccaggacagcgagggctgtgagcccagtgaaggagatggcctgggggaggagggcctgctgagccggctgtatgaggagcccgccccagacaggcctcctggagaaaatgagacctacctgatgcagttcatggaggagtggggcctgtatgtgcagatggagaactag

SEQ ID NO: 156418 - DNA, 1617 bp, synthetic construct
  misc_feature 1..1617: note = Description of Artificial Sequence: Synthetic coding sequence
  source 1..1617: mol_type = other DNA
atgccccggggctgggccgcccccctgctgctgctgctgctgcagggcggctggggctgcccagacctggtgtgctacacagactacctgcagaccgtcatctgcatcctggagatgtggaacctgcaccccagcaccctgaccctgacctggcaggaccagtatgaggagctgaaggatgaggccaccagctgcagcctgcacaggtctgcccacaatgccacccacgccacctacacctgccacatggatgtgttccacttcatggctgatgacatcttctctgtgaacatcacagaccagagcggcaactacagccaggagtgtggcagcttcctgctggccgagagcatcaagccagccccacccttcaacgtgacagtgaccttcagcggccagtacaacatctcctggaggagtgactatgaagatcctgccttctacatgctgaagggcaagctgcagtatgagctgcagtacagaaacagaggagacccctgggccgtgagccccaggaggaagctgatctctgtggacagccgctctgtgtccctgctgcccctggagttcaggaaggacagcagctatgagctgcaggtgcgggccggccccatgcctggcagcagctaccagggcacctggagcgagtggagcgaccccgtcatcttccagacccagagcgaggagctgaaggagggctggaacccccacctgctgctgctgctgctgctggtgattgtgttcatcccagccttctggagcctgaagacccaccccctgtggaggctgtggaagaagatctgggccgtgcccagccctgagcgcttcttcatgcccctgtacaagggctgcagcggggacttcaagaagtgggtgggcgcccccttcaccggcagcagcctggagctgggcccctggagccctgaggtgcccagcaccctggaggtgtacagctgccaccccccaagaagccctgccaagaggctgcagctgacagagctgcaggagcctgctgagctggtggagagtgatggagtgcccaagcccagcttctggcccacagcccagaacagcggcggcagcgcctacagcgaggagcgggaccggccctacggcctggtgtccattgacacagtgacagtgctggatgctgagggcccctgcacctggccctgcagctgtgaagatgatggctacccagccctggacctggatgctggcctggagcccagccctggcctggaggaccccctgctggatgctggcaccaccgtgctgagctgtggctgtgtgtctgctggcagccctggcctgggcggccccctgggcagcctgctggaccggctgaagccacccctggctgatggagaggactgggccggcggcctgccctggggcggccgcagccctgggggcgtgtctgagagcgaggccggcagccccctggccggcctggacatggacacctttgacagcggctttgtgggcagtgactgcagcagccctgtggagtgtgacttcaccagccctggagatgagggccccccaagaagctacctgcggcagtgggtggtgattcctccacccctgagcagccctggcccccaggccagctag

SEQ ID NO: 156419 - DNA, 1617 bp, synthetic construct; identical to SEQ ID NO: 156418
  misc_feature 1..1617: note = Description of Artificial Sequence: Synthetic coding sequence
  source 1..1617: mol_type = other DNA

SEQ ID NO: 156420 - DNA, 1617 bp, synthetic construct; identical to SEQ ID NO: 156418
  misc_feature 1..1617: note = Description of Artificial Sequence: Synthetic coding sequence
  source 1..1617: mol_type = other DNA

SEQ ID NO: 156421 - DNA, 792 bp, synthetic construct
  misc_feature 1..792: note = Description of Artificial Sequence: Synthetic coding sequence
  source 1..792: mol_type = other DNA
atgatgcccaagcactgcttcctgggcttcctgatctccttcttcctgactggagtggccggcacccagagcacccatgagagcctgaagccccagagggtgcagttccagagcaggaacttccacaacatcctgcagtggcagcccggccgggccctgaccggcaacagctctgtgtactttgtgcagtacaagatcatgttcagctgcagcatgaagagcagccaccagaagcccagcggctgctggcagcacatcagctgcaacttccctggctgcaggaccctggccaagtatggccagaggcagtggaagaacaaggaggactgctggggcacccaggagctgagctgtgacctgaccagcgagaccagtgacatccaggagccctactacggccgggtgcgggccgccagcgctggcagctacagcgagtggagcatgaccccccgcttcaccccctggtgggagaccaagattgacccccctgtgatgaacatcacccaggtgaatggcagcctgctggtgatcctgcacgcccccaacctgccctaccgctaccagaaggagaagaatgtgtccattgaggactactatgagctgctgtacagagtcttcatcatcaacaacagcctggagaaggagcagaaggtgtatgaaggagcccacagagctgtggagattgaggccctgaccccccacagcagctactgtgtggtggccgagatctaccagcccatgctggaccggcgcagccagaggtctgaggagcgctgtgtggagatcccctag

SEQ ID NO: 156422 - DNA, 393 bp, synthetic construct
  misc_feature 1..393: note = Description of Artificial Sequence: Synthetic coding sequence
  source 1..393: mol_type = other DNA
atgatgcccaagcactgcttcctgggcttcctgatctccttcttcctgactggagtggccggcacccagagcacccatgagagcctgaagccccagagggtgcagttccagagcaggaacttccacaacatcctgcagtggcagcccggccgggccctgaccggcaacagctctgtgtactttgtgcagtacaagatctacggccagaggcagtggaagaacaaggaggactgctggggcacccaggagctgagctgtgacctgaccagcgagaccagtgacatccaggagccctactacggccgggtgcgggccgccagcgctggcagctacagcgagtggagcatgaccccccgcttcaccccctggtgggagcgggccaagggcctgtag

SEQ ID NO: 156423 - DNA, 696 bp, synthetic construct
  misc_feature 1..696: note = Description of Artificial Sequence: Synthetic coding sequence
  source 1..696: mol_type = other DNA
atgatgcccaagcactgcttcctgggcttcctgatctccttcttcctgactggagtggccggcacccagagcacccatgagagcctgaagccccagagggtgcagttccagagcaggaacttccacaacatcctgcagtggcagcccggccgggccctgaccggcaacagctctgtgtactttgtgcagtacaagatctacggccagaggcagtggaagaacaaggaggactgctggggcacccaggagctgagctgtgacctgaccagcgagaccagtgacatccaggagccctactacggccgggtgcgggccgccagcgctggcagctacagcgagtggagcatgaccccccgcttcaccccctggtgggagaccaagattgacccccctgtgatgaacatcacccaggtgaatggcagcctgctggtgatcctgcacgcccccaacctgccctaccgctaccagaaggagaagaatgtgtccattgaggactactatgagctgctgtacagagtcttcatcatcaacaacagcctggagaaggagcagaaggtgtatgaaggagcccacagagctgtggagattgaggccctgaccccccacagcagctactgtgtggtggccgagatctaccagcccatgctggaccggcgcagccagaggtctgaggagcgctgtgtggagatcccctag

SEQ ID NO: 156424 - DNA, 1563 bp, synthetic construct
  misc_feature 1..1563: note = Description of Artificial Sequence: Synthetic coding sequence
  source 1..1563: mol_type = other DNA
atggccggccctgagcgctggggccccctgctgctgtgcctgctgcaggccgcccctggccggccccggctggccccaccccagaatgtgaccctgctgagccagaacttctctgtgtacctgacctggctgcccggcctgggcaacccccaggatgtgacctactttgtggcctaccagagcagccccacccggcggcgctggagggaggtggaggagtgtgccggcaccaaggagctgctgtgcagcatgatgtgcctgaagaagcaggacctgtacaacaagttcaagggccgggtgaggacagtgagccccagcagcaagagcccctgggtggagagcgagtacctggactacctgtttgaggtggagcccgcccctcctgtgctggtgctgacccagacagaggagatcctgagcgccaatgccacctaccagctgcccccctgcatgccacccctggacctgaagtatgaggtggccttctggaaggagggcgccggcaacaagaccctcttccctgtgaccccccacggccagcctgtgcagatcaccctgcagcctgctgccagcgagcaccactgcctgagcgcccggaccatctacaccttctctgtgcccaagtacagcaagttcagcaagcccacctgcttcctgctggaggtgcctgaggccaactgggccttcctggtgctgcccagcctgctgatcctgctgctggtgattgctgctgggggcgtcatctggaagaccctgatgggcaacccctggttccagagggccaagatgccccgggccctggacttcagcggccacacccaccctgtggccaccttccagcccagcaggcctgagagcgtgaatgacctcttcctgtgcccccagaaggagctgacccggggcgtgcggcccaccccccgggtgcgggccccagccacccagcagacccgctggaagaaggacctggccgaggatgaggaggaggaggatgaggaggacacagaagatggagtgtccttccagccctacatcgagccccccagcttcctgggccaggagcaccaggcccctggccacagcgaggccggcggcgtggacagcggccggccccgggcccccctggtgcccagcgagggcagcagcgcctgggacagcagtgaccgctcctgggccagcacagtggacagctcctgggacagagctggcagcagcggctacctggccgagaagggccctggccagggccctggaggagatggccaccaggagagcctgcccccacctgagttcagcaaggacagcggcttcctggaggagctgcctgaggacaacctgagctcctgggccacctggggcaccctgcccccagagcccaacctggtgcctgggggcccccctgtgtccctgcagaccctgaccttctgctgggagagcagccctgaggaggaggaggaggcccgggagagcgagattgaggacagtgatgctggctcctggggcgctgagagcacccagaggacagaggaccggggccgcaccctgggccactacatggccaggtag

SEQ ID NO: 156425 - DNA, 735 bp, synthetic construct
  misc_feature 1..735: note = Description of Artificial Sequence: Synthetic coding sequence
  source 1..735: mol_type = other DNA
atggccggccctgagcgctggggccccctgctgctgtgcctgctgcaggccgcccctggccggccccggctggccccaccccagaatgtgaccctgctgagccagaacttctctgtgtacctgacctggctgcccggcctgggcaacccccaggatgtgacctactttgtggcctaccagagcagccccacccggcggcgctggagggaggtggaggagtgtgccggcaccaaggagctgctgtgcagcatgatgtgcctgaagaagcaggacctgtacaacaagttcaagggccgggtgaggacagtgagccccagcagcaagagcccctgggtggagagcgagtacctggactacctgtttgaggtggagcccgcccctcctgtgctggtgctgacccagacagaggagatcctgagcgccaatgccacctaccagctgcccccctgcatgccacccctggacctgaagtatgaggtggccttctggaaggagggcgccggcaacaagaccctcttccctgtgaccccccacggccagcctgtgcagatcaccctgcagcctgctgccagcgagcaccactgcctgagcgcccggaccatctacaccttctctgtgcccaagtacagcaagttcagcaagcccacctgcttcctgctggaggtgcccggcctcttctggacccacaccccctgtggcaacctgagcgcccagcagaccagggtgcgggagtag

SEQ ID NO: 156426 - DNA, 636 bp, synthetic construct
  misc_feature 1..636: note = Description of Artificial Sequence: Synthetic coding sequence
  source 1..636: mol_type = other DNA
atggccggccctgagcgctggggccccctgctgctgtgcctgctgcaggccgcccctggccggccccggctggccccaccccagaatgtgaccctgctgagccagaacttctctgtgtacctgacctggctgcccggcctgggcaacccccaggatgtgacctactttgtggcctaccagagcagccccacccggcggcgctggagggaggtggaggagtgtgccggcaccaaggagctgctgtgcagcatgatgtgcctgaagaagcaggacctgtacaacaagttcaagggccgggtgaggacagtgagccccagcagcaagagcccctgggtggagagcgagtacctggactacctgtttgaggtggagcccgcccctcctgtgctggtgctgacccagacagaggagatcctgagcgccaatgccacctaccagctgcccccctgcatgccacccctggacctgaagtatgaggtggccttctggaaggagggcgccggcaacaaggtgggcagcagcttccctgccccccggctgggccccctgctgcaccccttcctgctgcgcttcttcagccccagccagcctgccccagcccccctgctgcaggaggtgtttcctgtgcacagctag

SEQ ID NO: 156427 - DNA, 558 bp, synthetic construct
  misc_feature 1..558: note = Description of Artificial Sequence: Synthetic coding sequence
  source 1..558: mol_type = other DNA
atgatgtgcctgaagaagcaggacctgtacaacaagttcaagggccgggtgaggacagtgagccccagcagcaagagcccctgggtggagagcgagtacctggactacctgtttgaggtggagcccgcccctcctgtgctggtgctgacccagacagaggagatcctgagcgccaatgccacctaccagctgcccccctgcatgccacccctggacctgaagtatgaggtggccttctggaaggagggcgccggcaacaagaccctcttccctgtgacccctcatggccagcctgtgcagatcaccctgcagcctgctgccagcgagcaccactgcctgagcgcccggaccatctacaccttctctgtgcccaagtacagcaagttcagcaagcccacctgcttcctgctggaggtgcctgaggccaactgggccttcctggtgctgcccagcctgctgatcctgctgctggtgattgctgctggaggagtcatctggaagaccctgatgggcaacccctggttccagagggccaagatgccccgggccctggtgtag

SEQ ID NO: 156428 - DNA, 1476 bp, synthetic construct
  misc_feature 1..1476: note = Description of Artificial Sequence: Synthetic coding sequence
  source 1..1476: mol_type = other DNA
atggccggccctgagcgctggggccccctgctgctgtgcctgctgcaggccgcccctggccggccccggctggccccaccccagaatgtgaccctgctgagccagaacttctctgtgtacctgacctggctgcccggcctgggcaacccccaggatgtgacctactttgtggcctaccagagcagccccacccggcggcgctggagggaggtggaggagtgtgccggcaccaaggagctgctgtgcagcatgatgtgcctgaagaagcaggacctgtacaacaagttcaagggccgggtgaggacagtgagccccagcagcaagagcccctgggtggagagcgagtacctggactacctgtttgaggtggagcccgcccctcctgtgctggtgctgacccagacagaggagatcctgagcgccaatgccacctaccagctgcccccctgcatgccacccctggacctgaagtatgaggtggccttctggaaggagggcgccggcaacaagaccctcttccctgtgaccccccacggccagcctgtgcagatcaccctgcagcctgctgccagcgagcaccactgcctgagcgcccggaccatctacaccttctctgtgcccaagtacagcaagttcagcaagcccacctgcttcctgctggaggtgcctgaggccaactgggccttcctggtgctgcccagcctgctgatcctgctgctggtgattgctgctgggggcgtcatctggaagaccctgatgggcaacccctggttccagagggccaagatgccccgggccctggagctgacccggggcgtgcggcccaccccccgggtgcgggccccagccacccagcagacccgctggaagaaggacctggctgaagatgaggaggaggaggatgaggaggacacagaagatggagtgtccttccagccctacatcgagcccccatccttcctgggccaggagcaccaggcccctggccacagcgaggccggcggcgtggacagcggccggccccgggcccccctggtgcccagcgagggcagcagcgcctgggacagcagtgaccgctcctgggccagcacagtggacagctcctgggaccgggccggcagcagcggctacctggccgagaagggccctggccagggccctggaggagatggccaccaggagagcctgcccccacctgagttcagcaaggacagcggcttcctggaggagctgcctgaggacaacctgagctcctgggccacctggggcaccctgcccccagagcccaacctggtgcctgggggcccccctgtgtccctgcagaccctgaccttctgctgggagagcagccctgaggaggaggaggaggcccgggagagcgagattgaagattctgatgctggctcctggggcgctgagagcacccagaggacagaagatcggggccgcaccctgggccactacatggccaggtag

SEQ ID NO: 156429 - DNA, 459 bp, synthetic construct
  misc_feature 1..459: note = Description of Artificial Sequence: Synthetic coding sequence
  source 1..459: mol_type = other DNA
atgagccggctgcctgtgctgctgctgctgcagctgctggtgcggcccggcctgcaggcccccatgacccagaccacccccctgaagacctcctgggtgaactgcagcaacatgattgatgagatcatcacccacctgaagcagccccccctgcccctgctggacttcaacaacctgaatggagaggaccaggacatcctgatggagaacaacctgcggcggcccaacctggaggccttcaacagagctgtgaagagcctgcagaatgccagcgccatcgagagcatcctgaagaacctgctgccctgcctgcccctggccacagctgcccccaccaggcaccccatccacatcaaggatggagactggaatgagttccggaggaagctgaccttctacctgaagaccctggagaatgcccaggcccagcagaccaccctgagcctggccatcttctag

SEQ ID NO: 156430 - DNA, 1137 bp, synthetic construct
  misc_feature 1..1137: note = Description of Artificial Sequence: Synthetic coding sequence
  source 1..1137: mol_type = other DNA
atggtgctgctgtggctgaccctgctgctgattgccctgccctgcctgctgcagaccaaggaggaccccaacccccccatcaccaacctgaggatgaaggccaaggcccagcagctgacctgggacctgaacagaaatgtgacagacattgaatgtgtgaaggatgctgactacagcatgcctgctgtgaacaacagctactgccagtttggagccatcagcctgtgtgaggtgaccaactacacagtgcgggtggccaacccccccttcagcacctggatcctcttccctgagaacagcggcaagccctgggccggggctgagaacctgacctgctggattcatgatgtggacttcctgagctgctcctgggccgtgggccctggggccccagcagatgtgcagtatgacctgtacctgaatgtggccaacagacggcagcagtatgagtgcctgcactacaagacagatgcccagggcaccagaattggctgccgctttgatgacatcagccggctgagcagcggcagccagagcagccacatcctggtgcggggccgctctgctgccttcggcatcccctgcacagacaagtttgtggtgttcagccagatcgagatcctgaccccacccaacatgacagccaagtgcaacaagacccacagcttcatgcactggaagatgaggagccacttcaacaggaagttccgctatgagctgcagatccagaagaggatgcagcccgtcatcacagagcaggtgcgggacaggaccagcttccagctgctgaaccctggcacctacacagtgcagatccgggcccgggagcgggtgtatgagttcctgagcgcctggagcaccccccagagatttgaatgtgaccaggaggagggcgccaacacccgggcctggaggaccagcctgctgattgccctgggcaccctgctggccctggtgtgtgtgtttgtgatctgccgccgctacctggtgatgcagaggctcttcccccgcatcccccacatgaaggaccccatcggggacagcttccagaatgacaagctggtggtgtgggaggccggcaaggccggcctggaggagtgcctggtgacagaggtgcaggtggtgcagaagacctag

SEQ ID NO: 156431 - DNA, 903 bp, synthetic construct
  misc_feature 1..903: note = Description of Artificial Sequence: Synthetic coding sequence
  source 1..903: mol_type = other DNA
atggtgctgctgtggctgaccctgctgctgattgccctgccctgcctgctgcagaccaaggagggcggcaagccctgggccggggctgagaacctgacctgctggattcatgatgtggacttcctgagctgctcctgggccgtgggccctggggccccagcagatgtgcagtatgacctgtacctgaatgtggccaacagacggcagcagtatgagtgcctgcactacaagacagatgcccagggcaccagaattggctgccgctttgatgacatcagccggctgagcagcggcagccagagcagccacatcctggtgcggggccgctctgctgccttcggcatcccctgcacagacaagtttgtggtgttcagccagatcgagatcctgaccccacccaacatgacagccaagtgcaacaagacccacagcttcatgcactggaagatgaggagccacttcaacaggaagttccgctatgagctgcagatccagaagaggatgcagcccgtcatcacagagcaggtgcgggacaggaccagcttccagctgctgaaccctggcacctacacagtgcagatccgggcccgggagcgggtgtatgagttcctgagcgcctggagcaccccccagagatttgaatgtgaccaggaggagggcgccaacacccgggcctggaggaccagcctgctgattgccctgggcaccctgctggccctggtgtgtgtgtttgtgatctgccgccgctacctggtgatgcagaggctcttcccccgcatcccccacatgaaggaccccatcggggacagcttccagaatgacaagctggtggtgtgggaggccggcaaggccggcctggaggagtgcctggtgacagaggtgcaggtggtgcagaagacctag

SEQ ID NO: 156432 - DNA, 495 bp, synthetic construct
  misc_feature 1..495: note = Description of Artificial Sequence: Synthetic coding sequence
  source 1..495: mol_type = other DNA
atggtgctgctgtggctgaccctgctgctgattgccctgccctgcctgctgcagaccaaggagggcggcaagccctgggccggggctgagaacctgacctgctggattcatgatgtggacttcctgagctgctcctgggccgtgggccctggggccccagcagatgtgcagtatgacctgtacctgaatgtggccaacagacggcagcagtatgagtgcctgcactacaagacagatgcccagggcaccagaattggctgccgctttgatgacatcagccggctgagcagcggcagccagagcagccacatcctggtgcggggccgctctgctgccttcggcatcccctgcacagacaagtttgtggtgttcagccagatcgagatcctgaccccacccaacatgacagccaagtgcaacaagacccacagcttcatgcactggaagatgaggagccacttcaacaggaagttccgctatgagctgcagatctag

SEQ ID NO: 156433 - DNA, 1323 bp, synthetic construct
  misc_feature 1..1323: note = Description of Artificial Sequence: Synthetic coding sequence
  source 1..1323: mol_type = other DNA
atgacctactggaggctggagaacatcgccaagacagagccccccaagatcttccgggtgaagcctgtgctgggcatcaagaggatgatccagatcgagtggatcaagccagagctggcccctgtgtccagtgacctgaagtacaccctgcgcttcagaacagtgaacagcacctcctggatggaggtgaactttgccaagaacaggaaggacaagaaccagacctacaacctgaccggcctgcagcccttcacagaatatgtgattgccctgcgctgtgctgtgaaggagagcaagttctggagcgactggagccaggagaagatgggcatgacagaggaggaggccccctgtggcctggagctgtggagggtgctgaagccagctgaggctgatggccggcggcctgtgcggctgctgtggaagaaggcccggggggcccctgtgctggagaagaccctgggctacaacatctggtactacccagagagcaacaccaacctgacagagaccatgaacaccaccaaccagcagctggagctgcacctgggcggggagagcttctgggtgtccatgatctcctacaacagcctgggcaagagccctgtggccaccctgcgcatcccagccatccaggagaagagcttccagtgcatcgaggtgatgcaggcctgtgtggccgaggaccagctggtggtgaagtggcagagcagcgccctggatgtgaacacctggatgattgagtggttcccagatgtggacagcgagcccaccaccctgtcctgggagagcgtgtcccaggccaccaactggaccatccagcaggacaagctgaagcccttctggtgctacaacatctctgtgtaccccatgctgcatgacaaggtgggggagccctacagcatccaggcctatgccaaggagggcgtgcccagcgagggccctgagaccaaggtggagaacatcggcgtgaagacagtgaccatcacctggaaggagatccccaagtctgagaggaagggcatcatctgcaactacaccatcttctaccaggccgagggcggcaagggcttctgcaagcacgcccacagcgaggtggagaagaaccccaagccccagattgatgccatggacaggcctgtggtgggcatggccccacccagccactgtgacctgcagcccggcatgaaccacctggccagcctgaacctgtctgaaaatggagccaagagcacccacctgctgggcttctggggcctgaatgaaagtgaggtgacagtgcctgagcggcgggtgctgaggaagtggaaggagctgctgtag

SEQ ID NO: 156434 - DNA, 1989 bp, synthetic construct
  misc_feature 1..1989: note = Description of Artificial Sequence: Synthetic coding sequence
  source 1..1989: mol_type = other DNA
atgaagctgagcccccagcccagctgtgtgaacctgggcatgatgtggacctgggccctgtggatgctgcccagcctgtgcaagttcagcctggccgccctgcctgccaagccagagaacatcagctgtgtgtactactacaggaagaacctgacctgcacctggagccctgggaaggagaccagctacacccagtacacagtgaagaggacctacgccttcggggagaagcatgacaactgcaccaccaacagcagcaccagtgaaaatagagccagctgcagcttcttcctgccccgcatcaccatcccagacaactacaccatcgaggtggaggccgagaatggagatggagtcatcaagagccacatgacctactggaggctggagaacatcgccaagacagagccccccaagatcttccgggtgaagcctgtgctgggcatcaagaggatgatccagatcgagtggatcaagccagagctggcccctgtgtccagtgacctgaagtacaccctgcgcttcagaacagtgaacagcacctcctggatggaggtgaactttgccaagaacaggaaggacaagaaccagacctacaacctgaccggcctgcagcccttcacagaatatgtgattgccctgcgctgtgctgtgaaggagagcaagttctggagcgactggagccaggagaagatgggcatgacagaggaggaggccccctgtggcctggagctgtggagggtgctgaagccagctgaggctgatggaagaagacctgtgcggctgctgtggaagaaggcccggggggcccctgtgctggagaagaccctgggctacaacatctggtactacccagagagcaacaccaacctgacagagaccatgaacaccaccaaccagcagctggagctgcacctgggcggggagagcttctgggtgtccatgatctcctacaacagcctgggcaagagccctgtggccaccctgcgcatcccagccatccaggagaagagcttccagtgcatcgaggtgatgcaggcctgtgtggccgaggaccagctggtggtgaagtggcagagcagcgccctggatgtgaacacctggatgattgagtggttcccagatgtggacagcgagcccaccaccctgtcctgggagagcgtgtcccaggccaccaactggaccatccagcaggacaagctgaagcccttctggtgctacaacatctctgtgtaccccatgctgcatgacaaggtgggggagccctacagcatccaggcctatgccaaggagggcgtgcccagcgagggccctgagaccaaggtggagaacattggagtgaagacagtgaccatcacctggaaggagatccccaagtctgagaggaagggcatcatctgcaactacaccatcttctaccaggccgagggcggcaagggcttcagcaagacagtgaacagcagcatcctgcagtatggcctggagagcctgaagaggaagaccagctacatcgtgcaggtgatggccagcaccagcgctgggggcaccaacggcaccagcatcaacttcaagaccctgtccttctctgtgtttgagatcatcctgatcaccagcctcatcggcggcggcctgctgatcctgatcatcctgactgtggcctacggcctgaagaagcccaacaagctgacccacctgtgctggcccaccgtgcccaacccagctgagagcagcatcgccacctggcatggagatgacttcaaggacaagctgaacctgaaggagagtgatgacagcgtgaacacagaggaccgcatcctgaagccctgcagcacccccagcgacaagctggtgattgacaagctggtggtgaactttggaaatgtgctgcaggagatcttcacagatgaggccaggacaggccaggagaacaacctgggcggggagaagaatggcacccgcatcctgagcagctgccccaccagcatctag

SEQ ID NO: 156435 - DNA, 2046 bp, synthetic construct
  misc_feature 1..2046: note = Description of Artificial Sequence: Synthetic coding sequence
  source 1..2046: mol_type = other DNA
atgtgcatccggcagctgaagttcttcaccacagcctgtgtgtgtgagtgcccccagaacatcctgagcccccagcccagctgtgtgaacctgggcatgatgtggacctgggccctgtggatgctgcccagcctgtgcaagttcagcctggccgccctgcctgccaagccagagaacatcagctgtgtgtactactacaggaagaacctgacctgcacctggagccctgggaaggagaccagctacacccagtacacagtgaagaggacctacgcctttggagagaagcatgacaactgcaccaccaacagcagcaccagcgagaacagagccagctgcagcttcttcctgccccgcatcaccatcccagacaactacaccatcgaggtggaggctgaaaatggagatggagtcatcaagagccacatgacctactggaggctggagaacatcgccaagacagagccccccaagatcttccgggtgaagcctgtgctgggcatcaagaggatgatccagatcgagtggatcaagccagagctggcccctgtgtccagtgacctgaagtacaccctgcgcttcagaacagtgaacagcacctcctggatggaggtgaactttgccaagaacaggaaggacaagaaccagacctacaacctgaccggcctgcagcccttcacagaatatgtgattgccctgcgctgtgctgtgaaggagagcaagttctggagcgactggagccaggagaagatgggcatgacagaggaggaggccccctgtggcctggagctgtggagggtgctgaagccagctgaggctgatggccggcggcctgtgcggctgctgtggaagaaggcccggggggcccctgtgctggagaagaccctgggctacaacatctggtactacccagagagcaacaccaacctgacagagaccatgaacaccaccaaccagcagctggagctgcacctgggcggggagagcttctgggtgtccatgatctcctacaacagcctgggcaagagccctgtggccaccctgcgcatcccagccatccaggagaagagcttccagtgcatcgaggtgatgcaggcctgtgtggccgaggaccagctggtggtgaagtggcagagcagcgccctggatgtgaacacctggatgattgagtggttcccagatgtggacagcgagcccaccaccctgtcctgggagagcgtgtcccaggccaccaactggaccatccagcaggacaagctgaagcccttctggtgctacaacatctctgtgtaccccatgctgcatgacaaggtgggggagccctacagcatccaggcctatgccaaggagggcgtgcccagcgagggccctgagaccaaggtggagaacatcggcgtgaagacagtgaccatcacctggaaggagatccccaagtctgagaggaagggcatcatctgcaactacaccatcttctaccaggccgagggcggcaagggcttcagcaagacagtgaacagcagcatcctgcagtatggcctggagagcctgaagaggaagaccagctacatcgtgcaggtgatggccagcaccagcgctgggggcaccaacggcaccagcatcaacttcaagaccctgtccttctctgtgtttgagatcatcctgatcaccagcctgattggaggcggcctgctgatcctgatcatcctgactgtggcctacggcctgaagaagcccaacaagctgacccacctgtgctggcccaccgtgcccaacccagctgagagcagcatcgccacctggcatggagatgacttcaaggacaagctgaacctgaaggagagtgatgattctgtgaacacagaagatcgcatcctgaagccctgcagcacccccagcgacaagctggtgattgacaagctggtggtgaactttggaaatgtgctgcaggagatcttcacagatgaggccaggacaggccaggagaacaacctgggcggggagaagaatggcacccgcatcctgagcagctgccccaccagcatctag

SEQ ID NO: 156436 - DNA, 1989 bp, synthetic construct; identical to SEQ ID NO: 156434
  misc_feature 1..1989: note = Description of Artificial Sequence: Synthetic coding sequence
  source 1..1989: mol_type = other DNA

SEQ ID NO: 156437 - DNA, 1749 bp, synthetic construct
  misc_feature 1..1749: note = Description of Artificial Sequence: Synthetic coding sequence
  source 1..1749: mol_type = other DNA
atgtgcatccggcagctgaagttcttcaccacagcctgtgtgtgtgagtgcccccagaacatcctgagcccccagcccagctgtgtgaacctgggcatgatgtggacctgggccctgtggatgctgcccagcctgtgcaagttcagcctggccgccctgcctgccaagccagagaacatcagctgtgtgtactactacaggaagaacctgacctgcacctggagccctgggaaggagaccagctacacccagtacacagtgaagaggacctacgcctttggagagaagcatgacaactgcaccaccaacagcagcaccagcgagaacagagccagctgcagcttcttcctgccccgcatcaccatcccagacaactacaccatcgaggtggaggctgaaaatggagatggagtcatcaagagccacatgacctactggaggctggagaacatcgccaagacagagccccccaagatcttccgggtgaagcctgtgctgggcatcaagaggatgatccagatcgagtggatcaagccagagctggcccctgtgtccagtgacctgaagtacaccctgcgcttcagaacagtgaacagcacctcctggatggaggtgaactttgccaagaacaggaaggacaagaaccagacctacaacctgaccggcctgcagcccttcacagaatatgtgattgccctgcgctgtgctgtgaaggagagcaagttctggagcgactggagccaggagaagatgggcatgacagaggaggaggccccctgtggcctggagctgtggagggtgctgaagccagctgaggctgatggccggcggcctgtgcggctgctgtggaagaaggcccggggggcccctgtgctggagaagaccctgggctacaacatctggtactacccagagagcaacaccaacctgacagagaccatgaacaccaccaaccagcagctggagctgcacctgggcggggagagcttctgggtgtccatgatctcctacaacagcctgggcaagagccctgtggccaccctgcgcatcccagccatccaggagaagagcttccagtgcatcgaggtgatgcaggcctgtgtggccgaggaccagctggtggtgaagtggcagagcagcgccctggatgtgaacacctggatgattgagtggttcccagatgtggacagcgagcccaccaccctgtcctgggagagcgtgtcccaggccaccaactggaccatccagcaggacaagctgaagcccttctggtgctacaacatctctgtgtaccccatgctgcatgacaaggtgggggagccctacagcatccaggcctatgccaaggagggcgtgcccagcgagggccctgagaccaaggtggagaacatcggcgtgaagacagtgaccatcacctggaaggagatccccaagtctgagaggaagggcatcatctgcaactacaccatcttctaccaggccgagggcggcaagggcttctgcaagcacgcccacagcgaggtggagaagaaccccaagccccagattgatgccatggacaggcctgtggtgggcatggccccacccagccactgtgacctgcagcccggcatgaaccacctggccagcctgaacctgtctgaaaatggagccaagagcacccacctgctgggcttctggggcctgaatgaaagtgaggtgacagtgcctgagcggcgggtgctgaggaagtggaaggagctgctgtag

SEQ ID NO: 156438 - DNA, 2295 bp, synthetic construct
  misc_feature 1..2295: note = Description of Artificial Sequence: Synthetic coding sequence
  source 1..2295: mol_type = other DNA
atgtgcatccggcagctgaagttcttcaccacagcctgtgtgtgtgagtgcccccagaacatcctgagcccccagcccagctgtgtgaacctgggcatgatgtggacctgggccctgtggatgctgcccagcctgtgcaagttcagcctggccgccctgcctgccaagccagagaacatcagctgtgtgtactactacaggaagaacctgacctgcacctggagccctgggaaggagaccagctacacccagtacacagtgaagaggacctacgcctttggagagaagcatgacaactgcaccaccaacagcagcaccagcgagaacagagccagctgcagcttcttcctgccccgcatcaccatcccagacaactacaccatcgaggtggaggctgaaaatggagatggagtcatcaagagccacatgacctactggaggctggagaacatcgccaagacagagccccccaagatcttccgggtgaagcctgtgctgggcatcaagaggatgatccagatcgagtggatcaagccagagctggcccctgtgtccagtgacctgaagtacaccctgcgcttcagaacagtgaacagcacctcctggatggaggtgaactttgccaagaacaggaaggacaagaaccagacctacaacctgaccggcctgcagcccttcacagaatatgtgattgccctgcgctgtgctgtgaaggagagcaagttctggagcgactggagccaggagaagatgggcatgacagaggaggaggccccctgtggcctggagctgtggagggtgctgaagccagctgaggctgatggccggcggcctgtgcggctgctgtggaagaaggcccggggggcccctgtgctggagaagaccctgggctacaacatctggtactacccagagagcaacaccaacctgacagagaccatgaacaccaccaaccagcagctggagctgcacctgggcggggagagcttctgggtgtccatgatctcctacaacagcctgggcaagagccctgtggccaccctgcgcatcccagccatccaggagaagagcttccagtgcatcgaggtgatgcaggcctgtgtggccgaggaccagctggtggtgaagtggcagagcagcgccctggatgtgaacacctggatgattgagtggttcccagatgtggacagcgagcccaccaccctgtcctgggagagcgtgtcccaggccaccaactggaccatccagcaggacaagctgaagcccttctggtgctacaacatctctgtgtaccccatgctgcatgacaaggtgggggagccctacagcatccaggcctatgccaaggagggcgtgcccagcgagggccctgagaccaaggtggagaacatcggcgtgaagacagtgaccatcacctggaaggagatccccaagtctgagaggaagggcatcatctgcaactacaccatcttctaccaggccgagggcggcaagggcttcagcaagacagtgaacagcagcatcctgcagtatggcctggagagcctgaagaggaagaccagctacatcgtgcaggtgatggccagcaccagcgctgggggcaccaacggcaccagcatcaacttcaagaccctgtccttctctgtgtttgagatcatcctgatcaccagcctgattggaggcggcctgctgatcctgatcatcctgactgtggcctacggcctgaagaagcccaacaagctgacccacctgtgctggcccaccgtgcccaacccagctgagagcagcatcgccacctggcatggagatgacttcaaggacaagctgaacctgaaggagagtgatgattctgtgaacacagaagatcgcatcctgaagccctgcagcacccccagcgacaagctggtgattgacaagctggtggtgaactttggaaatgtgctgcaggagatcttcacagatgaggccaggacaggccaggagaacaacctgggcggggagaagaatggctacgtgacctgccccttccggccagactgccccctgggcaagagctttgaggagctgcctgtgtccccagagatcccccccaggaagagccagtacctgcggagcaggatgcctgagggcaccaggcctgaggccaaggagcagctgctcttcagcggccagagcctggtgcctgaccacctgtgtgaggagggcgcccccaacccctacctgaagaacagcgtgacagcccgggagttcctggtgtctgagaagctgcctgagcacaccaagggggaggtgtag

SEQ ID NO: 156439 - DNA, 1869 bp, synthetic construct
  misc_feature 1..1869: note = Description of Artificial Sequence: Synthetic coding sequence
  source 1..1869: mol_type = other DNA
atgacctactggaggctggagaacatcgccaagacagagccccccaagatcttccgggtgaagcctgtgctgggcatcaagaggatgatccagatcgagtggatcaagccagagctggcccctgtgtccagtgacctgaagtacaccctgcgcttcagaacagtgaacagcacctcctggatggaggtgaactttgccaagaacaggaaggacaagaaccagacctacaacctgaccggcctgcagcccttcacagaatatgtgattgccctgcgctgtgctgtgaaggagagcaagttctggagcgactggagccaggagaagatgggcatgacagaggaggaggccccctgtggcctggagctgtggagggtgctgaagccagctgaggctgatggccggcggcctgtgcggctgctgtggaagaaggcccggggggcccctgtgctggagaagaccctgggctacaacatctggtactacccagagagcaacaccaacctgacagagaccatgaacaccaccaaccagcagctggagctgcacctgggcggggagagcttctgggtgtccatgatctcctacaacagcctgggcaagagccctgtggccaccctgcgcatcccagccatccaggagaagagcttccagtgcatcgaggtgatgcaggcctgtgtggccgaggaccagctggtggtgaagtggcagagcagcgccctggatgtgaacacctggatgattgagtggttcccagatgtggacagcgagcccaccaccctgtcctgggagagcgtgtcccaggccaccaactggaccatccagcaggacaagctgaagcccttctggtgctacaacatctctgtgtaccccatgctgcatgacaaggtgggggagccctacagcatccaggcctatgccaaggagggcgtgcccagcgagggccctgagaccaaggtggagaacatcggcgtgaagacagtgaccatcacctggaaggagatccccaagtctgagaggaagggcatcatctgcaactacaccatcttctaccaggccgagggcggcaagggcttcagcaagacagtgaacagcagcatcctgcagtatggcctggagagcctgaagaggaagaccagctacatcgtgcaggtgatggccagcaccagcgctgggggcaccaacggcaccagcatcaacttcaagaccctgtccttctctgtgtttgagatcatcctgatcaccagcctgattggaggcggcctgctgatcctgatcatcctgactgtggcctacggcctgaagaagcccaacaagctgacccacctgtgctggcccaccgtgcccaacccagctgagagcagcatcgccacctggcatggagatgacttcaaggacaagctgaacctgaaggagagtgatgattctgtgaacacagaagatcgcatcctgaagccctgcagcacccccagcgacaagctggtgattgacaagctggtggtgaactttggaaatgtgctgcaggagatcttcacagatgaggccaggacaggccaggagaacaacctgggcggggagaagaatggctacgtgacctgccccttccggccagactgccccctgggcaagagctttgaggagctgcctgtgtccccagagatcccccccaggaagagccagtacctgcggagcaggatgcctgagggcaccaggcctgaggccaaggagcagctgctcttcagcggccagagcctggtgcctgaccacctgtgtgaggagggcgcccccaacccctacctgaagaacagcgtgacagcccgggagttcctggtgtctgagaagctgcctgagcacaccaagggggaggtgtag

SEQ ID NO: 156440 - DNA, 468 bp, synthetic construct
  misc_feature 1..468: note = Description of Artificial Sequence: Synthetic coding sequence
  source 1..468: mol_type = other DNA
atggtgctgagcggggccctgtgcttcaggatgaaggacagcgccctgaaggtgctgtacctgcacaacaaccagctgctggccggcggcctgcatgctgggaaggtgatcaagggggaggagatctctgtggtgcccaaccgctggctggatgccagcctgagccctgtgatcctgggcgtgcagggcggcagccagtgcctgagctgtggggtgggccaggagcccaccctgaccctggagcctgtgaacatcatggagctgtacctgggcgccaaggagagcaagagcttcaccttctaccgccgggacatgggcctgaccagcagctttgaatctgctgcctacccaggctggttcctgtgcaccgtgcctgaggccgaccagcctgtgcggctgacccagctgcctgaaaatggaggctggaatgcccccatcacagacttctacttccagcagtgtgactag

SEQ ID NO: 156441 - DNA, 468 bp, synthetic construct; identical to SEQ ID NO: 156440
  misc_feature 1..468: note = Description of Artificial Sequence: Synthetic coding sequence
  source 1..468: mol_type = other DNA

SEQ ID NO: 156442 - DNA, 354 bp, synthetic construct
  misc_feature 1..354: note = Description of Artificial Sequence: Synthetic coding sequence
  source 1..354: mol_type = other DNA
atggtgctgagcggggccctgtgcttcaggatgaaggacagcgccctgaaggtgctgtacctgcacaacaaccagctgctggccggcggcctgcatgctgggaaggtgatcaagggggaggagatctctgtggtgcccaaccgctggctggatgccagcctgagccctgtgatcctgggcgtgcagggcggcagccagtgcctgagctgtggggtgggccaggagcccaccctgaccctggagcctgtgaacatcatggagctgtacctgggcgccaaggagagcaagagcttcaccttctaccgccgggacatgggcctgaccagcagctttgaatctgctgcctacccctag

SEQ ID NO: 156443 - DNA, 2478 bp, synthetic construct
  misc_feature 1..2478: note = Description of Artificial Sequence: Synthetic coding sequence
  source 1..2478: mol_type = other DNA
atgggctggctgtgcagcggcctgctcttccctgtgtcctgcctggtgctgctgcaggtggccagcagcggcaacatgaaggtgctgcaggagcccacctgtgtgtctgactacatgagcatcagcacctgtgagtggaagatgaatggccccaccaactgcagcacagagctgcggctgctgtaccagctggtgttcctgctgtctgaggcccacacctgcatcccagaaaataatggaggagctggctgtgtgtgccacctgctgatggatgatgtggtgtctgctgacaactacaccctggacctgtgggccggccagcagctgctgtggaagggcagcttcaagcccagcgagcacgtgaagccccgggcccctggcaacctgactgtgcacaccaacgtgtctgacaccctgctgctgacctggagcaacccctaccccccagacaactacctgtacaaccacctgacctatgctgtgaacatctggagcgaaaatgaccctgctgacttccgcatctacaacgtgacctacctggagcccagcctgagaattgctgccagcaccctgaagagcggcatctcctaccgggcccgggtgcgggcctgggcccagtgctacaacaccacctggagcgagtggagccccagcaccaagtggcacaacagctaccgggagccctttgagcagcacctgctgctgggcgtgtctgtgtcctgcatcgtcatcctggccgtgtgcctgctgtgctacgtgtccatcaccaagatcaagaaggagtggtgggaccagatccccaacccagcccggagccggctggtggccatcatcatccaggatgcccagggcagccagtgggagaagaggagccggggccaggagcccgccaagtgcccccactggaagaactgcctgaccaagctgctgccctgcttcctggagcacaacatgaagagagatgaggacccccacaaggccgccaaggagatgcccttccagggcagcggcaagagcgcctggtgccctgtggagatcagcaagacagtgctgtggccagagagcatctctgtggtgcgctgtgtggagctgtttgaggcccctgtggagtgtgaggaggaggaggaggtggaggaggagaagggcagcttctgtgccagccctgagagcagcagagatgacttccaggagggccgggagggcatcgtggcccggctgacagagagcctcttcctggacctgctgggggaggagaatggaggcttctgccagcaggacatgggagagagctgcctgctgccccccagcggcagcaccagcgcccacatgccctgggatgagttccccagcgctggccccaaggaggccccaccctggggcaaggagcagcccctgcacctggagcccagccccccagccagccccacccagagcccagacaacctgacctgcacagagacccccctggtgattgctggcaacccagcctaccgctccttcagcaacagcctgagccagagcccctgcccccgggagctgggccctgaccccctgctggcccggcacctggaggaggtggagcctgagatgccctgtgtgccccagctgtctgagcccaccaccgtgccccagcctgagcctgagacctgggagcagatcctgcggagaaatgtgctgcagcacggggctgctgctgcccctgtgtctgcccccaccagcggctaccaggagtttgtgcatgctgtggagcagggcggcacccaggccagcgctgtggtgggcctgggccccccaggagaggccggctacaaggccttcagcagcctgctggccagcagcgctgtgtccccagagaagtgtggctttggagccagcagcggggaggagggctacaagcccttccaggacctgatccctggctgccctggggaccctgcccctgtgcctgtgcccctcttcaccttcggcctggaccgggagcccccaagaagcccccagagcagccacctgcccagcagcagccctgagcacctgggcctggagcccggggagaaggtggaggacatgcccaagccacccctgccccaggagcaggccacagaccccctggtggacagcctgggcagcggcatcgtgtacagcgccctgacctgccacctgtgtggccacctgaagcagtgccacggccaggaggatggcggccagacccctgtgatggccagcccctgctgcggctgctgctgcggggacaggagcagcccccccaccacccccctgcgggccccagaccccagccctgggggcgtgcccctggaggccagcctgtgcccagccagcctggcccccagcggcatcagcgagaagagcaagagcagcagcagcttccacccagcccctggaaatgcccagagcagcagccagacccccaagatcgtgaactttgtgtctgtgggccccacctacatgagggtgtcctag

SEQ ID NO: 156444 - DNA, 2433 bp, synthetic construct
  misc_feature 1..2433: note = Description of Artificial Sequence: Synthetic coding sequence
  source 1..2433: mol_type = other DNA
atgcagaaggatgcccggcgggagggcaacatgaaggtgctgcaggagcccacctgtgtgtctgactacatgagcatcagcacctgtgagtggaagatgaatggccccaccaactgcagcacagagctgcggctgctgtaccagctggtgttcctgctgtctgaggcccacacctgcatccctgagaacaacggcggggccggctgtgtgtgccacctgctgatggatgatgtggtgtctgctgacaactacaccctggacctgtgggccggccagcagctgctgtggaagggcagcttcaagcccagcgagcacgtgaagccccgggcccctggcaacctgactgtgcacaccaacgtgtctgacaccctgctgctgacctggagcaacccctaccccccagacaactacctgtacaaccacctgacctatgctgtgaacatctggagcgaaaatgaccctgctgacttccgcatctacaacgtgacctacctggagcccagcctgagaattgctgccagcaccctgaagagcggcatctcctaccgggcccgggtgcgggcctgggcccagtgctacaacaccacctggagcgagtggagccccagcaccaagtggcacaacagctaccgggagccctttgagcagcacctgctgctgggcgtgtctgtgtcctgcatcgtcatcctggccgtgtgcctgctgtgctacgtgtccatcaccaagatcaagaaggagtggtgggaccagatccccaacccagcccggagccggctggtggccatcatcatccaggatgcccagggcagccagtgggagaagaggagccggggccaggagcccgccaagtgcccccactggaagaactgcctgaccaagctgctgccctgcttcctggagcacaacatgaagagagatgaggacccccacaaggccgccaaggagatgcccttccagggcagcggcaagagcgcctggtgccctgtggagatcagcaagacagtgctgtggccagagagcatctctgtggtgcgctgtgtggagctgtttgaggcccctgtggagtgtgaggaggaggaggaggtggaggaggagaagggcagcttctgtgccagccctgagagcagcagagatgacttccaggagggccgggagggcatcgtggcccggctgacagagagcctcttcctggacctgctgggggaggagaatggaggcttctgccagcaggacatgggagagagctgcctgctgcccccatctggcagcaccagcgcccacatgccctgggatgagttccccagcgctggccccaaggaggccccaccctggggcaaggagcagcccctgcacctggagcccagccccccagccagccccacccagagcccagacaacctgacctgcacagagacccccctggtgattgctggcaacccagcctaccgctccttcagcaacagcctgagccagagcccctgcccccgggagctgggccctgaccccctgctggcccggcacctggaggaggtggagcctgagatgccctgtgtgccccagctgtctgagcccaccaccgtgccccagcctgagcctgagacctgggagcagatcctgcggagaaatgtgctgcagcacggggctgctgctgcccctgtgtctgcccccaccagcggctaccaggagtttgtgcatgctgtggagcagggcggcacccaggccagcgctgtggtgggcctgggccccccaggagaggccggctacaaggccttcagcagcctgctggccagcagcgctgtgtccccagagaagtgtggctttggagccagcagtggagaggagggctacaagcccttccaggacctgatccctggctgccctggggaccctgcccctgtgcctgtgcccctcttcaccttcggcctggaccgggagccccccaggagcccccagagcagccacctgcccagcagcagccctgagcacctgggcctggagcctggagagaaggtggaggacatgcccaagccacccctgccccaggagcaggccacagaccccctggtggacagcctgggcagcggcatcgtgtacagcgccctgacctgccacctgtgtggccacctgaagcagtgccacggccaggaggatggcggccagacccctgtgatggccagcccctgctgcggctgctgctgcggggacaggagcagcccccccaccacccccctgcgggccccagaccccagccctggaggagtgcccctggaggccagcctgtgcccagccagcctggcccccagcggcatcagcgagaagagcaagagcagcagcagcttccacccagcccctggaaatgcccagagcagcagccagacccccaagatcgtgaactttgtgtctgtgggccccacctacatgagggtgtcctag

SEQ ID NO: 156445 - DNA, 684 bp, synthetic construct
  misc_feature 1..684: note = Description of Artificial Sequence: Synthetic coding sequence
  source 1..684: mol_type = other DNA
atgggctggctgtgcagcggcctgctcttccctgtgtcctgcctggtgctgctgcaggtggccagcagcggcaacatgaaggtgctgcaggagcccacctgtgtgtctgactacatgagcatcagcacctgtgagtggaagatgaatggccccaccaactgcagcacagagctgcggctgctgtaccagctggtgttcctgctgtctgaggcccacacctgcatcccagaaaataatggaggagctggctgtgtgtgccacctgctgatggatgatgtggtgtctgctgacaactacaccctggacctgtgggccggccagcagctgctgtggaagggcagcttcaagcccagcgagcacgtgaagccccgggcccctggcaacctgactgtgcacaccaacgtgtctgacaccctgctgctgacctggagcaacccctaccccccagacaactacctgtacaaccacctgacctatgctgtgaacatctggagcgaaaatgaccctgctgacttccgcatctacaacgtgacctacctggagcccagcctgagaattgctgccagcaccctgaagagcggcatctcctaccgggcccgggtgcgggcctgggcccagtgctacaacaccacctggagcgagtggagccccagcaccaagtggcacaacttctctgtgtgctag

SEQ ID NO: 156446 - DNA, 2478 bp, synthetic construct; identical to SEQ ID NO: 156443
  misc_feature 1..2478: note = Description of Artificial Sequence: Synthetic coding sequence
  source 1..2478: mol_type = other DNA

SEQ ID NO: 156447 - DNA, 684 bp, synthetic construct
  misc_feature 1..684: note = Description of Artificial Sequence: Synthetic coding sequence
  source 1..684: mol_type = other DNA
atgggctggctgtgcagcggcctgctcttccctgtgtcctgcctggtgctgctgcaggtggccagcagcggcaacatgaaggtgctgcaggagcccacctgtgtgtctgactacatgagcatcagcacctgtgagtggaagatgaatggccccaccaactgcagcacagagctgcggctgctgtaccagctggtgttcctgctgtctgaggcccacacctgcatcccagaaaataatggaggagctggctgtgtgtgccacctgctgatggatgatgtggtgtctgctgacaactacaccctggacctgtgggccggccagcagctgctgtggaagggcagcttcaagcccagcgagcacgtgaagccccgggcccctggcaacctgactgtgcacaccaacgtgtctgacaccctgctgctgacctggagcaacccctaccccccagacaactacctgtacaaccacctgacctatgctgtgaacatctggagcgaaaatgaccctgctgacttccgcatctacaacgtgacctacctggagcccagcctgagaattgctgccagcaccctgaagagcggcatctcctaccgggcccgggtgcgggcctgggcccagtgctacaacaccacctggagcgagtggagccccagcaccaagtggcacaacagcaacatctgctag

SEQ ID NO: 156448 - DNA, 2478 bp, synthetic construct; identical to SEQ ID NO: 156443
  misc_feature 1..2478: note = Description of Artificial Sequence: Synthetic coding sequence
  source 1..2478: mol_type = other DNA

SEQ ID NO: 156449 - DNA, 1263 bp, synthetic construct
  misc_feature 1..1263: note = Description of Artificial Sequence: Synthetic coding sequence
  source 1..1263: mol_type = other DNA
atgatcatcgtggcccacgtgctgctgatcctgctgggcgccacagagatcctgcaggccgacctgctgcctgatgagaagatcagcctgctgccccctgtgaacttcaccatcaaggtgacaggcctggcccaggtgctgctgcagtggaagcccaacccagaccaggagcagagaaatgtgaacctggagtaccaggtgaagatcaatgcccccaaggaggatgattatgagacccgcatcacagagagcaaatgtgtgaccatcctgcacaagggcttcagcgcctctgtgaggaccatcctgcagaatgaccacagcctgctggccagctcctgggccagcgctgagctgcacgcccctcctggcagccctggcaccagcatcgtgaacctgacctgcaccaccaacaccacagaggacaactacagccggctgcggagctaccaggtgtccctgcactgcacctggctggtgggcacagatgcccctgaggacacccagtacttcctgtactaccgctatggctcctggacagaggagtgccaggagtacagcaaggacaccctgggcaggaacatcgcctgctggttccccaggaccttcatcctgagcaagggccgggactggctggccgtgctggtgaatggcagcagcaagcacagcgccatccggccctttgaccagctgtttgccctgcacgccatcgaccagatcaacccccccctgaatgtgacagctgagattgagggcacccggctgagcatccagtgggagaagcctgtgtctgccttccccatccactgctttgattatgaggtgaagatccacaacaccagaaatggctacctgcagatcgagaagctgatgaccaatgccttcatcagcatcattgatgacctgagcaaatatgatgtgcaggtgcgggctgctgtgtcctccatgtgccgggaggccggcctgtggagcgagtggagccagcccatctacgtgggcaatgatgagcacaagcccctgcgggagtggtttgtgattgtcatcatggccaccatctgcttcatcctgctgatcctgagcctcatctgcaagatctgccacctgtggatcaagctgtttcctcccatcccagcccccaagagcaacatcaaggacctgtttgtgaccaccaactatgagaaggccggcagcagcgagacagaaattgaagtcatctgctacatcgagaagccaggagtggagaccctggaggacagcgtcttctag

SEQ ID NO: 156450 - DNA, 1008 bp, synthetic construct
  misc_feature 1..1008: note = Description of Artificial Sequence: Synthetic coding sequence
  source 1..1008: mol_type = other DNA
atgatcatcgtggcccacgtgctgctgatcctgctgggcgccacagagatcctgcaggccgacctgctgcctgatgagaagatcagcctgctgccccctgtgaacttcaccatcaaggtgacaggcctggcccaggtgctgctgcagtggaagcccaacccagaccaggagcagagaaatgtgaacctggagtaccaggtgaagatcaatgcccccaaggaggatgattatgagacccgcatcacagagagcaaatgtgtgaccatcctgcacaagggcttcagcgcctctgtgaggaccatcctgcagaatgaccacagcctgctggccagctcctgggccagcgctgagctgcacgcccctcctggcagccctggcaccagcatcgtgaacctgacctgcaccaccaacaccacagaggacaactacagccggctgcggagctaccaggtgtccctgcactgcacctggctggtgggcacagatgcccctgaggacacccagtacttcctgtactaccgctatggctcctggacagaggagtgccaggagtacagcaaggacaccctgggcaggaacatcgcctgctggttccccaggaccttcatcctgagcaagggccgggactggctggccgtgctggtgaatggcagcagcaagcacagcgccatccggccctttgaccagctgtttgccctgcacgccatcgaccagatcaacccccccctgaatgtgacagctgagattgagggcacccggctgagcatccagtgggagaagcctgtgtctgccttccccatccactgctttgattatgaggtgaagatccacaacaccagaaatggctacctgcagatcgagaagctgatgaccaatgccttcatcagcatcattgatgacctgagcaaatatgatgtgcaggtgcgggctgctgtgtcctccatgtgccgggaggccggcctgtggagcgagtggagccagcccatctacgtgggcttcagcaggtag

SEQ ID NO: 156451 - DNA, 453 bp, synthetic construct
  misc_feature 1..453: note = Description of Artificial Sequence: Synthetic coding sequence
  source 1..453: mol_type = other DNA
atgaccaatgccttcatcagcatcattgatgacctgagcaaatatgatgtgcaggtgcgggctgctgtgtcctccatgtgccgggaggccggcctgtggagcgagtggagccagcccatctacgtgggcaatgatgagcacaagcccctgcgggagtggtttgtgattgtcatcatggccaccatctgcttcatcctgctgatcctgagcctcatctgcaagatctgccacctgtggatcaagctgttcccccccatcccagcccccaagagcaacatcaaggacctgtttgtgaccaccaactatgaggtgctgtgcatcttcatctacatcctggacagcgctgacaacttcctgcagaagaagaaggccggcagcagcgagacagaaattgaagtcatctgctacatcgagaagccaggagtggagaccctggaggacagcgtcttctag

SEQ ID NO: 156452 - DNA, 1008 bp, synthetic construct; identical to SEQ ID NO: 156450
  misc_feature 1..1008: note = Description of Artificial Sequence: Synthetic coding sequence
  source 1..1008: mol_type = other DNA

SEQ ID NO: 156453 - DNA, 978 bp, synthetic construct
  misc_feature 1..978: note = Description of Artificial Sequence: Synthetic coding sequence
  source 1..978: mol_type = other DNA
atgatcatcgtggcccacgtgctgctgatcctgctgggcgccacagagatcctgcaggccgacctgctgcctgatgagaagatcagcctgctgccccctgtgaacttcaccatcaaggtgacaggcctggcccaggtgctgctgcagtggaagcccaacccagaccaggagcagagaaatgtgaacctggagtaccaggtgaagatcaatgcccccaaggaggatgattatgagacccgcatcacagagagcaaatgtgtgaccatcctgcacaagggcttcagcgcctctgtgaggaccatcctgcagaatgaccacagcctgctggccagctcctgggccagcgctgagctgcacgcccctcctggcagccctggcaccagcatcgtgaacctgacctgcaccaccaacaccacagaggacaactacagccggctgcggagctaccaggtgtccctgcactgcacctggctggtgggcacagatgcccctgaggacacccagtacttcctgtactaccgctatggctcctggacagaggagtgccaggagtacagcaaggacaccctgggcaggaacatcgcctgctggttccccaggaccttcatcctgagcaagggccgggactggctggccgtgctggtgaatggcagcagcaagcacagcgccatccggccctttgaccagctgtttgccctgcacgccatcggaaatgatgagcacaagcccctgcgggagtggtttgtgattgtcatcatggccaccatctgcttcatcctgctgatcctgagcctcatctgcaagatctgccacctgtggatcaagctgttcccccccatcccagcccccaagagcaacatcaaggacctgtttgtgaccaccaactatgagaaggccggcagcagcgagacagaaattgaggtgatctgctacatcgagaagccaggagtggagaccctggaggacagcgtcttctag

SEQ ID NO: 156454 - DNA, 330 bp, synthetic construct
  misc_feature 1..330: note = Description of Artificial Sequence: Synthetic coding sequence
  source 1..330: mol_type = other DNA
atgatcatcgtggcccacgtgctgctgatcctgctgggcgccacagagatcctgcaggccgacctgctgcctgatgagaagatcagcctgctgccccctgtgaacttcaccatcaaggtgacaggcctggcccaggtgctgctgcagtggaagcccaacccagaccaggagcagagaaatgtgaacctggagtaccaggtgaagatcaatgcccccaaggaggatgattatgagacccgcatcacagagagcaaatgtgtgaccatcctgcacaagggcttcagcgcctctgtgaggaccatcctgcagaatgaccacagcctgctgtag

SEQ ID NO: 156455 - DNA, 1002 bp, synthetic construct
  misc_feature 1..1002: note = Description of Artificial Sequence: Synthetic coding sequence
  source 1..1002: mol_type = other DNA
atgatcatcgtggcccacgtgctgctgatcctgctgggcgccacagagatcctgcaggccgacctgctgcctgatgagaagatcagcctgctgccccctgtgaacttcaccatcaaggtgacaggcctggcccaggtgctgctgcagtggaagcccaacccagaccaggagcagagaaatgtgaacctggagtaccaggtgaagatcaatgcccccaaggaggatgattatgagacccgcatcacagagagcaaatgtgtgaccatcctgcacaagggcttcagcgcctctgtgaggaccatcctgcagaatgaccacagcctgctggccagctcctgggccagcgctgagctgcacgcccctcctggcagccctggcaccagcatcgtgaacctgacctgcaccaccaacaccacagaggacaactacagccggctgcggagctaccaggtgtccctgcactgcacctggctggtgggcacagatgcccctgaggacacccagtacttcctgtactaccgctatggctcctggacagaggagtgccaggagtacagcaaggacaccctgggcaggaacatcgcctgctggttccccaggaccttcatcctgagcaagggccgggactggctggccgtgctggtgaatggcagcagcaagcacagcgccatccggccctttgaccagctgtttgccctgcacgccatcgaccagatcaacccccccctgaatgtgacagctgagattgagggcacccggctgagcatccagtgggagaagcctgtgtctgccttccccatccactgctttgattatgaggtgaagatccacaacaccagaaatggctacctgcagatcgagaagctgatgaccaatgccttcatcagcatcattgatgacctgagcaaatatgatgtgcaggtgcgggctgctgtgtcctccatgtgccgggaggccggcctgtggagcgagtggagccagcccatctacgtgggcaagtag

SEQ ID NO: 156456 - DNA, 1137 bp, synthetic construct
  misc_feature 1..1137: note = Description of Artificial Sequence: Synthetic coding sequence
  source 1..1137: mol_type = other DNA
atgatcatcgtggcccacgtgctgctgatcctgctgggcgccacagagatcctgcaggccgacctgctgcctgatgagaagatcagcctgctgccccctgtgaacttcaccatcaaggtgacaggcctggcccaggtgctgctgcagtggaagcccaacccagaccaggagcagagaaatgtgaacctggagtaccaggtgaagatcaatgcccccaaggaggatgattatgagacccgcatcacagagagcaaatgtgtgaccatcctgcacaagggcttcagcgcctctgtgaggaccatcctgcagaatgaccacagcctgctggccagctcctgggccagcgctgagctgcacgcccctcctggcagccctggcaccagcatcgtgaacctgacctgcaccaccaacaccacagaggacaactacagccggctgcggagctaccaggtgtccctgcactgcacctggctggtgggcacagatgcccctgaggacacccagtacttcctgtactaccgctatggctcctggacagaggagtgccaggagtacagcaaggacaccctgggcaggaacatcgcctgctggttccccaggaccttcatcctgagcaagggccgggactggctggccgtgctggtgaatggcagcagcaagcacagcgccatccggccctttgaccagctgtttgccctgcacgccatcgaccagatcaacccccccctgaatgtgacagctgagattgagggcacccggctgagcatccagtgggagaagcctgtgtctgccttccccatccactgctttgattatgaggtgaagatccacaacaccagaaatggctacctgcagatcgagaagctgatgaccaatgccttcatcagcatcattgatgacctgagcaaatatgatgtgcaggtgcgggctgctgtgtcctccatgtgccgggaggccggcctgtggagcgagtggagccagcccatctacgtgggcaatgatgagcacaagcccctgcgggagtggtttgtgattgtcatcatggccaccatctgcttcatcctgctgatcctgagcctcatctgcaagatcaagctgggccctgtgcggaggaagctgaagagcagcgtcatctag

SEQ ID NO: 156457 - DNA, 591 bp, synthetic construct
  misc_feature 1..591: note = Description of Artificial Sequence: Synthetic coding sequence
  source 1..591: mol_type = other DNA
atgatcatcgtggcccacgtgctgctgatcctgctgggcgccacagagatcctgcaggccgacctgctgcctgatgagaagatcagcctgctgccccctgtgaacttcaccatcaaggtgacaggcctggcccaggtgctgctgcagtggaagcccaacccagaccaggagcagagaaatgtgaacctggagtaccaggtgaagatcaatgcccccaaggaggatgattatgagacccgcatcacagagagcaaatgtgtgaccatcctgcacaagggcttcagcgcctctgtgaggaccatcctgcagaatgaccacagcctgctggccagctcctgggccagcgctgagctgcacgcccctcctggcagccctggcaccagcatcgtgaacctgacctgcaccaccaacaccacagaggacaactacagccggctgcggagctaccaggtgtccctgcactgcacctggctggtgggcacagatgcccctgaggacacccagtacttcctgtactaccgctatggctcctggacagaggagtgccaggagtacagcaaggacaccctgggcaggaacatcgcctgctag

SEQ ID NO: 156458 - DNA, 636 bp, synthetic construct
  misc_feature 1..636: note = Description of Artificial Sequence: Synthetic coding sequence
  source 1..636: mol_type = other DNA
atgatcatcgtggcccacgtgctgctgatcctgctgggcgccacagagatcctgcaggccgacctgctgcctgatgagaagatcagcctgctgccccctgtgaacttcaccatcaaggtgacaggcctggcccaggtgctgctgcagtggaagcccaacccagaccaggagcagagaaatgtgaacctggagtaccaggtgaagatcaatgcccccaaggaggatgattatgagacccgcatcacagagagcaaatgtgtgaccatcctgcacaagggcttcagcgcctctgtgaggaccatcctgcagaatgaccacagcctgctggccagctcctgggccagcgctgagctgcacgcccctcctggaaatgatgagcacaagcccctgcgggagtggtttgtgattgtcatcatggccaccatctgcttcatcctgctgatcctgagcctcatctgcaagatctgccacctgtggatcaagctgttcccccccatcccagcccccaagagcaacatcaaggacctgtttgtgaccaccaactatgagaaggccggcagcagcgagacagaaattgaggtgatctgctacatcgagaagccaggagtggagaccctggaggacagcgtcttctag

SEQ ID NO: 156459 - DNA, 1263 bp, synthetic construct; identical to SEQ ID NO: 156449
  misc_feature 1..1263: note = Description of Artificial Sequence: Synthetic coding sequence
  source 1..1263: mol_type = other DNA

SEQ ID NO: 156460 - DNA, 1002 bp, synthetic construct; identical to SEQ ID NO: 156455
  misc_feature 1..1002: note = Description of Artificial Sequence: Synthetic coding sequence
  source 1..1002: mol_type = other DNA

SEQ ID NO: 156461 - DNA, 1098 bp, synthetic construct
  misc_feature 1..1098: note = Description of Artificial Sequence: Synthetic coding sequence
  source 1..1098: mol_type = other DNA
atgctggccgtgggctgtgccctgctggccgccctgctggccgcccctggggccgccctggccccccggcgctgcccagcccaggaggtggcccggggcgtgctgaccagcctgcccggggacagcgtgaccctgacctgccctggggtggagccagaagataatgccaccgtgcactgggtgctgaggaagccagctgctggcagccaccccagccgctgggccggcatgggccgccgcctgctgctgcggtctgtgcagctgcatgattctggcaactacagctgctacagagctggccggcctgctggcaccgtgcacctgctggtggatgtgcccccagaggagccccagctgagctgcttcaggaagagccccctgagcaatgtggtgtgtgagtggggccccaggagcacccccagcctgaccaccaaggctgtgctgctggtgaggaagttccagaacagccctgctgaggacttccaggagccctgccagtacagccaggagagccagaagttcagctgccagctggccgtgcctgagggggacagcagcttctacatcgtgtccatgtgtgtggccagctctgtgggcagcaagttcagcaagacccagaccttccagggctgcggcatcctgcagcctgaccccccagccaacatcaccgtgacagctgtggccaggaacccccgctggctgtctgtgacctggcaggacccccacagctggaacagcagcttctaccgcctgcgctttgagctgcgctacagagctgagaggagcaagaccttcaccacctggatggtgaaggacctgcagcaccactgtgtgattcatgatgcctggagcggcctgcggcacgtggtgcagctgcgggcccaggaggagtttggccagggcgagtggagcgagtggagccctgaggccatgggcaccccctggacagagagccgcagccccccagcagaaaatgaggtgtccacccccatgcaggccctgaccaccaacaaggatgatgacaacatcctcttccgggacagcgccaatgccaccagcctgcccggcagcagaagaagaggcagctgtggcctgtag

SEQ ID NO: 156462 - DNA, 1407 bp, synthetic construct
  misc_feature 1..1407: note = Description of Artificial Sequence: Synthetic coding sequence
  source 1..1407: mol_type = other DNA
atgctggccgtgggctgtgccctgctggccgccctgctggccgcccctggggccgccctggccccccggcgctgcccagcccaggaggtggcccggggcgtgctgaccagcctgcccggggacagcgtgaccctgacctgccctggggtggagccagaagataatgccaccgtgcactgggtgctgaggaagccagctgctggcagccaccccagccgctgggccggcatgggccgccgcctgctgctgcggtctgtgcagctgcatgattctggcaactacagctgctacagagctggccggcctgctggcaccgtgcacctgctggtggatgtgcccccagaggagccccagctgagctgcttcaggaagagccccctgagcaatgtggtgtgtgagtggggccccaggagcacccccagcctgaccaccaaggctgtgctgctggtgaggaagttccagaacagccctgctgaggacttccaggagccctgccagtacagccaggagagccagaagttcagctgccagctggccgtgcctgagggggacagcagcttctacatcgtgtccatgtgtgtggccagctctgtgggcagcaagttcagcaagacccagaccttccagggctgcggcatcctgcagcctgaccccccagccaacatcaccgtgacagctgtggccaggaacccccgctggctgtctgtgacctggcaggacccccacagctggaacagcagcttctaccgcctgcgctttgagctgcgctacagagctgagaggagcaagaccttcaccacctggatggtgaaggacctgcagcaccactgtgtgattcatgatgcctggagcggcctgcggcacgtggtgcagctgcgggcccaggaggagtttggccagggcgagtggagcgagtggagccctgaggccatgggcaccccctggacagagagccgcagccccccagcagaaaatgaggtgtccacccccatgcaggccctgaccaccaacaaggatgatgacaacatcctcttccgggacagcgccaatgccaccagcctgcctgtgcaggacagcagctctgtgcccctgcccaccttcctggtggccggcggcagcctggccttcggcaccctgctgtgcatcgccatcgtgctgcgcttcaagaagacctggaagctgcgggccctgaaggagggcaagacctccatgcaccccccctacagcctgggccagctggtgcctgagcggccccggcccacccctgtgctggtgcccctcatcagcccccctgtgagccccagcagcctgggcagtgacaacaccagcagccacaacagaccagatgcccgggaccccaggagcccctatgacatcagcaacacagactacttcttccccaggtag

SEQ ID NO: 156463 - DNA, 2757 bp, synthetic construct
  misc_feature 1..2757: note = Description of Artificial Sequence: Synthetic coding sequence
  source 1..2757: mol_type = other DNA
atgctgaccctgcagacctggctggtgcaggccctcttcatcttcctgaccacagagagcactggagagctgctggacccctgtggctacatcagccctgagagccctgtggtgcagctgcacagcaacttcaccgctgtgtgtgtgctgaaggagaagtgcatggactacttccacgtgaatgccaactacatcgtgtggaagaccaaccacttcaccatccccaaggagcagtacaccatcatcaacagaacagccagctctgtgaccttcacagacatcgccagcctgaacatccagctgacctgcaacatcctgaccttcggccagctggagcagaatgtgtatggcatcaccatcatcagcggcctgcccccagagaagcccaagaacctgagctgcatcgtgaatgaaggcaagaagatgagatgtgagtgggatggcggccgggagacccacctggagaccaacttcaccctgaagtctgagtgggccacccacaagtttgctgactgcaaggccaagagggacacccccaccagctgcaccgtggactacagcacagtgtactttgtgaacatcgaggtgtgggtggaggctgaaaatgccctgggcaaggtgaccagtgaccacatcaactttgatcctgtgtacaaggtgaagcccaaccccccccacaacctgagcgtcatcaacagcgaggagctgagcagcatcctgaagctgacctggaccaaccccagcatcaagagcgtcatcatcctgaagtacaacatccagtaccgcaccaaggatgccagcacctggagccagatccccccagaggacacagccagcaccaggagcagcttcaccgtgcaggacctgaagcccttcacagaatatgtgttccgcatccgctgcatgaaggaggatggcaagggctactggagcgactggagcgaggaggccagcggcatcacctatgaagatcggcccagcaaggcccccagcttctggtacaagattgaccccagccacacccagggctacagaacagtgcagctggtgtggaagaccctgcccccatttgaggccaacgggaagatcctggactatgaggtgaccctgacccgctggaagagccacctgcagaactacacagtgaatgccaccaagctgactgtgaacctgaccaatgaccgctacctggccaccctgactgtgaggaacctggtgggcaagagtgatgctgctgtgctgaccatcccagcctgtgacttccaggccacccaccctgtgatggacctgaaggccttccccaaggacaacatgctgtgggtggagtggaccaccccccgggagagcgtgaagaagtacatcctggagtggtgtgtgctgagtgacaaggccccctgcatcacagactggcagcaggaggatggcaccgtgcacaggacctacctgcggggcaacctggccgagagcaagtgctacctgatcaccgtgacccctgtgtatgcagatggccctggcagccctgagagcatcaaggcctacctgaagcaggccccacccagcaagggccccaccgtgaggaccaagaaggtgggcaagaatgaagctgtgctggagtgggaccagctgcctgtggatgtgcagaatggcttcatccggaactacaccatcttctaccgcaccatcattggaaatgaaacagctgtgaatgtggacagcagccacacagagtacaccctgagcagcctgaccagtgacaccctgtacatggtgaggatggccgcctacacagatgaaggaggcaaggatggccctgagttcaccttcaccacccccaagtttgcccagggcgagattgaggccatcgtggtgcctgtgtgcctggccttcctgctgaccaccctgctgggcgtgctcttctgcttcaacaagagggacctgatcaagaagcacatctggcccaacgtgcctgaccccagcaagagccacatcgcccagtggagcccccacaccccacccaggcacaacttcaacagcaaggaccagatgtacagtgatggcaacttcacagatgtgtctgtggtggagattgaggccaatgacaagaagcccttccctgaggacctgaagagcctggacctcttcaagaaggagaagatcaacacagagggccacagcagcggcatcggcggcagcagctgcatgagcagcagccggcccagcatcagcagcagtgatgaaaatgaaagcagccagaacaccagcagcacagtgcagtacagcacagtggtgcacagcggctaccgccaccaggtgcccagcgtgcaggtgttcagccgctctgagagcacccagcccctgctggacagcgaggagaggcctgaggacctgcagctggtggaccacgtggatggaggagatggcatcctgccccggcagcagtacttcaagcagaactgcagccagcacgagagcagcccagacatcagccactttgagaggagcaagcaggtgtcctctgtgaatgaagaagattttgtgcggctgaagcagcagatcagtgaccacatcagccagagctgtggcagcggccagatgaagatgttccaggaggtgtctgctgctgatgcctttggacctggaacagagggccaggtggagagatttgagaccgtgggcatggaggccgccacagatgagggcatgcccaagagctacctgccccagacagtgcggcagggcggctacatgccccagtag

SEQ ID NO: 156464 - DNA, 990 bp, synthetic construct
  misc_feature 1..990: note = Description of Artificial Sequence: Synthetic coding sequence
  source 1..990: mol_type = other DNA
atgctgaccctgcagacctggctggtgcaggccctcttcatcttcctgaccacagagagcactggagagctgctggacccctgtggctacatcagccctgagagccctgtggtgcagctgcacagcaacttcaccgctgtgtgtgtgctgaaggagaagtgcatggactacttccacgtgaatgccaactacatcgtgtggaagaccaaccacttcaccatccccaaggagcagtacaccatcatcaacagaacagccagctctgtgaccttcacagacatcgccagcctgaacatccagctgacctgcaacatcctgaccttcggccagctggagcagaatgtgtatggcatcaccatcatcagcggcctgcccccagagaagcccaagaacctgagctgcatcgtgaatgaaggcaagaagatgagatgtgagtgggatggcggccgggagacccacctggagaccaacttcaccctgaagtctgagtgggccacccacaagtttgctgactgcaaggccaagagggacacccccaccagctgcaccgtggactacagcacagtgtactttgtgaacatcgaggtgtgggtggaggctgaaaatgccctgggcaaggtgaccagtgaccacatcaactttgatcctgtgtacaaggtgaagcccaaccccccccacaacctgagcgtcatcaacagcgaggagctgagcagcatcctgaagctgacctggaccaaccccagcatcaagagcgtcatcatcctgaagtacaacatccagtaccgcaccaaggatgccagcacctggagccagatccccccagaggacacagccagcaccaggagcagcttcaccgtgcaggacctgaagcccttcacagaatatgtgttccgcatccgctgcatgaaggaggatggcaagggctactggagcgactggagcgaggaggccagcggcatcacctatgaggacaacatcgccagcttctag

SEQ ID NO: 156465 - DNA, 2574 bp, synthetic construct
  misc_feature 1..2574: note = Description of Artificial Sequence: Synthetic coding sequence
  source 1..2574: mol_type = other DNA
atgctgaccctgcagacctggctggtgcaggccctcttcatcttcctgaccacagagagcactggagagctgctggacccctgtggctacatcagccctgagagccctgtggtgcagctgcacagcaacttcaccgctgtgtgtgtgctgaaggagaagtgcatggactacttccacgtgaatgccaactacatcgtgtggaagaccaaccacttcaccatccccaaggagcagtacaccatcatcaacagaacagccagctctgtgaccttcacagacatcgccagcctgaacatccagctgacctgcaacatcctgaccttcggccagctggagcagaatgtgtatggcatcaccatcatcagcggcctgcccccagagaagcccaagaacctgagctgcatcgtgaatgaaggcaagaagatgagatgtgagtgggatggcggccgggagacccacctggagaccaacttcaccctgaagtctgagtgggccacccacaagtttgctgactgcaaggccaagagggacacccccaccagctgcaccgtggactacagcacagtgtactttgtgaacatcgaggtgtgggtggaggctgaaaatgccctgggcaaggtgaccagtgaccacatcaactttgatcctgtgtacaaggtgaagcccaaccccccccacaacctgagcgtcatcaacagcgaggagctgagcagcatcctgaagctgacctggaccaaccccagcatcaagagcgtcatcatcctgaagtacaacatccagtaccgcaccaaggatgccagcacctggagccagatccccccagaggacacagccagcaccaggagcagcttcaccgtgcaggacctgaagcccttcacagaatatgtgttccgcatccgctgcatgaaggaggatggcaagggctactggagcgactggagcgaggaggccagcggcatcacctatgaagatcggcccagcaaggcccccagcttctggtacaagattgaccccagccacacccagggctacagaacagtgcagctggtgtggaagaccctgcccccatttgaggccaacgggaagatcctggactatgaggtgaccctgacccgctggaagagccacctgcagaactacacagtgaatgccaccaagctgactgtgaacctgaccaatgaccgctacctggccaccctgactgtgaggaacctggtgggcaagagtgatgctgctgtgctgaccatcccagcctgtgacttccagggcaacctggccgagagcaagtgctacctgatcaccgtgacccctgtgtatgcagatggccctggcagccctgagagcatcaaggcctacctgaagcaggccccacccagcaagggccccaccgtgaggaccaagaaggtgggcaagaatgaggccgtgctggagtgggaccagctgcctgtggatgtgcagaatggcttcatccggaactacaccatcttctaccgcaccatcattggaaatgaaacagctgtgaatgtggacagcagccacacagagtacaccctgagcagcctgaccagtgacaccctgtacatggtgaggatggccgcctacacagatgagggcggcaaggatggccctgagttcaccttcaccacccccaagtttgcccagggcgagattgaggccatcgtggtgcctgtgtgcctggccttcctgctgaccaccctgctgggcgtgctcttctgcttcaacaagagggacctgatcaagaagcacatctggcccaacgtgcctgaccccagcaagagccacatcgcccagtggagcccccacaccccacccaggcacaacttcaacagcaaggaccagatgtacagtgatggcaacttcacagatgtgtctgtggtggagattgaggccaatgacaagaagcccttccctgaggacctgaagagcctggacctcttcaagaaggagaagatcaacacagagggccacagcagcggcattggaggcagcagctgcatgagcagcagccggcccagcatcagcagcagtgatgaaaatgaaagcagccagaacaccagcagcacagtgcagtacagcacagtggtgcacagcggctaccgccaccaggtgcccagcgtgcaggtgttcagccgctctgagagcacccagcccctgctggacagcgaggagaggcctgaggacctgcagctggtggaccacgtggatggaggagatggcatcctgccccggcagcagtacttcaagcagaactgcagccagcacgagagcagcccagacatcagccactttgagaggagcaagcaggtgtcctctgtgaatgaggaggactttgtgcggctgaagcagcagatcagtgaccacatcagccagagctgtggcagcggccagatgaagatgttccaggaggtgtctgctgctgatgccttcggccctggaacagagggccaggtggagagatttgaaacagtgggcatggaggccgccacagatgagggcatgcccaagagctacctgccccagacagtgcggcagggcggctacatgccccagtag

SEQ ID NO: 156466 - DNA, 2757 bp, synthetic construct; identical to SEQ ID NO: 156463
  misc_feature 1..2757: note = Description of Artificial Sequence: Synthetic coding sequence
  source 1..2757: mol_type = other DNA

SEQ ID NO: 156467 - DNA, 990 bp, synthetic construct; identical to SEQ ID NO: 156464
  misc_feature 1..990: note = Description of Artificial Sequence: Synthetic coding sequence
  source 1..990: mol_type = other DNA

SEQ ID NO: 156468 - DNA, 990 bp, synthetic construct; identical to SEQ ID NO: 156464
  misc_feature 1..990: note = Description of Artificial Sequence: Synthetic coding sequence
  source 1..990: mol_type = other DNA

SEQ ID NO: 156469 - DNA, 990 bp, synthetic construct
  misc_feature 1..990: note = Description of Artificial Sequence: Synthetic coding sequence
  source 1..990: mol_type = other DNA
atgctgaccctgcagacctggctggtgcaggccctcttcatcttcctgaccacagagagcactggagagctgctggacccctgtggctacatcagccctgagagccctgtggtgcagctgcacagcaacttcaccgctgtgtgtgtgctgaaggagaagtgcatggactacttccacgtgaatgccaactacatcgtgtggaagaccaaccacttcaccatccccaaggagcagtacaccatcatcaacagaacagccagctctgtgaccttcacagacatcgccagcctgaacatccagctgacctgcaacatcctgaccttcggccagctggagcagaatgtgtatggcatcaccatcatcagcggcctgcccccagagaagcccaagaacctgagctgcatcgtgaatgaaggcaagaagatgagatgtgagtgggatggcggccgggagacccacctggagaccaacttcaccctgaagtctgagtgggccacccacaagtttgctgactgcaaggccaagagggacacccccaccagctgcaccgtggactacagcacagtgtactttgtgaacatcgaggtgtgggtggaggctgaaaatgccctgggcaaggtgaccagtgaccacatcaactttgatcctgtgtacaaggtgaagcccaaccccccccacaacctgagcgtcatcaacagcgaggagctgagcagcatcctgaagctgacctggaccaaccccagcatcaagagcgtcatcatcctgaagtacaacatccagtaccgcaccaaggatgccagcacctggagccagatccccccagaggacacagccagcaccaggagcagcttcaccgtgcaggacctgaagcccttcacagaatatgtgttccgcatccgctgcatgaaggaggatggcaagggctactggagcgactggagcgaggaggccagcggcatcacctatgaggacaccatcttctccttctag

SEQ ID NO: 156470 - DNA, 1380 bp, synthetic construct
  misc_feature 1..1380: note = Description of Artificial Sequence: Synthetic coding sequence
  source 1..1380: mol_type = other DNA
atgaccatcctgggcaccaccttcggcatggtgttcagcctgctgcaggtggtgtctggagagagcggctacgcccagaatggagacctggaggatgctgagctggatgactacagcttcagctgctacagccagctggaggtgaatggcagccagcacagcctgacctgtgcctttgaggaccctgatgtgaacatcaccaacctggagtttgagatctgtggggccctggtggaggtgaagtgcctgaacttcaggaagctgcaggagatctacttcatcgagaccaagaagttcctgctgattggcaagagcaacatctgtgtgaaggtgggggagaagagcctgacctgcaagaagattgacctgaccaccatcgtgaagccagaggccccctttgacctgtctgtggtgtaccgggagggcgccaatgactttgtggtgaccttcaacaccagccacctgcagaagaagtatgtgaaggtgctgatgcatgatgtggcctaccggcaggagaaggatgagaacaagtggacccacgtgaacctgagcagcaccaagctgaccctgctgcagaggaagctgcagcctgctgccatgtatgagatcaaggtgcgcagcatcccagaccactacttcaagggcttctggagcgagtggagccccagctactacttccgcaccccagagatcaacaacagcagtggagagatggaccccatcctgctgaccatcagcatcctgtccttcttctctgtggccctgctggtgatcctggcctgtgtgctgtggaagaagaggatcaagcccatcgtgtggcccagcctgcctgaccacaagaagaccctggagcacctgtgcaagaagcccaggaagaacctgaatgtgtccttcaaccctgagagcttcctggactgccagatccaccgggtggatgacatccaggccagagatgaggtggagggcttcctgcaggacaccttcccccagcagctggaggagagcgagaagcagaggctgggcggagatgtgcagagccccaactgccccagtgaagatgtggtgatcaccccagagagctttggccgggacagcagcctgacctgcctggccggaaatgtgtctgcctgtgatgcccccatcctgagcagcagccgcagcctggactgccgggagagcggcaagaatggcccccacgtgtaccaggacctgctgctgagcctgggcaccaccaacagcaccctgcccccacccttcagcctgcagagcggcatcctgaccctgaaccctgtggcccagggccagcccatcctgaccagcctgggcagcaaccaggaggaggcctacgtgaccatgagcagcttctaccagaaccagtag

SEQ ID NO: 156471 - DNA, 789 bp, synthetic construct
  misc_feature 1..789: note = Description of Artificial Sequence: Synthetic coding sequence
  source 1..789: mol_type = other DNA
atgaccatcctgggcaccaccttcggcatggtgttcagcctgctgcaggtggtgtctggagagagcggctacgcccagaatggagacctggaggatgctgagctggatgactacagcttcagctgctacagccagctggaggtgaatggcagccagcacagcctgacctgtgcctttgaggaccctgatgtgaacatcaccaacctggagtttgagatctgtggggccctggtggaggtgaagtgcctgaacttcaggaagctgcaggagatctacttcatcgagaccaagaagttcctgctgattggcaagagcaacatctgtgtgaaggtgggggagaagagcctgacctgcaagaagattgacctgaccaccatcgtgaagccagaggccccctttgacctgtctgtggtgtaccgggagggcgccaatgactttgtggtgaccttcaacaccagccacctgcagaagaagtatgtgaaggtgctgatgcatgatgtggcctaccggcaggagaaggatgagaacaagtggacccacgtgaacctgagcagcaccaagctgaccctgctgcagaggaagctgcagcctgctgccatgtatgagatcaaggtgcgcagcatcccagaccactacttcaagggcttctggagcgagtggagccccagctactacttccgcaccccagagatcaacaacagcagcggcctgagcctgtcctatggccctgtgagccccatcatccggcggctgtggaacatctttgtgaggaaccaggagaagatctag

SEQ ID NO: 156472 - DNA, 786 bp, synthetic construct
  misc_feature 1..786: note = Description of Artificial Sequence: Synthetic coding sequence
  source 1..786: mol_type = other DNA
atgaccatcctgggcaccaccttcggcatggtgttcagcctgctgcaggtggtgtctggagagagcggctacgcccagaatggagacctggaggatgctgagctggatgactacagcttcagctgctacagccagctggaggtgaatggcagccagcacagcctgacctgtgcctttgaggaccctgatgtgaacatcaccaacctggagtttgagatctgtggggccctggtggaggtgaagtgcctgaacttcaggaagctgcaggagatctacttcatcgagaccaagaagttcctgctgattggcaagagcaacatctgtgtgaaggtgggggagaagagcctgacctgcaagaagattgacctgaccaccatcgtgaagccagaggccccctttgacctgtctgtggtgtaccgggagggcgccaatgactttgtggtgaccttcaacaccagccacctgcagaagaagtatgtgaaggtgctgatgcatgatgtggcctaccggcaggagaaggatgagaacaagtggacccacgtgaacctgagcagcaccaagctgaccctgctgcagaggaagctgcagcctgctgccatgtatgagatcaaggtgcgcagcatcccagaccactacttcaagggcttctggagcgagtggagccccagctactacttccgcaccccagagatcaacaacagcagcggcctgagcctgtcctatggccctgtgagccccatcatccggcggctgtggaacatctttgtgaggaaccaggagaagtag

SEQ ID NO: 156473 - DNA, 180 bp, synthetic construct
  misc_feature 1..180: note = Description of Artificial Sequence: Synthetic coding sequence
  source 1..180: mol_type = other DNA
atgaccatcctgggcaccaccttcggcatggtgttcagcctgctgcaggtggtgtctggagagagcggctacgcccagaatggagacctggaggatgctgagctggatgactacagcttcagctgctacagccagctggaggtgaatggcagccagcacagcctgacctgtgccttctag

SEQ ID NO: 156474 - DNA, 159 bp, synthetic construct
  misc_feature 1..159: note = Description of Artificial Sequence: Synthetic coding sequence
  source 1..159: mol_type = other DNA
atgaccatcctgggcaccaccttcggcatggtgttcagcctgctgcaggtggtgtctggagagagcggctacgcccagaatggagacctggaggatgctgagctggatgactacagcttcagctgctacagccagctggaggtgaatggcagccagtag

SEQ ID NO: 156475 - DNA, 1566 bp, synthetic construct
  misc_feature 1..1566: note = Description of Artificial Sequence: Synthetic coding sequence
  source 1..1566: mol_type = other DNA
atgggcctgggccgctgcatctgggagggctggaccctggagagcgaggccctgcggcgggacatgggcacctggctgctggcctgcatctgcatctgcacctgtgtgtgcctgggcgtgtctgtgactggagagggccagggccccaggagcaggaccttcacctgcctgaccaacaacatcctgagaattgactgccactggagcgcccctgagctgggccagggcagcagcccctggctgctcttcaccagcaaccaggcccctgggggcacccacaagtgcatcctgcggggctctgaatgtactgtggtgctgcccccagaggccgtgctggtgcccagcgacaacttcaccatcaccttccaccactgcatgagcggccgggagcaggtgtccctggtggaccctgagtacctgccccggcggcacgtgaagctggaccccccaagtgacctgcagagcaacatcagcagcggccactgcatcctgacctggagcatcagccctgccctggagcccatgaccaccctgctgtcctatgagctggccttcaagaagcaggaggaggcctgggagcaggcccagcaccgggaccacatcgtgggcgtgacctggctgatcctggaggcctttgagctggaccccggcttcatccacgaggcccggctgcgggtgcagatggccaccctggaggatgatgtggtggaggaggagcgctacacaggccagtggagcgagtggagccagcctgtgtgcttccaggccccccagaggcagggccccctcatccccccctggggctggccaggcaacaccctggtggccgtgtccatcttcctgctgctgaccggccccacctacctgctcttcaagctgagcccccgggtgaagaggatcttctaccagaatgtgcccagccctgccatgttcttccagcccctgtacagcgtgcacaacggcaacttccagacctggatgggcgcccacggggccggcgtgctgctgagccaggactgtgccggcaccccccagggcgccctggagccctgtgtgcaggaggccacagccctgctgacctgtggccctgcccggccctggaagtctgtggccctggaggaggagcaggagggccctggcacccggctgcccggcaacctgagcagtgaagatgtgctgcctgctggctgcacagagtggagggtgcagaccctggcctacctgccccaggaggactgggcccccaccagcctgaccaggcctgcccccccagacagcgagggcagccgcagcagcagcagcagcagcagcagcaacaacaacaactactgtgccctgggctgctatggaggctggcacctgagcgccctgcccggcaacacccagagcagcggccccatcccagccctggcctgtggcctgagctgtgaccaccagggcctggagacccagcagggcgtggcctgggtgctggccggccactgccagaggcctggcctgcacgaggacctgcagggcatgctgctgcccagcgtgctgagcaaggcccgctcctggaccttctag

SEQ ID NO: 156476 - DNA, 1029 bp, synthetic construct
  misc_feature 1..1029: note = Description of Artificial Sequence: Synthetic coding sequence
  source 1..1029: mol_type = other DNA
atgccccagacctgtgatggcaccggccagatgcacctgggcagcaactgctgcaagaatggccagaccctgctgcagaggacctgccacggcgtgtcctgctgcggctggtggttccaggccgcccggagcatcctgggcaagggccccagcgcccagagcctggccggctggaccctggagagcgaggccctgcggcgggacatgggcacctggctgctggcctgcatctgcatctgcacctgtgtgtgcctgggcgtgtctgtgactggagagggccagggccccaggagcaggaccttcacctgcctgaccaacaacatcctgagaattgactgccactggagcgcccctgagctgggccagggcagcagcccctggctgctcttcacccggctgctggccgcccacatcagcgccagctgtggggctgtgtctgcccccagctgctgccacctgcggcagtgcagctgccacctgaccatcagccccagcctgagcaccacagcctgcctgggcggcagccgcagcgcctggtggaccaggagcacctgccctggggacaccagcaacatcagcagcggccactgcatcctgacctggagcatcagccctgccctggagcccatgaccaccctgctgtcctatgagctggccttcaagaagcaggaggaggcctgggagcaggcccagcaccgggaccacatcgtgggcgtgacctggctgatcctggaggcctttgagctggaccccggcttcatccacgaggcccggctgcgggtgcagatggccaccctggaggatgatgtggtggaggaggagcgctacacaggccagtggagcgagtggagccagcctgtgtgcttccaggccccccagaggcagggccccctcatccccccctggggctggccaggcaacaccctggtggccgtgtccatcttcctgctgctgaccggccccacctacctgctcttcaagctgagcccccggctgggctggggccccactggacctgtgtgctgctag

SEQ ID NO: 156477 - DNA, 1503 bp, synthetic construct
  misc_feature 1..1503: note = Description of Artificial Sequence: Synthetic coding sequence
  source 1..1503: mol_type = other DNA
atgggcacctggctgctggcctgcatctgcatctgcacctgtgtgtgcctgggcgtgtctgtgactggagagggccagggccccaggagcaggaccttcacctgcctgaccaacaacatcctgagaattgactgccactggagcgcccctgagctgggccagggcagcagcccctggctgctcttcaccagcaaccaggcccctgggggcacccacaagtgcatcctgcggggcagcgagtgcaccgtggtgctgcccccagaggccgtgctggtgcccagcgacaacttcaccatcaccttccaccactgcatgagcggccgggagcaggtgtccctggtggaccctgagtacctgcccaggagacatgtgaagctggacccccccagcgacctgcagagcaacatcagcagcggccactgcatcctgacctggagcatcagccctgccctggagcccatgaccaccctgctgtcctatgagctggccttcaagaagcaggaggaggcctgggagcaggcccagcaccgggaccacatcgtgggcgtgacctggctgatcctggaggcctttgagctggaccccggcttcatccacgaggcccggctgcgggtgcagatggccaccctggaggatgatgtggtggaggaggagcgctacacaggccagtggagcgagtggagccagcctgtgtgcttccaggccccccagaggcagggccccctcatccccccctggggctggccaggcaacaccctggtggccgtgtccatcttcctgctgctgaccggccccacctacctgctcttcaagctgagcccccgggtgaagaggatcttctaccagaatgtgcccagccctgccatgttcttccagcccctgtacagcgtgcacaatggaaacttccagacctggatgggcgcccatggagctggggtgctgctgagccaggactgtgccggcaccccccagggcgccctggagccctgtgtgcaggaggccacagccctgctgacctgtggccctgcccggccctggaagtctgtggccctggaggaggagcaggagggccctggcacccggctgcccggcaacctgagcagtgaagatgtgctgcctgctggctgcacagagtggagggtgcagaccctggcctacctgccccaggaggactgggcccccaccagcctgaccaggcctgcccccccagattctgagggcagccgcagcagcagcagcagcagcagcagcaacaacaacaactactgtgccctgggctgctacggcggctggcacctgagcgccctgcccggcaacacccagagcagcggccccatcccagccctggcctgtggcctgagctgtgaccaccagggcctggagacccagcagggcgtggcctgggtgctggccggccactgccagaggcctggcctgcacgaggacctgcagggcatgctgctgcccagcgtgctgagcaaggcccgctcctggaccttctag

SEQ ID NO: 156478 - DNA, 990 bp, synthetic construct
  misc_feature 1..990: note = Description of Artificial Sequence: Synthetic coding sequence
  source 1..990: mol_type = other DNA
atgggcacctggctgctggcctgcatctgcatctgcacctgtgtgtgcctgggcgtgtctgtgactggagagggccagggccccaggagcaggaccttcacctgcctgaccaacaacatcctgagaattgactgccactggagcgcccctgagctgggccagggcagcagcccctggctgctcttcaccagcaaccaggcccctgggggcacccacaagtgcatcctgcggggcagcgagtgcaccgtggtgctgcccccagaggccgtgctggtgcccagcgacaacttcaccatcaccttccaccactgcatgagcggccgggagcaggtgtccctggtggaccctgagtacctgcccaggagacatgtgaagctggacccccccagcgacctgcagagcaacatcagcagcggccactgcatcctgacctggagcatcagccctgccctggagcccatgaccaccctgctgtcctatgagctggccttcaagaagcaggaggaggcctgggagcaggcccagcaccgggaccacatcgtgggcgtgacctggctgatcctggaggcctttgagctggaccccggcttcatccacgaggcccggctgcgggtgcagatggccaccctggaggatgatgtggtggaggaggagcgctacacaggccagtggagcgagtggagccagcctgtgtgcttccaggccccccagaggcagggccccctcatccccccctggggctggccaggcaacaccctggtggccgtgtccatcttcctgctgctgaccggccccacctacctgctcttcaagctgagcccccgggtgaagaggatcttctaccagaatgtgcccagccctgccatgttcttccagcccctgtacagcgtgcacaatggaaacttccaggtgtgtgccgagaccacagagggccacggcggccagggcctgccccgggccctggcctgcccccgctgctggctgtcctag

SEQ ID NO: 156479 - DNA, 999 bp, synthetic construct
  misc_feature 1..999: note = Description of Artificial Sequence: Synthetic coding sequence
  source 1..999: mol_type = other DNA
atgcacctgggcagcaactgctgcaagaatggccagaccctgctgcagaggacctgccacggcgtgtcctgctgcggctggtggttccaggccgcccggagcatcctgggcaagggccccagcgcccagagcctggccggctggaccctggagagcgaggccctgcggcgggacatgggcacctggctgctggcctgcatctgcatctgcacctgtgtgtgcctgggcgtgtctgtgactggagagggccagggccccaggagcaggaccttcacctgcctgaccaacaacatcctgagaattgactgccactggagcgcccctgagctgggccagggcagcagcccctggctgctcttcacccggctgctggccgcccacatcagcgccagctgtggggctgtgtctgcccccagctgctgccacctgcggcagtgcagctgccacctgaccatcagccccagcctgagcaccacagcctgcctgggcggcagccgcagcgcctggtggaccaggagcacctgccctggggacaccagcaacatcagcagcggccactgcatcctgacctggagcatcagccctgccctggagcccatgaccaccctgctgtcctatgagctggccttcaagaagcaggaggaggcctgggagcaggcccagcaccgggaccacatcgtgggcgtgacctggctgatcctggaggcctttgagctggaccccggcttcatccacgaggcccggctgcgggtgcagatggccaccctggaggatgatgtggtggaggaggagcgctacacaggccagtggagcgagtggagccagcctgtgtgcttccaggccccccagaggcagggccccctcatccccccctggggctggccaggcaacaccctggtggccgtgtccatcttcctgctgctgaccggccccacctacctgctcttcaagctgagcccccggctgggctggggccccactggacctgtgtgctgctag

SEQ ID NO: 156480 - DNA, 1878 bp, synthetic construct
  misc_feature 1..1878: note = Description of Artificial Sequence: Synthetic coding sequence
  source 1..1878: mol_type = other DNA
atggcctgctacatctaccagctgcccagctgggtgctggatgacctgtgcaggaacatggatgccctgtctgagtgggactggatggagtttgccagctatgtgatcacagacctgacccagctgaggaagatcaagtccatggagcgggtgcagggcgtgtccatcacccgggagctgctgtggtggtggggcatgaggcaggccaccgtgcagcagctggtggacctgctgtgccgcctggagctgtaccgggccgcccagatcatcctgaactggaagccagcccctgagatccgctgccccatcccagccttcccagattctgtgaagccagagaagcccctggccgcctctgtgaggaaggccgaggatgagcaggaggagggccagcctgtgaggatggccaccttccctggccctggcagcagccctgcccgggcccaccagcctgccttcctgcagcccccagaagaagatgccccccacagcctgcggagtgacctgcccaccagcagtgacagcaaggacttcagcaccagcatccccaagcaggagaagctgctgagcctggccggggacagcctcttctggagcgaggctgatgtggtgcaggccacagatgacttcaaccagaacaggaagatcagccagggcacctttgctgatgtgtaccggggccaccgccacggcaagccctttgtgttcaagaagctgcgggagacagcctgcagcagccctggcagcattgagcgcttcttccaggccgagctgcagatctgcctgcgctgctgccaccccaacgtgctgcctgtgctgggcttctgtgccgcccggcagttccacagcttcatctacccctacatggccaacggcagcctgcaggaccggctgcagggccagggcggcagtgaccccctgccctggccccagagggtgtccatctgcagcggcctgctgtgtgctgtggagtacctgcacggcctggagatcatccacagcaatgtgaagagcagcaatgtgctgctggaccagaacctgacccccaagctggcccaccccatggcccacctgtgccctgtgaacaagaggagcaagtacaccatgatgaagacccacctgctgcggaccagcgctgcctacctgcctgaggacttcatccgggtgggccagctgaccaagagggtggacatcttcagctgtggcatcgtgctggccgaggtgctgaccggcatcccagccatggacaacaacagaagccctgtgtacctgaaggacctgctgctgagtgacatccccagcagcacagccagcctgtgcagcaggaagacaggagtggagaatgtgatggccaaggagatctgccagaagtacctggagaagggagctggccgcctgcctgaggactgtgccgaggccctggccacagctgcctgcctgtgcctgcggcggaggaacaccagcctgcaggaggtgtgtggctctgtggccgctgtggaggagcggctgcggggccgggagaccctgctgccctggagcggcctgtctgagggcaccggcagcagcagcaacaccccagaggagacagatgatgtggacaacagcagcctggatgccagcagctccatgtctgtggccccctgggccggggccgccacccccctgctgcccacagaaaatggagagggccgcctgcgggtcatcgtgggccgggaggccgacagcagcagcgaggcctgtgtgggcctggagcccccccaggatgtgacagagacctcctggcagatcgagatcaatgaggccaagaggaagctgatggagaacatcctgctgtacaaggaggagaaggtggacagcattgagctgtttggcccctag

SEQ ID NO: 156481 - DNA, 1791 bp, synthetic construct
  misc_feature 1..1791: note = Description of Artificial Sequence: Synthetic coding sequence
  source 1..1791: mol_type = other DNA
atggccggcaactgtggggcccggggggccctgagcgcccacaccctgctgtttgacctgcccccagccctgctgggggagctgtgtgctgtgctggacagctgtgatggagccctgggctggaggggcctggccgagcggctgagcagctcctggctggatgtgcgccacatcgagaagtatgtggaccagggcaagagcggcacccgggagctgctgtggagctgggcccagaagaacaagaccatcggggacctgctgcaggtgctgcaggagatgggccaccggcgggccatccacctgatcaccaactatggagctgtgctgagccccagcgagaagagctaccaggagggcggcttccccaacatcctcttcaaggagacagccaacgtgacagtggacaacgtgctgatccctgagcacaatgagaagggcatcctgctgaagagcagcatctccttccagaacatcatcgagggcaccaggaacttccacaaggacttcctgattggagagggggagatctttgaggtgtacagagtggagatccagaacctgacctatgctgtgaagctgttcaagcaggagaagaagatgcagtgcaagaagcactggaagcgcttcctgtctgagctggaggtgctgctgctcttccaccaccccaacatcctggagctggccgcctacttcacagaaacagagaagttctgcctgatctacccctacatgagaaatggcaccctgtttgaccggctgcagtgtgtgggggacacagcccccctgccctggcacatccgcatcggcatcctgattggcatcagcaaggccatccactacctgcacaacgtgcagccctgcagcgtcatctgtggcagcatcagcagcgccaacatcctgctggatgaccagttccagcccaagctgacagactttgccatggcccacttccgcagccacctggagcaccagagctgcaccatcaacatgaccagcagcagcagcaagcacctgtggtacatgcctgaggagtacatccggcagggcaagctgagcatcaagacagatgtgtacagctttggcatcgtcatcatggaggtgctgaccggctgccgggtggtgctggatgaccccaagcacatccagctgcgggacctgctgcgggagctgatggagaagaggggcctggacagctgcctgtccttcctggacaagaaggtgcccccctgccccaggaacttcagcgccaagctgttctgcctggccggccgctgtgccgccacccgggccaagctgcggcccagcatggatgaggtgctgaacaccctggagagcacccaggccagcctgtactttgctgaggacccccccaccagcctgaagagcttccgctgccccagccccctcttcctggagaatgtgcccagcatccctgtggaggatgatgagagccagaacaacaacctgctgcccagtgatgagggcctgagaattgacaggatgacccagaagaccccatttgagtgcagccagagcgaggtgatgttcctgagcctggacaagaagccagagagcaagagaaatgaggaggcctgcaacatgcccagcagcagctgtgaggagagctggttccccaagtacatcgtgcccagccaggacctgcggccctacaaggtgaacatcgaccccagcagcgaggcccctggccacagctgccgcagcaggcctgtggagagcagctgcagcagcaagttctcctgggatgaatatgagcagtacaagaaggagtag

SEQ ID NO: 156482 - DNA, 1608 bp, synthetic construct
  misc_feature 1..1608: note = Description of Artificial Sequence: Synthetic coding sequence
  source 1..1608: mol_type = other DNA
atggccggcaactgtggggcccggggggccctgagcgcccacaccctgctgtttgacctgcccccagccctgctgggggagctgtgtgctgtgctggacagctgtgatggagccctgggctggaggggcctgggcgctgtgctgagccccagcgagaagagctaccaggagggcggcttccccaacatcctcttcaaggagacagccaacgtgacagtggacaacgtgctgatccctgagcacaatgagaagggcatcctgctgaagagcagcatctccttccagaacatcatcgagggcaccaggaacttccacaaggacttcctgattggagagggggagatctttgaggtgtacagagtggagatccagaacctgacctatgctgtgaagctgttcaagcaggagaagaagatgcagtgcaagaagcactggaagcgcttcctgtctgagctggaggtgctgctgctcttccaccaccccaacatcctggagctggccgcctacttcacagaaacagagaagttctgcctgatctacccctacatgagaaatggcaccctgtttgaccggctgcagtgtgtgggggacacagcccccctgccctggcacatcagaattggcatcctgattggcatcagcaaggccatccactacctgcacaacgtgcagccctgcagcgtcatctgtggcagcatcagcagcgccaacatcctgctggatgaccagttccagcccaagctgacagactttgccatggcccacttccgcagccacctggagcaccagagctgcaccatcaacatgaccagcagcagcagcaagcacctgtggtacatgcctgaggagtacatccggcagggcaagctgagcatcaagacagatgtgtacagctttggaattgtcatcatggaggtgctgaccggctgccgggtggtgctggatgaccccaagcacatccagctgcgggacctgctgcgggagctgatggagaagaggggcctggacagctgcctgtccttcctggacaagaaggtgcccccctgccccaggaacttcagcgccaagctgttctgcctggccggccgctgtgccgccacccgggccaagctgcggcccagcatggatgaggtgctgaacaccctggagagcacccaggccagcctgtactttgctgaagatcctcccaccagcctgaagagcttccgctgccccagccccctcttcctggagaatgtgcccagcatccctgtggaggatgatgagagccagaacaacaacctgctgcccagtgatgagggcctgagaattgacaggatgacccagaagaccccatttgaatgttcccagagcgaggtgatgttcctgagcctggacaagaagccagagagcaagagaaatgaggaggcctgcaacatgcccagcagcagctgtgaggagagctggttccccaagtacatcgtgcccagccaggacctgcggccctacaaggtgaacatcgaccccagcagcgaggcccctggccacagctgccgcagcaggcctgtggagagcagctgcagcagcaagttctcctgggatgaatatgagcagtacaagaaggagtag

SEQ ID NO: 156483 - DNA, 657 bp, synthetic construct
  misc_feature 1..657: note = Description of Artificial Sequence: Synthetic coding sequence
  source 1..657: mol_type = other DNA
atgaacaagcccatcacccccagcacctacgtgcgctgcctgaatgtgggcctcatcaggaagctgagtgacttcatcgacccccaggagggctggaagaagctggccgtggccatcaagaagcccagcggagatgaccgctacaaccagttccacatccgccgctttgaggccctgctgcagacaggcaagagccccaccagcgagctgctgtttgactggggcaccaccaactgcaccgtgggggacctggtggacctgctgatccagaatgagttctttgccccagccagcctgctgctgcctgatgctgtgcccaagacagccaacaccctgcccagcaaggaggccatcaccgtgcagcagaagcagatgcccttctgtgacaaggacaggaccctgatgacccctgtgcagaacctggagcagagctacatgcccccagacagcagcagccctgagaacaagagcctggaggtgtctgacacccgcttccacagcttctccttctatgagctgaagaatgtgaccaacaactttgatgagcggcccatctctgtgggcggcaacaagatgggagagggcggctttggagtggtgtacaagggctacgtgaacaacaactgtggcagcgaggaggcctgcagcaatggatag

SEQ ID NO: 156484 - DNA, 1011 bp, synthetic construct
  misc_feature 1..1011: note = Description of Artificial Sequence: Synthetic coding sequence
  source 1..1011: mol_type = other DNA
atgcccttctgtgacaaggacaggaccctgatgacccctgtgcagaacctggagcagagctacatgcccccagacagcagcagccctgagaacaagagcctggaggtgtctgacacccgcttccacagcttctccttctatgagctgaagaatgtgaccaacaactttgatgagcggcccatctctgtgggcggcaacaagatgggagagggcggctttggagtggtgtacaagggctacgtgaacaacaccaccgtggccgtgaagaagctggccgccatggtggacatcaccacagaggagctgaagcagcagtttgaccaggagatcaaggtgatggccaagtgccagcacgagaacctggtggagctgctgggcttcagcagtgatggagatgacctgtgcctggtgtatgtgtacatgcccaacggcagcctgctggaccggctgagctgcctggatggcaccccacccctgtcctggcacatgcgctgcaagatcgcccagggcgccgccaacggcatcaacttcctgcacgagaaccaccacatccaccgggacatcaagagcgccaacatcctgctggatgaggccttcaccgccaagatcagtgactttggcctggcccgggccagcgagaagtttgcccagacagtgatgaccagccgcatcgtgggcaccacagcctacatggcccctgaggccctgcggggggagatcacccccaagagtgacatctacagctttggagtggtgctgctggagatcatcaccggcctgcctgctgtggatgagcaccgggagccccagctgctgctggacatcaaggaggagattgaagatgaggagaagaccatcgaggactacatcgacaagaagatgaatgatgctgacagcacctctgtggaggccatgtacagcgtggccagccagtgcctgcacgagaagaagaacaagaggccagacatcaagaaggtgcagcagctgctgcaggagatgacagccagctag

SEQ ID NO: 156485 - DNA, 1011 bp, synthetic construct; identical to SEQ ID NO: 156484
  misc_feature 1..1011: note = Description of Artificial Sequence: Synthetic coding sequence
  source 1..1011: mol_type = other DNA

SEQ ID NO: 156486 - DNA, 1383 bp, synthetic construct
  misc_feature 1..1383: note = Description of Artificial Sequence: Synthetic coding sequence
  source 1..1383: mol_type = other DNA
atgaacaagcccatcacccccagcacctacgtgcgctgcctgaatgtgggcctcatcaggaagctgagtgacttcatcgacccccaggagggctggaagaagctggccgtggccatcaagaagcccagcggagatgaccgctacaaccagttccacatccgccgctttgaggccctgctgcagacaggcaagagccccaccagcgagctgctgtttgactggggcaccaccaactgcaccgtgggggacctggtggacctgctgatccagaatgagttctttgccccagccagcctgctgctgcctgatgctgtgcccaagacagccaacaccctgcccagcaaggaggccatcaccgtgcagcagaagcagatgcccttctgtgacaaggacaggaccctgatgacccctgtgcagaacctggagcagagctacatgcccccagacagcagcagccctgagaacaagagcctggaggtgtctgacacccgcttccacagcttctccttctatgagctgaagaatgtgaccaacaactttgatgagcggcccatctctgtgggcggcaacaagatgggagagggcggctttggagtggtgtacaagggctacgtgaacaacaccaccgtggccgtgaagaagctggccgccatggtggacatcaccacagaggagctgaagcagcagtttgaccaggagatcaaggtgatggccaagtgccagcacgagaacctggtggagctgctgggcttcagcagtgatggagatgacctgtgcctggtgtatgtgtacatgcccaacggcagcctgctggaccggctgagctgcctggatggcaccccacccctgtcctggcacatgcgctgcaagatcgcccagggcgccgccaacggcatcaacttcctgcacgagaaccaccacatccaccgggacatcaagagcgccaacatcctgctggatgaggccttcaccgccaagatcagtgactttggcctggcccgggccagcgagaagtttgcccagacagtgatgaccagccgcatcgtgggcaccacagcctacatggcccctgaggccctgcggggggagatcacccccaagagtgacatctacagctttggagtggtgctgctggagatcatcaccggcctgcctgctgtggatgagcaccgggagccccagctgctgctggacatcaaggaggagattgaagatgaggagaagaccatcgaggactacatcgacaagaagatgaatgatgctgacagcacctctgtggaggccatgtacagcgtggccagccagtgcctgcacgagaagaagaacaagaggccagacatcaagaaggtgcagcagctgctgcaggagatgacagccagctag

SEQ ID NO: 156487 - DNA, 270 bp, synthetic construct
  misc_feature 1..270: note = Description of Artificial Sequence: Synthetic coding sequence
  source 1..270: mol_type = other DNA
atgaacaagcccatcacccccagcacctacgtgcgctgcctgaatgtgggcctcatcaggaagctgagtgacttcatcgacccccaggagggctggaagaagctggccgtggccatcaagaagcccagcggagatgaccgctacaaccagttccacatccgccgctttgaggccctgctgcagacaggcaagagccccaccagcgagctgctgtttgactggggcaccaccaactgcaccgtgggggacctggtggacctgctgatctag

SEQ ID NO: 156488 - DNA, 1383 bp, synthetic construct; identical to SEQ ID NO: 156486
  misc_feature 1..1383: note = Description of Artificial Sequence: Synthetic coding sequence
  source 1..1383: mol_type = other DNA

SEQ ID NO: 156489 - DNA, 2394 bp, synthetic construct
  misc_feature 1..2394: note = Description of Artificial Sequence: Synthetic coding sequence
  source 1..2394: mol_type = other DNA
atgtacctggagacccggcgggccatctttgtgttctggatcttcctgcaggtgcagggcaccaaggacatcagcatcaacatctaccacagcgagaccaaggacatcgacaaccccccaagaaatgagaccacagagagcacagagaagatgtacaagatgagcaccatgaggcgcatctttgacctggccaagcacaggaccaagaggtctgccttcttccccaccggggtgaaggtgtgcccccaggagagcatgaagcagatcctggacagcctgcaggcctactaccgcctgcgggtgtgccaggaggccgtgtgggaggcctaccgcatcttcctggaccgcatcccagacaccggggagtaccaggactgggtgtccatctgccagcaggagaccttctgcctgtttgacatcggcaagaacttcagcaacagccaggagcacctggacctgctgcagcagaggatcaagcagaggagcttcccagacaggaaggatgagatctctgctgagaagaccctgggggagcctggagagaccatcgtcatcagcacagatgtggccaacgtgtccctgggccccttccccctgaccccagatgacaccctgctgaatgagatcctggacaacaccctgaatgacaccaagatgcccaccacagagcgggagacagaatttgctgtgctggaggagcagagggtggagctgtctgtgtccctggtgaaccagaagttcaaggccgagctggccgacagccagagcccctactaccaggagctggccggcaagagccagctgcagatgcagaagatcttcaagaagctgcccggcttcaagaagatccacgtgctgggcttccggcccaagaaggagaaggatggcagcagcagcacagagatgcagctgacagccatcttcaagaggcacagcgctgaggccaagagccctgccagtgacctgctgagctttgacagcaacaagattgagagcgaggaggtgtaccacggcaccatggaggaggacaagcagcctgagatctacctgacagccacagacctgaagaggctcatcagcaaggccctggaggaggagcagagcctggatgtgggcaccatccagttcacagatgaaattgctggcagcctgcctgcctttggaccagacacccagagcgagctgcccaccagctttgctgtgatcacagaagatgccaccctgagccctgagctgccccctgtggagccccagctggagaccgtggatggagctgagcacggcctgcctgacacctcctggagccccccagccatggccagcaccagcctgtctgaggccccacccttcttcatggccagcagcatcttcagcctgacagaccagggcaccacagacaccatggccacagaccagaccatgctggtgcccggcctgaccatccccaccagtgactacagcgccatcagccagctggccctgggcatcagccaccccccagccagcagtgatgacagccgcagcagcgctggaggagaggacatggtgcgccacctggatgagatggacctgagtgacaccccagcccccagcgaggtgcctgagctgtctgaatatgtgtctgtgcctgaccacttcctggaggacaccacccctgtgtctgccctgcagtacatcaccaccagctccatgaccatcgcccccaagggccgggagctggtggtgttcttcagcctgcgggtggccaacatggccttcagcaatgacctcttcaacaagagcagcctggagtaccgggccctggagcagcagttcacccagctgctggtgccctacctgcggagcaacctgaccggcttcaagcagctggagatcctgaacttcagaaatggcagcgtcatcgtgaacagcaagatgaagtttgccaagtctgtgccctacaacctgaccaaggctgtgcacggcgtgctggaggacttccgctctgctgctgcccagcagctgcacctggagattgacagctacagcctgaacatcgagcctgctgaccaggccgacccctgcaagttcctggcctgtggggagtttgcccagtgtgtgaagaatgaaagaacagaggaggctgaatgtcgctgcaagccaggctatgacagccagggcagcctggatggcctggagcccggcctgtgtggccctggcaccaaggaatgtgaggtgctgcagggcaaaggagccccctgccgcctgcctgaccacagcgagaaccaggcctacaagacctctgtgaagaagttccagaaccagcagaacaacaaggtgatcagcaagagaaattctgagctgctgactgtggagtatgaggagttcaaccaccaggactgggagggcaactag

SEQ ID NO: 156490 - DNA, 477 bp, synthetic construct
  misc_feature 1..477: note = Description of Artificial Sequence: Synthetic coding sequence
  source 1..477: mol_type = other DNA
gagcggcccaacggcaccagcgcccagcctgcccaggtgaagccagagttctaccggcaggccgagctgaagccctgcccctggacaggcagcaaccagaggcgctgcatcaccttctgccccaccccagaccaggccgacccctgcaagttcctggcctgtggggagtttgcccagtgtgtgaagaatgaaagaacagaggaggccgagtgccgctgcaagccaggctatgacagccagggcagcctggatggcctggagcccggcctgtgtggccctggcaccaaggaatgtgaggtgctgcagggcaagggggccccctgccgcctgcctgaccacagcgagaaccaggcctacaagacctctgtgaagaagttccagaaccagcagaacaacaaggtgatcagcaagaggaacagcgagctgctgactgtggagtatgaggagttcaaccaccaggactgggagggcaactag

SEQ ID NO: 156491 - DNA, 444 bp, synthetic construct
  misc_feature 1..444: note = Description of Artificial Sequence: Synthetic coding sequence
  source 1..444: mol_type = other DNA
atgtacctggagacccggcgggccatctttgtgttctggatcttcctgcaggtgcagggcaccaaggtgtgccaggaggccgtgtgggaggcctaccgcatcttcctggaccgcatcccagacaccggggagtaccaggactgggtgtccatctgccagcaggagaccttctgcctgtttgacatcggcaagaacttcagcaacagccaggagcacctggacctgctgcagcagaggatcaagcagaggagcttcccagacaggaaggatgagatctctgctgagaagaccctgggggagcctggagagaccatcgtcatcagcacagagaagaacaagggcaagaccaagcccttcaacatcctgcagtttggaaacaaccaccacgagcacctgctgcccatcttctgcctgctgagcagcatcatctacacctactactag

SEQ ID NO: 156492 - DNA, 3726 bp, synthetic construct
  misc_feature 1..3726: note = Description of Artificial Sequence: Synthetic coding sequence
  source 1..3726: mol_type = other DNA
atgatcatgttccccctgtttgggaagatcagcctgggcatcctgatctttgtgctgattgaaggagacttccccagcctgacagcccagacctacctgagcattgaggagatccaggagcccaagtctgctgtgtccttcctgctgcctgaggagagcacagacctgagcctggccaccaagaagaagcagcccctggaccggcgggagacagagcggcagtggctgatcagaagaagaagaagcatcctcttccccaatggagtgaagatctgcccagatgagagcgtggccgaggccgtggccaaccacgtgaagtacttcaaggtgcgggtgtgccaggaggccgtgtgggaggccttccgcaccttctgggaccggctgcccggccgggaggagtaccactactggatgaacctgtgtgaagatggagtgaccagcatctttgagatgggcaccaacttcagcgagagcgtggagcacaggagcctcatcatgaagaagctgacctacgccaaggagaccgtgagcagcagcgagctgagcagccctgtgcctgtgggggacaccagcaccctgggggacaccaccctgtctgtgccccaccctgaggtggatgcctatgagggcgccagcgagagcagcctggagaggcctgaggagagcatcagcaatgaaattgaaaatgtgattgaggaggccaccaagccagctggggagcagattgctgagttcagcatccacctgctgggcaagcagtaccgggaggagctgcaggacagcagcagcttccaccaccagcacctggaggaggagttcatcagcgaggtggagaatgccttcaccggcctgcccggctacaaggagatccgggtgctggagttccgcagccccaaggaaaatgattctggagtggatgtgtactatgctgtgaccttcaacggggaggccatcagcaacaccacctgggacctgatcagcctgcacagcaacaaggtggagaaccacggcctggtggagctggatgacaagcccaccgtggtgtacaccatcagcaacttccgggactacatcgccgagaccctgcagcagaacttcctgctgggcaacagcagcctgaacccagaccctgacagcctgcagctgatcaacgtgcggggcgtgctgcggcaccagacagaggacctggtgtggaacacccagagcagcagcctgcaggccacccccagcagcatcctggacaacaccttccaggccgcctggcccagcgcagatgagagcatcaccagcagcatcccccccctggacttcagcagcggccccccatctgccaccggccgggagctgtggagcgagagccccctgggggacctggtgtccacccacaagctggccttccccagcaagatgggcctgagcagcagccctgaggtgctggaggtgagcagcctgaccctgcacagcgtgaccccagctgtgctgcagacaggcctgcctgtggccagcgaggagaggaccagcggcagccacctggtggaggatggcctggccaacgtggaggagagcgaggacttcctgagcattgacagcctgcccagcagcagcttcacccagcctgtgcccaaggagaccatccccagcatggaggacagtgatgtgtccctgaccagcagcccctacctgaccagcagcatccccttcggcctggacagcctgaccagcaaggtgaaggaccagctgaaggtgagccccttcctgcctgatgcctccatggagaaggagctgatctttgatggcggcctgggcagcggcagcggccagaaggtggacctgatcacctggccctggagcgagaccagcagcgagaagtctgctgagcccctgagcaagccctggctggaggatgatgacagcctgctgcctgctgagattgaggacaagaagctggtgctggtggacaagatggacagcacagaccagatcagcaagcacagcaaatatgaacatgatgacaggagcacccacttccctgaggaggagcccctgagcggccctgctgtgcccatctttgctgacacagctgctgagagcgccagcctgaccctgcccaagcacatcagcgaggtgcctggggtggatgactacagcgtgaccaaggcccccctcatcctgacctctgtggccatcagcgccagcacagacaagagtgaccaggctgatgccatcctgcgggaggacatggagcagatcacagagagcagcaactatgagtggtttgattctgaggtgtccatggtgaagccagacatgcagaccctgtggaccatcctgcctgagagcgagcgggtgtggaccaggaccagcagcctggagaagctgagccgggacatcctggccagcaccccccagagcgctgaccggctgtggctgtctgtgacccagagcaccaagctgccccccaccaccatcagcaccctgctggaggatgaagtcatcatgggcgtgcaggacatcagcctggagctggacagaattggaacagactactaccagcctgagcaggtgcaggagcagaatggcaaggtgggcagctatgtggagatgagcacctctgtgcacagcacagagatggtgtctgtggcctggcccacagagggcggagatgacctgagctacacccagaccagcggggccctggtggtgttcttcagcctgcgggtgaccaacatgatgttttctgaggacctcttcaacaagaacagcctggagtacaaggccctggagcagcgcttcctggagctgctggtgccctacctgcagagcaacctgaccggcttccagaacctggagatcctgaacttcagaaatggcagcatcgtggtgaacagcaggatgaagtttgccaacagcgtgccccccaacgtgaacaatgctgtgtacatgatcctggaggacttctgcaccacagcctacaacaccatgaacctggccatcgacaagtacagcctggatgtggagagcggagatgaggccaacccctgcaagttccaggcctgcaatgagttcagcgagtgcctggtgaacccctggagcggggaggccaagtgccgctgcttccctggctacctgtctgtggaggagcggccctgccagagcctgtgtgacctgcagcctgacttctgcctgaatgatggaaaatgtgacatcatgcctggccatggagccatctgccgctgccgggtgggggagaactggtggtaccggggcaagcactgtgaggagtttgtgtctgagcctgtgatcatcggcatcaccatcgcctctgtggtgggcctgctggtgatcttcagcgccatcatctacttcttcatccgcaccctgcaggcccaccacgacagaagtgagcgggagagccccttcagcggcagcagccggcagcctgacagcctgagcagcattgaaaatgctgtgaagtacaaccctgtgtatgagagccaccgggccggctgtgagaagtatgagggcccctacccccagcaccccttctacagcagcgccagcggagatgtgattggaggcctgagccgggaggagatccggcagatgtatgagagcagcgagctgagccgggaggagatccaggagaggatgagggtgctggagctgtatgccaatgaccctgagtttgctgcctttgtgcgggagcagcaggtggaggaggtgtag

SEQ ID NO: 156493 - DNA, 201 bp, synthetic construct
  misc_feature 1..201: note = Description of Artificial Sequence: Synthetic coding sequence
  source 1..201: mol_type = other DNA
ggctacctgtctgtggaggagcggccctgccagagcctgtgtgacctgcagcctgacttctgcctgaatgatggaaaatgtgacatcatgcctggccatggagccatctgcagcggcagcagccggcagcctgacagcctgagcagcattgaaaatgctgtgaagtacaaccctgtgtatgagagccacagagctggatag

SEQ ID NO: 156494 - DNA, 2745 bp, synthetic construct
  misc_feature 1..2745: note = Description of Artificial Sequence: Synthetic coding sequence
  source 1..2745: mol_type = other DNA
atggcccagttccccaccccatttggaggcagcctggacatctgggccatcaccgtggaggagcgggccaagcatgaccagcagttccacagcctgaagcccatcagcggcttcatcaccggggaccaggccaggaacttcttcttccagagcggcctgccccagcctgtgctggcccagatctgggccctggccgacatgaacaatgatggccgcatggaccaggtggagttcagcatcgccatgaagctgatcaagctgaagctgcagggctaccagctgcccagcgccctgccccctgtgatgaagcagcagcctgtggccatcagcagcgccccagccttcggcatgggcggcatcgcctccatgccacccctgacagctgtggcccctgtgcccatgggcagcatccctgtggtgggcatgagccccaccctggtgtcctctgtgcccacagctgctgtgccccccctggccaacggggcccctcctgtgatccagcccctgcctgcctttgcccaccctgctgccaccctgcccaagagcagcagcttcagccgcagcggccctggcagccagctgaacaccaagctgcagaaggcccagagctttgatgtggcctctgtgccccctgtggccgagtgggccgtgccccagagcagccggctgaagtaccggcagctgttcaacagccatgacaagaccatgagcggccacctgaccggcccccaggcccggaccatcctgatgcagagcagcctgccccaggcccagctggccagcatctggaacctgagtgacatcgaccaggacggcaagctgacagctgaggagttcatcctggccatgcacctgattgatgtggccatgagcggccagcccctgccccctgtgctgcccccagagtacatccccccatccttcagaagagtgcgcagcggcagcggcatcagcgtcatcagcagcacctctgtggaccagaggctgcctgaggagcctgtgctggaggatgagcagcagcagctggagaagaagctgcctgtgacctttgaggacaagaagcgggagaactttgagcggggcaacctggagctggagaagaggcggcaggccctgctggagcagcagaggaaggagcaggagcggctggcccagctggagagagctgagcaggagaggaaggagcgggagcggcaggagcaggagaggaagaggcagctggagctggagaagcagctggagaagcagcgggagctggagcggcagcgggaggaggagaggaggaaggagattgaaagaagagaggccgccaagcgggagctggagcggcagaggcagctggagtgggagaggaacagacggcaggagctgctgaaccagaggaacaaggagcaggaggacatcgtggtgctgaaggccaagaagaagaccctggagtttgagctggaggccctgaatgacaagaagcaccagctggagggcaagctgcaggacatccgctgccgcctgaccacccagaggcaggagattgagagcaccaacaagagccgggagctgagaattgctgagatcacccacctgcagcagcagctgcaggagagccagcagatgctgggccgcctcatccctgagaagcagatcctgaatgaccagctgaagcaggtgcagcagaacagcctgcaccgggacagcctggtgaccctgaagagggccctggaggccaaggagctggcccggcagcacctgcgggaccagctggatgaggtggagaaggagaccaggagcaagctgcaggagattgacatcttcaacaaccagctgaaggagctgcgggagatccacaacaagcagcagctgcagaagcagaagtccatggaggccgagcggctgaagcagaaggagcaggagaggaagatcatcgagctggagaagcagaaggaggaggcccagaggcgggcccaggagcgggacaagcagtggctggagcacgtgcagcaggaggatgagcaccagaggcccaggaagctgcacgaggaggagaagctgaagcgggaggagagcgtgaagaagaaggatggagaggagaagggcaagcaggaggcccaggacaagctgggccgcctcttccaccagcaccaggagcccgccaagccagctgtgcaggccccctggagcacagctgagaagggccccctgaccatcagcgcccaggagaatgtgaaggtggtgtactaccgggccctgtacccctttgagagccgcagccatgatgagatcaccatccagcccggggacatcgtgatggtggatgagagccagacaggagagcccggctggctgggcggggagctgaagggcaagacaggctggttccctgccaactatgcagagaagatcccagaaaatgaggtgcctgcccctgtgaagcctgtgacagacagcaccagcgccccagcccccaagctggccctgcgggagaccccagcccccctggccgtgaccagcagcgagcccagcaccacccccaacaactgggccgacttcagcagcacctggcccaccagcaccaatgagaagccagagacagacaactgggatgcctgggccgcccagcccagcctgactgtgcccagcgctggccagctgcggcagaggtctgccttcaccccagccacagccaccggcagcagccccagccctgtgctgggccagcacggcttctggttcttccgggagagctgctag

SEQ ID NO: 156495 - DNA, 954 bp, synthetic construct
  misc_feature 1..954: note = Description of Artificial Sequence: Synthetic coding sequence
  source 1..954: mol_type = other DNA
tgacccctgatggagagcgagctgctgacagagaaggaggtggccatgatctttgtgaactggaaggagctgatcatgtgcaacatcaagctgctgaaggccctgcgggtgaggaagaagatgtctggagagaagatgcctgtgaagatgattggagacatcctgagcgcccagctgccccacatgcagccctacatccgcttctgcagccggcagctgaatggagctgccctgatccagcagaagacagatgaggccccagacttcaaggagtttgtgaagaggctggccatggacccccgctgcaagggcatgcccctgagcagcttcatcctgaagcccatgcagagggtgacccgctaccccctcatcatcaagaaccagctggtgttcaacagcgtgaccaactgcctgggccccaggaagttcctgcacagcggcaagctgtacaaggccaagagcaacaaggagctgtatggcttcctgttcaatgacttcctgctgctgacccagatcaccaagcccctgggcagcagcggcacagacaaggtgttcagccccaagagcaacctgcagtacaagatgtacaagacccccatcttcctgaatgaggtgctggtgaagctgcccacagaccccagcggagatgagcccatcttccacatcagccacatcgacagagtgtacaccctgcgggcagagagcatcaatgaaagaacagcctgggtgcagaagatcaaggccgccagcgagctgtacatcgagacagagaagaagaagcgggagaaggcctacctggtgcgcagccagagggccactggaattggccgcctgatggtgaatgtggtggagggcatcgagctgaagccctgccgcagccacggcaagagcaacccctactgtgaggtgaccatgggcagccagtgccacatcaccaagaccatccaggactag

SEQ ID NO: 156496 - DNA, 5166 bp, synthetic construct
  misc_feature 1..5166: note = Description of Artificial Sequence: Synthetic coding sequence
  source 1..5166: mol_type = other DNA
atggcccagttccccaccccatttggaggcagcctggacatctgggccatcaccgtggaggagcgggccaagcatgaccagcagttccacagcctgaagcccatcagcggcttcatcaccggggaccaggccaggaacttcttcttccagagcggcctgccccagcctgtgctggcccagatctgggccctggccgacatgaacaatgatggccgcatggaccaggtggagttcagcatcgccatgaagctgatcaagctgaagctgcagggctaccagctgcccagcgccctgccccctgtgatgaagcagcagcctgtggccatcagcagcgccccagccttcggcatgggcggcatcgcctccatgccacccctgacagctgtggcccctgtgcccatgggcagcatccctgtggtgggcatgagccccaccctggtgtcctctgtgcccacagctgctgtgccccccctggccaacggggcccctcctgtgatccagcccctgcctgcctttgcccaccctgctgccaccctgcccaagagcagcagcttcagccgcagcggccctggcagccagctgaacaccaagctgcagaaggcccagagctttgatgtggcctctgtgccccctgtggccgagtgggccgtgccccagagcagccggctgaagtaccggcagctgttcaacagccatgacaagaccatgagcggccacctgaccggcccccaggcccggaccatcctgatgcagagcagcctgccccaggcccagctggccagcatctggaacctgagtgacatcgaccaggacggcaagctgacagctgaggagttcatcctggccatgcacctgattgatgtggccatgagcggccagcccctgccccctgtgctgcccccagagtacatccccccatccttcagaagagtgcgcagcggcagcggcatcagcgtcatcagcagcacctctgtggaccagaggctgcctgaggagcctgtgctggaggatgagcagcagcagctggagaagaagctgcctgtgacctttgaggacaagaagcgggagaactttgagcggggcaacctggagctggagaagaggcggcaggccctgctggagcagcagaggaaggagcaggagcggctggcccagctggagagagctgagcaggagaggaaggagcgggagcggcaggagcaggagaggaagaggcagctggagctggagaagcagctggagaagcagcgggagctggagcggcagcgggaggaggagaggaggaaggagattgaaagaagagaggccgccaagcgggagctggagcggcagaggcagctggagtgggagaggaacagacggcaggagctgctgaaccagaggaacaaggagcaggaggacatcgtggtgctgaaggccaagaagaagaccctggagtttgagctggaggccctgaatgacaagaagcaccagctggagggcaagctgcaggacatccgctgccgcctgaccacccagaggcaggagattgagagcaccaacaagagccgggagctgagaattgctgagatcacccacctgcagcagcagctgcaggagagccagcagatgctgggccgcctcatccctgagaagcagatcctgaatgaccagctgaagcaggtgcagcagaacagcctgcaccgggacagcctggtgaccctgaagagggccctggaggccaaggagctggcccggcagcacctgcgggaccagctggatgaggtggagaaggagaccaggagcaagctgcaggagattgacatcttcaacaaccagctgaaggagctgcgggagatccacaacaagcagcagctgcagaagcagaagtccatggaggccgagcggctgaagcagaaggagcaggagaggaagatcatcgagctggagaagcagaaggaggaggcccagaggcgggcccaggagcgggacaagcagtggctggagcacgtgcagcaggaggatgagcaccagaggcccaggaagctgcacgaggaggagaagctgaagcgggaggagagcgtgaagaagaaggatggagaggagaagggcaagcaggaggcccaggacaagctgggccgcctcttccaccagcaccaggagcccgccaagccagctgtgcaggccccctggagcacagctgagaagggccccctgaccatcagcgcccaggagaatgtgaaggtggtgtactaccgggccctgtacccctttgagagccgcagccatgatgagatcaccatccagcccggggacatcgtgatggtgattggctgctgggtggatgagagccagacaggagagcccggctggctgggcggggagctgaagggcaagacaggctggttccctgccaactatgcagagaagatcccagaaaatgaggtgcctgcccctgtgaagcctgtgacagacagcaccagcgccccagcccccaagctggccctgcgggagaccccagcccccctggccgtgaccagcagcgagcccagcaccacccccaacaactgggccgacttcagcagcacctggcccaccagcaccaatgagaagccagagacagacaactgggatgcctgggccgcccagcccagcctgactgtgcccagcgctggccagctgcggcagaggtctgccttcaccccagccacagccaccggcagcagccccagccctgtgctgggccagggcgagaaggtggagggcctgcaggcccaggccctgtacccctggagggccaagaaggacaaccacctgaacttcaacaagaatgatgtgatcaccgtgctggagcagcaggacatgtggtggtttggagaggtgcagggccagaagggctggttccccaagagctatgtgaagctgatcagcggccccatcaggaagagcacctccatggattctggcagcagcgagagccctgccagcctgaagagggtggccagccctgctgccaagcctgtggtgtctggagaggagttcatcgccatgtacacctatgagagcagcgagcagggcgacctgaccttccagcagggagatgtgatcctggtgaccaagaaggatggagactggtggacaggcaccgtgggggacaaggccggggtcttccccagcaactacgtgcggctgaaggacagcgagggcagcggcacagctgggaagacaggcagcctgggcaagaagccagagatcgcccaggtgattgccagctacacagccaccggccctgagcagctgaccctggcccctggccagctgatcctgatcaggaagaagaaccctgggggctggtgggagggggagctgcaggcccggggcaagaagaggcagatcggctggttccctgccaactacgtgaagctgctgagccctggcaccagcaagatcacccccacagagccccccaagagcacagccctggccgctgtgtgccaggtgattggcatgtatgactacacagcccagaatgatgatgagctggccttcaacaagggccagatcatcaacgtgctgaacaaggaggaccctgactggtggaagggggaggtgaatggccaggtgggcctcttccccagcaactacgtgaagctgaccacagacatggaccccagccagcagtggtgcagcgacctgcacctgctggacatgctgacccccacagagaggaagaggcagggctacatccacgagctgattgtgacagaggagaactacgtgaatgacctgcagctggtgacagagatcttccagaagcccctgatggagagcgagctgctgacagagaaggaggtggccatgatctttgtgaactggaaggagctgatcatgtgcaacatcaagctgctgaaggccctgcgggtgaggaagaagatgtctggagagaagatgcctgtgaagatgattggagacatcctgagcgcccagctgccccacatgcagccctacatccgcttctgcagccggcagctgaatggagctgccctgatccagcagaagacagatgaggccccagacttcaaggagtttgtgaagaggctggccatggacccccgctgcaagggcatgcccctgagcagcttcatcctgaagcccatgcagagggtgacccgctaccccctcatcatcaagaacatcctggagaacaccccagagaaccacccagaccacagccacctgaagcacgccctggagaaggccgaggagctgtgcagccaggtgaatgaaggagtgcgggagaaggagaacagcgaccggctggagtggatccaggcccacgtgcagtgtgagggcctgtctgagcagctggtgttcaacagcgtgaccaactgcctgggccccaggaagttcctgcacagcggcaagctgtacaaggccaagagcaacaaggagctgtatggcttcctgttcaatgacttcctgctgctgacccagatcaccaagcccctgggcagcagcggcacagacaaggtgttcagccccaagagcaacctgcagtacaagatgtacaagacccccatcttcctgaatgaggtgctggtgaagctgcccacagaccccagcggagatgagcccatcttccacatcagccacatcgacagagtgtacaccctgcgggcagagagcatcaatgaaagaacagcctgggtgcagaagatcaaggccgccagcgagctgtacatcgagacagagaagaagaagcgggagaaggcctacctggtgcgcagccagagggccactggaattggccgcctgatggtgaatgtggtggagggcatcgagctgaagccctgccgcagccacggcaagagcaacccctactgtgaggtgaccatgggcagccagtgccacatcaccaagaccatccaggacaccctgaaccccaagtggaacagcaactgccagttcttcatccgggacctggagcaggaggtgctgtgcatcaccgtgtttgagcgggaccagttctccccagatgacttcctgggccgcacagagatccgggtggccgacatcaagaaggaccagggcagcaagggccctgtgaccaagtgcctgctgctgcacgaggtgcccaccggggagatcgtggtgcggctggacctgcagctgtttgatgagccctag

SEQ ID NO: 156497 - DNA, 4953 bp, synthetic construct
  misc_feature 1..4953: note = Description of Artificial Sequence: Synthetic coding sequence
  source 1..4953: mol_type = other DNA
atggcccagttccccaccccatttggaggcagcctggacatctgggccatcaccgtggaggagcgggccaagcatgaccagcagttccacagcctgaagcccatcagcggcttcatcaccggggaccaggccaggaacttcttcttccagagcggcctgccccagcctgtgctggcccagatctgggccctggccgacatgaacaatgatggccgcatggaccaggtggagttcagcatcgccatgaagctgatcaagctgaagctgcagggctaccagctgcccagcgccctgccccctgtgatgaagcagcagcctgtggccatcagcagcgccccagccttcggcatgggcggcatcgcctccatgccacccctgacagctgtggcccctgtgcccatgggcagcatccctgtggtgggcatgagccccaccctggtgtcctctgtgcccacagctgctgtgccccccctggccaacggggcccctcctgtgatccagcccctgcctgcctttgcccaccctgctgccaccctgcccaagagcagcagcttcagccgcagcggccctggcagccagctgaacaccaagctgcagaaggcccagagctttgatgtggcctctgtgccccctgtggccgagtgggccgtgccccagagcagccggctgaagtaccggcagctgttcaacagccatgacaagaccatgagcggccacctgaccggcccccaggcccggaccatcctgatgcagagcagcctgccccaggcccagctggccagcatctggaacctgagtgacatcgaccaggacggcaagctgacagctgaggagttcatcctggccatgcacctgattgatgtggccatgagcggccagcccctgccccctgtgctgcccccagagtacatccccccatccttcagaagagtgcgcagcggcagcggcatcagcgtcatcagcagcacctctgtggaccagaggctgcctgaggagcctgtgctggaggatgagcagcagcagctggagaagaagctgcctgtgacctttgaggacaagaagcgggagaactttgagcggggcaacctggagctggagaagaggcggcaggccctgctggagcagcagaggaaggagcaggagcggctggcccagctggagagagctgagcaggagaggaaggagcgggagcggcaggagcaggagaggaagaggcagctggagctggagaagcagctggagaagcagcgggagctggagcggcagcgggaggaggagaggaggaaggagattgaaagaagagaggccgccaagcgggagctggagcggcagaggcagctggagtgggagaggaacagacggcaggagctgctgaaccagaggaacaaggagcaggaggacatcgtggtgctgaaggccaagaagaagaccctggagtttgagctggaggccctgaatgacaagaagcaccagctggagggcaagctgcaggacatccgctgccgcctgaccacccagaggcaggagattgagagcaccaacaagagccgggagctgagaattgctgagatcacccacctgcagcagcagctgcaggagagccagcagatgctgggccgcctcatccctgagaagcagatcctgaatgaccagctgaagcaggtgcagcagaacagcctgcaccgggacagcctggtgaccctgaagagggccctggaggccaaggagctggcccggcagcacctgcgggaccagctggatgaggtggagaaggagaccaggagcaagctgcaggagattgacatcttcaacaaccagctgaaggagctgcgggagatccacaacaagcagcagctgcagaagcagaagtccatggaggccgagcggctgaagcagaaggagcaggagaggaagatcatcgagctggagaagcagaaggaggaggcccagaggcgggcccaggagcgggacaagcagtggctggagcacgtgcagcaggaggatgagcaccagaggcccaggaagctgcacgaggaggagaagctgaagcgggaggagagcgtgaagaagaaggatggagaggagaagggcaagcaggaggcccaggacaagctgggccgcctcttccaccagcaccaggagcccgccaagccagctgtgcaggccccctggagcacagctgagaagggccccctgaccatcagcgcccaggagaatgtgaaggtggtgtactaccgggccctgtacccctttgagagccgcagccatgatgagatcaccatccagcccggggacatcgtgatggtgattggctgctgggtggatgagagccagacaggagagcccggctggctgggcggggagctgaagggcaagacaggctggttccctgccaactatgcagagaagatcccagaaaatgaggtgcctgcccctgtgaagcctgtgacagacagcaccagcgccccagcccccaagctggccctgcgggagaccccagcccccctggccgtgaccagcagcgagcccagcaccacccccaacaactgggccgacttcagcagcacctggcccaccagcaccaatgagaagccagagacagacaactgggatgcctgggccgcccagcccagcctgactgtgcccagcgctggccagctgcggcagaggtctgccttcaccccagccacagccaccggcagcagccccagccctgtgctgggccagggcgagaaggtggagggcctgcaggcccaggccctgtacccctggagggccaagaaggacaaccacctgaacttcaacaagaatgatgtgatcaccgtgctggagcagcaggacatgtggtggtttggagaggtgcagggccagaagggctggttccccaagagctatgtgaagctgatcagcggccccatcaggaagagcacctccatggattctggcagcagcgagagccctgccagcctgaagagggtggccagccctgctgccaagcctgtggtgtctggagaggagatcgcccaggtgattgccagctacacagccactggacctgagcagctgaccctggcccctggccagctgatcctgatcaggaagaagaaccctgggggctggtgggagggggagctgcaggcccggggcaagaagaggcagatcggctggttccctgccaactacgtgaagctgctgagccctggcaccagcaagatcacccccacagagccccccaagagcacagccctggccgctgtgtgccaggtgattggcatgtatgactacacagcccagaatgatgatgagctggccttcaacaagggccagatcatcaacgtgctgaacaaggaggaccctgactggtggaagggggaggtgaatggccaggtgggcctcttccccagcaactacgtgaagctgaccacagacatggaccccagccagcagtggtgcagcgacctgcacctgctggacatgctgacccccacagagaggaagaggcagggctacatccacgagctgattgtgacagaagaaaattatgtgaatgacctgcagctggtgacagagatcttccagaagcccctgatggagagcgagctgctgacagagaaggaggtggccatgatctttgtgaactggaaggagctgatcatgtgcaacatcaagctgctgaaggccctgcgggtgaggaagaagatgtctggagagaagatgcctgtgaagatgattggagacatcctgagcgcccagctgccccacatgcagccctacatccgcttctgcagccggcagctgaatggagctgccctgatccagcagaagacagatgaggccccagacttcaaggagtttgtgaagaggctggccatggacccccgctgcaagggcatgcccctgagcagcttcatcctgaagcccatgcagagggtgacccgctaccccctcatcatcaagaacatcctggagaacaccccagagaaccacccagaccacagccacctgaagcacgccctggagaaggccgaggagctgtgcagccaggtgaatgaaggagtgcgggagaaggaaaattctgaccggctggagtggatccaggcccacgtgcagtgtgagggcctgtctgagcagctggtgttcaacagcgtgaccaactgcctgggccccaggaagttcctgcacagcggcaagctgtacaaggccaagagcaacaaggagctgtatggcttcctgttcaatgacttcctgctgctgacccagatcaccaagcccctgggcagcagcggcacagacaaggtgttcagccccaagagcaacctgcagtacaagatgtacaagacccccatcttcctgaatgaggtgctggtgaagctgcccacagaccccagcggagatgagcccatcttccacatcagccacatcgacagagtgtacaccctgcgggcagagagcatcaatgaaagaacagcctgggtgcagaagatcaaggccgccagcgagctgtacattgaaacagagaagaagaagcgggagaaggcctacctggtgcgcagccagagggccaccggcatcggccgcctgatggtgaatgtggtggagggcatcgagctgaagccctgccgcagccacggcaagagcaacccctactgtgaggtgaccatgggcagccagtgccacatcaccaagaccatccaggacaccctgaaccccaagtggaacagcaactgccagttcttcatccgggacctggagcaggaggtgctgtgcatcaccgtgtttgagcgggaccagttctccccagatgacttcctgggccgcacagagatccgggtggccgacatcaagaaggaccagggcagcaaaggacctgtgaccaagtgcctgctgctgcacgaggtgcccactggagagatcgtggtgcggctggacctgcagctgtttgatgagccctag

SEQ ID NO: 156498 - DNA, 3237 bp, synthetic construct
  misc_feature 1..3237: note = Description of Artificial Sequence: Synthetic coding sequence
  source 1..3237: mol_type = other DNA
atggcccagttccccaccccatttggaggcagcctggacatctgggccatcaccgtggaggagcgggccaagcatgaccagcagttccacagcctgaagcccatcagcggcttcatcaccggggaccaggccaggaacttcttcttccagagcggcctgccccagcctgtgctggcccagatctgggccctggccgacatgaacaatgatggccgcatggaccaggtggagttcagcatcgccatgaagctgatcaagctgaagctgcagggctaccagctgcccagcgccctgccccctgtgatgaagcagcagcctgtggccatcagcagcgccccagccttcggcatgggcggcatcgcctccatgccacccctgacagctgtggcccctgtgcccatgggcagcatccctgtggtgggcatgagccccaccctggtgtcctctgtgcccacagctgctgtgccccccctggccaacggggcccctcctgtgatccagcccctgcctgcctttgcccaccctgctgccaccctgcccaagagcagcagcttcagccgcagcggccctggcagccagctgaacaccaagctgcagaaggcccagagctttgatgtggcctctgtgccccctgtggccgagtgggccgtgccccagagcagccggctgaagtaccggcagctgttcaacagccatgacaagaccatgagcggccacctgaccggcccccaggcccggaccatcctgatgcagagcagcctgccccaggcccagctggccagcatctggaacctgagtgacatcgaccaggacggcaagctgacagctgaggagttcatcctggccatgcacctgattgatgtggccatgagcggccagcccctgccccctgtgctgcccccagagtacatccccccatccttcagaagagtgcgcagcggcagcggcatcagcgtcatcagcagcacctctgtggaccagaggctgcctgaggagcctgtgctggaggatgagcagcagcagctggagaagaagctgcctgtgacctttgaggacaagaagcgggagaactttgagcggggcaacctggagctggagaagaggcggcaggccctgctggagcagcagaggaaggagcaggagcggctggcccagctggagagagctgagcaggagaggaaggagcgggagcggcaggagcaggagaggaagaggcagctggagctggagaagcagctggagaagcagcgggagctggagcggcagcgggaggaggagaggaggaaggagattgaaagaagagaggccgccaagcgggagctggagcggcagaggcagctggagtgggagaggaacagacggcaggagctgctgaaccagaggaacaaggagcaggaggacatcgtggtgctgaaggccaagaagaagaccctggagtttgagctggaggccctgaatgacaagaagcaccagctggagggcaagctgcaggacatccgctgccgcctgaccacccagaggcaggagattgagagcaccaacaagagccgggagctgagaattgctgagatcacccacctgcagcagcagctgcaggagagccagcagatgctgggccgcctcatccctgagaagcagatcctgaatgaccagctgaagcaggtgcagcagaacagcctgcaccgggacagcctggtgaccctgaagagggccctggaggccaaggagctggcccggcagcacctgcgggaccagctggatgaggtggagaaggagaccaggagcaagctgcaggagattgacatcttcaacaaccagctgaaggagctgcgggagatccacaacaagcagcagctgcagaagcagaagtccatggaggccgagcggctgaagcagaaggagcaggagaggaagatcatcgagctggagaagcagaaggaggaggcccagaggcgggcccaggagcgggacaagcagtggctggagcacgtgcagcaggaggatgagcaccagaggcccaggaagctgcacgaggaggagaagctgaagcgggaggagagcgtgaagaagaaggatggagaggagaagggcaagcaggaggcccaggacaagctgggccgcctcttccaccagcaccaggagcccgccaagccagctgtgcaggccccctggagcacagctgagaagggccccctgaccatcagcgcccaggagaatgtgaaggtggtgtactaccgggccctgtacccctttgagagccgcagccatgatgagatcaccatccagcccggggacatcgtgatggtggatgagagccagacaggagagcccggctggctgggcggggagctgaagggcaagacaggctggttccctgccaactatgcagagaagatcccagaaaatgaggtgcctgcccctgtgaagcctgtgacagacagcaccagcgccccagcccccaagctggccctgcgggagaccccagcccccctggccgtgaccagcagcgagcccagcaccacccccaacaactgggccgacttcagcagcacctggcccaccagcaccaatgagaagccagagacagacaactgggatgcctgggccgcccagcccagcctgactgtgcccagcgctggccagctgcggcagaggtctgccttcaccccagccacagccaccggcagcagccccagccctgtgctgggccagggcgagaaggtggagggcctgcaggcccaggccctgtacccctggagggccaagaaggacaaccacctgaacttcaacaagaatgatgtgatcaccgtgctggagcagcaggacatgtggtggtttggagaggtgcagggccagaagggctggttccccaagagctatgtgaagctgatcagcggccccatcaggaagagcacctccatggacagcggcagcagcgagagccctgccagcctgaagagggtggccagccctgctgccaagcctgtggtgtctggagaggagttcatcgccatgtacacctatgagagcagcgagcagggcgacctgaccttccagcagggagatgtgatcctggtgaccaagaaggatggagactggtggacaggaacagtgggggacaaggccggggtcttccccagcaactacgtgcggctgaaggacagcgagggcagcggcacagctgggaagacaggcagcctgggcaagaagccaggccccagctgcaatgtgaagtag

SEQ ID NO: 156499 - DNA, 3663 bp, synthetic construct
  misc_feature 1..3663: note = Description of Artificial Sequence: Synthetic coding sequence
  source 1..3663: mol_type = other DNA
atggcccagttccccaccccatttggaggcagcctggacatctgggccatcaccgtggaggagcgggccaagcatgaccagcagttccacagcctgaagcccatcagcggcttcatcaccggggaccaggccaggaacttcttcttccagagcggcctgccccagcctgtgctggcccagatctgggccctggccgacatgaacaatgatggccgcatggaccaggtggagttcagcatcgccatgaagctgatcaagctgaagctgcagggctaccagctgcccagcgccctgccccctgtgatgaagcagcagcctgtggccatcagcagcgccccagccttcggcatgggcggcatcgcctccatgccacccctgacagctgtggcccctgtgcccatgggcagcatccctgtggtgggcatgagccccaccctggtgtcctctgtgcccacagctgctgtgccccccctggccaacggggcccctcctgtgatccagcccctgcctgcctttgcccaccctgctgccaccctgcccaagagcagcagcttcagccgcagcggccctggcagccagctgaacaccaagctgcagaaggcccagagctttgatgtggcctctgtgccccctgtggccgagtgggccgtgccccagagcagccggctgaagtaccggcagctgttcaacagccatgacaagaccatgagcggccacctgaccggcccccaggcccggaccatcctgatgcagagcagcctgccccaggcccagctggccagcatctggaacctgagtgacatcgaccaggacggcaagctgacagctgaggagttcatcctggccatgcacctgattgatgtggccatgagcggccagcccctgccccctgtgctgcccccagagtacatccccccatccttcagaagagtgcgcagcggcagcggcatcagcgtcatcagcagcacctctgtggaccagaggctgcctgaggagcctgtgctggaggatgagcagcagcagctggagaagaagctgcctgtgacctttgaggacaagaagcgggagaactttgagcggggcaacctggagctggagaagaggcggcaggccctgctggagcagcagaggaaggagcaggagcggctggcccagctggagagagctgagcaggagaggaaggagcgggagcggcaggagcaggagaggaagaggcagctggagctggagaagcagctggagaagcagcgggagctggagcggcagcgggaggaggagaggaggaaggagattgaaagaagagaggccgccaagcgggagctggagcggcagaggcagctggagtgggagaggaacagacggcaggagctgctgaaccagaggaacaaggagcaggaggacatcgtggtgctgaaggccaagaagaagaccctggagtttgagctggaggccctgaatgacaagaagcaccagctggagggcaagctgcaggacatccgctgccgcctgaccacccagaggcaggagattgagagcaccaacaagagccgggagctgagaattgctgagatcacccacctgcagcagcagctgcaggagagccagcagatgctgggccgcctcatccctgagaagcagatcctgaatgaccagctgaagcaggtgcagcagaacagcctgcaccgggacagcctggtgaccctgaagagggccctggaggccaaggagctggcccggcagcacctgcgggaccagctggatgaggtggagaaggagaccaggagcaagctgcaggagattgacatcttcaacaaccagctgaaggagctgcgggagatccacaacaagcagcagctgcagaagcagaagtccatggaggccgagcggctgaagcagaaggagcaggagaggaagatcatcgagctggagaagcagaaggaggaggcccagaggcgggcccaggagcgggacaagcagtggctggagcacgtgcagcaggaggatgagcaccagaggcccaggaagctgcacgaggaggagaagctgaagcgggaggagagcgtgaagaagaaggatggagaggagaagggcaagcaggaggcccaggacaagctgggccgcctcttccaccagcaccaggagcccgccaagccagctgtgcaggccccctggagcacagctgagaagggccccctgaccatcagcgcccaggagaatgtgaaggtggtgtactaccgggccctgtacccctttgagagccgcagccatgatgagatcaccatccagcccggggacatcgtgatggtgaagggggagtgggtggatgagagccagacaggagagcccggctggctgggcggggagctgaagggcaagacaggctggttccctgccaactatgcagagaagatcccagaaaatgaggtgcctgcccctgtgaagcctgtgacagacagcaccagcgccccagcccccaagctggccctgcgggagaccccagcccccctggccgtgaccagcagcgagcccagcaccacccccaacaactgggccgacttcagcagcacctggcccaccagcaccaatgagaagccagagacagacaactgggatgcctgggccgcccagcccagcctgactgtgcccagcgctggccagctgcggcagaggtctgccttcaccccagccacagccaccggcagcagccccagccctgtgctgggccagggcgagaaggtggagggcctgcaggcccaggccctgtacccctggagggccaagaaggacaaccacctgaacttcaacaagaatgatgtgatcaccgtgctggagcagcaggacatgtggtggtttggagaggtgcagggccagaagggctggttccccaagagctatgtgaagctgatcagcggccccatcaggaagagcacctccatggattctggcagcagcgagagccctgccagcctgaagagggtggccagccctgctgccaagcctgtggtgtctggagaggagttcatcgccatgtacacctatgagagcagcgagcagggcgacctgaccttccagcagggagatgtgatcctggtgaccaagaaggatggagactggtggacaggcaccgtgggggacaaggccggggtcttccccagcaactacgtgcggctgaaggacagcgagggcagcggcacagctgggaagacaggcagcctgggcaagaagccagagatcgcccaggtgattgccagctacacagccaccggccctgagcagctgaccctggcccctggccagctgatcctgatcaggaagaagaaccctgggggctggtgggagggggagctgcaggcccggggcaagaagaggcagatcggctggttccctgccaactacgtgaagctgctgagccctggcaccagcaagatcacccccacagagccccccaagagcacagccctggccgctgtgtgccaggtgattggcatgtatgactacacagcccagaatgatgatgagctggccttcaacaagggccagatcatcaacgtgctgaacaaggaggaccctgactggtggaagggggaggtgaatggccaggtgggcctcttccccagcaactacgtgaagctgaccacagacatggaccccagccagcagtag

SEQ ID NO: 156500 - DNA, 5166 bp, synthetic construct
  misc_feature 1..5166: note = Description of Artificial Sequence: Synthetic coding sequence
  source 1..5166: mol_type = other DNA
atggcccagttccccaccccatttggaggcagcctggacatctgggccatcaccgtggaggagcgggccaagcatgaccagcagttccacagcctgaagcccatcagcggcttcatcaccggggaccaggccaggaacttcttcttccagagcggcctgccccagcctgtgctggcccagatctgggccctggccgacatgaacaatgatggccgcatggaccaggtggagttcagcatcgccatgaagctgatcaagctgaagctgcagggctaccagctgcccagcgccctgccccctgtgatgaagcagcagcctgtggccatcagcagcgccccagccttcggcatgggcggcatcgcctccatgccacccctgacagctgtggcccctgtgcccatgggcagcatccctgtggtgggcatgagccccaccctggtgtcctctgtgcccacagctgctgtgccccccctggccaacggggcccctcctgtgatccagcccctgcctgcctttgcccaccctgctgccaccctgcccaagagcagcagcttcagccgcagcggccctggcagccagctgaacaccaagctgcagaaggcccagagctttgatgtggcctctgtgccccctgtggccgagtgggccgtgccccagagcagccggctgaagtaccggcagctgttcaacagccatgacaagaccatgagcggccacctgaccggcccccaggcccggaccatcctgatgcagagcagcctgccccaggcccagctggccagcatctggaacctgagtgacatcgaccaggacggcaagctgacagctgaggagttcatcctggccatgcacctgattgatgtggccatgagcggccagcccctgccccctgtgctgcccccagagtacatccccccatccttcagaagagtgcgcagcggcagcggcatcagcgtcatcagcagcacctctgtggaccagaggctgcctgaggagcctgtgctggaggatgagcagcagcagctggagaagaagctgcctgtgacctttgaggacaagaagcgggagaactttgagcggggcaacctggagctggagaagaggcggcaggccctgctggagcagcagaggaaggagcaggagcggctggcccagctggagagagctgagcaggagaggaaggagcgggagcggcaggagcaggagaggaagaggcagctggagctggagaagcagctggagaagcagcgggagctggagcggcagcgggaggaggagaggaggaaggagattgaaagaagagaggccgccaagcgggagctggagcggcagaggcagctggagtgggagaggaacagacggcaggagctgctgaaccagaggaacaaggagcaggaggacatcgtggtgctgaaggccaagaagaagaccctggagtttgagctggaggccctgaatgacaagaagcaccagctggagggcaagctgcaggacatccgctgccgcctgaccacccagaggcaggagattgagagcaccaacaagagccgggagctgagaattgctgagatcacccacctgcagcagcagctgcaggagagccagcagatgctgggccgcctcatccctgagaagcagatcctgaatgaccagctgaagcaggtgcagcagaacagcctgcaccgggacagcctggtgaccctgaagagggccctggaggccaaggagctggcccggcagcacctgcgggaccagctggatgaggtggagaaggagaccaggagcaagctgcaggagattgacatcttcaacaaccagctgaaggagctgcgggagatccacaacaagcagcagctgcagaagcagaagtccatggaggccgagcggctgaagcagaaggagcaggagaggaagatcatcgagctggagaagcagaaggaggaggcccagaggcgggcccaggagcgggacaagcagtggctggagcacgtgcagcaggaggatgagcaccagaggcccaggaagctgcacgaggaggagaagctgaagcgggaggagagcgtgaagaagaaggatggagaggagaagggcaagcaggaggcccaggacaagctgggccgcctcttccaccagcaccaggagcccgccaagccagctgtgcaggccccctggagcacagctgagaagggccccctgaccatcagcgcccaggagaatgtgaaggtggtgtactaccgggccctgtacccctttgagagccgcagccatgatgagatcaccatccagcccggggacatcgtgatggtgaagggggagtgggtggatgagagccagacaggagagcccggctggctgggcggggagctgaagggcaagacaggctggttccctgccaactatgcagagaagatcccagaaaatgaggtgcctgcccctgtgaagcctgtgacagacagcaccagcgccccagcccccaagctggccctgcgggagaccccagcccccctggccgtgaccagcagcgagcccagcaccacccccaacaactgggccgacttcagcagcacctggcccaccagcaccaatgagaagccagagacagacaactgggatgcctgggccgcccagcccagcctgactgtgcccagcgctggccagctgcggcagaggtctgccttcaccccagccacagccaccggcagcagccccagccctgtgctgggccagggcgagaaggtggagggcctgcaggcccaggccctgtacccctggagggccaagaaggacaaccacctgaacttcaacaagaatgatgtgatcaccgtgctggagcagcaggacatgtggtggtttggagaggtgcagggccagaagggctggttccccaagagctatgtgaagctgatcagcggccccatcaggaagagcacctccatggattctggcagcagcgagagccctgccagcctgaagagggtggccagccctgctgccaagcctgtggtgtctggagaggagttcatcgccatgtacacctatgagagcagcgagcagggcgacctgaccttccagcagggagatgtgatcctggtgaccaagaaggatggagactggtggacaggcaccgtgggggacaaggccggggtcttccccagcaactacgtgcggctgaaggacagcgagggcagcggcacagctgggaagacaggcagcctgggcaagaagccagagatcgcccaggtgattgccagctacacagccaccggccctgagcagctgaccctggcccctggccagctgatcctgatcaggaagaagaaccctgggggctggtgggagggggagctgcaggcccggggcaagaagaggcagatcggctggttccctgccaactacgtgaagctgctgagccctggcaccagcaagatcacccccacagagccccccaagagcacagccctggccgctgtgtgccaggtgattggcatgtatgactacacagcccagaatgatgatgagctggccttcaacaagggccagatcatcaacgtgctgaacaaggaggaccctgactggtggaagggggaggtgaatggccaggtgggcctcttccccagcaactacgtgaagctgaccacagacatggaccccagccagcagtggtgcagcgacctgcacctgctggacatgctgacccccacagagaggaagaggcagggctacatccacgagctgattgtgacagaggagaactacgtgaatgacctgcagctggtgacagagatcttccagaagcccctgatggagagcgagctgctgacagagaaggaggtggccatgatctttgtgaactggaaggagctgatcatgtgcaacatcaagctgctgaaggccctgcgggtgaggaagaagatgtctggagagaagatgcctgtgaagatgattggagacatcctgagcgcccagctgccccacatgcagccctacatccgcttctgcagccggcagctgaatggagctgccctgatccagcagaagacagatgaggccccagacttcaaggagtttgtgaagaggctggccatggacccccgctgcaagggcatgcccctgagcagcttcatcctgaagcccatgcagagggtgacccgctaccccctcatcatcaagaacatcctggagaacaccccagagaaccacccagaccacagccacctgaagcacgccctggagaaggccgaggagctgtgcagccaggtgaatgaaggagtgcgggagaaggagaacagcgaccggctggagtggatccaggcccacgtgcagtgtgagggcctgtctgagcagctggtgttcaacagcgtgaccaactgcctgggccccaggaagttcctgcacagcggcaagctgtacaaggccaagagcaacaaggagctgtatggcttcctgttcaatgacttcctgctgctgacccagatcaccaagcccctgggcagcagcggcacagacaaggtgttcagccccaagagcaacctgcagtacaagatgtacaagacccccatcttcctgaatgaggtgctggtgaagctgcccacagaccccagcggagatgagcccatcttccacatcagccacatcgacagagtgtacaccctgcgggcagagagcatcaatgaaagaacagcctgggtgcagaagatcaaggccgccagcgagctgtacatcgagacagagaagaagaagcgggagaaggcctacctggtgcgcagccagagggccactggaattggccgcctgatggtgaatgtggtggagggcatcgagctgaagccctgccgcagccacggcaagagcaacccctactgtgaggtgaccatgggcagccagtgccacatcaccaagaccatccaggacaccctgaaccccaagtggaacagcaactgccagttcttcatccgggacctggagcaggaggtgctgtgcatcaccgtgtttgagcgggaccagttctccccagatgacttcctgggccgcacagagatccgggtggccgacatcaagaaggaccagggcagcaagggccctgtgaccaagtgcctgctgctgcacgaggtgcccaccggggagatcgtggtgcggctggacctgcagctgtttgatgagccctag

SEQ ID NO: 156501 - DNA, 3048 bp, synthetic construct
  misc_feature 1..3048: note = Description of Artificial Sequence: Synthetic coding sequence
  source 1..3048: mol_type = other DNA
atggcccagttccccaccccatttggaggcagcctggacatctgggccatcaccgtggaggagcgggccaagcatgaccagcagttccacagcctgaagcccatcagcggcttcatcaccggggaccaggccaggaacttcttcttccagagcggcctgccccagcctgtgctggcccagatctgggccctggccgacatgaacaatgatggccgcatggaccaggtggagttcagcatcgccatgaagctgatcaagctgaagctgcagggctaccagctgcccagcgccctgccccctgtgatgaagcagcagcctgtggccatcagcagcgccccagccttcggcatgggcggcatcgcctccatgccacccctgacagctgtggcccctgtgcccatgggcagcatccctgtggtgggcatgagccccaccctggtgtcctctgtgcccacagctgctgtgccccccctggccaacggggcccctcctgtgatccagcccctgcctgcctttgcccaccctgctgccaccctgcccaagagcagcagcttcagccgcagcggccctggcagccagctgaacaccaagctgcagaaggcccagagctttgatgtggcctctgtgccccctgtggccgagtgggccgtgccccagagcagccggctgaagtaccggcagctgttcaacagccatgacaagaccatgagcggccacctgaccggcccccaggcccggaccatcctgatgcagagcagcctgccccaggcccagctggccagcatctggaacctgagtgacatcgaccaggacggcaagctgacagctgaggagttcatcctggccatgcacctgattgatgtggccatgagcggccagcccctgccccctgtgctgcccccagagtacatccccccatccttcagaagagtgcgcagcggcagcggcatcagcgtcatcagcagcacctctgtggaccagaggctgcctgaggagcctgtgctggaggatgagcagcagcagctggagaagaagctgcctgtgacctttgaggacaagaagcgggagaactttgagcggggcaacctggagctggagaagaggcggcaggccctgctggagcagcagaggaaggagcaggagcggctggcccagctggagagagctgagcaggagaggaaggagcgggagcggcaggagcaggagaggaagaggcagctggagctggagaagcagctggagaagcagcgggagctggagcggcagcgggaggaggagaggaggaaggagattgaaagaagagaggccgccaagcgggagctggagcggcagaggcagctggagtgggagaggaacagacggcaggagctgctgaaccagaggaacaaggagcaggaggacatcgtggtgctgaaggccaagaagaagaccctggagtttgagctggaggccctgaatgacaagaagcaccagctggagggcaagctgcaggacatccgctgccgcctgaccacccagaggcaggagattgagagcaccaacaagagccgggagctgagaattgctgagatcacccacctgcagcagcagctgcaggagagccagcagatgctgggccgcctcatccctgagaagcagatcctgaatgaccagctgaagcaggtgcagcagaacagcctgcaccgggacagcctggtgaccctgaagagggccctggaggccaaggagctggcccggcagcacctgcgggaccagctggatgaggtggagaaggagaccaggagcaagctgcaggagattgacatcttcaacaaccagctgaaggagctgcgggagatccacaacaagcagcagctgcagaagcagaagtccatggaggccgagcggctgaagcagaaggagcaggagaggaagatcatcgagctggagaagcagaaggaggaggcccagaggcgggcccaggagcgggacaagcagtggctggagcacgtgcagcaggaggatgagcaccagaggcccaggaagctgcacgaggaggagaagctgaagcgggaggagagcgtgaagaagaaggatggagaggagaagggcaagcaggaggcccaggacaagctgggccgcctcttccaccagcaccaggagcccgccaagccagctgtgcaggccccctggagcacagctgagaagggccccctgaccatcagcgcccaggagaatgtgaaggtggtgtactaccgggccctgtacccctttgagagccgcagccatgatgagatcaccatccagcccggggacatcgtgatggtggatgagagccagacaggagagcccggctggctgggcggggagctgaagggcaagacaggctggttccctgccaactatgcagagaagatcccagaaaatgaggtgcctgcccctgtgaagcctgtgacagacagcaccagcgccccagcccccaagctggccctgcgggagaccccagcccccctggccgtgaccagcagcgagcccagcaccacccccaacaactgggccgacttcagcagcacctggcccaccagcaccaatgagaagccagagacagacaactgggatgcctgggccgcccagcccagcctgactgtgcccagcgctggccagctgcggcagaggtctgccttcaccccagccacagccaccggcagcagccccagccctgtgctgggccagggcgagaaggtggagggcctgcaggcccaggccctgtacccctggagggccaagaaggacaaccacctgaacttcaacaagaatgatgtgatcaccgtgctggagcagcaggacatgtggtggtttggagaggtgcagggccagaagggctggttccccaagagctatgtgaagctgatcagcggccccatcaggaagagcacctccatggacagcggcagcagcgagagccctgccagcctgaagagggtggccagccctgctgccaagcctgtggtgtctggagagggcctgtggaactgctgggagaaccgggagttcaggaagaagacctag

SEQ ID NO: 156502 - DNA, 3063 bp, synthetic construct
  misc_feature 1..3063: note = Description of Artificial Sequence: Synthetic coding sequence
  source 1..3063: mol_type = other DNA
atggcccagttccccaccccatttggaggcagcctggacatctgggccatcaccgtggaggagcgggccaagcatgaccagcagttccacagcctgaagcccatcagcggcttcatcaccggggaccaggccaggaacttcttcttccagagcggcctgccccagcctgtgctggcccagatctgggccctggccgacatgaacaatgatggccgcatggaccaggtggagttcagcatcgccatgaagctgatcaagctgaagctgcagggctaccagctgcccagcgccctgccccctgtgatgaagcagcagcctgtggccatcagcagcgccccagccttcggcatgggcggcatcgcctccatgccacccctgacagctgtggcccctgtgcccatgggcagcatccctgtggtgggcatgagccccaccctggtgtcctctgtgcccacagctgctgtgccccccctggccaacggggcccctcctgtgatccagcccctgcctgcctttgcccaccctgctgccaccctgcccaagagcagcagcttcagccgcagcggccctggcagccagctgaacaccaagctgcagaaggcccagagctttgatgtggcctctgtgccccctgtggccgagtgggccgtgccccagagcagccggctgaagtaccggcagctgttcaacagccatgacaagaccatgagcggccacctgaccggcccccaggcccggaccatcctgatgcagagcagcctgccccaggcccagctggccagcatctggaacctgagtgacatcgaccaggacggcaagctgacagctgaggagttcatcctggccatgcacctgattgatgtggccatgagcggccagcccctgccccctgtgctgcccccagagtacatccccccatccttcagaagagtgcgcagcggcagcggcatcagcgtcatcagcagcacctctgtggaccagaggctgcctgaggagcctgtgctggaggatgagcagcagcagctggagaagaagctgcctgtgacctttgaggacaagaagcgggagaactttgagcggggcaacctggagctggagaagaggcggcaggccctgctggagcagcagaggaaggagcaggagcggctggcccagctggagagagctgagcaggagaggaaggagcgggagcggcaggagcaggagaggaagaggcagctggagctggagaagcagctggagaagcagcgggagctggagcggcagcgggaggaggagaggaggaaggagattgaaagaagagaggccgccaagcgggagctggagcggcagaggcagctggagtgggagaggaacagacggcaggagctgctgaaccagaggaacaaggagcaggaggacatcgtggtgctgaaggccaagaagaagaccctggagtttgagctggaggccctgaatgacaagaagcaccagctggagggcaagctgcaggacatccgctgccgcctgaccacccagaggcaggagattgagagcaccaacaagagccgggagctgagaattgctgagatcacccacctgcagcagcagctgcaggagagccagcagatgctgggccgcctcatccctgagaagcagatcctgaatgaccagctgaagcaggtgcagcagaacagcctgcaccgggacagcctggtgaccctgaagagggccctggaggccaaggagctggcccggcagcacctgcgggaccagctggatgaggtggagaaggagaccaggagcaagctgcaggagattgacatcttcaacaaccagctgaaggagctgcgggagatccacaacaagcagcagctgcagaagcagaagtccatggaggccgagcggctgaagcagaaggagcaggagaggaagatcatcgagctggagaagcagaaggaggaggcccagaggcgggcccaggagcgggacaagcagtggctggagcacgtgcagcaggaggatgagcaccagaggcccaggaagctgcacgaggaggagaagctgaagcgggaggagagcgtgaagaagaaggatggagaggagaagggcaagcaggaggcccaggacaagctgggccgcctcttccaccagcaccaggagcccgccaagccagctgtgcaggccccctggagcacagctgagaagggccccctgaccatcagcgcccaggagaatgtgaaggtggtgtactaccgggccctgtacccctttgagagccgcagccatgatgagatcaccatccagcccggggacatcgtgatggtggatgagagccagacaggagagcccggctggctgggcggggagctgaagggcaagacaggctggttccctgccaactatgcagagaagatcccagaaaatgaggtgcctgcccctgtgaagcctgtgacagacagcaccagcgccccagcccccaagctggccctgcgggagaccccagcccccctggccgtgaccagcagcgagcccagcaccacccccaacaactgggccgacttcagcagcacctggcccaccagcaccaatgagaagccagagacagacaactgggatgcctgggccgcccagcccagcctgactgtgcccagcgctggccagctgcggcagaggtctgccttcaccccagccacagccaccggcagcagccccagccctgtgctgggccagcctgacttcctgctgcaccccagcatgaggctgggccacatgcagccccgcatcgtgctgctcttcccagaccccctgcagtgcagcaccagccggctgctgcccatgctgcggcccaggcctggggtgcccttcctgcggagccccagctgccagagccccagccaccccagccggcccatcagtgatgctgcccccagcgtgaagttcaccctgatgcctcctggccgcatccacccctgcttcctgttcatcccagctgtgaacagcagaaattccttcctggtgtacttcatcctgcccggcggcaccctgggctgcttctacctgtgcctgccccactacctgtag

SEQ ID NO: 156503 - DNA, 3435 bp, synthetic construct
  misc_feature 1..3435: note = Description of Artificial Sequence: Synthetic coding sequence
  source 1..3435: mol_type = other DNA
atggcccagttccccaccccatttggaggcagcctggacatctgggccatcaccgtggaggagcgggccaagcatgaccagcagttccacagcctgaagcccatcagcggcttcatcaccggggaccaggccaggaacttcttcttccagagcggcctgccccagcctgtgctggcccagatctgggccctggccgacatgaacaatgatggccgcatggaccaggtggagttcagcatcgccatgaagctgatcaagctgaagctgcagggctaccagctgcccagcgccctgccccctgtgatgaagcagcagcctgtggccatcagcagcgccccagccttcggcatgggcggcatcgcctccatgccacccctgacagctgtggcccctgtgcccatgggcagcatccctgtggtgggcatgagccccaccctggtgtcctctgtgcccacagctgctgtgccccccctggccaacggggcccctcctgtgatccagcccctgcctgcctttgcccaccctgctgccaccctgcccaagagcagcagcttcagccgcagcggccctggcagccagctgaacaccaagctgcagaaggcccagagctttgatgtggcctctgtgccccctgtggccgagtgggccgtgccccagagcagccggctgaagtaccggcagctgttcaacagccatgacaagaccatgagcggccacctgaccggcccccaggcccggaccatcctgatgcagagcagcctgccccaggcccagctggccagcatctggaacctgagtgacatcgaccaggacggcaagctgacagctgaggagttcatcctggccatgcacctgattgatgtggccatgagcggccagcccctgccccctgtgctgcccccagagtacatccccccatccttcagaagagtgcgcagcggcagcggcatcagcgtcatcagcagcacctctgtggaccagaggctgcctgaggagcctgtgctggaggatgagcagcagcagctggagaagaagctgcctgtgacctttgaggacaagaagcgggagaactttgagcggggcaacctggagctggagaagaggcggcaggccctgctggagcagcagaggaaggagcaggagcggctggcccagctggagagagctgagcaggagaggaaggagcgggagcggcaggagcaggagaggaagaggcagctggagctggagaagcagctggagaagcagcgggagctggagcggcagcgggaggaggagaggaggaaggagattgaaagaagagaggccgccaagcgggagctggagcggcagaggcagctggagtgggagaggaacagacggcaggagctgctgaaccagaggaacaaggagcaggaggacatcgtggtgctgaaggccaagaagaagaccctggagtttgagctggaggccctgaatgacaagaagcaccagctggagggcaagctgcaggacatccgctgccgcctgaccacccagaggcaggagattgagagcaccaacaagagccgggagctgagaattgctgagatcacccacctgcagcagcagctgcaggagagccagcagatgctgggccgcctcatccctgagaagcagatcctgaatgaccagctgaagcaggtgcagcagaacagcctgcaccgggacagcctggtgaccctgaagagggccctggaggccaaggagctggcccggcagcacctgcgggaccagctggatgaggtggagaaggagaccaggagcaagctgcaggagattgacatcttcaacaaccagctgaaggagctgcgggagatccacaacaagcagcagctgcagaagcagaagtccatggaggccgagcggctgaagcagaaggagcaggagaggaagatcatcgagctggagaagcagaaggaggaggcccagaggcgggcccaggagcgggacaagcagtggctggagcacgtgcagcaggaggatgagcaccagaggcccaggaagctgcacgaggaggagaagctgaagcgggaggagagcgtgaagaagaaggatggagaggagaagggcaagcaggaggcccaggacaagctgggccgcctcttccaccagcaccaggagcccgccaagccagctgtgcaggccccctggagcacagctgagaagggccccctgaccatcagcgcccaggagaatgtgaaggtggtgtactaccgggccctgtacccctttgagagccgcagccatgatgagatcaccatccagcccggggacatcgtgatggtggatgagagccagacaggagagcccggctggctgggcggggagctgaagggcaagacaggctggttccctgccaactatgcagagaagatcccagaaaatgaggtgcctgcccctgtgaagcctgtgacagacagcaccagcgccccagcccccaagctggccctgcgggagaccccagcccccctggccgtgaccagcagcgagcccagcaccacccccaacaactgggccgacttcagcagcacctggcccaccagcaccaatgagaagccagagacagacaactgggatgcctgggccgcccagcccagcctgactgtgcccagcgctggccagctgcggcagaggtctgccttcaccccagccacagccaccggcagcagccccagccctgtgctgggccagggcgagaaggtggagggcctgcaggcccaggccctgtacccctggagggccaagaaggacaaccacctgaacttcaacaagaatgatgtgatcaccgtgctggagcagcaggacatgtggtggtttggagaggtgcagggccagaagggctggttccccaagagctatgtgaagctgatcagcggccccatcaggaagagcacctccatggacagcggcagcagcgagagccctgccagcctgaagagggtggccagccctgctgccaagcctgtggtgtctggagaggagatcgcccaggtgattgccagctacacagccaccggccctgagcagctgaccctggcccctggccagctgatcctgatcaggaagaagaaccctgggggctggtgggagggggagctgcaggcccggggcaagaagaggcagatcggctggttccctgccaactacgtgaagctgctgagccctggcaccagcaagatcacccccacagagccccccaagagcacagccctggccgctgtgtgccaggtgattggcatgtatgactacacagcccagaatgatgatgagctggccttcaacaagggccagatcatcaacgtgctgaacaaggaggaccctgactggtggaagggggaggtgaatggccaggtgggcctcttccccagcaactacgtgaagctgaccacagacatggaccccagccagcagtag

SEQ ID NO: 156504 - DNA, 3648 bp, synthetic construct
  misc_feature 1..3648: note = Description of Artificial Sequence: Synthetic coding sequence
  source 1..3648: mol_type = other DNA
atggcccagttccccaccccatttggaggcagcctggacatctgggccatcaccgtggaggagcgggccaagcatgaccagcagttccacagcctgaagcccatcagcggcttcatcaccggggaccaggccaggaacttcttcttccagagcggcctgccccagcctgtgctggcccagatctgggccctggccgacatgaacaatgatggccgcatggaccaggtggagttcagcatcgccatgaagctgatcaagctgaagctgcagggctaccagctgcccagcgccctgccccctgtgatgaagcagcagcctgtggccatcagcagcgccccagccttcggcatgggcggcatcgcctccatgccacccctgacagctgtggcccctgtgcccatgggcagcatccctgtggtgggcatgagccccaccctggtgtcctctgtgcccacagctgctgtgccccccctggccaacggggcccctcctgtgatccagcccctgcctgcctttgcccaccctgctgccaccctgcccaagagcagcagcttcagccgcagcggccctggcagccagctgaacaccaagctgcagaaggcccagagctttgatgtggcctctgtgccccctgtggccgagtgggccgtgccccagagcagccggctgaagtaccggcagctgttcaacagccatgacaagaccatgagcggccacctgaccggcccccaggcccggaccatcctgatgcagagcagcctgccccaggcccagctggccagcatctggaacctgagtgacatcgaccaggacggcaagctgacagctgaggagttcatcctggccatgcacctgattgatgtggccatgagcggccagcccctgccccctgtgctgcccccagagtacatccccccatccttcagaagagtgcgcagcggcagcggcatcagcgtcatcagcagcacctctgtggaccagaggctgcctgaggagcctgtgctggaggatgagcagcagcagctggagaagaagctgcctgtgacctttgaggacaagaagcgggagaactttgagcggggcaacctggagctggagaagaggcggcaggccctgctggagcagcagaggaaggagcaggagcggctggcccagctggagagagctgagcaggagaggaaggagcgggagcggcaggagcaggagaggaagaggcagctggagctggagaagcagctggagaagcagcgggagctggagcggcagcgggaggaggagaggaggaaggagattgaaagaagagaggccgccaagcgggagctggagcggcagaggcagctggagtgggagaggaacagacggcaggagctgctgaaccagaggaacaaggagcaggaggacatcgtggtgctgaaggccaagaagaagaccctggagtttgagctggaggccctgaatgacaagaagcaccagctggagggcaagctgcaggacatccgctgccgcctgaccacccagaggcaggagattgagagcaccaacaagagccgggagctgagaattgctgagatcacccacctgcagcagcagctgcaggagagccagcagatgctgggccgcctcatccctgagaagcagatcctgaatgaccagctgaagcaggtgcagcagaacagcctgcaccgggacagcctggtgaccctgaagagggccctggaggccaaggagctggcccggcagcacctgcgggaccagctggatgaggtggagaaggagaccaggagcaagctgcaggagattgacatcttcaacaaccagctgaaggagctgcgggagatccacaacaagcagcagctgcagaagcagaagtccatggaggccgagcggctgaagcagaaggagcaggagaggaagatcatcgagctggagaagcagaaggaggaggcccagaggcgggcccaggagcgggacaagcagtggctggagcacgtgcagcaggaggatgagcaccagaggcccaggaagctgcacgaggaggagaagctgaagcgggaggagagcgtgaagaagaaggatggagaggagaagggcaagcaggaggcccaggacaagctgggccgcctcttccaccagcaccaggagcccgccaagccagctgtgcaggccccctggagcacagctgagaagggccccctgaccatcagcgcccaggagaatgtgaaggtggtgtactaccgggccctgtacccctttgagagccgcagccatgatgagatcaccatccagcccggggacatcgtgatggtggatgagagccagacaggagagcccggctggctgggcggggagctgaagggcaagacaggctggttccctgccaactatgcagagaagatcccagaaaatgaggtgcctgcccctgtgaagcctgtgacagacagcaccagcgccccagcccccaagctggccctgcgggagaccccagcccccctggccgtgaccagcagcgagcccagcaccacccccaacaactgggccgacttcagcagcacctggcccaccagcaccaatgagaagccagagacagacaactgggatgcctgggccgcccagcccagcctgactgtgcccagcgctggccagctgcggcagaggtctgccttcaccccagccacagccaccggcagcagccccagccctgtgctgggccagggcgagaaggtggagggcctgcaggcccaggccctgtacccctggagggccaagaaggacaaccacctgaacttcaacaagaatgatgtgatcaccgtgctggagcagcaggacatgtggtggtttggagaggtgcagggccagaagggctggttccccaagagctatgtgaagctgatcagcggccccatcaggaagagcacctccatggacagcggcagcagcgagagccctgccagcctgaagagggtggccagccctgctgccaagcctgtggtgtctggagaggagttcatcgccatgtacacctatgagagcagcgagcagggcgacctgaccttccagcagggagatgtgatcctggtgaccaagaaggatggagactggtggacaggaacagtgggggacaaggccggggtcttccccagcaactacgtgcggctgaaggacagcgagggcagcggcacagctgggaagacaggcagcctgggcaagaagccagaaattgcccaggtgattgccagctacacagccactggacctgagcagctgaccctggcccctggccagctgatcctgatcaggaagaagaaccctgggggctggtgggagggggagctgcaggcccggggcaagaagaggcagatcggctggttccctgccaactacgtgaagctgctgagccctggcaccagcaagatcacccccacagagccccccaagagcacagccctggccgctgtgtgccaggtgattggcatgtatgactacacagcccagaatgatgatgagctggccttcaacaagggccagatcatcaacgtgctgaacaaggaggaccctgactggtggaagggggaggtgaatggccaggtgggcctcttccccagcaactacgtgaagctgaccacagacatggaccccagccagcagtag

SEQ ID NO: 156505 - DNA, 3537 bp, synthetic construct
  misc_feature 1..3537: note = Description of Artificial Sequence: Synthetic coding sequence
  source 1..3537: mol_type = other DNA
atggcccagttccccaccccatttggaggcagcctggacatctgggccatcaccgtggaggagcgggccaagcatgaccagcagttccacagcctgaagcccatcagcggcttcatcaccggggaccaggccaggaacttcttcttccagagcggcctgccccagcctgtgctggcccagatctgggccctggccgacatgaacaatgatggccgcatggaccaggtggagttcagcatcgccatgaagctgatcaagctgaagctgcagggctaccagctgcccagcgccctgccccctgtgatgaagcagcagcctgtggccatcagcagcgccccagcctttgctgctgtgccccccctggccaatggagcccctcctgtgatccagcccctgcctgcctttgcccaccctgctgccaccctgcccaagagcagcagcttcagccgcagcggccctggcagccagctgaacaccaagctgcagaaggcccagagctttgatgtggcctctgtgccccctgtggccgagtgggccgtgccccagagcagccggctgaagtaccggcagctgttcaacagccatgacaagaccatgagcggccacctgaccggcccccaggcccggaccatcctgatgcagagcagcctgccccaggcccagctggccagcatctggaacctgagtgacatcgaccaggacggcaagctgacagctgaggagttcatcctggccatgcacctgattgatgtggccatgagcggccagcccctgccccctgtgctgcccccagagtacatcccccccagcttccggcgggtgcgcagcggcagcggcatcagcgtcatcagcagcacctctgtggaccagaggctgcctgaggagcctgtgctggaggatgagcagcagcagctggagaagaagctgcctgtgacctttgaggacaagaagagagaaaattttgagcggggcaacctggagctggagaagaggcggcaggccctgctggagcagcagaggaaggagcaggagcggctggcccagctggagcgggcagagcaggagaggaaggagcgggagcggcaggagcaggagaggaagaggcagctggagctggagaagcagctggagaagcagcgggagctggagcggcagcgggaggaggagaggaggaaggagattgaaagaagagaagctgccaagcgggagctggagcggcagaggcagctggagtgggagaggaacagacggcaggagctgctgaaccagaggaacaaggagcaggaggacatcgtggtgctgaaggccaagaagaagaccctggagtttgagctggaggccctgaatgacaagaagcaccagctggagggcaagctgcaggacatccgctgccgcctgaccacccagaggcaggagattgagagcaccaacaagagccgggagctgagaattgctgagatcacccacctgcagcagcagctgcaggagagccagcagatgctgggccgcctcatccctgagaagcagatcctgaatgaccagctgaagcaggtgcagcagaacagcctgcaccgggacagcctggtgaccctgaagagggccctggaggccaaggagctggcccggcagcacctgcgggaccagctggatgaggtggagaaggagaccaggagcaagctgcaggagattgacatcttcaacaaccagctgaaggagctgcgggagatccacaacaagcagcagctgcagaagcagaagtccatggaggccgagcggctgaagcagaaggagcaggagaggaagatcatcgagctggagaagcagaaggaggaggcccagaggcgggcccaggagcgggacaagcagtggctggagcacgtgcagcaggaggatgagcaccagaggcccaggaagctgcacgaggaggagaagctgaagcgggaggagagcgtgaagaagaaggatggagaggagaagggcaagcaggaggcccaggacaagctgggccgcctcttccaccagcaccaggagcccgccaagccagctgtgcaggccccctggagcacagctgagaagggccccctgaccatcagcgcccaggagaatgtgaaggtggtgtactaccgggccctgtacccctttgagagccgcagccatgatgagatcaccatccagcccggggacatcgtgatggtggatgagagccagacaggagagcccggctggctgggcggggagctgaagggcaagacaggctggttccctgccaactatgcagagaagatcccagaaaatgaggtgcctgcccctgtgaagcctgtgacagacagcaccagcgccccagcccccaagctggccctgcgggagaccccagcccccctggccgtgaccagcagcgagcccagcaccacccccaacaactgggccgacttcagcagcacctggcccaccagcaccaatgagaagccagagacagacaactgggatgcctgggccgcccagcccagcctgactgtgcccagcgctggccagctgcggcagaggtctgccttcaccccagccacagccaccggcagcagccccagccctgtgctgggccagggcgagaaggtggagggcctgcaggcccaggccctgtacccctggagggccaagaaggacaaccacctgaacttcaacaagaatgatgtgatcaccgtgctggagcagcaggacatgtggtggtttggagaggtgcagggccagaagggctggttccccaagagctatgtgaagctgatcagcggccccatcaggaagagcacctccatggattctggcagcagcgagagccctgccagcctgaagagggtggccagccctgctgccaagcctgtggtgtctggagaggagttcatcgccatgtacacctatgagagcagcgagcagggcgacctgaccttccagcagggagatgtgatcctggtgaccaagaaggatggagactggtggacaggcaccgtgggggacaaggccggggtcttccccagcaactacgtgcggctgaaggacagcgagggcagcggcacagctgggaagacaggcagcctgggcaagaagccagagatcgcccaggtgattgccagctacacagccaccggccctgagcagctgaccctggcccctggccagctgatcctgatcaggaagaagaaccctgggggctggtgggagggggagctgcaggcccggggcaagaagaggcagatcggctggttccctgccaactacgtgaagctgctgagccctggcaccagcaagatcacccccacagagccccccaagagcacagccctggccgctgtgtgccaggtgattggcatgtatgactacacagcccagaatgatgatgagctggccttcaacaagggccagatcatcaacgtgctgaacaaggaggaccctgactggtggaagggggaggtgaatggccaggtgggcctcttccccagcaactacgtgaagctgaccacagacatggaccccagccagcagtag

SEQ ID NO: 156506 - DNA, 3450 bp, synthetic construct
  misc_feature 1..3450: note = Description of Artificial Sequence: Synthetic coding sequence
  source 1..3450: mol_type = other DNA
atggcccagttccccaccccatttggaggcagcctggacatctgggccatcaccgtggaggagcgggccaagcatgaccagcagttccacagcctgaagcccatcagcggcttcatcaccggggaccaggccaggaacttcttcttccagagcggcctgccccagcctgtgctggcccagatctgggccctggccgacatgaacaatgatggccgcatggaccaggtggagttcagcatcgccatgaagctgatcaagctgaagctgcagggctaccagctgcccagcgccctgccccctgtgatgaagcagcagcctgtggccatcagcagcgccccagccttcggcatgggcggcatcgcctccatgccacccctgacagctgtggcccctgtgcccatgggcagcatccctgtggtgggcatgagccccaccctggtgtcctctgtgcccacagctgctgtgccccccctggccaacggggcccctcctgtgatccagcccctgcctgcctttgcccaccctgctgccaccctgcccaagagcagcagcttcagccgcagcggccctggcagccagctgaacaccaagctgcagaaggcccagagctttgatgtggcctctgtgccccctgtggccgagtgggccgtgccccagagcagccggctgaagtaccggcagctgttcaacagccatgacaagaccatgagcggccacctgaccggcccccaggcccggaccatcctgatgcagagcagcctgccccaggcccagctggccagcatctggaacctgagtgacatcgaccaggacggcaagctgacagctgaggagttcatcctggccatgcacctgattgatgtggccatgagcggccagcccctgccccctgtgctgcccccagagtacatccccccatccttcagaagagtgcgcagcggcagcggcatcagcgtcatcagcagcacctctgtggaccagaggctgcctgaggagcctgtgctggaggatgagcagcagcagctggagaagaagctgcctgtgacctttgaggacaagaagcgggagaactttgagcggggcaacctggagctggagaagaggcggcaggccctgctggagcagcagaggaaggagcaggagcggctggcccagctggagagagctgagcaggagaggaaggagcgggagcggcaggagcaggagaggaagaggcagctggagctggagaagcagctggagaagcagcgggagctggagcggcagcgggaggaggagaggaggaaggagattgaaagaagagaggccgccaagcgggagctggagcggcagaggcagctggagtgggagaggaacagacggcaggagctgctgaaccagaggaacaaggagcaggaggacatcgtggtgctgaaggccaagaagaagaccctggagtttgagctggaggccctgaatgacaagaagcaccagctggagggcaagctgcaggacatccgctgccgcctgaccacccagaggcaggagattgagagcaccaacaagagccgggagctgagaattgctgagatcacccacctgcagcagcagctgcaggagagccagcagatgctgggccgcctcatccctgagaagcagatcctgaatgaccagctgaagcaggtgcagcagaacagcctgcaccgggacagcctggtgaccctgaagagggccctggaggccaaggagctggcccggcagcacctgcgggaccagctggatgaggtggagaaggagaccaggagcaagctgcaggagattgacatcttcaacaaccagctgaaggagctgcgggagatccacaacaagcagcagctgcagaagcagaagtccatggaggccgagcggctgaagcagaaggagcaggagaggaagatcatcgagctggagaagcagaaggaggaggcccagaggcgggcccaggagcgggacaagcagtggctggagcacgtgcagcaggaggatgagcaccagaggcccaggaagctgcacgaggaggagaagctgaagcgggaggagagcgtgaagaagaaggatggagaggagaagggcaagcaggaggcccaggacaagctgggccgcctcttccaccagcaccaggagcccgccaagccagctgtgcaggccccctggagcacagctgagaagggccccctgaccatcagcgcccaggagaatgtgaaggtggtgtactaccgggccctgtacccctttgagagccgcagccatgatgagatcaccatccagcccggggacatcgtgatggtgaagggggagtgggtggatgagagccagacaggagagcccggctggctgggcggggagctgaagggcaagacaggctggttccctgccaactatgcagagaagatcccagaaaatgaggtgcctgcccctgtgaagcctgtgacagacagcaccagcgccccagcccccaagctggccctgcgggagaccccagcccccctggccgtgaccagcagcgagcccagcaccacccccaacaactgggccgacttcagcagcacctggcccaccagcaccaatgagaagccagagacagacaactgggatgcctgggccgcccagcccagcctgactgtgcccagcgctggccagctgcggcagaggtctgccttcaccccagccacagccaccggcagcagccccagccctgtgctgggccagggcgagaaggtggagggcctgcaggcccaggccctgtacccctggagggccaagaaggacaaccacctgaacttcaacaagaatgatgtgatcaccgtgctggagcagcaggacatgtggtggtttggagaggtgcagggccagaagggctggttccccaagagctatgtgaagctgatcagcggccccatcaggaagagcacctccatggattctggcagcagcgagagccctgccagcctgaagagggtggccagccctgctgccaagcctgtggtgtctggagaggagatcgcccaggtgattgccagctacacagccactggacctgagcagctgaccctggcccctggccagctgatcctgatcaggaagaagaaccctgggggctggtgggagggggagctgcaggcccggggcaagaagaggcagatcggctggttccctgccaactacgtgaagctgctgagccctggcaccagcaagatcacccccacagagccccccaagagcacagccctggccgctgtgtgccaggtgattggcatgtatgactacacagcccagaatgatgatgagctggccttcaacaagggccagatcatcaacgtgctgaacaaggaggaccctgactggtggaagggggaggtgaatggccaggtgggcctcttccccagcaactacgtgaagctgaccacagacatggaccccagccagcagtag

SEQ ID NO: 156507 - DNA, 5151 bp, synthetic construct
  misc_feature 1..5151: note = Description of Artificial Sequence: Synthetic coding sequence
  source 1..5151: mol_type = other DNA
atggcccagttccccaccccatttggaggcagcctggacatctgggccatcaccgtggaggagcgggccaagcatgaccagcagttccacagcctgaagcccatcagcggcttcatcaccggggaccaggccaggaacttcttcttccagagcggcctgccccagcctgtgctggcccagatctgggccctggccgacatgaacaatgatggccgcatggaccaggtggagttcagcatcgccatgaagctgatcaagctgaagctgcagggctaccagctgcccagcgccctgccccctgtgatgaagcagcagcctgtggccatcagcagcgccccagccttcggcatgggcggcatcgcctccatgccacccctgacagctgtggcccctgtgcccatgggcagcatccctgtggtgggcatgagccccaccctggtgtcctctgtgcccacagctgctgtgccccccctggccaacggggcccctcctgtgatccagcccctgcctgcctttgcccaccctgctgccaccctgcccaagagcagcagcttcagccgcagcggccctggcagccagctgaacaccaagctgcagaaggcccagagctttgatgtggcctctgtgccccctgtggccgagtgggccgtgccccagagcagccggctgaagtaccggcagctgttcaacagccatgacaagaccatgagcggccacctgaccggcccccaggcccggaccatcctgatgcagagcagcctgccccaggcccagctggccagcatctggaacctgagtgacatcgaccaggacggcaagctgacagctgaggagttcatcctggccatgcacctgattgatgtggccatgagcggccagcccctgccccctgtgctgcccccagagtacatccccccatccttcagaagagtgcgcagcggcagcggcatcagcgtcatcagcagcacctctgtggaccagaggctgcctgaggagcctgtgctggaggatgagcagcagcagctggagaagaagctgcctgtgacctttgaggacaagaagcgggagaactttgagcggggcaacctggagctggagaagaggcggcaggccctgctggagcagcagaggaaggagcaggagcggctggcccagctggagagagctgagcaggagaggaaggagcgggagcggcaggagcaggagaggaagaggcagctggagctggagaagcagctggagaagcagcgggagctggagcggcagcgggaggaggagaggaggaaggagattgaaagaagagaggccgccaagcgggagctggagcggcagaggcagctggagtgggagaggaacagacggcaggagctgctgaaccagaggaacaaggagcaggaggacatcgtggtgctgaaggccaagaagaagaccctggagtttgagctggaggccctgaatgacaagaagcaccagctggagggcaagctgcaggacatccgctgccgcctgaccacccagaggcaggagattgagagcaccaacaagagccgggagctgagaattgctgagatcacccacctgcagcagcagctgcaggagagccagcagatgctgggccgcctcatccctgagaagcagatcctgaatgaccagctgaagcaggtgcagcagaacagcctgcaccgggacagcctggtgaccctgaagagggccctggaggccaaggagctggcccggcagcacctgcgggaccagctggatgaggtggagaaggagaccaggagcaagctgcaggagattgacatcttcaacaaccagctgaaggagctgcgggagatccacaacaagcagcagctgcagaagcagaagtccatggaggccgagcggctgaagcagaaggagcaggagaggaagatcatcgagctggagaagcagaaggaggaggcccagaggcgggcccaggagcgggacaagcagtggctggagcacgtgcagcaggaggatgagcaccagaggcccaggaagctgcacgaggaggagaagctgaagcgggaggagagcgtgaagaagaaggatggagaggagaagggcaagcaggaggcccaggacaagctgggccgcctcttccaccagcaccaggagcccgccaagccagctgtgcaggccccctggagcacagctgagaagggccccctgaccatcagcgcccaggagaatgtgaaggtggtgtactaccgggccctgtacccctttgagagccgcagccatgatgagatcaccatccagcccggggacatcgtgatggtggatgagagccagacaggagagcccggctggctgggcggggagctgaagggcaagacaggctggttccctgccaactatgcagagaagatcccagaaaatgaggtgcctgcccctgtgaagcctgtgacagacagcaccagcgccccagcccccaagctggccctgcgggagaccccagcccccctggccgtgaccagcagcgagcccagcaccacccccaacaactgggccgacttcagcagcacctggcccaccagcaccaatgagaagccagagacagacaactgggatgcctgggccgcccagcccagcctgactgtgcccagcgctggccagctgcggcagaggtctgccttcaccccagccacagccaccggcagcagccccagccctgtgctgggccagggcgagaaggtggagggcctgcaggcccaggccctgtacccctggagggccaagaaggacaaccacctgaacttcaacaagaatgatgtgatcaccgtgctggagcagcaggacatgtggtggtttggagaggtgcagggccagaagggctggttccccaagagctatgtgaagctgatcagcggccccatcaggaagagcacctccatggacagcggcagcagcgagagccctgccagcctgaagagggtggccagccctgctgccaagcctgtggtgtctggagaggagttcatcgccatgtacacctatgagagcagcgagcagggcgacctgaccttccagcagggagatgtgatcctggtgaccaagaaggatggagactggtggacaggaacagtgggggacaaggccggggtcttccccagcaactacgtgcggctgaaggacagcgagggcagcggcacagctgggaagacaggcagcctgggcaagaagccagaaattgcccaggtgattgccagctacacagccactggacctgagcagctgaccctggcccctggccagctgatcctgatcaggaagaagaaccctgggggctggtgggagggggagctgcaggcccggggcaagaagaggcagatcggctggttccctgccaactacgtgaagctgctgagccctggcaccagcaagatcacccccacagagccccccaagagcacagccctggccgctgtgtgccaggtgattggcatgtatgactacacagcccagaatgatgatgagctggccttcaacaagggccagatcatcaacgtgctgaacaaggaggaccctgactggtggaagggggaggtgaatggccaggtgggcctcttccccagcaactacgtgaagctgaccacagacatggaccccagccagcagtggtgcagcgacctgcacctgctggacatgctgacccccacagagaggaagaggcagggctacatccacgagctgattgtgacagaagaaaattatgtgaatgacctgcagctggtgacagagatcttccagaagcccctgatggagagcgagctgctgacagagaaggaggtggccatgatctttgtgaactggaaggagctgatcatgtgcaacatcaagctgctgaaggccctgcgggtgaggaagaagatgtctggagagaagatgcctgtgaagatgattggagacatcctgagcgcccagctgccccacatgcagccctacatccgcttctgcagccggcagctgaatggagctgccctgatccagcagaagacagatgaggccccagacttcaaggagtttgtgaagaggctggccatggacccccgctgcaagggcatgcccctgagcagcttcatcctgaagcccatgcagagggtgacccgctaccccctcatcatcaagaacatcctggagaacaccccagagaaccacccagaccacagccacctgaagcacgccctggagaaggccgaggagctgtgcagccaggtgaatgaaggagtgcgggagaaggaaaattctgaccggctggagtggatccaggcccacgtgcagtgtgagggcctgtctgagcagctggtgttcaacagcgtgaccaactgcctgggccccaggaagttcctgcacagcggcaagctgtacaaggccaagagcaacaaggagctgtatggcttcctgttcaatgacttcctgctgctgacccagatcaccaagcccctgggcagcagcggcacagacaaggtgttcagccccaagagcaacctgcagtacaagatgtacaagacccccatcttcctgaatgaggtgctggtgaagctgcccacagaccccagcggagatgagcccatcttccacatcagccacatcgacagagtgtacaccctgcgggcagagagcatcaatgaaagaacagcctgggtgcagaagatcaaggccgccagcgagctgtacattgaaacagagaagaagaagcgggagaaggcctacctggtgcgcagccagagggccaccggcatcggccgcctgatggtgaatgtggtggagggcatcgagctgaagccctgccgcagccacggcaagagcaacccctactgtgaggtgaccatgggcagccagtgccacatcaccaagaccatccaggacaccctgaaccccaagtggaacagcaactgccagttcttcatccgggacctggagcaggaggtgctgtgcatcaccgtgtttgagcgggaccagttctccccagatgacttcctgggccgcacagagatccgggtggccgacatcaagaaggaccagggcagcaaaggacctgtgaccaagtgcctgctgctgcacgaggtgcccactggagagatcgtggtgcggctggacctgcagctgtttgatgagccctag

SEQ ID NO: 156508 - DNA, 4983 bp, synthetic construct
  misc_feature 1..4983: note = Description of Artificial Sequence: Synthetic coding sequence
  source 1..4983: mol_type = other DNA
atggcccagttccccaccccatttggaggcagcctggacatctgggccatcaccgtggaggagcgggccaagcatgaccagcagttccacagcctgaagcccatcagcggcttcatcaccggggaccaggccaggaacttcttcttccagagcggcctgccccagcctgtgctggcccagatctgggccctggccgacatgaacaatgatggccgcatggaccaggtggagttcagcatcgccatgaagctgatcaagctgaagctgcagggctaccagctgcccagcgccctgccccctgtgatgaagcagcagcctgtggccatcagcagcgccccagccttcggcatgggcggcatcgcctccatgccacccctgacagctgtggcccctgtgcccatgggcagcatccctgtggtgggcatgagccccaccctggtgtcctctgtgcccacagctgctgtgccccccctggccaacggggcccctcctgtgatccagcccctgcctgcctttgcccaccctgctgccaccctgcccaagagcagcagcttcagccgcagcggccctggcagccagctgaacaccaagctgcagaaggcccagagctttgatgtggcctctgtgccccctgtggccgagtgggccgtgccccagagcagccggctgaagtaccggcagctgttcaacagccatgacaagaccatgagcggccacctgaccggcccccaggcccggaccatcctgatgcagagcagcctgccccaggcccagctggccagcatctggaacctgagtgacatcgaccaggacggcaagctgacagctgaggagttcatcctggccatgcacctgattgatgtggccatgagcggccagcccctgccccctgtgctgcccccagagtacatccccccatccttcagaagagtgcgcagcggcagcggcatcagcgtcatcagcagcacctctgtggaccagaggctgcctgaggagcctgtgctggaggatgagcagcagcagctggagaagaagctgcctgtgacctttgaggacaagaagcgggagaactttgagcggggcaacctggagctggagaagaggcggcaggccctgctggagcagcagaggaaggagcaggagcggctggcccagctggagagagctgagcaggagaggaaggagcgggagcggcaggagcaggagaggaagaggcagctggagctggagaagcagctggagaagcagcgggagctggagcggcagcgggaggaggagaggaggaaggagattgaaagaagagaggccgccaagcgggagctggagcggcagaggcagctggagtgggagaggaacagacggcaggagctgctgaaccagaggaacaaggagcaggaggacatcgtggtgctgaaggccaagaagaagaccctggagtttgagctggaggccctgaatgacaagaagcaccagctggagggcaagctgcaggacatccgctgccgcctgaccacccagaggcaggagattgagagcaccaacaagagccgggagctgagaattgctgagatcacccacctgcagcagcagctgcaggagagccagcagatgctgggccgcctcatccctgagaagcagatcctgaatgaccagctgaagcaggtgcagcagaacagcctgcaccgggacagcctggtgaccctgaagagggccctggaggccaaggagctggcccggcagcacctgcgggaccagctggatgaggtggagaaggagaccaggagcaagctgcaggagattgacatcttcaacaaccagctgaaggagctgcgggagatccacaacaagcagcagctgcagaagcagaagtccatggaggccgagcggctgaagcagaaggagcaggagaggaagatcatcgagctggagaagcagaaggaggaggcccagaggcgggcccaggagcgggacaagcagtggctggagcacgtgcagcaggaggatgagcaccagaggcccaggaagctgcacgaggaggagaagctgaagcgggaggagagcgtgaagaagaaggatggagaggagaagggcaagcaggaggcccaggacaagctgggccgcctcttccaccagcaccaggagcccgccaagccagctgtgcaggccccctggagcacagctgagaagggccccctgaccatcagcgcccaggagaatgtgaaggtggtgtactaccgggccctgtacccctttgagagccgcagccatgatgagatcaccatccagcccggggacatcgtgatggtggatgagagccagacaggagagcccggctggctgggcggggagctgaagggcaagacaggctggttccctgccaactatgcagagaagatcccagaaaatgaggtgcctgcccctgtgaagcctgtgacagacagcaccagcgccccagcccccaagctggccctgcgggagaccccagcccccctggccgtgaccagcagcgagcccagcaccacccccaacaactgggccgacttcagcagcacctggcccaccagcaccaatgagaagccagagacagacaactgggatgcctgggccgcccagcccagcctgactgtgcccagcgctggccagctgcggcagaggtctgccttcaccccagccacagccaccggcagcagccccagccctgtgctgggccagggcgagaaggtggagggcctgcaggcccaggccctgtacccctggagggccaagaaggacaaccacctgaacttcaacaagaatgatgtgatcaccgtgctggagcagcaggacatgtggtggtttggagaggtgcagggccagaagggctggttccccaagagctatgtgaagctgatcagcggccccatcaggaagagcacctccatggacagcggcagcagcgagagccctgccagcctgaagagggtggccagccctgctgccaagcctgtggtgtctggagaggagttcatcgccatgtacacctatgagagcagcgagcagggcgacctgaccttccagcagggagatgtgatcctggtgaccaagaaggatggagactggtggacaggaacagtgggggacaaggccggggtcttccccagcaactacgtgcggctgaaggacagcgagggcagcggcacagctgggaagacaggcagcctgggcaagaagccagaaattgcccaggtgattgccagctacacagccactggacctgagcagctgaccctggcccctggccagctgatcctgatcaggaagaagaaccctgggggctggtgggagggggagctgcaggcccggggcaagaagaggcagatcggctggttccctgccaactacgtgaagctgctgagccctggcaccagcaagatcacccccacagagccccccaagagcacagccctggccgctgtgtgccaggtgattggcatgtatgactacacagcccagaatgatgatgagctggccttcaacaagggccagatcatcaacgtgctgaacaaggaggaccctgactggtggaagggggaggtgaatggccaggtgggcctcttccccagcaactacgtgaagctgaccacagacatggaccccagccagcagtggtgcagcgacctgcacctgctggacatgctgacccccacagagaggaagaggcagggctacatccacgagctgattgtgacagaagaaaattatgtgaatgacctgcagctggtgacagagatcttccagaagcccctgatggagagcgagctgctgacagagaaggaggtggccatgatctttgtgaactggaaggagctgatcatgtgcaacatcaagctgctgaaggccctgcgggtgaggaagaagatgtctggagagaagatgcctgtgaagatgattggagacatcctgagcgcccagctgccccacatgcagccctacatccgcttctgcagccggcagctgaatggagctgccctgatccagcagaagacagatgaggccccagacttcaaggagtttgtgaagaggctggccatggacccccgctgcaagggcatgcccctgagcagcttcatcctgaagcccatgcagagggtgacccgctaccccctcatcatcaagaaccagctggtgttcaacagcgtgaccaactgcctgggccccaggaagttcctgcacagcggcaagctgtacaaggccaagagcaacaaggagctgtatggcttcctgttcaatgacttcctgctgctgacccagatcaccaagcccctgggcagcagcggcacagacaaggtgttcagccccaagagcaacctgcagtacaagatgtacaagacccccatcttcctgaatgaggtgctggtgaagctgcccacagaccccagcggagatgagcccatcttccacatcagccacatcgacagagtgtacaccctgcgggcagagagcatcaatgaaagaacagcctgggtgcagaagatcaaggccgccagcgagctgtacattgaaacagagaagaagaagcgggagaaggcctacctggtgcgcagccagagggccaccggcatcggccgcctgatggtgaatgtggtggagggcatcgagctgaagccctgccgcagccacggcaagagcaacccctactgtgaggtgaccatgggcagccagtgccacatcaccaagaccatccaggacaccctgaaccccaagtggaacagcaactgccagttcttcatccgggacctggagcaggaggtgctgtgcatcaccgtgtttgagcgggaccagttctccccagatgacttcctgggccgcacagagatccgggtggccgacatcaagaaggaccagggcagcaaaggacctgtgaccaagtgcctgctgctgcacgaggtgcccactggagagatcgtggtgcggctggacctgcagctgtttgatgagccctag

SEQ ID NO: 156509 - DNA, 348 bp, synthetic construct
  misc_feature 1..348: note = Description of Artificial Sequence: Synthetic coding sequence
  source 1..348: mol_type = other DNA
atggcccagttccccaccccatttggaggcagcctggacatctgggccatcaccgtggaggagcgggccaagcatgaccagcagttccacagcctgaagcccatcagcggcttcatcaccggggaccaggccaggaacttcttcttccagagcggcctgccccagcctgtgctggcccagatctgggccctggccgacatgaacaatgatggccgcatggaccaggtggagttcagcatcgccatgaagctgatcaagctgaagctgcagggctaccagctgcccagcgccctgccccctgtgatgaagcagcagcctgtggccatcagcagcgccccagccttctag

SEQ ID NO: 156510 - DNA, 237 bp, synthetic construct
  misc_feature 1..237: note = Description of Artificial Sequence: Synthetic coding sequence
  source 1..237: mol_type = other DNA
atggcccagttccccaccccatttggaggcagcctggacatctgggccatcaccgtggaggagcgggccaagcatgaccagcagttccacagcctgaagcccatcagcggcttcatcaccggggaccaggccaggaacttcttcttccagagcggcctgccccagcctgtgctggcccagatctgggccctggccgacatgaacaatgatggccgcatggaccaggtggagttctag

SEQ ID NO: 156511 - DNA, 5094 bp, synthetic construct
  misc_feature 1..5094: note = Description of Artificial Sequence: Synthetic coding sequence
  source 1..5094: mol_type = other DNA
atgatggcccagttccccacagccatgaatggaggccccaacatgtgggccatcaccagcgaggagaggaccaagcatgaccggcagtttgacaacctgaagcccagcggcggctacatcactggagaccaggccaggaacttcttcctgcagagcggcctgcctgcccctgtgctggccgagatctgggccctgagtgacctgaacaaggatggcaagatggaccagcaggagttcagcatcgccatgaagctgatcaagctgaagctgcagggccagcagctgcctgtggtgctgccccccatcatgaagcagccccccatgttcagccccctcatcagcgccaggtttggcatgggctccatgcccaacctgagcatcccccagcccctgcccccagctgcccccatcaccagcctgagcagcgccaccagcggcaccaacctgccccccctgatgatgcccacccccctggtgcccagcgtgtccaccagcagcctgcccaatggaacagccagcctcatccagcccctgcccatcccctacagcagcagcaccctgccccacggcagcagctacagcctgatgatgggcggctttggaggagccagcatccagaaggcccagagcctgattgacctgggcagcagcagcagcaccagcagcacagccagcctgagcggcaacagccccaagacaggcaccagcgagtgggccgtgccccagcccacccggctgaagtaccggcagaagttcaacaccctggacaagtccatgagcggctacctgagcggcttccaggccagaaatgccctgctgcagagcaacctgagccagacccagctggccaccatctggaccctggctgatgtggatggagatggccagctgaaggccgaggagttcatcctggccatgcacctgacagacatggccaaggccggccagcccctgcccctgaccctgcccccagagctggtgccccccagcttccggggcggcaagcagattgacagcatcaatggcaccctgcccagctaccagaagatgcaggaggaggagccccagaagaagctgcctgtgacctttgaggacaagaggaaggccaactatgagcggggcaacatggagctggagaagaggcggcaggccctgatggagcagcagcagcgggaggccgagaggaaggcccagaaggagaaggaggagtgggagaggaagcagcgggagctgcaggagcaggagtggaagaagcagctggagctggagaagaggctggagaagcagcgggagctggagcggcagcgggaggaggagaggaggaaggacatcgagcggcgggaggccgccaagcaggagctggagcggcagaggcggctggagtgggagcgcatccggcggcaggagctgctgaaccagaagaaccgggagcaggaggagatcgtgcggctgaacagcaagaagaagaacctgcacctggagctggaggccctgaatggcaagcaccagcagatcagcggccgcctgcaggatgtgcggctgaagaagcagacccagaagacagagctggaggtgctggacaagcagtgtgacctggagatcatggagatcaagcagctgcagcaggagctgcaggagtaccagaacaagctgatctacctggtgcctgagaagcagctgctgaatgaaagaatcaagaacatgcagttcagcaacaccccagacagcggcgtgtccctgctgcacaagaagagcctggagaaggaggagctgtgccagaggctgaaggagcagctggatgccctggagaaggagacagccagcaagctgtctgagatggacagcttcaacaaccagctgaagtgtggcaacatggatgacagcgtgctgcagtgcctgctgagcctgctgagctgcctgaacaacctcttcctgctgctgaaggagctgcgggagacctacaacacccagcagctggccctggagcagctgtacaagatcaagagggacaagctgaaggagattgaaaggaagaggctggagctgatgcagaagaagaagctggaggatgaggccgccaggaaggccaagcagggcaaggagaacctgtggaaggagaacctgaggaaggaggaggaggagaagcagaagaggctgcaggaggagaagacccaggagaagatccaggaggaggagaggaaggccgaggagaagcagaggaaggacaaggacaccctgaaggccgaggagaagaagcgggagacagcctctgtgctggtgaactaccgggccctgtacccctttgaggccagaaatcatgatgagatgtccttcaacagcggggacatcatccaggtggatgagaagacagtgggggagcccggctggctgtatggcagcttccagggcaactttggctggttcccctgcaactacgtggagaagatgcccagcagtgaaaatgagaaggctgtgagccccaagaaggccctgctgcccccaacagtgtccctgagcgccaccagcaccagcagcgagcccctgagcagcaaccagcctgcctctgtgacagactaccagaatgtgtccttcagcaacctgactgtgaacacctcctggcagaagaagagcgccttcaccaggacagtgtccccaggctctgtgagccccatccacggccagggccaggtggtggagaacctgaaggcccaggccctgtgctcctggacagccaagaaggacaaccacctgaacttcagcaagcatgacatcatcaccgtgctggagcagcaggagaactggtggtttggagaggtgcacggcggccggggctggttccccaagagctatgtgaagatcatccctggcagcgaggtgaagcgggaggagcctgaggccctgtatgctgctgtgaacaagaagcccaccagcgctgcctacagcgtgggggaggagtacatcgccctgtacccctacagctctgtggagcccggggacctgaccttcacagaaggagaggagatcctggtgacccagaaggatggagagtggtggacaggcagcatcggggacaggagcggcatcttccccagcaactacgtgaagcccaaggaccaggagagctttggcagcgccagcaagagcggggccagcaacaagaagccagaaattgcccaggtgaccagcgcctacgtggccagcggcagcgagcagctgagcctggcccctggccagctgatcctgatcctgaagaagaacaccagcggctggtggcagggcgagctgcaggcccggggcaagaagaggcagaagggctggttccctgccagccacgtgaagctgctgggccccagcagcgagcgggccaccccagccttccaccctgtgtgccaggtgattgccatgtatgactatgctgccaacaatgaagatgagctgtccttcagcaagggccagctgatcaacgtgatgaacaaggatgatcctgactggtggcagggcgagatcaacggggtgacaggcctcttccccagcaactacgtgaagatgaccacagacagcgaccccagccagcagtggtgtgccgacctgcagaccctggacaccatgcagcccatcgagaggaagaggcagggctacatccacgagctgatccagacagaggagcgctacatggctgacctgcagctggtggtggaggtgttccagaagaggatggccgagagcggcttcctgacagaaggagagatggccctgatctttgtgaactggaaggagctgatcatgagcaacaccaagctgctgaaggccctgcgggtgaggaagaagacaggaggagagaagatgcctgtgcagatgattggagacatcctggccgctgagctgagccacatgcaggcctacatccgcttctgcagctgccagctgaatggagctgccctgctgcagcagaagacagatgaggacacagacttcaaggagttcctgaagaagctggccagtgacccccgctgcaagggcatgcccctgagcagcttcctgctgaagcccatgcagaggatcacccgctaccccctgctgatccgcagcatcctggagaacaccccagagagccatgctgaccacagcagcctgaagctggccctggagagagctgaggagctgtgcagccaggtgaatgaaggagtgcgggagaaggagaacagcgaccggctggagtggatccaggcccacgtgcagtgtgagggcctggccgagcagctgatcttcaacagcctgaccaactgcctgggccccaggaagctgctgcacagcggcaagctgtacaagaccaagagcaacaaggagctgcacggcttcctgttcaatgacttcctgctgctgacctacatggtgaagcagtttgctgtgagcagcggcagcgagaagctgttcagcagcaagagcaatgcccagttcaagatgtacaagacccccatcttcctgaatgaggtgctggtgaagctgcccacagaccccagcagtgatgagcctgtgttccacatcagccacatcgacagagtgtacaccctgaggacagacaacatcaatgaaagaacagcctgggtgcagaagatcaaggccgccagcgagcagtacatcgacacagagaagaagaagcgggagaaggcctaccaggcccggagccagaagaccagcggcatcggccgcctgatggtgcacgtgattgaggccacagagctgaaggcctgcaagcccaacgggaagagcaacccctactgtgagatctccatgggcagccagagctacaccaccaggaccatccaggacaccctgaaccccaagtggaacttcaactgccagttcttcatcaaggacctgtaccaggatgtgctgtgcctgaccctgtttgaccgggaccagttctccccagatgacttcctgggccgcacagagatccctgtggccaagatcagaacagagcaggagagcaagggccccatgacccggcggctgctgctgcacgaggtgcccactggagaggtgtgggtgcgctttgacctgcagctgtttgagcagaagaccctgctgtag

SEQ ID NO: 156512 - DNA, 5013 bp, synthetic construct
  misc_feature 1..5013: note = Description of Artificial Sequence: Synthetic coding sequence
  source 1..5013: mol_type = other DNA
atgatggcccagttccccacagccatgaatggaggccccaacatgtgggccatcaccagcgaggagaggaccaagcatgaccggcagtttgacaacctgaagcccagcggcggctacatcactggagaccaggccaggaacttcttcctgcagagcggcctgcctgcccctgtgctggccgagatctgggccctgagtgacctgaacaaggatggcaagatggaccagcaggagttcagcatcgccatgaagctgatcaagctgaagctgcagggccagcagctgcctgtggtgctgccccccatcatgaagcagccccccatgttcagccccctcatcagcgccaggtttggcatgggctccatgcccaacctgagcatcccccagcccctgcccccagctgcccccatcaccagcctgagcagcgccaccagcggcaccaacctgccccccctgatgatgcccacccccctggtgcccagcgtgtccaccagcagcctgcccaatggaacagccagcctcatccagcccctgcccatcccctacagcagcagcaccctgccccacggcagcagctacagcctgatgatgggcggctttggaggagccagcatccagaaggcccagagcctgattgacctgggcagcagcagcagcaccagcagcacagccagcctgagcggcaacagccccaagacaggcaccagcgagtgggccgtgccccagcccacccggctgaagtaccggcagaagttcaacaccctggacaagtccatgagcggctacctgagcggcttccaggccagaaatgccctgctgcagagcaacctgagccagacccagctggccaccatctggaccctggctgatgtggatggagatggccagctgaaggccgaggagttcatcctggccatgcacctgacagacatggccaaggccggccagcccctgcccctgaccctgcccccagagctggtgccccccagcttccggggcggcaagcagattgacagcatcaatggcaccctgcccagctaccagaagatgcaggaggaggagccccagaagaagctgcctgtgacctttgaggacaagaggaaggccaactatgagcggggcaacatggagctggagaagaggcggcaggccctgatggagcagcagcagcgggaggccgagaggaaggcccagaaggagaaggaggagtgggagaggaagcagcgggagctgcaggagcaggagtggaagaagcagctggagctggagaagaggctggagaagcagcgggagctggagcggcagcgggaggaggagaggaggaaggacatcgagcggcgggaggccgccaagcaggagctggagcggcagaggcggctggagtgggagcgcatccggcggcaggagctgctgaaccagaagaaccgggagcaggaggagatcgtgcggctgaacagcaagaagaagaacctgcacctggagctggaggccctgaatggcaagcaccagcagatcagcggccgcctgcaggatgtgcggctgaagaagcagacccagaagacagagctggaggtgctggacaagcagtgtgacctggagatcatggagatcaagcagctgcagcaggagctgcaggagtaccagaacaagctgatctacctggtgcctgagaagcagctgctgaatgaaagaatcaagaacatgcagttcagcaacaccccagacagcggcgtgtccctgctgcacaagaagagcctggagaaggaggagctgtgccagaggctgaaggagcagctggatgccctggagaaggagacagccagcaagctgtctgagatggacagcttcaacaaccagctgaaggagctgcgggagacctacaacacccagcagctggccctggagcagctgtacaagatcaagagggacaagctgaaggagattgaaaggaagaggctggagctgatgcagaagaagaagctggaggatgaagctgccaggaaggccaagcagggcaaggagaacctgtggaaggagaacctgaggaaggaggaggaggagaagcagaagaggctgcaggaggagaagacccaggagaagatccaggaggaggagaggaaggccgaggagaagcagaggaaggacaaggacaccctgaaggccgaggagaagaagcgggagacagcctctgtgctggtgaactaccgggccctgtacccctttgaggccaggaaccatgatgagatgtccttcaacagcggggacatcatccaggtggatgagaagacagtgggggagcccggctggctgtatggcagcttccagggcaactttggctggttcccctgcaactacgtggagaagatgcccagcagtgaaaatgagaaggctgtgagccccaagaaggccctgctgccccccaccgtgtccctgagcgccaccagcaccagcagcgagcccctgagcagcaaccagcctgcctctgtgacagactaccagaatgtgtccttcagcaacctgactgtgaacacctcctggcagaagaagagcgccttcaccaggacagtgtccccaggctctgtgagccccatccacggccagggccaggtggtggagaacctgaaggcccaggccctgtgctcctggacagccaagaaggacaaccacctgaacttcagcaagcatgacatcatcaccgtgctggagcagcaggagaactggtggtttggagaggtgcatggaggccggggctggttccccaagagctatgtgaagatcatccctggcagcgaggtgaagcgggaggagcctgaggccctgtatgctgctgtgaacaagaagcccaccagcgctgcctacagcgtgggggaggagtacatcgccctgtacccctacagctctgtggagcccggggacctgaccttcacagaaggagaggagatcctggtgacccagaaggatggagagtggtggacaggcagcattggagacagaagtggcatcttccccagcaactacgtgaagcccaaggaccaggagagctttggaagtgccagcaagagcggggccagcaacaagaagccagagatcgcccaggtgaccagcgcctacgtggccagcggcagcgagcagctgagcctggcccctggccagctgatcctgatcctgaagaagaacaccagcggctggtggcagggcgagctgcaggcccggggcaagaagaggcagaagggctggttccctgccagccacgtgaagctgctgggccccagcagcgagcgggccaccccagccttccaccctgtgtgccaggtgattgccatgtatgactatgctgccaacaatgaagatgagctgtccttcagcaagggccagctgatcaacgtgatgaacaaggatgatcctgactggtggcagggcgagatcaatggagtgacaggcctcttccccagcaactacgtgaagatgaccacagacagcgaccccagccagcagtggtgtgccgacctgcagaccctggacaccatgcagcccattgaaaggaagaggcagggctacatccacgagctgatccagacagaggagcgctacatggctgacctgcagctggtggtggaggtgttccagaagaggatggccgagagcggcttcctgacagaaggagagatggccctgatctttgtgaactggaaggagctgatcatgagcaacaccaagctgctgaaggccctgcgggtgaggaagaagacaggaggagagaagatgcctgtgcagatgattggagacatcctggccgctgagctgagccacatgcaggcctacatccgcttctgcagctgccagctgaatggagctgccctgctgcagcagaagacagatgaggacacagacttcaaggagttcctgaagaagctggccagtgacccccgctgcaagggcatgcccctgagcagcttcctgctgaagcccatgcagaggatcacccgctaccccctgctgatccgcagcatcctggagaacaccccagagagccacgccgaccacagcagcctgaagctggccctggagcgggcagaggagctgtgcagccaggtgaatgaaggagtgcgggagaaggaaaattctgaccggctggagtggatccaggcccacgtgcagtgtgagggcctggccgagcagctgatcttcaacagcctgaccaactgcctgggccccaggaagctgctgcacagcggcaagctgtacaagaccaagagcaacaaggagctgcacggcttcctgttcaatgacttcctgctgctgacctacatggtgaagcagtttgctgtgagcagcggcagcgagaagctgttcagcagcaagagcaatgcccagttcaagatgtacaagacccccatcttcctgaatgaggtgctggtgaagctgcccacagaccccagcagtgatgagcccgtcttccacatcagccacatcgacagagtgtacaccctgaggacagacaacatcaatgaaagaacagcctgggtgcagaagatcaaggccgccagcgagcagtacatcgacacagagaagaagaagcgggagaaggcctaccaggcccggagccagaagaccagcggcatcggccgcctgatggtgcacgtgattgaggccacagagctgaaggcctgcaagcccaacgggaagagcaacccctactgtgagatctccatgggcagccagagctacaccaccaggaccatccaggacaccctgaaccccaagtggaacttcaactgccagttcttcatcaaggacctgtaccaggatgtgctgtgcctgaccctgtttgaccgggaccagttctccccagatgacttcctgggccgcacagagatccctgtggccaagatcagaacagagcaggagagcaagggccccatgacccggcggctgctgctgcacgaggtgcccaccggggaggtgtgggtgcgctttgacctgcagctgtttgagcagaagaccctgctgtag

SEQ ID NO: 156513 - DNA, 5013 bp, synthetic construct; identical to SEQ ID NO: 156512
  misc_feature 1..5013: note = Description of Artificial Sequence: Synthetic coding sequence
  source 1..5013: mol_type = other DNA

SEQ ID NO: 156514 - DNA, 1836 bp, synthetic construct
  misc_feature 1..1836: note = Description of Artificial Sequence: Synthetic coding sequence
  source 1..1836: mol_type = other DNA
atggcccagttccccacagccatgaatggaggccccaacatgtgggccatcaccagcgaggagaggaccaagcatgaccggcagtttgacaacctgaagcccagcggcggctacatcaccggggaccaggccaggaacttcttcctgcagagcggcctgcctgcccctgtgctggccgagatctgggccctgagtgacctgaacaaggatggcaagatggaccagcaggagttcagcatcgccatgaagctgatcaagctgaagctgcagggccagcagctgcctgtggtgctgccccccatcatgaagcagccccccatgttcagccccctcatcagcgcccgcttcggcatgggctccatgcccaacctgagcatcccccagcccctgcccccagctgcccccatcaccagcctgagcagcgccaccagcggcaccaacctgccccccctgatgatgcccacccccctggtgcccagcgtgtccaccagcagcctgcccaacggcacagccagcctcatccagcccctgcccatcccctacagcagcagcaccctgccccacggcagcagctacagcctgatgatgggcggctttggaggagccagcatccagaaggcccagagcctgattgacctgggcagcagccgctcctggagcagcggcagcagcgcccacagccctgccacccaccgggcccccctgagcagccctgtgcccaacagcagcaccagcagcacagccagcctgagcggcaacagccccaagacaggcaccagcgagtgggccgtgccccagcccacccggctgaagtaccggcagaagttcaacaccctggacaagtccatgagcggctacctgagcggcttccaggccagaaatgccctgctgcagagcaacctgagccagacccagctggccaccatctggaccctggctgatgtggatggagatggccagctgaaggccgaggagttcatcctggccatgcacctgacagacatggccaaggccggccagcccctgcccctgaccctgcccccagagctggtgccccccagcttccggggcggcaagcagattgacagcatcaatggcaccctgcccagctaccagaagatgcaggaggaggagccccagaagaagctgcctgtgacctttgaggacaagaggaaggccaactatgagcggggcaacatggagctggagaagaggcggcaggccctgatggagcagcagcagcgggaggccgagaggaaggcccagaaggagaaggaggagtgggagaggaagcagcgggagctgcaggagcaggagtggaagaagcagctggagctggagaagaggctggagaagcagcgggagctggagcggcagcgggaggaggagaggaggaaggacatcgagcggcgggaggccgccaagcaggagctggagcggcagaggcggctggagtgggagcgcatccggcggcaggagctgctgaaccagaagaaccgggagcaggaggagatcgtgcggctgaacagcaagaagaagaacctgcacctggagctggaggccctgaatggcaagcaccagcagatcagcggccgcctgcaggatgtgcggctgaagaagcagacccagaagacagagctggaggtgctggacaagcagtgtgacctggagatcatggagatcaagcagctgcagcaggagctgcaggagtaccagaacaagctgatctacctggtgcctgagaagcagctgctgaatgaaagaatcaagaacatgcagttcagcaacaccccagacagcggcgtgtccctgctgcacaagaagagcctggagtag

SEQ ID NO: 156515 - DNA, 3750 bp, synthetic construct
  misc_feature 1..3750: note = Description of Artificial Sequence: Synthetic coding sequence
  source 1..3750: mol_type = other DNA
atgatggcccagttccccacagccatgaatggaggccccaacatgtgggccatcaccagcgaggagaggaccaagcatgaccggcagtttgacaacctgaagcccagcggcggctacatcactggagaccaggccaggaacttcttcctgcagagcggcctgcctgcccctgtgctggccgagatctgggccctgagtgacctgaacaaggatggcaagatggaccagcaggagttcagcatcgccatgaagctgatcaagctgaagctgcagggccagcagctgcctgtggtgctgccccccatcatgaagcagccccccatgttcagccccctcatcagcgccaggtttggcatgggctccatgcccaacctgagcatcccccagcccctgcccccagctgcccccatcaccagcctgagcagcgccaccagcggcaccaacctgccccccctgatgatgcccacccccctggtgcccagcgtgtccaccagcagcctgcccaatggaacagccagcctcatccagcccctgcccatcccctacagcagcagcaccctgccccacggcagcagctacagcctgatgatgggcggctttggaggagccagcatccagaaggcccagagcctgattgacctgggcagcagcagcagcaccagcagcacagccagcctgagcggcaacagccccaagacaggcaccagcgagtgggccgtgccccagcccacccggctgaagtaccggcagaagttcaacaccctggacaagtccatgagcggctacctgagcggcttccaggccagaaatgccctgctgcagagcaacctgagccagacccagctggccaccatctggaccctggctgatgtggatggagatggccagctgaaggccgaggagttcatcctggccatgcacctgacagacatggccaaggccggccagcccctgcccctgaccctgcccccagagctggtgccccccagcttccggggcggcaagcagattgacagcatcaatggcaccctgcccagctaccagaagatgcaggaggaggagccccagaagaagctgcctgtgacctttgaggacaagaggaaggccaactatgagcggggcaacatggagctggagaagaggcggcaggccctgatggagcagcagcagcgggaggccgagaggaaggcccagaaggagaaggaggagtgggagaggaagcagcgggagctgcaggagcaggagtggaagaagcagctggagctggagaagaggctggagaagcagcgggagctggagcggcagcgggaggaggagaggaggaaggacatcgagcggcgggaggccgccaagcaggagctggagcggcagaggcggctggagtgggagcgcatccggcggcaggagctgctgaaccagaagaaccgggagcaggaggagatcgtgcggctgaacagcaagaagaagaacctgcacctggagctggaggccctgaatggcaagcaccagcagatcagcggccgcctgcaggatgtgcggctgaagaagcagacccagaagacagagctggaggtgctggacaagcagtgtgacctggagatcatggagatcaagcagctgcagcaggagctgcaggagtaccagaacaagctgatctacctggtgcctgagaagcagctgctgaatgaaagaatcaagaacatgcagttcagcaacaccccagacagcggcgtgtccctgctgcacaagaagagcctggagaaggaggagctgtgccagaggctgaaggagcagctggatgccctggagaaggagacagccagcaagctgtctgagatggacagcttcaacaaccagctgaagtgtggcaacatggatgacagcgtgctgcagtgcctgctgagcctgctgagctgcctgaacaacctcttcctgctgctgaaggagctgcgggagacctacaacacccagcagctggccctggagcagctgtacaagatcaagagggacaagctgaaggagattgaaaggaagaggctggagctgatgcagaagaagaagctggaggatgaggccgccaggaaggccaagcagggcaaggagaacctgtggaaggagaacctgaggaaggaggaggaggagaagcagaagaggctgcaggaggagaagacccaggagaagatccaggaggaggagaggaaggccgaggagaagcagaggaaggacaaggacaccctgaaggccgaggagaagaagcgggagacagcctctgtgctggtgaactaccgggccctgtacccctttgaggccagaaatcatgatgagatgtccttcaacagcggggacatcatccaggtggatgagaagacagtgggggagcccggctggctgtatggcagcttccagggcaactttggctggttcccctgcaactacgtggagaagatgcccagcagtgaaaatgagaaggctgtgagccccaagaaggccctgctgcccccaacagtgtccctgagcgccaccagcaccagcagcgagcccctgagcagcaaccagcctgcctctgtgacagactaccagaatgtgtccttcagcaacctgactgtgaacacctcctggcagaagaagagcgccttcaccaggacagtgtccccaggctctgtgagccccatccacggccagggccaggtggtggagaacctgaaggcccaggccctgtgctcctggacagccaagaaggacaaccacctgaacttcagcaagcatgacatcatcaccgtgctggagcagcaggagaactggtggtttggagaggtgcacggcggccggggctggttccccaagagctatgtgaagatcatccctggcagcgaggtgaagcgggaggagcctgaggccctgtatgctgctgtgaacaagaagcccaccagcgctgcctacagcgtgggggaggagtacatcgccctgtacccctacagctctgtggagcccggggacctgaccttcacagaaggagaggagatcctggtgacccagaaggatggagagtggtggacaggcagcatcggggacaggagcggcatcttccccagcaactacgtgaagcccaaggaccaggagagctttggcagcgccagcaagagcggggccagcaacaagaagccagaaattgcccaggtgaccagcgcctacgtggccagcggcagcgagcagctgagcctggcccctggccagctgatcctgatcctgaagaagaacaccagcggctggtggcagggcgagctgcaggcccggggcaagaagaggcagaagggctggttccctgccagccacgtgaagctgctgggccccagcagcgagcgggccaccccagccttccaccctgtgtgccaggtgattgccatgtatgactatgctgccaacaatgaagatgagctgtccttcagcaagggccagctgatcaacgtgatgaacaaggatgatcctgactggtggcagggcgagatcaacggggtgacaggcctcttccccagcaactacgtgaagatgaccacagacagcgaccccagccagcagtggtgtgccgacctgcagaccctggacaccatgcagcccatcgagaggaagaggcagggctacatccacgagctgatccagacagaggagcgctacatggctgacctgcagctggtggtggaggtgcggcggctgctgctggccagcagccggggcatctgctgcctgtcctag

SEQ ID NO: 156516 - DNA, 1899 bp, synthetic construct
  misc_feature 1..1899: note = Description of Artificial Sequence: Synthetic coding sequence
  source 1..1899: mol_type = other DNA
atgaaccgctacaccaccatccggcagctgggagatggcacctacggctctgtgctgctgggccgcagcattgagagcggggagctgattgccatcaagaagatgaagaggaagttctacagctgggaggagtgcatgaacctgcgggaggtgaagagcctgaagaagctgaaccacgccaacgtggtgaagctgaaggaggtgatcagagaaaatgaccacctgtacttcatctttgagtacatgaaggagaacctgtaccagctgatcaaggagaggaacaagctgtttcctgagagcgccatccggaacatcatgtaccagatcctgcagggcctggccttcatccacaagcacggcttcttccaccgggacctgaagccagagaacctgctgtgcatgggccctgagctggtgaagattgctgactttggcctggcccgggagatccgcagcaagccaccctacacagattatgtgtccacccgctggtaccgggcccctgaggtgctgctgcggagcaccaactacagcagccccattgatgtgtgggccgtgggctgcatcatggccgaggtgtacaccctgcggcccctcttccctggggccagcgagattgacaccatcttcaagatctgccaggtgctgggcacccccaagaagacagactggccagagggctaccagctgagcagcgccatgaacttccgctggccccagtgtgtgcccaacaacctgaagaccctcatccccaatgccagcagcgaggccgtgcagctgctgcgggacatgctgcagtgggaccccaagaagaggcccacagccagccaggccctgcgctacccctacttccaggtgggccaccccctgggcagcaccacccagaacctgcaggacagcgagaagccccagaagggcatcctggagaaggccggccccccaccctacatcaagcctgtgcccccagcccagcccccagccaagccccacacccgcatcagcagccggcagcaccaggccagccagccccccctgcacctgacctacccctacaaggccgaggtgtccaggacagaccaccccagccacctgcaggaggacaagcccagccccctgctcttccccagcctgcacaacaagcacccccagagcaagatcacagctggcctggagcacaagaatggagagatcaagcccaagagcagaagacgctggggcctcatcagccgcagcaccaaggacagtgatgactgggccgacctggatgacctggacttcagccccagcctgagcagaattgacctgaagaacaagaagaggcagagtgatgacaccctgtgccgctttgaatctgtgctggacctgaagcccagcgagcctgtgggcactggaaacagcgcccccacccagaccagctaccagaggcgggacacccccaccctgcggtctgctgccaagcagcactacctgaagcacagccgctacctgcccggcatcagcatcagaaatggcatcctgagcaaccctgggaaggagttcatcccccccaacccctggagcagcagcggcctgagcggcaagagcagcggcaccatgtctgtcatcagcaaggtgaacagcgtgggcagcagcagcaccagcagcagcggcctgaccggcaactacgtgcccagcttcctgaagaaggagatcggcagcgccatgcagagggtgcacctggcccccatcccagaccccagccctggctacagcagcctgaaggccatgaggccccaccctggccggcccttcttccacacccagcccaggagcaccccaggcctcatcccccggcccccagctgcccagcctgtgcacggccgcacagactgggccagcaaatatgccagcagaagatag

SEQ ID NO: 156517 - DNA, 1899 bp, synthetic construct; identical to SEQ ID NO: 156516
  misc_feature 1..1899: note = Description of Artificial Sequence: Synthetic coding sequence
  source 1..1899: mol_type = other DNA

SEQ ID NO: 156518 - DNA, 738 bp, synthetic construct
  misc_feature 1..738: note = Description of Artificial Sequence: Synthetic coding sequence
  source 1..738: mol_type = other DNA
atgtgtgccgaggtgggccctgccctgtgccggggcatggagaggaacagcctgggctgctgtgaggcccccaagaagctgagcctgtccttcagcattgaggccatcctgaagaggcctgcccggcggagtgacatggacaggcctgagggccctggagaggagggccctggagaggccgccgccagcggcagcggcctggagaagccacccaaggaccagccccaggagggcaggaagagcaagagaagagtgaggaccaccttcaccacagagcagctgcacgagctggagaagatcttccacttcacccactacccagatgtgcacatccgcagccagctggccgcccgcatcaacctgcctgaggcccgggtgcagatctggttccagaaccagagggccaagtggaggaagcaggagaagattggcaacctgggcgccccccagcagctgtctgaggcctctgtggccctgcccaccaacctggatgtggccggccccacctggaccagcacagccctgcggcggctggccccacccaccagctgctgccccagcgcccaggaccagctggccagcgcctggttccctgcctggatcaccctgctgcctgcccacccctgggagacccagcctgtgcccggcctgcccatccaccagacctgcatccctgtgctgtgcatcctgcccccaccccaccccaagtggggcagcatctgtgccaccagcacctag

SEQ ID NO: 156519 - DNA, 738 bp, synthetic construct; identical to SEQ ID NO: 156518
  misc_feature 1..738: note = Description of Artificial Sequence: Synthetic coding sequence
  source 1..738: mol_type = other DNA

SEQ ID NO: 156520 - DNA, 1749 bp, synthetic construct
  misc_feature 1..1749: note = Description of Artificial Sequence: Synthetic coding sequence
  source 1..1749: mol_type = other DNA
atggccaatgaagactgccccaaggctgctgacagccccttcagcagtgacaagcacgcccagctgatcctggcccagatcaacaagatgagaaatggccagcacttctgtgatgtgcagctgcaggtgggccaggagagcttcaaggcccaccggctggtgctggccgccagcagcccctactttgctgccctcttcaccggcggcatgaaggagagcagcaaggatgtggtgcccatcctgggcattgaagctggcatcttccagatcctgctggacttcatctacacaggaattgtgaacatcggcgtgaacaacgtgcaggagctgatcatcgctgctgacatgctgcagctgacagaggtggtgcacctgtgctgtgagttcctgaagggccagattgaccccctgaactgcatcggcatcttccagttcagcgagcagatcgcctgccacgacctgctggagttcagcgagaactacatccacgtgcacttcctggaggtgcacagcggggaggagttcctggccctgaccaaggaccagctgatcaagatcctgcggtctgaggagctgagcattgaagatgagtaccaggtgttcctggccgccatgcagtggatcctgaaggacctgggcaagaggaggaagcacgtggtggaggtgctggaccccatccgcttccccctgctgcccccccagaggctgctgaagtacatcgagggcgtgtctgacttcaacctgcgggtggccctgcagaccctgctgaaggagtactgtgaggtgtgcaagagccccaaggagaacaagttctgcagcttcctgcagaccagcaaggtgcggcccaggaagaaggccaggaagtacctgtatgctgtgggcggctacacccggctgcagggcggccgctggagcgacagccgggccctgagctgtgtggagagatttgacaccttcagccagtactggaccaccgtgagcagcctgcaccaggcccggagcggcctgggcgtgacagtgctgggcggcatggtgtatgccatcggcggggagaaggacagcatgatctttgactgcacagaatgttatgaccctgtgaccaagcagtggaccaccgtggcctccatgaaccacccccgctgtggcctgggcgtgtgtgtgtgctatggagccatctatgccctgggcggctgggtgggcgctgagatcggcaacaccatcgagagatttgatcctgatgagaacaagtgggaggtggtgggcaacatggctgtgagccgctactacttcggctgctgtgagatgcagggcctcatctacgtgattggaggcatcagcaatgaaggcatcgagctgcggagctttgaggtgtatgaccccctgagcaagcgctggagccccctgccccccatgggcacccggcgggcctacctgggcgtggccgccctgaatgactgcatctacagcgtgggcggctggaatgagacccaggatgccctgcacacagtggagaagtacagctttgaggaggagaagtgggtggaggtggcctccatgaaggtgccccgggccggcatgtgtgtggtggccgtgaatggcctgctgtatgtgtctgggggccgcagcagcagccatgacttcctggccccagacacccacagatatgaggtgttccggctgaagtgggagaacatgtgcatcctcttcaatgaccacaagaccctgaccaagggcatcttcaacctgtag

SEQ ID NO: 156521 - DNA, 1755 bp, synthetic construct
  misc_feature 1..1755: note = Description of Artificial Sequence: Synthetic coding sequence
  source 1..1755: mol_type = other DNA
atggccaatgaagactgccccaaggctgctgacagccccttcagcagtgacaagcacgcccagctgatcctggcccagatcaacaagatgagaaatggccagcacttctgtgatgtgcagctgcaggtgggccaggagagcttcaaggcccaccggctggtgctggccgccagcagcccctactttgctgccctcttcaccggcggcatgaaggagagcagcaaggatgtggtgcccatcctgggcattgaagctggcatcttccagatcctgctggacttcatctacacaggaattgtgaacatcggcgtgaacaacgtgcaggagctgatcatcgctgctgacatgctgcagctgacagaggtggtgcacctgtgctgtgagttcctgaagggccagattgaccccctgaactgcatcggcatcttccagttcagcgagcagatcgcctgccacgacctgctggagttcagcgagaactacatccacgtgcacttcctggaggtgcacagcggggaggagttcctggccctgaccaaggaccagctgatcaagatcctgcggtctgaggagctgagcattgaagatgagtaccaggtgttcctggccgccatgcagtggatcctgaaggacctgggcaagaggaggaagcacgtggtggaggtgctggaccccatccgcttccccctgctgcccccccagaggctgctgaagtacatcgagggcgtgtctgacttcaacctgcgggtggccctgcagaccctgctgaaggagtactgtgaggtgtgcaagagccccaaggagaacaagttctgcagcttcctgcagaccagcaaggtgcggcccaggaagaaggccaggaagtacctgtatgctgtgggcggctacacccggctgcagggcggccgctggagcgacagccgggccctgagctgtgtggagagatttgacaccttcagccagtactggaccaccgtgagcagcctgcaccaggcccggagcggcctgggcgtgacagtgctgggcggcatggtgtatgccatcggcggggagaaggacagcatgatctttgactgcacagaatgttatgaccctgtgaccaagcagtggaccaccgtggcctccatgaaccacccccgctgtggcctgggcgtgtgtgtgtgctatggagccatctatgccctgggcggctgggtgggcgctgagatcggcaacaccatcgagagatttgatcctgatgagaacaagtgggaggtggtgggcaacatggctgtgagccgctactacttcggctgctgtgagatgcagggcctcatctacgtgattggaggcatcagcaatgaaggcatcgagctgcggagctttgaggtgtatgaccccctgagcaagcgctggagccccctgccccccatgggcacccggcgggcctacctgggcgtggccgccctgaatgactgcatctacagcgtgggcggctggaatgagacccaggatgccctgcacacagtggagaagtacagctttgaggaggagaagtgggtggaggtggcctccatgaaggtgccccgggccggcatgtgtgtggtggccgtgaatggcctgctgtatgtgtctgggggccgcagcagcagccatgacttcctggcccctggcaccctggacagcgtggaggtgtacaacccccacagcgacacctggacagaaattggcaacatgatcaccagccgctgtgagggcggcgtggccgtgctgtag

SEQ ID NO: 156522 - DNA, 3879 bp, synthetic construct
  misc_feature 1..3879: note = Description of Artificial Sequence: Synthetic coding sequence
  source 1..3879: mol_type = other DNA
atgagagctgtgctgacctggagggacaaggccgagcactgcatcaatgacatcgccttcaagccagatggcacccagctgatcctggccgccggcagccggctgctggtgtatgacaccagtgatggcaccctgctgcagcccctgaagggccacaaggacacagtgtactgtgtggcctatgccaaggatggcaagagatttgccagcggcagcgctgacaagagcgtcatcatctggaccagcaagctggagggcatcctgaagtacacctcctggagcgtgatgagcagcctgcacctgcacctgcccttcctgggcctgcacaagacagtgcgggtgacagccacagacaaggcccccaagggccagggcggcagaattgactgcctgcggcccagcgtgcagaaccagcccggccagaagcacaatgatgccatccagtgtgtgtcctacaaccccatcacccaccagctggccagctgcagcagcagtgactttggcctgtggagccctgagcagaagtctgtgtccaagcacaagagcagcagcaagatcatctgctgctcctggaccaatgatggccagtacctggccctgggcatgttcaacggcatcatcagcatccggaacaagaatggagaggagaaggtgaagattgaaagacctgggggcagcctgagccccatctggagcatctgctggaaccccagcagccgctgggagagcttctggatgaacagagaaaatgaagatgctgaagatgtgattgtgaaccgctacatccaggagatccccagcaccctgaagtctgctgtgtacagcagccagggcagcgaggccgaggaggaggagcctgaggaggaggatgacagccccagagatgacaacctggaggagagaaatgacatcctggccgtggccgactggggccagaaggtgtccttctaccagctgagcggcaagcagatcggcaaggaccgggccctgaactttgacccctgctgcatctcctacttcaccaagggggagtacatcctgctgggcggcagtgacaagcaggtgtccctcttcaccaaggatggagtgcggctgggcaccgtgggggagcagaacagctgggtgtggacctgccaggccaagccagacagcaactacgtggtggtgggctgccaggacggcaccatctccttctaccagctgatcttcagcacagtgcacggcctgtacaaggacagatatgcctacagagacagcatgacagatgtgattgtgcagcacctgatcacagagcagaaggtgcgcatcaagtgcaaggagctggtgaagaagatcgccatctacagaaaccggctggccatccagctgcctgagaagatcctgatctatgagctgtacagcgaggacctgagtgacatgcactacagagtgaaggagaagatcatcaagaagtttgagtgcaacctgctggtggtgtgtgccaaccacatcatcctgtgccaggagaagaggctgcagtgcctgtccttctctggagtgaaggagcgggagtggcagatggagagcctcatccgctacatcaaggtgattggaggccccccaggccgggagggcctgctggtgggcctgaagaatggccagatcctgaagatctttgtggacaacctgtttgccatcgtgctgctgaagcaggccacagctgtgcgctgcctggacatgtctgccagcaggaagaagctggccgtggtggatgaaaatgacacctgcctggtgtatgacatcgacaccaaggagctgctcttccaggagcccaatgccaacagcgtggcctggaacacccagtgtgaggacatgctgtgcttcagcggcggcggctacctgaacatcaaggccagcaccttccctgtgcaccggcagaagctgcagggctttgtggtgggctacaacggcagcaagatcttctgcctgcacgtgttcagcatctctgctgtggaggtgccccagagcgcccccatgtaccagtacctggacaggaagctgttcaaggaggcctaccagatcgcctgcctgggcgtgacagacacagactggagggagctggccatggaggccctggagggcctggactttgaaacagccaagaaggccttcatccgggtgcaggacctgcgctacctggagctgatcagcagcattgaggagaggaagaagagaggagagaccaacaatgacctcttcctggctgatgtgttctcctaccagggcaagttccacgaggccgccaagctgtacaagaggagcggccacgagaacctggccctggagatgtacacagacctgtgcatgtttgaatatgccaaggacttcctgggcagcggggaccccaaggagaccaagatgctgatcaccaagcaggccgactgggccaggaacatcaaggagcccaaggctgctgtggagatgtacatctctgctggggagcacgtgaaggccatcgagatctgtggggaccacggctgggtggacatgctgattgatattgccaggaagctggacaaggccgagcgggagcccctgctgctgtgtgccacctacctgaagaagctggacagccctggctatgctgctgagacctacctgaagatgggagacctgaagagcctggtgcagctgcacgtggagacccagcgctgggatgaggcctttgccctgggggagaagcaccctgagttcaaggatgacatctacatgccctatgcccagtggctggctgaaaatgacagatttgaggaggcccagaaggccttccacaaggccggccggcagcgggaggccgtgcaggtgctggagcagctgaccaacaatgctgtggccgagagccgcttcaatgatgctgcctactactactggatgctgtccatgcagtgcctggacatcgcccaggaccctgcccagaaggacaccatgctgggcaagttctaccacttccagaggctggccgagctgtaccacggctaccacgccatccaccgccacacagaggaccccttctctgtgcacaggcctgagaccctcttcaacatcagccgcttcctgctgcacagcctgcccaaggacacccccagcggcatcagcaaggtgaagatcctcttcaccctggccaagcagagcaaggccctgggcgcctaccgcctggcccggcatgcctatgacaagctgcggggcctgtacatcccagcccgcttccagaagagcattgagctgggcaccctgaccatccgggccaagcccttccatgattctgaggagctggtgcccctgtgctaccgctgcagcaccaacaaccccctgctgaacaacctgggcaatgtgtgcatcaactgccggcagcccttcatcttcagcgccagcagctatgatgtgctgcacctggtggagttctacctggaggagggcatcacagatgaggaggccatcagcctgattgacctggaggtgctgcggcccaagagagatgaccggcagctggagatcgccaacaacagcagccagatcctgcggctggtggagaccaaggacagcattggagatgaggaccccttcaccgccaagctgagctttgagcagggcggcagcgagtttgtgcctgtggtggtgtcccggctggtgctgcgctccatgagcagaagagatgtgctgatcaagcgctggcccccacccctgcgctggcagtacttccgcagcctgctgcctgatgccagcatcaccatgtgccccagctgcttccagatgttccacagcgaggactatgagctgctggtgctgcagcacggctgctgcccctactgccgccgctgcaaggatgaccccggcccctag

SEQ ID NO: 156523 - DNA, 3549 bp, synthetic construct
  misc_feature 1..3549: note = Description of Artificial Sequence: Synthetic coding sequence
  source 1..3549: mol_type = other DNA
atgagagctgtgctgacctggagggacaaggccgagcactgcatcaatgacatcgccttcaagccagatggcacccagctgatcctggccgccggcagccggctgctggtgtatgacaccagtgatggcaccctgctgcagcccctgaagggccacaaggacacagtgtactgtgtggcctatgccaaggatggcaagagatttgccagcggcagcgctgacaagagcgtcatcatctggaccagcaagctggagggcatcctgaagtacacccacaatgatgccatccagtgtgtgtcctacaaccccatcacccaccagctggccagctgcagcagcagtgactttggcctgtggagccctgagcagaagtctgtgtccaagcacaagagcagcagcaagatcatctgctgctcctggaccaatgatggccagtacctggccctgggcatgtttaatggcatcatcagcatccggaacaagaatggagaggagaaggtgaagattgaaagacctgggggcagcctgagccccatctggagcatctgctggaaccccagccgggaggagagaaatgacatcctggccgtggccgactggggccagaaggtgtccttctaccagctgagcggcaagcagatcggcaaggaccgggccctgaactttgacccctgctgcatctcctacttcaccaagggggagtacatcctgctgggcggcagtgacaagcaggtgtccctcttcaccaaggatggagtgcggctgggcaccgtgggggagcagaacagctgggtgtggacctgccaggccaagccagacagcaactacgtggtggtgggctgccaggacggcaccatctccttctaccagctgatcttcagcacagtgcacggcctgtacaaggacagatatgcctacagagacagcatgacagatgtgattgtgcagcacctgatcacagagcagaaggtgcgcatcaagtgcaaggagctggtgaagaagatcgccatctacagaaaccggctggccatccagctgcctgagaagatcctgatctatgagctgtacagcgaggacctgagtgacatgcactacagagtgaaggagaagatcatcaagaagtttgagtgcaacctgctggtggtgtgtgccaaccacatcatcctgtgccaggagaagaggctgcagtgcctgtccttctctggagtgaaggagcgggagtggcagatggagagcctcatccgctacatcaaggtgattggaggccccccaggccgggagggcctgctggtgggcctgaagaatggccagatcctgaagatctttgtggacaacctgtttgccatcgtgctgctgaagcaggccacagctgtgcgctgcctggacatgtctgccagcaggaagaagctggccgtggtggatgaaaatgacacctgcctggtgtatgacatcgacaccaaggagctgctcttccaggagcccaatgccaacagcgtggcctggaacacccagtgtgaggacatgctgtgcttcagcggcggcggctacctgaacatcaaggccagcaccttccctgtgcaccggcagaagctgcagggctttgtggtgggctacaacggcagcaagatcttctgcctgcacgtgttcagcatctctgctgtggaggtgccccagagcgcccccatgtaccagtacctggacaggaagctgttcaaggaggcctaccagatcgcctgcctgggcgtgacagacacagactggagggagctggccatggaggccctggagggcctggactttgaaacagccaagaaggccttcatccgggtgcaggacctgcgctacctggagctgatcagcagcattgaggagaggaagaagagaggagagaccaacaatgacctcttcctggctgatgtgttctcctaccagggcaagttccacgaggccgccaagctgtacaagaggagcggccacgagaacctggccctggagatgtacacagacctgtgcatgtttgaatatgccaaggacttcctgggcagcggggaccccaaggagaccaagatgctgatcaccaagcaggccgactgggccaggaacatcaaggagcccaaggctgctgtggagatgtacatctctgctggggagcacgtgaaggccatcgagatctgtggggaccacggctgggtggacatgctgattgatattgccaggaagctggacaaggccgagcgggagcccctgctgctgtgtgccacctacctgaagaagctggacagccctggctatgctgctgagacctacctgaagatgggagacctgaagagcctggtgcagctgcacgtggagacccagcgctgggatgaggcctttgccctgggggagaagcaccctgagttcaaggatgacatctacatgccctatgcccagtggctggctgaaaatgacagatttgaggaggcccagaaggccttccacaaggccggccggcagcgggaggccgtgcaggtgctggagcagctgaccaacaatgctgtggccgagagccgcttcaatgatgctgcctactactactggatgctgtccatgcagtgcctggacatcgcccaggaccctgcccagaaggacaccatgctgggcaagttctaccacttccagaggctggccgagctgtaccacggctaccacgccatccaccgccacacagaggaccccttctctgtgcacaggcctgagaccctcttcaacatcagccgcttcctgctgcacagcctgcccaaggacacccccagcggcatcagcaaggtgaagatcctcttcaccctggccaagcagagcaaggccctgggcgcctaccgcctggcccggcatgcctatgacaagctgcggggcctgtacatcccagcccgcttccagaagagcattgagctgggcaccctgaccatccgggccaagcccttccatgattctgaggagctggtgcccctgtgctaccgctgcagcaccaacaaccccctgctgaacaacctgggcaatgtgtgcatcaactgccggcagcccttcatcttcagcgccagcagctatgatgtgctgcacctggtggagttctacctggaggagggcatcacagatgaggaggccatcagcctgattgacctggaggtgctgcggcccaagagagatgaccggcagctggagatcgccaacaacagcagccagatcctgcggctggtggagaccaaggacagcattggagatgaggaccccttcaccgccaagctgagctttgagcagggcggcagcgagtttgtgcctgtggtggtgtcccggctggtgctgcgctccatgagcagaagagatgtgctgatcaagcgctggcccccacccctgcgctggcagtacttccgcagcctgctgcctgatgccagcatcaccatgtgccccagctgcttccagatgttccacagcgaggactatgagctgctggtgctgcagcacggctgctgcccctactgccgccgctgcaaggatgaccccggcccctag

SEQ ID NO: 156524 - DNA, 3726 bp, synthetic construct
  misc_feature 1..3726: note = Description of Artificial Sequence: Synthetic coding sequence
  source 1..3726: mol_type = other DNA
atgagagctgtgctgacctggagggacaaggccgagcactgcatcaatgacatcgccttcaagccagatggcacccagctgatcctggccgccggcagccggctgctggtgtatgacaccagtgatggcaccctgctgcagcccctgaagggccacaaggacacagtgtactgtgtggcctatgccaaggatggcaagagatttgccagcggcagcgctgacaagagcgtcatcatctggaccagcaagctggagggcatcctgaagtacacccacaatgatgccatccagtgtgtgtcctacaaccccatcacccaccagctggccagctgcagcagcagtgactttggcctgtggagccctgagcagaagtctgtgtccaagcacaagagcagcagcaagatcatctgctgctcctggaccaatgatggccagtacctggccctgggcatgtttaatggcatcatcagcatccggaacaagaatggagaggagaaggtgaagattgaaagacctgggggcagcctgagccccatctggagcatctgctggaaccccagcagccgctgggagagcttctggatgaaccgggagaatgaagatgctgaagatgtgattgtgaaccgctacatccaggagatccccagcaccctgaagtctgctgtgtacagcagccagggcagcgaggccgaggaggaggagcctgaggaggaggatgacagccccagagatgacaacctggaggagagaaatgacatcctggccgtggccgactggggccagaaggtgtccttctaccagctgagcggcaagcagatcggcaaggaccgggccctgaactttgacccctgctgcatctcctacttcaccaagggggagtacatcctgctgggcggcagtgacaagcaggtgtccctcttcaccaaggatggagtgcggctgggcaccgtgggggagcagaacagctgggtgtggacctgccaggccaagccagacagcaactacgtggtggtgggctgccaggacggcaccatctccttctaccagctgatcttcagcacagtgcacggcctgtacaaggacagatatgcctacagagacagcatgacagatgtgattgtgcagcacctgatcacagagcagaaggtgcgcatcaagtgcaaggagctggtgaagaagatcgccatctacagaaaccggctggccatccagctgcctgagaagatcctgatctatgagctgtacagcgaggacctgagtgacatgcactacagagtgaaggagaagatcatcaagaagtttgagtgcaacctgctggtggtgtgtgccaaccacatcatcctgtgccaggagaagaggctgcagtgcctgtccttcagcggcgtgaaggagcgggagtggcagatggagagcctcatccgctacatcaaggtgattggaggccccccaggccgggagggcctgctggtgggcctgaagaatggccagatcctgaagatctttgtggacaacctgtttgccatcgtgctgctgaagcaggccacagctgtgcgctgcctggacatgtctgccagcaggaagaagctggccgtggtggatgaaaatgacacctgcctggtgtatgacatcgacaccaaggagctgctcttccaggagcccaatgccaacagcgtggcctggaacacccagtgtgaggacatgctgtgcttcagcggcggcggctacctgaacatcaaggccagcaccttccctgtgcaccggcagaagctgcagggctttgtggtgggctacaacggcagcaagatcttctgcctgcacgtgttcagcatctctgctgtggaggtgccccagagcgcccccatgtaccagtacctggacaggaagctgttcaaggaggcctaccagatcgcctgcctgggcgtgacagacacagactggagggagctggccatggaggccctggagggcctggactttgaaacagccaagaaggccttcatccgggtgcaggacctgcgctacctggagctgatcagcagcattgaggagaggaagaagagaggagagaccaacaatgacctcttcctggctgatgtgttctcctaccagggcaagttccatgaagctgccaagctgtacaagaggagcggccacgagaacctggccctggagatgtacacagacctgtgcatgtttgaatatgccaaggacttcctgggcagcggggaccccaaggagaccaagatgctgatcaccaagcaggccgactgggccaggaacatcaaggagcccaaggctgctgtggagatgtacatctctgctggggagcacgtgaaggccatcgagatctgtggggaccacggctgggtggacatgctgattgacatcgccaggaagctggacaaggccgagcgggagcccctgctgctgtgtgccacctacctgaagaagctggacagccctggctacgccgctgagacctacctgaagatgggagacctgaagagcctggtgcagctgcacgtggagacccagcgctgggatgaggcctttgccctgggggagaagcaccctgagttcaaggatgacatctacatgccctatgcccagtggctggccgagaatgacagatttgaggaggcccagaaggccttccacaaggccggccggcagcgggaggccgtgcaggtgctggagcagctgaccaacaatgctgtggccgagagccgcttcaatgatgctgcctactactactggatgctgtccatgcagtgcctggacatcgcccaggaccctgcccagaaggacaccatgctgggcaagttctaccacttccagaggctggccgagctgtaccacggctaccacgccatccaccgccacacagaggaccccttctctgtgcacaggcctgagaccctcttcaacatcagccgcttcctgctgcacagcctgcccaaggacaccccatctggcatcagcaaggtgaagatcctcttcaccctggccaagcagagcaaggccctgggcgcctaccgcctggcccggcatgcctatgacaagctgcggggcctgtacatcccagcccgcttccagaagagcattgagctgggcaccctgaccatccgggccaagcccttccatgacagcgaggagctggtgcccctgtgctaccgctgcagcaccaacaaccccctgctgaacaacctgggcaatgtgtgcatcaactgccggcagcccttcatcttcagcgccagcagctatgatgtgctgcacctggtggagttctacctggaggagggcatcacagatgaggaggccatcagcctgattgacctggaggtgctgcggcccaagagagatgaccggcagctggagatcgccaacaacagcagccagatcctgcggctggtggagaccaaggacagcattggagatgaggaccccttcaccgccaagctgagctttgagcagggcggcagcgagtttgtgcctgtggtggtgtcccggctggtgctgcgctccatgagcagaagagatgtgctgatcaagcgctggcccccacccctgcgctggcagtacttccgcagcctgctgcctgatgccagcatcaccatgtgccccagctgcttccagatgttccacagtgaagattatgagctgctggtgctgcagcacggctgctgcccctactgccgccgctgcaaggatgatcctggcccctag

SEQ ID NO: 156525 - DNA, 3396 bp, synthetic construct
  misc_feature 1..3396: note = Description of Artificial Sequence: Synthetic coding sequence
  source 1..3396: mol_type = other DNA
atgagagctgtgctgacctggagggacaaggccgagcactgcatcaatgacatcgccttcaagccagatggcacccagctgatcctggccgccggcagccggctgctggtgtatgacaccagtgatggcaccctgctgcagcccctgaagggccacaaggacacagtgtactgtgtggcctatgccaaggatggcctgtggagccctgagcagaagtctgtgtccaagcacaagagcagcagcaagatcatctgctgctcctggaccaatgatggccagtacctggccctgggcatgtttaatggcatcatcagcatccggaacaagaatggagaggagaaggtgaagattgaaagacctgggggcagcctgagccccatctggagcatctgctggaaccccagccgggaggagagaaatgacatcctggccgtggccgactggggccagaaggtgtccttctaccagctgagcggcaagcagatcggcaaggaccgggccctgaactttgacccctgctgcatctcctacttcaccaagggggagtacatcctgctgggcggcagtgacaagcaggtgtccctcttcaccaaggatggagtgcggctgggcaccgtgggggagcagaacagctgggtgtggacctgccaggccaagccagacagcaactacgtggtggtgggctgccaggacggcaccatctccttctaccagctgatcttcagcacagtgcacggcctgtacaaggacagatatgcctacagagacagcatgacagatgtgattgtgcagcacctgatcacagagcagaaggtgcgcatcaagtgcaaggagctggtgaagaagatcgccatctacagaaaccggctggccatccagctgcctgagaagatcctgatctatgagctgtacagcgaggacctgagtgacatgcactacagagtgaaggagaagatcatcaagaagtttgagtgcaacctgctggtggtgtgtgccaaccacatcatcctgtgccaggagaagaggctgcagtgcctgtccttctctggagtgaaggagcgggagtggcagatggagagcctcatccgctacatcaaggtgattggaggccccccaggccgggagggcctgctggtgggcctgaagaatggccagatcctgaagatctttgtggacaacctgtttgccatcgtgctgctgaagcaggccacagctgtgcgctgcctggacatgtctgccagcaggaagaagctggccgtggtggatgaaaatgacacctgcctggtgtatgacatcgacaccaaggagctgctcttccaggagcccaatgccaacagcgtggcctggaacacccagtgtgaggacatgctgtgcttcagcggcggcggctacctgaacatcaaggccagcaccttccctgtgcaccggcagaagctgcagggctttgtggtgggctacaacggcagcaagatcttctgcctgcacgtgttcagcatctctgctgtggaggtgccccagagcgcccccatgtaccagtacctggacaggaagctgttcaaggaggcctaccagatcgcctgcctgggcgtgacagacacagactggagggagctggccatggaggccctggagggcctggactttgaaacagccaagaaggccttcatccgggtgcaggacctgcgctacctggagctgatcagcagcattgaggagaggaagaagagaggagagaccaacaatgacctcttcctggctgatgtgttctcctaccagggcaagttccacgaggccgccaagctgtacaagaggagcggccacgagaacctggccctggagatgtacacagacctgtgcatgtttgaatatgccaaggacttcctgggcagcggggaccccaaggagaccaagatgctgatcaccaagcaggccgactgggccaggaacatcaaggagcccaaggctgctgtggagatgtacatctctgctggggagcacgtgaaggccatcgagatctgtggggaccacggctgggtggacatgctgattgatattgccaggaagctggacaaggccgagcgggagcccctgctgctgtgtgccacctacctgaagaagctggacagccctggctatgctgctgagacctacctgaagatgggagacctgaagagcctggtgcagctgcacgtggagacccagcgctgggatgaggcctttgccctgggggagaagcaccctgagttcaaggatgacatctacatgccctatgcccagtggctggctgaaaatgacagatttgaggaggcccagaaggccttccacaaggccggccggcagcgggaggccgtgcaggtgctggagcagctgaccaacaatgctgtggccgagagccgcttcaatgatgctgcctactactactggatgctgtccatgcagtgcctggacatcgcccaggccgaccctgcccagaaggacaccatgctgggcaagttctaccacttccagaggctggccgagctgtaccacggctaccacgccatccaccgccacacagaggaccccttctctgtgcacaggcctgagaccctcttcaacatcagccgcttcctgctgcacagcctgcccaaggacaccccatctggcatcagcaaggtgaagatcctcttcaccctggccaagcagagcaaggccctgggcgcctaccgcctggcccggcatgcctatgacaagctgcggggcctgtacatcccagcccgcttccagaagagcattgagctgggcaccctgaccatccgggccaagcccttccatgacagcgaggagctggtgcccctgtgctaccgctgcagcaccaacaaccccctgctgaacaacctgggcaatgtgtgcatcaactgccggcagcccttcatcttcagcgccagcagctatgatgtgctgcacctggtggagttctacctggaggagggcatcacagatgaggaggccatcagcctgattgacctggaggtgctgcggcccaagagagatgaccggcagctggagatcgccaacaacagcagccagatcctgcggctggtggagaccaaggacagcattggagatgaggaccccttcaccgccaagctgagctttgagcagggcggcagcgagtttgtgcctgtggtggtgtcccggctggtgctgcgctccatgagcagaagagatgtgctgatcaagcgctggcccccacccctgcgctggcagtacttccgcagcctgctgcctgatgccagcatcaccatgtgccccagctgcttccagatgttccacagtgaagattatgagctgctggtgctgcagcacggctgctgcccctactgccgccgctgcaaggatgatcctggcccctag

SEQ ID NO: 156526 - DNA, 3276 bp, synthetic construct
  misc_feature 1..3276: note = Description of Artificial Sequence: Synthetic coding sequence
  source 1..3276: mol_type = other DNA
atgtttaatggcatcatcagcatccggaacaagaatggagaggagaaggtgaagattgaaagacctgggggcagcctgagccccatctggagcatctgctggaaccccagcagccgctgggagagcttctggatgaaccgggagaatgaagatgctgaagatgtgattgtgaaccgctacatccaggagatccccagcaccctgaagtctgctgtgtacagcagccagggcagcgaggccgaggaggaggagcctgaggaggaggatgacagccccagagatgacaacctggaggagagaaatgacatcctggccgtggccgactggggccagaaggtgtccttctaccagctgagcggcaagcagatcggcaaggaccgggccctgaactttgacccctgctgcatctcctacttcaccaagggggagtacatcctgctgggcggcagtgacaagcaggtgtccctcttcaccaaggatggagtgcggctgggcaccgtgggggagcagaacagctgggtgtggacctgccaggccaagccagacagcaactacgtggtggtgggctgccaggacggcaccatctccttctaccagctgatcttcagcacagtgcacggcctgtacaaggacagatatgcctacagagacagcatgacagatgtgattgtgcagcacctgatcacagagcagaaggtgcgcatcaagtgcaaggagctggtgaagaagatcgccatctacagaaaccggctggccatccagctgcctgagaagatcctgatctatgagctgtacagcgaggacctgagtgacatgcactacagagtgaaggagaagatcatcaagaagtttgagtgcaacctgctggtggtgtgtgccaaccacatcatcctgtgccaggagaagaggctgcagtgcctgtccttcagcggcgtgaaggagcgggagtggcagatggagagcctcatccgctacatcaaggtgattggaggccccccaggccgggagggcctgctggtgggcctgaagaatggccagatcctgaagatctttgtggacaacctgtttgccatcgtgctgctgaagcaggccacagctgtgcgctgcctggacatgtctgccagcaggaagaagctggccgtggtggatgaaaatgacacctgcctggtgtatgacatcgacaccaaggagctgctcttccaggagcccaatgccaacagcgtggcctggaacacccagtgtgaggacatgctgtgcttcagcggcggcggctacctgaacatcaaggccagcaccttccctgtgcaccggcagaagctgcagggctttgtggtgggctacaacggcagcaagatcttctgcctgcacgtgttcagcatctctgctgtggaggtgccccagagcgcccccatgtaccagtacctggacaggaagctgttcaaggaggcctaccagatcgcctgcctgggcgtgacagacacagactggagggagctggccatggaggccctggagggcctggactttgaaacagccaagaaggccttcatccgggtgcaggacctgcgctacctggagctgatcagcagcattgaggagaggaagaagagaggagagaccaacaatgacctcttcctggctgatgtgttctcctaccagggcaagttccatgaagctgccaagctgtacaagaggagcggccacgagaacctggccctggagatgtacacagacctgtgcatgtttgaatatgccaaggacttcctgggcagcggggaccccaaggagaccaagatgctgatcaccaagcaggccgactgggccaggaacatcaaggagcccaaggctgctgtggagatgtacatctctgctggggagcacgtgaaggccatcgagatctgtggggaccacggctgggtggacatgctgattgacatcgccaggaagctggacaaggccgagcgggagcccctgctgctgtgtgccacctacctgaagaagctggacagccctggctacgccgctgagacctacctgaagatgggagacctgaagagcctggtgcagctgcacgtggagacccagcgctgggatgaggcctttgccctgggggagaagcaccctgagttcaaggatgacatctacatgccctatgcccagtggctggccgagaatgacagatttgaggaggcccagaaggccttccacaaggccggccggcagcgggaggccgtgcaggtgctggagcagctgaccaacaatgctgtggccgagagccgcttcaatgatgctgcctactactactggatgctgtccatgcagtgcctggacatcgcccaggaccctgcccagaaggacaccatgctgggcaagttctaccacttccagaggctggccgagctgtaccacggctaccacgccatccaccgccacacagaggaccccttctctgtgcacaggcctgagaccctcttcaacatcagccgcttcctgctgcacagcctgcccaaggacaccccatctggcatcagcaaggtgaagatcctcttcaccctggccaagcagagcaaggccctgggcgcctaccgcctggcccggcatgcctatgacaagctgcggggcctgtacatcccagcccgcttccagaagagcattgagctgggcaccctgaccatccgggccaagcccttccatgacagcgaggagctggtgcccctgtgctaccgctgcagcaccaacaaccccctgctgaacaacctgggcaatgtgtgcatcaactgccggcagcccttcatcttcagcgccagcagctatgatgtgctgcacctggtggagttctacctggaggagggcatcacagatgaggaggccatcagcctgattgacctggaggtgctgcggcccaagagagatgaccggcagctggagatcgccaacaacagcagccagatcctgcggctggtggagaccaaggacagcattggagatgaggaccccttcaccgccaagctgagctttgagcagggcggcagcgagtttgtgcctgtggtggtgtcccggctggtgctgcgctccatgagcagaagagatgtgctgatcaagcgctggcccccacccctgcgctggcagtacttccgcagcctgctgcctgatgccagcatcaccatgtgccccagctgcttccagatgttccacagtgaagattatgagctgctggtgctgcagcacggctgctgcccctactgccgccgctgcaaggatgatcctggcccctag

SEQ ID NO: 156527 - DNA, 3099 bp, synthetic construct
  misc_feature 1..3099: note = Description of Artificial Sequence: Synthetic coding sequence
  source 1..3099: mol_type = other DNA
atgtttaatggcatcatcagcatccggaacaagaatggagaggagaaggtgaagattgaaagacctgggggcagcctgagccccatctggagcatctgctggaaccccagccgggaggagagaaatgacatcctggccgtggccgactggggccagaaggtgtccttctaccagctgagcggcaagcagatcggcaaggaccgggccctgaactttgacccctgctgcatctcctacttcaccaagggggagtacatcctgctgggcggcagtgacaagcaggtgtccctcttcaccaaggatggagtgcggctgggcaccgtgggggagcagaacagctgggtgtggacctgccaggccaagccagacagcaactacgtggtggtgggctgccaggacggcaccatctccttctaccagctgatcttcagcacagtgcacggcctgtacaaggacagatatgcctacagagacagcatgacagatgtgattgtgcagcacctgatcacagagcagaaggtgcgcatcaagtgcaaggagctggtgaagaagatcgccatctacagaaaccggctggccatccagctgcctgagaagatcctgatctatgagctgtacagcgaggacctgagtgacatgcactacagagtgaaggagaagatcatcaagaagtttgagtgcaacctgctggtggtgtgtgccaaccacatcatcctgtgccaggagaagaggctgcagtgcctgtccttctctggagtgaaggagcgggagtggcagatggagagcctcatccgctacatcaaggtgattggaggccccccaggccgggagggcctgctggtgggcctgaagaatggccagatcctgaagatctttgtggacaacctgtttgccatcgtgctgctgaagcaggccacagctgtgcgctgcctggacatgtctgccagcaggaagaagctggccgtggtggatgaaaatgacacctgcctggtgtatgacatcgacaccaaggagctgctcttccaggagcccaatgccaacagcgtggcctggaacacccagtgtgaggacatgctgtgcttcagcggcggcggctacctgaacatcaaggccagcaccttccctgtgcaccggcagaagctgcagggctttgtggtgggctacaacggcagcaagatcttctgcctgcacgtgttcagcatctctgctgtggaggtgccccagagcgcccccatgtaccagtacctggacaggaagctgttcaaggaggcctaccagatcgcctgcctgggcgtgacagacacagactggagggagctggccatggaggccctggagggcctggactttgaaacagccaagaaggccttcatccgggtgcaggacctgcgctacctggagctgatcagcagcattgaggagaggaagaagagaggagagaccaacaatgacctcttcctggctgatgtgttctcctaccagggcaagttccacgaggccgccaagctgtacaagaggagcggccacgagaacctggccctggagatgtacacagacctgtgcatgtttgaatatgccaaggacttcctgggcagcggggaccccaaggagaccaagatgctgatcaccaagcaggccgactgggccaggaacatcaaggagcccaaggctgctgtggagatgtacatctctgctggggagcacgtgaaggccatcgagatctgtggggaccacggctgggtggacatgctgattgatattgccaggaagctggacaaggccgagcgggagcccctgctgctgtgtgccacctacctgaagaagctggacagccctggctatgctgctgagacctacctgaagatgggagacctgaagagcctggtgcagctgcacgtggagacccagcgctgggatgaggcctttgccctgggggagaagcaccctgagttcaaggatgacatctacatgccctatgcccagtggctggctgaaaatgacagatttgaggaggcccagaaggccttccacaaggccggccggcagcgggaggccgtgcaggtgctggagcagctgaccaacaatgctgtggccgagagccgcttcaatgatgctgcctactactactggatgctgtccatgcagtgcctggacatcgcccaggaccctgcccagaaggacaccatgctgggcaagttctaccacttccagaggctggccgagctgtaccacggctaccacgccatccaccgccacacagaggaccccttctctgtgcacaggcctgagaccctcttcaacatcagccgcttcctgctgcacagcctgcccaaggacacccccagcggcatcagcaaggtgaagatcctcttcaccctggccaagcagagcaaggccctgggcgcctaccgcctggcccggcatgcctatgacaagctgcggggcctgtacatcccagcccgcttccagaagagcattgagctgggcaccctgaccatccgggccaagcccttccatgattctgaggagctggtgcccctgtgctaccgctgcagcaccaacaaccccctgctgaacaacctgggcaatgtgtgcatcaactgccggcagcccttcatcttcagcgccagcagctatgatgtgctgcacctggtggagttctacctggaggagggcatcacagatgaggaggccatcagcctgattgacctggaggtgctgcggcccaagagagatgaccggcagctggagatcgccaacaacagcagccagatcctgcggctggtggagaccaaggacagcattggagatgaggaccccttcaccgccaagctgagctttgagcagggcggcagcgagtttgtgcctgtggtggtgtcccggctggtgctgcgctccatgagcagaagagatgtgctgatcaagcgctggcccccacccctgcgctggcagtacttccgcagcctgctgcctgatgccagcatcaccatgtgccccagctgcttccagatgttccacagcgaggactatgagctgctggtgctgcagcacggctgctgcccctactgccgccgctgcaaggatgaccccggcccctag

SEQ ID NO: 156528 - DNA, 3252 bp, synthetic construct
  misc_feature 1..3252: note = Description of Artificial Sequence: Synthetic coding sequence
  source 1..3252: mol_type = other DNA
atgagagctgtgctgacctggagggacaaggccgagcactgcatcaatgacatcgccttcaagccagatggcacccagctgatcctggccgccggcagccggctgctggtgtatgacaccagtgatggcaccctgctgcagcccctgaagggccacaaggacacagtgtactgtgtggcctatgccaaggatggcctgtggagccctgagcagaagtctgtgtccaagcacaagagcagcagcaagatcatctgctgccgggaggagagaaatgacatcctggccgtggccgactggggccagaaggtgtccttctaccagctgagcggcaagcagatcggcaaggaccgggccctgaactttgacccctgctgcatctcctacttcaccaagggggagtacatcctgctgggcggcagtgacaagcaggtgtccctcttcaccaaggatggagtgcggctgggcaccgtgggggagcagaacagctgggtgtggacctgccaggccaagccagacagcaactacgtggtggtgggctgccaggacggcaccatctccttctaccagctgatcttcagcacagtgcacggcctgtacaaggacagatatgcctacagagacagcatgacagatgtgattgtgcagcacctgatcacagagcagaaggtgcgcatcaagtgcaaggagctggtgaagaagatcgccatctacagaaaccggctggccatccagctgcctgagaagatcctgatctatgagctgtacagcgaggacctgagtgacatgcactacagagtgaaggagaagatcatcaagaagtttgagtgcaacctgctggtggtgtgtgccaaccacatcatcctgtgccaggagaagaggctgcagtgcctgtccttcagcggcgtgaaggagcgggagtggcagatggagagcctcatccgctacatcaaggtgattggaggccccccaggccgggagggcctgctggtgggcctgaagaatggccagatcctgaagatctttgtggacaacctgtttgccatcgtgctgctgaagcaggccacagctgtgcgctgcctggacatgtctgccagcaggaagaagctggccgtggtggatgaaaatgacacctgcctggtgtatgacatcgacaccaaggagctgctcttccaggagcccaatgccaacagcgtggcctggaacacccagtgtgaggacatgctgtgcttcagcggcggcggctacctgaacatcaaggccagcaccttccctgtgcaccggcagaagctgcagggctttgtggtgggctacaacggcagcaagatcttctgcctgcacgtgttcagcatctctgctgtggaggtgccccagagcgcccccatgtaccagtacctggacaggaagctgttcaaggaggcctaccagatcgcctgcctgggcgtgacagacacagactggagggagctggccatggaggccctggagggcctggactttgaaacagccaagaaggccttcatccgggtgcaggacctgcgctacctggagctgatcagcagcattgaggagaggaagaagagaggagagaccaacaatgacctcttcctggctgatgtgttctcctaccagggcaagttccatgaagctgccaagctgtacaagaggagcggccacgagaacctggccctggagatgtacacagacctgtgcatgtttgaatatgccaaggacttcctgggcagcggggaccccaaggagaccaagatgctgatcaccaagcaggccgactgggccaggaacatcaaggagcccaaggctgctgtggagatgtacatctctgctggggagcacgtgaaggccatcgagatctgtggggaccacggctgggtggacatgctgattgacatcgccaggaagctggacaaggccgagcgggagcccctgctgctgtgtgccacctacctgaagaagctggacagccctggctacgccgctgagacctacctgaagatgggagacctgaagagcctggtgcagctgcacgtggagacccagcgctgggatgaggcctttgccctgggggagaagcaccctgagttcaaggatgacatctacatgccctatgcccagtggctggccgagaatgacagatttgaggaggcccagaaggccttccacaaggccggccggcagcgggaggccgtgcaggtgctggagcagctgaccaacaatgctgtggccgagagccgcttcaatgatgctgcctactactactggatgctgtccatgcagtgcctggacatcgcccaggccgaccctgcccagaaggacaccatgctgggcaagttctaccacttccagaggctggccgagctgtaccacggctaccacgccatccaccgccacacagaggaccccttctctgtgcacaggcctgagaccctcttcaacatcagccgcttcctgctgcacagcctgcccaaggacacccccagcggcatcagcaaggtgaggaagatcctcttcaccctggccaagcagagcaaggccctgggcgcctaccgcctggcccggcatgcctatgacaagctgcggggcctgtacatcccagcccgcttccagaagagcattgagctgggcaccctgaccatccgggccaagcccttccatgacagcgaggagctggtgcccctgtgctaccgctgcagcaccaacaaccccctgctgaacaacctgggcaatgtgtgcatcaactgccggcagcccttcatcttcagcgccagcagctatgatgtgctgcacctggtggagttctacctggaggagggcatcacagatgaggaggccatcagcctgattgacctggaggtgctgcggcccaagagagatgaccggcagctggagatcgccaacaacagcagccagatcctgcggctggtggagaccaaggacagcattggagatgaggaccccttcaccgccaagctgagctttgagcagggcggcagcgagtttgtgcctgtggtggtgtcccggctggtgctgcgctccatgagcagaagagatgtgctgatcaagcgctggcccccacccctgcgctggcagtacttccgcagcctgctgcctgatgccagcatcaccatgtgccccagctgcttccagatgttccacagtgaagattatgagctgctggtgctgcagcacggctgctgcccctactgccgccgctgcaaggatgatcctggcccctag

SEQ ID NO: 156529 - DNA, 2886 bp, synthetic construct
  misc_feature 1..2886: note = Description of Artificial Sequence: Synthetic coding sequence
  source 1..2886: mol_type = other DNA
atgagagctgtgctgacctggagggacaaggccgagcactgcatcaatgacatcgccttcaagccagatggcacccagctgatcctggccgccggcagccggctgctggtgtatgacaccagtgatggcaccctgctgcagcccctgaagggccacaaggacacagtgtactgtgtggcctatgccaaggatggcaagagatttgccagcggcagcgctgacaagagcgtcatcatctggaccagcaagctggagggcatcctgaagtacacccacaatgatgccatccagtgtgtgtcctacaaccccatcacccaccagctggccagctgcagcagcagtgactttggcctgtggagccctgagcagaagtctgtgtccaagcacaagagcagcagcaagatcatctgctgctcctggaccaatgatggccagtacctggccctgggcatgtttaatggcatcatcagcatccggaacaagaatggagaggagaaggtgaagattgaaagacctgggggcagcctgagccccatctggagcatctgctggaaccccagccgggaggagagaaatgacatcctggccgtggccgactggggccagaaggtgtccttctaccagctgagcggcaagcagatcggcaaggaccgggccctgaactttgacccctgctgcatctcctacttcaccaagggggagtacatcctgctgggcggcagtgacaagcaggtgtccctcttcaccaaggatggagtgcggctgggcaccgtgggggagcagaacagctgggtgtggacctgccaggccaagccagacagcaactacgtggtggtgggctgccaggacggcaccatctccttctaccagctgatcttcagcacagtgcacggcctgtacaaggacagatatgcctacagagacagcatgacagatgtgattgtgcagcacctgatcacagagcagaaggtgcgcatcaagtgcaaggagctggtgaagaagatcgccatctacagaaaccggctggccatccagctgcctgagaagatcctgatctatgagctgtacagcgaggacctgagtgacatgcactacagagtgaaggagaagatcatcaagaagtttgagtgcaacctgctggtggtgtgtgccaaccacatcatcctgtgccaggagaagaggctgcagtgcctgtccttctctggagtgaaggagcgggagtggcagatggagagcctcatccgctacatcaaggtgattggaggccccccaggccgggagggcctgctggtgggcctgaagaatggccagatcctgaagatctttgtggacaacctgtttgccatcgtgctgctgaagcaggccacagctgtgcgctgcctggacatgtctgccagcaggaagaagctggccgtggtggatgaaaatgacacctgcctggtgtatgacatcgacaccaaggagctgctcttccaggagcccaatgccaacagcgtggcctggaacacccagtgtgaggacatgctgtgcttcagcggcggcggctacctgaacatcaaggccagcaccttccctgtgcaccggcagaagctgcagggctttgtggtgggctacaacggcagcaagatcttctgcctgcacgtgttcagcatctctgctgtggaggtgccccagagcgcccccatgtaccagtacctggacaggaagctgttcaaggaggcctaccagatcgcctgcctgggcgtgacagacacagactggagggagctggccatggaggccctggagggcctggactttgaaacagccaagaaggccttcatccgggtgcaggacctgcgctacctggagctgatcagcagcattgaggagaggaagaagagaggagagaccaacaatgacctcttcctggctgatgtgttctcctaccagggcaagttccacgaggccgccaagctgtacaagaggagcggccacgagaacctggccctggagatgtacacagacctgtgcatgtttgaatatgccaaggacttcctgggcagcggggaccccaaggagaccaagatgctgatcaccaagcaggccgactgggccaggaacatcaaggagcccaaggctgctgtggagatgtacatctctgctggggagcacgtgaaggccatcgagatctgtggggaccacggctgggtggacatgctgattgatattgccaggaagctggacaaggccgagcgggagcccctgctgctgtgtgccacctacctgaagaagctggacagccctggctatgctgctgagacctacctgaagatgggagacctgaagagcctggtgcagctgcacgtggagacccagcgctgggatgaggcctttgccctgggggagaagcaccctgagttcaaggatgacatctacatgccctatgcccagtggctggctgaaaatgacagatttgaggaggcccagaaggccttccacaaggccggccggcagcgggaggccgtgcaggtgctggagcagctgaccaacaatgctgtggccgagagccgcttcaatgatgctgcctactactactggatgctgtccatgcagtgcctggacatcgcccaggaccctgcccagaaggacaccatgctgggcaagttctaccacttccagaggctggccgagctgtaccacggctaccacgccatccaccgccacacagaggaccccttctctgtgcacaggcctgagaccctcttcaacatcagccgcttcctgctgcacagcctgcccaaggacacccccagcggcatcagcaaggtgtgtgagaacaccctgcacctgggccaggccgagcagggcccccgctgcctgcaggccggccctgcccggctgtag

SEQ ID NO: 156530 - DNA, 3357 bp, synthetic construct
  misc_feature 1..3357: note = Description of Artificial Sequence: Synthetic coding sequence
  source 1..3357: mol_type = other DNA
atgagagctgtgctgacctggagggacaaggccgagcactgcatcaatgacatcgccttcaagccagatggcacccagctgatcctggccgccggcagccggctgctggtgtatgacaccagtgatggcaccctgctgcagcccctgaagggccacaaggacacagtgtactgtgtggcctatgccaaggatgtgctgtgcatcgagggcctgtggagccctgagcagaagtctgtgtccaagcacaagagcagcagcaagatcatctgctgctcctggaccaatgatggccagtacctggccctgggcatgttcaacggcatcatcagcatccggaacaagaatggagaggagaaggtgaagattgaaagacctgggggcagcctgagccccatctggagcatctgctggaaccccagccgggaggagagaaatgacatcctggccgtggccgactggggccagaaggtgtccttctaccagctgagcggcaagcagatcggcaaggaccgggccctgaactttgacccctgctgcatctcctacttcaccaagggggagtacatcctgctgggcggcagtgacaagcaggtgtccctcttcaccaaggatggagtgcggctgggcaccgtgggggagcagaacagctgggtgtggacctgccaggccaagccagacagcaactacgtggtggtgggctgccaggacggcaccatctccttctaccagctgatcttcagcacagtgcacggcctgtacaaggacagatatgcctacagagacagcatgacagatgtgattgtgcagcacctgatcacagagcagaaggtgcgcatcaagtgcaaggagctggtgaagaagatcgccatctacagaaaccggctggccatccagctgcctgagaagatcctgatctatgagctgtacagcgaggacctgagtgacatgcactacagagtgaaggagaagatcatcaagaagtttgagtgcaacctgctggtggtgtgtgccaaccacatcatcctgtgccaggagaagaggctgcagtgcctgtccttcagcggcgtgaaggagcgggagtggcagatggagagcctcatccgctacatcaaggtgattggaggccccccaggccgggagggcctgctggtgggcctgaagaatggccagatcctgaagatctttgtggacaacctgtttgccatcgtgctgctgaagcaggccacagctgtgcgctgcctggacatgtctgccagcaggaagaagctggccgtggtggatgaaaatgacacctgcctggtgtatgacatcgacaccaaggagctgctcttccaggagcccaatgccaacagcgtggcctggaacacccagtgtgaggacatgctgtgcttcagcggcggcggctacctgaacatcaaggccagcaccttccctgtgcaccggcagaagctgcagggctttgtggtgggctacaacggcagcaagatcttctgcctgcacgtgttcagcatctctgctgtggaggtgccccagagcgcccccatgtaccagtacctggacaggaagctgttcaaggaggcctaccagatcgcctgcctgggcgtgacagacacagactggagggagctggccatggaggccctggagggcctggactttgaaacagccaagaaggagaggaagaagagaggagagaccaacaatgacctcttcctggctgatgtgttctcctaccagggcaagttccatgaagctgccaagctgtacaagaggagcggccacgagaacctggccctggagatgtacacagacctgtgcatgtttgaatatgccaaggacttcctgggcagcggggaccccaaggagaccaagatgctgatcaccaagcaggccgactgggccaggaacatcaaggagcccaaggctgctgtggagatgtacatctctgctggggagcacgtgaaggccatcgagatctgtggggaccacggctgggtggacatgctgattgacatcgccaggaagctggacaaggccgagcgggagcccctgctgctgtgtgccacctacctgaagaagctggacagccctggctacgccgctgagacctacctgaagatgggagacctgaagagcctggtgcagctgcacgtggagacccagcgctgggatgaggcctttgccctgggggagaagcaccctgagttcaaggatgacatctacatgccctatgcccagtggctggccgagaatgacagatttgaggaggcccagaaggccttccacaaggccggccggcagcgggaggccgtgcaggtgctggagcagctgaccaacaatgctgtggccgagagccgcttcaatgatgctgcctactactactggatgctgtccatgcagtgcctggacatcgcccaggccgaccctgcccagaaggacaccatgctgggcaagttctaccacttccagaggctggccgagctgtaccacggctaccacgccatccaccgccacacagaggaccccttctctgtgcacaggcctgagaccctcttcaacatcagccgcttcctgctgcacagcctgcccaaggacacccccagcggcatcagcaaggtgaagatcctcttcaccctggccaagcagagcaaggccctgggcgcctaccgcctggcccggcatgcctatgacaagctgcggggcctgtacatcccagcccgcttccagaagagcattgagctgggcaccctgaccatccgggccaagcccttccatgattctgaggagctggtgcccctgtgctaccgctgcagcaccaacaaccccctgctgaacaacctgggcaatgtgtgcatcaactgccggcagcccttcatcttcagcgccagcagctatgatgtgctgcacctggtggagttctacctggaggagggcatcacagatgaggaggccatcagcctgattgacctggaggtgctgcggcccaagagagatgaccggcagctggagatcgccaacaacagcagccagatcctgcggctggtggagaccaaggacagcattggagatgaggaccccttcaccgccaagctgagctttgagcagggcggcagcgagtttgtgcctgtggtggtgtcccggctggtgctgcgctccatgagcagaagagatgtgctgatcaagcgctggcccccacccctgcgctggcagtacttccgcagcctgctgcctgatgccagcatcaccatgtgccccagctgcttccagatgttccacagcgaggactatgagctgctggtgctgcagcacggctgctgcccctactgccgccgctgcaaggatgaccccggcccctag

SEQ ID NO: 156531 - DNA, 5250 bp, synthetic construct
  misc_feature 1..5250: note = Description of Artificial Sequence: Synthetic coding sequence
  source 1..5250: mol_type = other DNA
atgcacctgaagcacctgcggaccctgctgagcccccaggatggagctgccaaggtgacctgcatggcctggagccagaacaatgccaagtttgctgtgtgcaccgtggacagagtggtgctgctgtatgatgagcacggggagcggcgggacaagttcagcaccaagccagctgacatgaagtatggcaggaagagctacatggtgaagggcatggccttctccccagacagcaccaagatcgccatcggccagacagacaacatcatctacgtgtacaagattggagaggactggggagacaagaaggtgatctgcaacaagttcatccagaccagcgctgtgacctgcctgcagtggccagctgagtacatcatcgtgtttggcctggccgagggcaaggtgcggctggccaacaccaagaccaacaagagcagcaccatctatggaacagagagctatgtggtgtccctgaccaccaactgcagcggcaagggcatcctgagcggccacgcagatggcaccatcgtgcgctacttctttgatgatgagggcagcggggagagccagggcaagctggtgaaccacccctgccccccctatgccctggcctgggccaccaacagcatcgtggccgccggctgtgacaggaagatcgtggcctacggcaaggagggccacatgctgcagacctttgactacagccgggacccccaggagcgggagttcaccacagctgtgagcagccctgggggccagagcgtggtgctgggcagctatgaccggctgcgggtcttcaactggatccccaggaggagcatctgggaggaggccaagcccaaggagatcaccaacctgtacaccatcacagccctggcctggaagagagatggcagccggctgtgtgtgggcaccctgtgtggcggcgtggagcagtttgactgctgcctgcggcgcagcatctacaagaacaagtttgagctgacctacgtgggccccagccaggtgattgtgaagaacctgagcagcggcaccagggtggtgctgaagagccactacggctatgaggtggaggaggtgaagatcctgggcaaggagcgctacctggtggcccacaccagcgagaccctgctgctgggggacctgaacaccaaccggctgtctgagatcgcctggcagggcagcggcggcaatgagaagtacttctttgaaaatgaaaatgtgtgcatgatcttcaatgctggggagctgaccctggtggagtatggcaacaatgacaccctgggctctgtgaggacagagttcatgaacccccacctgatctctgtgcgcatcaatgaacgctgccagaggggcacagaggacaacaagaagctggcctacctgattgacatcaagaccatcgccatcgtggacctgattggaggctacaacattggaacagtgtcccatgagagccgggtggactggctggagctgaatgagaccggccacaagctgctcttccgggacaggaagctgcggctgcacctgtatgacatcgagagctgcagcaagaccatgatcctgaacttctgcagctacatgcagtgggtgcccggcagtgatgtgctggtggcccagaacagaaacagcctgtgtgtgtggtacaacatcgaggcccctgagcgggtgaccatgttcaccatcagaggagatgtgattggcctggagcggggcggcggcaagacagaggtgatggtgatggagggcgtgaccaccgtggcctacaccctggatgagggcctgattgaatttggaacagccattgatgatggcaactacatccgggccacagccttcctggagaccctggagatgaccccagagacagaggccatgtggaagaccctgagcaagctggccctggaggcccggcagctgcacatcgccgagcgctgcttcagcgccctgggccaggtggccaaggcccgcttcctgcacgagaccaatgaaattgctgaccaggtgtcccgggagtatggaggagagggcacagacttctaccaggtgcgggcccggctggccatgctggagaagaactacaagctggccgagatgatcttcctggagcagaatgctgtggaggaggccatgggcatgtaccaggagctgcaccgctgggatgaatgtattgctgtggccgaggccaagggccacccagccctggagaagctgcggcgcagctactaccagtggctgatggacacccagcaggaggagcgggccggggagctgcaggagagccagggagatggcctggccgccatcagcctgtacctgaaggccggcctgcctgccaaggccgcccggctggtgctgacccgggaggagctgctggccaacacagagctggtggagcacatcacagctgccctgatcaagggggagctgtatgaaagagctggggacctgtttgagaagatccacaacccccagaaggccctggagtgctacagaaaaggaaatgccttcatgaaggctgtggagctggcccggctggccttccctgtggaggtggtgaagctggaggaggcctggggagaccacctggtgcagcagaagcagctggatgctgccatcaaccactacatcgaggcccgctgcagcatcaaggccattgaagctgccctgggcgcccggcagtggaagaaggccatctacatcctggacctgcaggacaggaacacagccagcaagtactaccccctggtggcccagcactacgccagcctgcaggagtatgaaattgctgaggagctgtacaccaagggggacaggaccaaggatgccatcgacatgtacacccaggccggccgctgggagcaggcccacaagctggccatgaagtgcatgaggccagaagatgtgtctgtgctgtacatcacccaggcccaggagatggagaagcagggcaagtaccgggaggccgagcggctgtatgtgacagtgcaggagccagacctggccatcaccatgtacaagaagcacaagctgtatgatgacatgatccggctggtgggcaagcaccacccagacctgctgagtgacacccacctgcacctgggcaaggagctggaggccgagggccgcctgcaggaggccgagtaccactacctggaggcccaggagtggaaggccaccgtgaacatgtaccgggccagcggcctgtgggaggaggcctacagagtggcccggacccagggcggggccaatgcccacaagcacgtggcctacctgtgggccaagagcctgggcggggaggccgctgtgcggctgctgaacaagctgggcctgctggaggccgctgtggaccacgccgctgacaactgcagctttgaatttgcctttgagctgagccggctggccctgaagcacaagaccccagaggtgcacctgaagtatgccatgttcctggaggatgagggcaagtttgaggaggccgaggccgagttcatccgggccggcaagcccaaggaggccgtgctgatgtttgtgcacaaccaggactgggaggccgcccagagggtggccgaggcccatgaccctgacagcgtggccgaggtgctggtgggccaggcccggggggccctggaggagaaggacttccagaaggccgagggcctgctgctgcgggcccagaggcctggcctggccctgaactactacaaggaggccggcctgtggagcgatgccctgcgcatctgcaaggactatgtgcccagccagctggaggccctgcaggaggagtatgaaagagaggccaccaagaagggggcccggggcgtggagggctttgtggagcaggcccggcactgggagcaggccggggagtacagcagagctgtggactgctacctgaaggtgcgggacagcggcaacagcggcctggccgagaagtgctggatgaaggctgctgagctgagcatcaagttcctgcccccccagaggaacatggaggtggtgctggccgtgggcccccagctgattggaattggcaagcacagcgctgctgctgagctgtacctgaacctggacctggtgaaggaggccattgatgccttcattgaaggagaggagtggaacaaggccaagagggtggccaaggagctggaccccaggtatgaagattatgtggaccagcactacaaggagttcctgaagaaccagggcaaggtggacagcctggtgggcgtggatgtgattgctgccctggacctgtatgtggagcagggccagtgggacaagtgcattgaaacagccaccaagcagaactacaagatcctgcacaagtatgtggccctgtatgccacccacctgatccgggagggcagcagcgcccaggccctggccctgtatgtgcagcacggggccccagccaacccccagaacttcaacatctacaagaggatcttcacagacatggtgagcagccctggcaccaactgtgccgaggcctaccacagctgggccgacctgagagatgtgctcttcaacctgtgtgagaacctggtgaagagcagcgaggccaacagccctgcccacgaggagttcaagaccatgctgctgattgcccactactatgccaccaggtctgctgcccagagcgtgaagcagctggagaccgtggccgcccggctgtctgtgtccctgctgcggcacacccagctgctgcctgtggacaaggccttctatgaggccggcattgctgccaaggctgtgggctgggacaacatggccttcatcttcctgaaccgcttcctggacctgacagatgccatcgaggagggcaccctggatggcctggaccacagcgacttccaggacacagacatcccctttgaggtgcccctgcctgccaagcagcacgtgcctgaggccgagcgggaggaggtgcgggactgggtgctgactgtgtccatggaccagaggctggagcaggtgctgcccagagatgagcggggggcctatgaggccagcctggtggccgccagcactggagtgcgggccctgccctgcctgatcaccggctaccccatcctgaggaacaagattgagttcaagaggcctgggaaggccgccaacaaggacaactggaacaagttcctgatggccatcaagaccagccacagccctgtgtgccaggatgtgctgaagttcatcagccagtggtgtggcggcctgcccagcaccagcttctccttccagtag

SEQ ID NO: 156532 - DNA, 1536 bp, synthetic construct
  misc_feature 1..1536: note = Description of Artificial Sequence: Synthetic coding sequence
  source 1..1536: mol_type = other DNA
atggcctggagccagaacaatgccaagtttgctgtgtgcaccgtggacagagtggtgctgctgtatgatgaacatggagagcggcgggacaagttcagcaccaagccagctgacatgaagtatggcaggaagagctacatggtgaagggcatggccttctccccagacagcaccaagatcgccatcggccagacagacaacatcatctacgtgtacaagatcggggaggactggggagacaagaaggtgatctgcaacaagttcatccagaccagcgctgtgacctgcctgcagtggccagctgagtacatcatcgtgtttggcctggccgagggcaaggtgcggctggccaacaccaagaccaacaagagcagcaccatctacggcacagagagctatgtggtgtccctgaccaccaactgcagcggcaagggcatcctgagcggccatgctgatggcaccatcgtgcgctacttctttgatgatgagggcagcggggagagccagggcaagctggtgaaccacccctgccccccctatgccctggcctgggccaccaacagcatcgtggccgccggctgtgacaggaagatcgtggcctacggcaaggagggccacatgctgcagacctttgactacagccgggacccccaggagcgggagttcaccacagctgtgagcagccctgggggccagagcgtggtgctgggcagctatgaccggctgcgggtcttcaactggatcccccggcgcagcatctgggaggaggccaagcccaaggagatcaccaacctgtacaccatcacagccctggcctggaagagagatggcagccggctgtgtgtgggcaccctgtgtggcggcgtggagcagtttgactgctgcctgcggcgcagcatctacaagaacaagtttgagctgacctacgtgggccccagccaggtgattgtgaagaacctgagcagcggcaccagggtggtgctgaagagccactacggctatgaggtggaggaggtgaagatcctgggcaaggagcgctacctggtggcccacaccagcgagaccctgctgctgggggacctgaacaccaaccggctgtctgaaattgcctggcagggcagcggcggcaatgagaagtacttctttgaaaatgaaaatgtgtgcatgatcttcaatgctggggagctgaccctggtggagtatggcaacaatgacaccctgggctctgtgaggacagagttcatgaacccccacctgatctctgtgcgcatcaatgaacgctgccagaggggcacagaggacaacaagaagctggcctacctgattgacatcaagaccatcgccatcgtggacctgattggaggctacaacatcggcaccgtgtcccatgagagccgggtggactggctggagctgaatgaaacaggccacaagctgctcttccgggacaggaagctgcgggtgagaagagccaccaaggccctgggcatcggctggcccacagaaggagtgcggcaggccgccacccgggactag

SEQ ID NO: 156533 - DNA, 369 bp, synthetic construct
  misc_feature 1..369: note = Description of Artificial Sequence: Synthetic coding sequence
  source 1..369: mol_type = other DNA
atgacccacctgctgctgacagccaccgtgaccccatctgagcagaacagcagccgggagcccggctgggagacagccatggccaaggacatcctgggggaggccggcctgcactttgatgagctgaacaagctgcgggtgctggaccctgaggtgacccagcagaccatcgagctgaaggaggagtgcaaggactttgtggacaagattggccagttccagaagatcgtgggcggcctgattgagctggtggaccagctggccaaggaggccgagaatgagaagatgaaggtgcgcagcgcctgcctgccccccacctcctggccaggcaccctggtgcactaccccctcatccccctgcccagctag

SEQ ID NO: 156534 - DNA, 447 bp, synthetic construct
  misc_feature 1..447: note = Description of Artificial Sequence: Synthetic coding sequence
  source 1..447: mol_type = other DNA
atggccaaggacatcctgggggaggccggcctgcactttgatgagctgaacaagctgcgggtgctggaccctgaggtgacccagcagaccatcgagctgaaggaggagtgcaaggactttgtggacaagattggccagttccagaagatcgtgggcggcctgattgagctggtggaccagctggccaaggaggccgagaatgagaagatgaagagcctggccgtgagcccccggctggagtgcaccggggccatcagcgcccactgcaagctgtgcctgagtgacagcagtgacagccccaccagccccagccgggtgggcggcaccaccggccaccgctgcagcgagctggcccagatctacagcaaggccgagaggagcagcacagctgccaccagcagccccaacagcaggaaagaaaatgctgccaggaaggtgtctggatag

SEQ ID NO: 156535 - DNA, 399 bp, synthetic construct
  misc_feature 1..399: note = Description of Artificial Sequence: Synthetic coding sequence
  source 1..399: mol_type = other DNA
atggccaaggacatcctgggggaggccggcctgcactttgatgagctgaacaagctgcgggtgctggaccctgaggtgacccagcagaccatcgagctgaaggaggagtgcaaggactttgtggacaagattggccagttccagaagatcgtgggcggcctgattgagctggtggaccagctggccaaggaggccgagaatgagaagatgaaggccatcggggccaggaacctgctgaagagcatcgccaagcagcgggaggcccagcagcagcagctgcaggccctgattgctgagaagaagatgcagctggagcgctacagagtggagtatgaggccctgtgcaaggtggaggccgagcagaatgagttcatcgaccagttcatcttccagaagtag

SEQ ID NO: 156536 - DNA, 216 bp, synthetic construct
  misc_feature 1..216: note = Description of Artificial Sequence: Synthetic coding sequence
  source 1..216: mol_type = other DNA
gacatcctgggggaggccggcctgcactttgatgagctgaacaagctgcgggtgctggaccctgaggtgacccagcagaccatcgagctgaaggaggagtgcaaggactttgtggacaagattggccagttccagaagatcgtgggcggcctcatcgagctggtggaccagctggccaaggaggctgaaaatgagaagatgaaggtgtctggatag

SEQ ID NO: 156537 - DNA, 345 bp, synthetic construct
  misc_feature 1..345: note = Description of Artificial Sequence: Synthetic coding sequence
  source 1..345: mol_type = other DNA
atggccaaggacatcctgggggaggccggcctgcactttgatgagctgaacaagctgcgggtgctggaccctgaggtgacccagcagaccatcgagctgaaggaggagtgcaaggactttgtggacaagattggccagttccagaagatcgtgggcggcctgattgagctggtggaccagctggccaaggaggccgagaatgagaagatgaaggccatcggggccaggaacctgctgaagagcatcgccaagcagcgggaggcccagcagcagcagctgcaggccctgattgctgagaagaagatgcagctggagagaaatgagctgaagatcagcctgctgtag

SEQ ID NO: 156538 - DNA, 477 bp, synthetic construct
  misc_feature 1..477: note = Description of Artificial Sequence: Synthetic coding sequence
  source 1..477: mol_type = other DNA
atgacccacctgctgctgacagccaccgtgaccccatctgagcagaacagcagccgggagcccggctgggagacagccatggccaaggacatcctgggggaggccggcctgcactttgatgagctgaacaagctgcgggtgctggaccctgaggtgacccagcagaccatcgagctgaaggaggagtgcaaggactttgtggacaagattggccagttccagaagatcgtgggcggcctgattgagctggtggaccagctggccaaggaggccgagaatgagaagatgaaggccatcggggccaggaacctgctgaagagcatcgccaagcagcgggaggcccagcagcagcagctgcaggccctgattgctgagaagaagatgcagctggagcgctacagagtggagtatgaggccctgtgcaaggtggaggccgagcagaatgagttcatcgaccagttcatcttccagaagtag

SEQ ID NO: 156539 - DNA, 399 bp, synthetic construct; identical to SEQ ID NO: 156535
  misc_feature 1..399: note = Description of Artificial Sequence: Synthetic coding sequence
  source 1..399: mol_type = other DNA

SEQ ID NO: 156540 - DNA, 642 bp, synthetic construct
  misc_feature 1..642: note = Description of Artificial Sequence: Synthetic coding sequence
  source 1..642: mol_type = other DNA
atggaggacctgctggacctggatgaggagctgcgctacagcctggccaccagccgggccaagatgggccggcgggcccagcaggagagcgcccaggccgagaaccacctgaatggcaagaacagcagcctgaccctgactggagagaccagcagcgccaagctgccccgctgccggcagggcggctgggccggggacagcgtgaaggccagcaatggcacccagacaggcaagcagcagctggacctgaatgcctgctaccacaagacccaccaccgggacctgggcctggccagcctggaggaggccgacatccccatcatcccagacctggaggaggtgcaggaggaggactttgtgctgcaggtggccgccccacccagcatccagatcaagagggtgatgacctacagagacctggacaatgacctgatgaagtacagcgccatccagaccctggatggagaaattgacctgaagctgctgaccaaggtgctggcccctgagcacgaggtgcgggaggatgatgtgggctgggactgggaccacctgttcacagaggtgagcagcgaggtgctgacagagtgggaccccctgcagacagagaaggaggaccctgctggccaggcccggcacacctag

SEQ ID NO: 156541 - DNA, 627 bp, synthetic construct
  misc_feature 1..627: note = Description of Artificial Sequence: Synthetic coding sequence
  source 1..627: mol_type = other DNA
atggaggacctgctggacctggatgaggagctgcgctacagcctggccaccagccgggccaagatgggccggcgggcccagcaggagagcgcccaggccgagaaccacctgaatggcaagaacagcagcctgaccctgactggagagaccagcagcgccaagctgccccgctgccggcagggcggctgggccggggacagcgtgaaggccagcaagttccggaggaaggccagcgaggagattgaggacttccggctgcggccccagagcctgaatggaagtgactatggaggagacatccccatcatcccagacctggaggaggtgcaggaggaggactttgtgctgcaggtggccgcccctccttccatccagatcaagagggtgatgacctacagagacctggacaatgacctgatgaagtacagcgccatccagaccctggatggagaaattgacctgaagctgctgaccaaggtgctggcccctgagcacgaggtgagagaagatgatgtgggctgggactgggaccacctgttcacagaggtgtcctctgaggtgctgacagagtgggaccccctgcagacagagaaggaggaccctgctggccaggcccggcacacctag

SEQ ID NO: 156542 - DNA, 342 bp, synthetic construct
  misc_feature 1..342: note = Description of Artificial Sequence: Synthetic coding sequence
  source 1..342: mol_type = other DNA
atggaggacctgctggacctggatgaggagctgcgctacagcctggccaccagccgggccaagatgggccggcgggcccagcaggagagcgcccaggccgagaaccacctgaatggcaagaacagcagcctgaccctgactggagagaccagcagcgccaagctgccccgctgccggcagggcggctgggccggggacagcgtgaaggccagcaagttccggaggaaggccagcgaggagattgaggagtatgtgagcagcatcctgatcctgatggtgtcctatgtggacctgggccagcagtgcagcctgggcggccatgacctcttccacctgtgctag

SEQ ID NO: 156543 - DNA, 1290 bp, synthetic construct
  misc_feature 1..1290: note = Description of Artificial Sequence: Synthetic coding sequence
  source 1..1290: mol_type = other DNA
atgacagctgccctggccgtggtgaccaccagcggcctggaggatggagtgcccaggagcagaggagagggcactggagaggtggtgctggagcggggccctggggccgcctaccacatgtttgtggtgatggaggacctggtggagaagctgaagctgctgcgctatgaggaggagttcctgaggaagagcaacctgaaggcccccagccgccactactttgccctgcccaccaaccctggagagcagttctacatgttctgcaccctggccgcctggctgatcaacaaggccggccggccctttgagcagccccaggagtatgatgaccccaatgccaccatcagcaacatcctgtctgagctgcggagctttggaagaacagctgacttcccccccagcaagctgaagagcggctacggggagcacgtgtgctacgtgctggactgctttgctgaggaggccctgaagtacatcggcttcacctggaagaggcccatctaccctgtggaggagctggaggaggagagcgtggccgaggatgatgctgagctgaccctgaacaaggtggatgaggagtttgtggaggaggagacagacaatgaggagaacttcatcgacctgaatgtgctgaaggcccagacctaccacctggacatgaatgaaacagccaagcaggaggacatcctggagagcaccacagatgctgctgagtggagcctggaggtggagcgggtgctgccccagctgaaggtgaccatcagaacagacaacaaggactggaggatccacgtggaccagatgcaccagcacaggtctggaattgaaagtgccctgaaggagaccaagggcttcctggacaagctgcacaatgagatcaccaggaccctggagaagatcagcagccgggagaagtacatcaacaaccagctggagaacctggtgcaggagtaccgggccgcccaggcccagctgtctgaggccaaggagcgctaccagcagggcaatggaggagtgacagagaggacccggctgctgtctgaggtgatggaggagctggagaaggtgaagcaggagatggaggagaagggcagctccatgacagatggagcccccctggtgaagatcaagcagagcctgaccaagctgaagcaggagaccgtggagatggacatccgcatcggcatcgtggagcacaccctgctgcagagcaagctgaaggagaagagcaacatgaccaggaacatgcacgccaccgtcatccctgagcccgccaccggcttctactag

SEQ ID NO: 156544 - DNA, 2334 bp, synthetic construct
  misc_feature 1..2334: note = Description of Artificial Sequence: Synthetic coding sequence
  source 1..2334: mol_type = other DNA
atgaggctgaagatcagcctgctgaaggagcccaagcaccaggagctggtgtcctgtgtgggctggaccacagctgaggagctgtacagctgcagtgatgaccaccagatcgtgaagtggaacctgctgaccagcgagaccacccagatcgtgaagctgcctgatgacatctaccccatcgacttccactggttccccaagagcctgggcgtgaagaagcagacccaggccgagagctttgtgctgaccagcagtgatggcaagttccacctgatcagcaagctgggccgggtggagaagtctgtggaggcccactgtggggctgtgctggccggccgctggaactatgagggcacagccctggtgacagtgggggaggatggccagatcaagatctggagcaagacaggcatgctgcggagcaccctggcccagcagggcacccctgtgtacagcgtggcctggggcccagattctgagaaggtgctgtacacagctgggaagcagctgatcatcaagcccctgcagcccaatgccaaggtgctgcagtggaaggcccatgatggcatcatcctgaaggtggactggaacagcgtgaatgacctgatcctgtctgctggggaggactgcaagtacaaggtgtgggacagctatggccggcccctgtacaacagccagccccatgagcaccccatcacctctgtggcctgggccccagatggagagctgtttgctgtgggcagcttccacaccctgcggctgtgtgacaagacaggctggagctatgccctggagaagcccaacacaggcagcatcttcaacatcgcctggagcattgatggcacccagattgctggggcctgtggaaatggccacgtggtgtttgcccacgtggtggagcagcactgggagtggaagaacttccaggtgaccctgaccaagagaagagccatgcaggtgagaaatgtgctgaatgatgctgtggacctgctggagttccgggacagagtcatcaaggccagcctgaactatgcccacctggtggtgtccaccagcctgcagtgctacgtgttcagcaccaagaactggaacacccccatcatctttgacctgaaggagggcaccgtgtccctcatcctgcaggccgagcggcacttcctgctggtggatggcagcagcatctacctgtacagctatgagggccgcttcatcagcagccccaagtttcctggcatgaggacagacatcctgaatgcccagacagtgtccctgagcaatgacaccatcgccatccgggacaaggcagatgagaagatcatcttcctgtttgaggccagcacaggcaagcccctgggagatggcaagttcctgagccacaagaatgagatcctggagatcgccctggaccagaagggcctgaccaatgacaggaagatcgccttcatcgacaagaacagagacctgtgcatcacctctgtgaagagatttgggaaggaggagcagatcatcaagctgggcaccatggtgcacaccctggcctggaatgacacctgcaacatcctgtgtggcctgcaggacacccgcttcatcgtgtggtactaccccaacacagtgtatgtggaccgggacatcctgcccaagaccctgtatgaaagagatgccagcgagttcagcaagaacccccacatcgtgtcctttgtgggcaaccaggtgaccatccggcgggcagatggcagcctggtgcacatcagcatcaccccctacccagccatcctgcatgaatatgtgagcagcagcaagtgggaggatgctgtgcggctgtgccgctttgtgaaggagcagaccatgtgggcctgcctggccgccatggctgtggccaacagagacatgaccacagctgagatcgcctatgctgccatcggggagattgacaaggtgcagtacatcaacagcatcaagaacctgcccagcaaggagagcaagatggcccacatcctgctcttcagcggcaacatccaggaggccgagatcgtgctgctgcaggccggcctggtgtaccaggccatccagatcaacatcaacctgtacaactgggagcgggccctggagctggccgtgaagtacaagacccacgtggacacagtgctggcctaccggcagaagttcctggagaccttcggcaagcaggagaccaacaagcgctacctgcactatgcagagggcctgcagattgactgggagaagatcaaggccaagattgagatggagatcaccaaggagcgggagcagagcagcagcagccagagcagcaagagcatcggcctgaagccctag

SEQ ID NO: 156545 - DNA, 195 bp, synthetic construct
  misc_feature 1..195: note = Description of Artificial Sequence: Synthetic coding sequence
  source 1..195: mol_type = other DNA
atgaggctgaagatcagcctgctgaaggagcccaagcaccaggagctggtgtcctgtgtgggctggaccacagctgaggagctgtacagctgcagtgatgaccaccagatcgtgaagtggaacctgctgaccagcgagaccacccagatcgtgaagctgcctgatgacatctaccccatcgacttccactggtag

SEQ ID NO: 156546 - DNA, 1923 bp, synthetic construct
  misc_feature 1..1923: note = Description of Artificial Sequence: Synthetic coding sequence
  source 1..1923: mol_type = other DNA
atgctgcggagcaccctggcccagcagggcacccctgtgtacagcgtggcctggggccctgacagcgagaaggtgctgtacacagctgggaagcagctgatcatcaagcccctgcagcccaatgccaaggtgctgcagtggaaggcccatgatggcatcatcctgaaggtggactggaacagcgtgaatgacctgatcctgtctgctggggaggactgcaagtacaaggtgtgggacagctatggccggcccctgtacaacagccagccccatgagcaccccatcacctctgtggcctgggccccagatggagagctgtttgctgtgggcagcttccacaccctgcggctgtgtgacaagacaggctggagctatgccctggagaagcccaacacaggcagcatcttcaacatcgcctggagcattgatggcacccagattgctggggcctgtggaaatggacatgtggtgtttgcccacgtggtggagcagcactgggagtggaagaacttccaggtgaccctgaccaagaggcgggccatgcaggtgagaaatgtgctgaatgatgctgtggacctgctggagttccgggacagagtcatcaaggccagcctgaactatgcccacctggtggtgtccaccagcctgcagtgctacgtgttcagcaccaagaactggaacacccccatcatctttgacctgaaggagggcaccgtgtccctcatcctgcaggccgagcggcacttcctgctggtggatggcagcagcatctacctgtacagctatgagggccgcttcatcagcagccccaagtttcctggcatgaggacagacatcctgaatgcccagacagtgtccctgagcaatgacaccatcgccatccgggacaaggcagatgagaagatcatcttcctgtttgaggccagcacaggcaagcccctgggagatggcaagttcctgagccacaagaatgagatcctggagatcgccctggaccagaagggcctgaccaatgacaggaagatcgccttcatcgacaagaacagagacctgtgcatcacctctgtgaagagatttgggaaggaggagcagatcatcaagctgggcaccatggtgcacaccctggcctggaatgacacctgcaacatcctgtgtggcctgcaggacacccgcttcatcgtgtggtactaccccaacacagtgtatgtggaccgggacatcctgcccaagaccctgtatgaaagagatgccagcgagttcagcaagaacccccacatcgtgtcctttgtgggcaaccaggtgaccatcagaagagcagatggcagcctggtgcacatcagcatcaccccctacccagccatcctgcacgagtatgtgagcagcagcaagtgggaggatgctgtgcggctgtgccgctttgtgaaggagcagaccatgtgggcctgcctggccgccatggctgtggccaacagagacatgaccacagctgagatcgcctatgctgccatcggggagattgacaaggtgcagtacatcaacagcatcaagaacctgcccagcaaggagagcaagatggcccacatcctgctcttcagcggcaacatccaggaggccgagatcgtgctgctgcaggccggcctggtgtaccaggccatccagatcaacatcaacctgtacaactgggagcgggccctggagctggccgtgaagtacaagacccacgtggacacagtgctggcctaccggcagaagttcctggagaccttcggcaagcaggagaccaacaagcgctacctgcactacgccgagggcctgcagattgactgggagaagatcaaggccaagattgagatggagatcaccaaggagcgggagcagagcagcagcagccagagcagcaagagcatcggcctgaagccctag

SEQ ID NO: 156547 - DNA, 366 bp, synthetic construct
  misc_feature 1..366: note = Description of Artificial Sequence: Synthetic coding sequence
  source 1..366: mol_type = other DNA
atgaggctgaagatcagcctgctgaaggagcccaagcaccaggagctggtgtcctgtgtgggctggaccacagctgaggagctgtacagctgcagtgatgaccaccagatcgtgaagtggaacctgctgaccagcgagaccacccagatcgtgaagctgcctgatgacatctaccccatcgacttccactggttccccaagagcctgggcgtgaagaagcagacccaggccgagagctttgtgctgaccagcagtgatggcaagttccacctgatcagcaagctgggccgggtggagaagtctgtggaggcccactgtggggctgtgctggccggccgctggaactatgagggcacagccctgtag

SEQ ID NO: 156548 - DNA, 1923 bp, synthetic construct; identical to SEQ ID NO: 156546
  misc_feature 1..1923: note = Description of Artificial Sequence: Synthetic coding sequence
  source 1..1923: mol_type = other DNA

SEQ ID NO: 156549 - DNA, 540 bp, synthetic construct
  misc_feature 1..540: note = Description of Artificial Sequence: Synthetic coding sequence
  source 1..540: mol_type = other DNA
atgaggctgaagatcagcctgctgaaggagcccaagcaccaggagctggtgtcctgtgtgggctggaccacagctgaggagctgtacagctgcagtgatgaccaccagatcgtgaagtggaacctgctgaccagcgagaccacccagatcgtgaagctgcctgatgacatctaccccatcgacttccactggttccccaagagcctgggcgtgaagaagcagacccaggccgagagctttgtgctgaccagcagtgatggcaagttccacctgatcagcaagctgggccgggtggagaagtctgtggaggcccactgtggggctgtgctggccggccgctggaactatgagggcacagccctggtgacagtgggggaggatggccagatcaagatctggagcaagacaggcatgctgcggagcaccctggcccagcagggcacccctgtgtacagcgtggcctggggcccagattctgagaaggtgctgtacacagctgggaagcagctgatcatcaagcccctgcagcccaatgcctag

SEQ ID NO: 156550 - DNA, 1227 bp, synthetic construct
  misc_feature 1..1227: note = Description of Artificial Sequence: Synthetic coding sequence
  source 1..1227: mol_type = other DNA
atggcctctgtggccagctgtgacagccggcccagcagtgatgagctgcccggggaccccagcagccaggaggaggatgaagattatgactttgaggacagagtgtctgacagcggcagctacagcagcgccagcagtgactatgatgacctggagcctgagtggctggacagcgtgcagaagaatggagagctgttctacctggagctgtctgaagatgaggaggagagcctgctgcctgagacccccaccgtgaaccacgtgcgcttctctgaaaatgagatcatcattgaagatgactacaaggagaggaagaagtatgagcccaagctgaagcagttcaccaagatcctgcggaggaagaggctgctgcccaagcgctgcaacaagaagaacagcaatgacaatggacctgtgtccatcctgaagcaccagagcaaccagaagacaggagtgattgtgcagcagcgctacaaggatgtgaatgtgtatgtgaaccccaagaagctgaccgtcatcaaggccaaggagcagctgaagctgctggaggtgctggtgggcatcatccaccagaccaagtggagctggaggagaacaggcaagcagggagatggagagcggctggtggtgcacggcctgctgcccggcggcagcgccatgaagagcggccaggtgctgattggagatgtgctggtggccgtgaatgatgtggatgtgaccacagagaacatcgagcgggtgctgagctgcatccctggccccatgcaggtgaagctgacctttgaaaatgcctatgatgtgaagcgggagaccagccacccccggcagaagaagacccagagcaacaccagtgacctggtgaagctgctgtggggcgaggaggtggagggcatccagcagagcggcctgaacaccccccacatcatcatgtacctgaccctgcagctggacagcgagaccagcaaggaggagcaggagatcctgtaccactaccccatgtctgaggccagccagaagctgaagtctgtgcggggcatcttcctgaccctgtgtgacatgctggagaatgtgacaggcacccaggtgaccagcagcagcctgctgctgaatggcaagcagatccacgtggcctactggaaggagagtgacaagctgctgctgattggcctgcctgctgaggagattgagctgcccagcagcgcccacacccacggggagagaaattag

SEQ ID NO: 156551 - DNA, 2829 bp, synthetic construct
  misc_feature 1..2829: note = Description of Artificial Sequence: Synthetic coding sequence
  source 1..2829: mol_type = other DNA
atggcctctgtggccagctgtgacagccggcccagcagtgatgagctgcccggggaccccagcagccaggaggaggatgaagattatgactttgaggacagagtgtctgacagcggcagctacagcagcgccagcagtgactatgatgacctggagcctgagtggctggacagcgtgcagaagaatggagagctgttctacctggagctgtctgaagatgaggaggagagcctgctgcctgagacccccaccgtgaaccacgtgcgcttctctgaaaatgagatcatcattgaagatgactacaaggagaggaagaagtatgagcccaagctgaagcagttcaccaagatcctgcggaggaagaggctgctgcccaagcgctgcaacaagaagaacagcaatgacaatggacctgtgtccatcctgaagcaccagagcaaccagaagacaggagtgattgtgcagcagcgctacaaggatgtgaatgtgtatgtgaaccccaagaagctgaccgtcatcaaggccaaggagcagctgaagctgctggaggtgctggtgggcatcatccaccagaccaagtggagctggaggagaacaggcaagcagggagatggagagcggctggtggtgcacggcctgctgcccggcggcagcgccatgaagagcggccaggtgctgattggagatgtgctggtggccgtgaatgatgtggatgtgaccacagagaacatcgagcgggtgctgagctgcatccctggccccatgcaggtgaagctgacctttgaaaatgcctatgatgtgaagcgggagaccagccacccccggcagaagaagacccagagcaacaccagtgacctggtgaagctgctgtggggcgaggaggtggagggcatccagcagagcggcctgaacaccccccacatcatcatgtacctgaccctgcagctggacagcgagaccagcaaggaggagcaggagatcctgtaccactaccccatgtctgaggccagccagaagctgaagtctgtgcggggcatcttcctgaccctgtgtgacatgctggagaatgtgacaggcacccaggtgaccagcagcagcctgctgctgaatggcaagcagatccacgtggcctactggaaggagagtgacaagctgctgctgattggcctgcctgctgaggaggtgcccctgccccggctgaggaacatgattgaaaatgtcatccagaccctgaagttcatgtatggcagcctggacagcgccttctgccagattgaaaatgtgccccggctggaccacttcttcaacctcttcttccagagggccctgcagcctgccaagctgcacagcagcgccagccccagcgcccagcagtatgatgccagcagcgctgtgctgctggacaacctgcccggggtgcgctggctgaccctgcccctggagatcaagatggagctggacatggccctgagtgacctggaggccgctgactttgctgagctgtctgaggactactatgacatgagaagactctacaccatcctgggcagcagcctcttctacaagggctacctgatctgcagccacctgcccaaggatgacctgattgatattgctgtgtactgccgccactactgcctgctgcccctggccgccaagcagagaattggccagctgatcatctggagggaggtgttcccccagcaccacctgcggcccctggccgacagcagcacagaggtgtttcctgagcctgagggccgctacttcctgctggtggtgggcctgaagcactacatgctgtgtgtgctgctggaggccggcggctgtgccagcaaggccatcggcagccctggccctgactgtgtgtatgtggaccaggtgaagaccaccctgcaccagctggatggagtggacagcagaattgatgagcggctggccagcagccctgtgccctgcctgagctgtgccgactggttcctgaccggcagccgggagaagacagacagcctgaccaccagccccatcctgagccggctgcagggcaccagcaaggtggccaccagccccacctgcaggaggaccctgtttggagactacagcctgaagaccaggaagcccagccccagctgcagcagcggcggcagtgacaatggctgtgagggcggggaggatgatggcttcagcccccacaccaccccagatgctgtgaggaagcagcgggagagccagggcagtgatggcctggaggagagcggcaccctgctgaaggtgaccaagaagaagagcaccctgcccaaccccttccacctgggcaacctgaagaaggacctgcctgagaaggagctggagatctacaacacagtgaagctgaccagcggccctgagaacaccctcttccactacgtggccctggagaccgtgcagggcatcttcatcacccccaccctggaggaggtggcccagctgagcggcagcatccacccccagctgatcaagaacttccaccagtgctgcctgagcatccgggctgtgttccagcagaccctggtggaggagaagaagaagggcctgaacagcggggaccacagcgacagcgccaagtctgtgagcagcctgaaccctgtgaaggagcacggcgtgctgtttgagtgcagccctggcaactggacagaccagaagaaggcccctcctgtgatggcctactgggtggtgggccgcctcttcctgcaccccaagccccaggagctgtatgtgtgcttccatgacagcgtgacagagatcgccatcgagatcgccttcaagctgttcttcggcctgaccctgtag

SEQ ID NO: 156552 - DNA, 2688 bp, synthetic construct
  misc_feature 1..2688: note = Description of Artificial Sequence: Synthetic coding sequence
  source 1..2688: mol_type = other DNA
atgaacaagtctgagaacctgctgtttgctggcagcagcctggccagccaggtgcacgccgctgctgtgaatggagacaagggggccctgcagaggctcatcgtgggcaacagcgccctgaaggacaaggaggaccagtttggaagaacacccctgatgtactgtgtgctggccgaccggctggactgtgctgatgccctgctgaaggccggggctgatgtgaacaagacagaccacagccagaggacagccctgcacctggccgcccagaagggcaactaccgcttcatgaagctgctgctgacccggcgggccaactggatgcagaaggacctggaggagatgacccccctgcacctgaccaccaggcacaggagccccaagtgcctggccctgctgctgaagttcatggcccctggagaggtggacacccaggacaagaacaagcagacagccctgcactggagcgcctactacaacaaccctgagcacgtgaagctgctgatcaagcatgacagcaacatcggcatcccagatgtggagggcaagatccccctgcactgggccgccaaccacaaggaccccagcgctgtgcacacagtgcgctgcatcctggatgctgcccccacagagagcctgctgaactggcaggactatgagggccgcacccccctgcactttgctgtggctgatggaaatgtgacagtggtggatgtgctgaccagctatgagagctgcaacatcaccagctatgacaacctcttccgcacccccctgcactgggccgccctgctgggccacgcccagatcgtgcacctgctgctggagaggaacaagagcggcaccatccccagcgacagccagggcgccacccccctgcactacgccgcccagagcaactttgctgagaccgtgaaggtgttcctgaagcaccccagcgtgaaggatgacagcgacctggagggccgcaccagcttcatgtgggccgccggcaagggcagtgatgatgtgctgcggaccatgctgagcctgaagagtgacatcgacatcaacatggctgacaagtatggaggaacagccctgcatgctgctgccctgagcggccacgtgtccacagtgaagctgctgctggagaacaatgcccaggtggatgccacagatgtgatgaagcacacccccctcttccgggcctgtgagatgggccacaaggatgtgatccagaccctcatcaagggcggggcccgggtggacctggtggaccaggacggccacagcctgctgcactgggccgccctgggcggcaatgctgatgtgtgccagatcctgattgagaacaagatcaaccccaacgtgcaggactatgccggccgcacccccctgcagtgtgccgcctatggaggctacatcaactgcatggctgtgctgatggagaacaatgctgaccccaacatccaggacaaggagggccgcacagccctgcactggagctgcaacaacggctacctggatgccatcaagctgctgctggactttgctgccttccccaaccagatggagaacaatgaggagcgctacacccccctggactatgccctgctgggggagagacatgaagtcatccagttcatgctggagcacggggccctgagcattgctgccatccaggacattgctgccttcaagatccaggccgtgtacaagggctacaaggtgaggaaggccttccgggacaggaagaacctgctgatgaagcatgagcagctgaggaaggatgctgctgccaagaagcgggaggaggagaacaagaggaaggaggccgagcagcagaagggccgccgcagcccagacagctgccggccccaggccctgccctgcctgcccagcacccaggatgtgcccagccggcagagccgggcccccagcaagcagcccccagctggaaatgtggcccagggccctgagccccgggacagccggggcagccctgggggcagcctgggcggggccctgcagaaggagcagcacgtgtccagtgacctgcagggcaccaacagccggcggcccaatgaaacagcccgggagcacagcaagggccagagcgcctgtgtgcacttccggcccaatgaaggaagtgatggcagccgccaccctggggtgcccagcgtggagaagagccgggagctgcggctgcagatcatccagcgggagaggaggaggaaggagctgttcaggaagaagaacaaggctgctgctgtgatccagagggcctggaggagctaccagctgaggaagcacctgagccacctgcggcacatgaagcagctgggcgctggagatgtggaccgctggaggcaggagagcacagccctgctgctgcaggtgtggaggaaggagctggagctgaagttcccccagaccacagctgtgtccaaggcccccaagagccccagcaagggcaccagcggcaccaagagcaccaagcacagcgtgctgaagcagatctacggctgcagccatgagggcaagatccaccaccccaccaggtctgtgaaggccagctctgtgctgcggctgaacagcgtgagcaacctgcagtgcatccacctgctggagaacagcggccgcagcaagaacttctcctacaacctgcagagcgccacccagcccaagaacaagaccaagccctag

SEQ ID NO: 156553 - DNA, 3198 bp, synthetic construct
  misc_feature 1..3198: note = Description of Artificial Sequence: Synthetic coding sequence
  source 1..3198: mol_type = other DNA
atgaacaagtctgagaacctgctgtttgctggcagcagcctggccagccaggtgcacgccgctgctgtgaatggagacaagggggccctgcagaggctcatcgtgggcaacagcgccctgaaggacaaggaggaccagtttggaagaacacccctgatgtactgtgtgctggccgaccggctggactgtgctgatgccctgctgaaggccggggctgatgtgaacaagacagaccacagccagaggacagccctgcacctggccgcccagaagggcaactaccgcttcatgaagctgctgctgacccggcgggccaactggatgcagaaggacctggaggagatgacccccctgcacctgaccaccaggcacaggagccccaagtgcctggccctgctgctgaagttcatggcccctggagaggtggacacccaggacaagaacaagcagacagccctgcactggagcgcctactacaacaaccctgagcacgtgaagctgctgatcaagcatgacagcaacatcggcatcccagatgtggagggcaagatccccctgcactgggccgccaaccacaaggaccccagcgctgtgcacacagtgcgctgcatcctggatgctgcccccacagagagcctgctgaactggcaggactatgagggccgcacccccctgcactttgctgtggctgatggaaatgtgacagtggtggatgtgctgaccagctatgagagctgcaacatcaccagctatgacaacctcttccgcacccccctgcactgggccgccctgctgggccacgcccagatcgtgcacctgctgctggagaggaacaagagcggcaccatccccagcgacagccagggcgccacccccctgcactacgccgcccagagcaactttgctgagaccgtgaaggtgttcctgaagcaccccagcgtgaaggatgacagcgacctggagggccgcaccagcttcatgtgggccgccggcaagggcagtgatgatgtgctgcggaccatgctgagcctgaagagtgacatcgacatcaacatggctgacaagtatggaggaacagccctgcatgctgctgccctgagcggccacgtgtccacagtgaagctgctgctggagaacaatgcccaggtggatgccacagatgtgatgaagcacacccccctcttccgggcctgtgagatgggccacaaggatgtgatccagaccctcatcaagggcggggcccgggtggacctggtggaccaggacggccacagcctgctgcactgggccgccctgggcggcaatgctgatgtgtgccagatcctgattgagaacaagatcaaccccaacgtgcaggactatgccggccgcacccccctgcagtgtgccgcctatggaggctacatcaactgcatggctgtgctgatggagaacaatgctgaccccaacatccaggacaaggagggccgcacagccctgcactggagctgcaacaacggctacctggatgccatcaagctgctgctggactttgctgccttccccaaccagatggagaacaatgaggagcgctacacccccctggactatgccctgctgggggagagacatgaagtcatccagttcatgctggagcacggggccctgagcattgctgccatccaggacattgctgccttcaagatccaggccgtgtacaagggctacaaggtgaggaaggccttccgggacaggaagaacctgctgatgaagcatgagcagctgaggaaggatgctgctgccaagaagcgggaggaggagaacaagaggaaggaggccgagcagcagaagggccgccgcagcccagacagctgccggccccaggccctgccctgcctgcccagcacccaggatgtgcccagccggcagagccgggcccccagcaagcagcccccagctggaaatgtggcccagggccctgagccccgggacagccggggcagccctgggggcagcctgggcggggccctgcagaaggagcagcacgtgtccagtgacctgcagggcaccaacagccggcggcccaatgaaacagcccgggagcacagcaagggccagagcgcctgtgtgcacttccggcccaatgaaggaagtgatggcagccgccaccctggggtgcccagcgtggagaagagcagaggagaaacagctggagatgagcgctgtgccaagggcaaaggatttgtgaagcagcccagctgcatccgggtggccggcccagatgagaagggggaggacagcagaagagctgctgccagcctgccccctcatgacagccactggaagcccagcagaagacatgacacagagcccaaggccaagtgtgccccccagaagaggaggacccaggagctgcggggcggccgctgcagccctgctggcagcagcaggcctggcagcgcccggggggaggccgtgcatgctggccagaaccccccccaccacaggacccccaggaacaaggtgacccaggccaagctgactggaggcctgtacagccacctgccccagagcacagaggagctgcggagcggggcccggcggctggagaccagcaccctgtctgaggacttccaggtgtccaaggagacagatcctgcccctggccccctgagcggccagagcgtgaacatcgacctgctgcctgtggagctgcggctgcagatcatccagcgggagaggaggaggaaggagctgttcaggaagaagaacaaggctgctgctgtgatccagagggcctggaggagctaccagctgaggaagcacctgagccacctgcggcacatgaagcagctgggcgctggagatgtggaccgctggaggcaggagagcacagccctgctgctgcaggtgtggaggaaggagctggagctgaagttcccccagaccacagctgtgtccaaggcccccaagagccccagcaagggcaccagcggcaccaagagcaccaagcacagcgtgctgaagcagatctacggctgcagccatgagggcaagatccaccaccccaccaggtctgtgaaggccagctctgtgctgcggctgaacagcgtgagcaacctgcagtgcatccacctgctggagaacagcggccgcagcaagaacttctcctacaacctgcagagcgccacccagcccaagaacaagaccaagccctag

SEQ ID NO: 156554 - DNA, 306 bp, synthetic construct
  misc_feature 1..306: note = Description of Artificial Sequence: Synthetic coding sequence
  source 1..306: mol_type = other DNA
atgaacaagtctgagaacctgctgtttgctggcagcagcctggccagccaggtgcacgccgctgctgtgaatggagacaagggggccctgcagaggctcatcgtgggcaacagcgccctgaaggacaaggaggaccagtttggaagaacacccctgatgtactgtgtgctggccgaccggctggactgtgctgatgccctgctgaaggccggggctgatgtgaacaagacagaccacagccagaggacagccctgcacctggccgcccagaaggccctgcggaccatcagcacaggccgcatctag

SEQ ID NO: 156555 - DNA, 2967 bp, synthetic construct
  misc_feature 1..2967: note = Description of Artificial Sequence: Synthetic coding sequence
  source 1..2967: mol_type = other DNA
atgaagctgctgctgacccggcgggccaactggatgcagaaggacctggaggagatgacccccctgcacctgaccaccaggcacaggagccccaagtgcctggccctgctgctgaagttcatggcccctggagaggtggacacccaggacaagaacaagcagacagccctgcactggagcgcctactacaacaaccctgagcacgtgaagctgctgatcaagcatgacagcaacatcggcatcccagatgtggagggcaagatccccctgcactgggccgccaaccacaaggaccccagcgctgtgcacacagtgcgctgcatcctggatgctgcccccacagagagcctgctgaactggcaggactatgagggccgcacccccctgcactttgctgtggctgatggaaatgtgacagtggtggatgtgctgaccagctatgagagctgcaacatcaccagctatgacaacctcttccgcacccccctgcactgggccgccctgctgggccacgcccagatcgtgcacctgctgctggagaggaacaagagcggcaccatccccagcgacagccagggcgccacccccctgcactacgccgcccagagcaactttgctgagaccgtgaaggtgttcctgaagcaccccagcgtgaaggatgacagcgacctggagggccgcaccagcttcatgtgggccgccggcaagggcagtgatgatgtgctgcggaccatgctgagcctgaagagtgacatcgacatcaacatggctgacaagtatggaggaacagccctgcatgctgctgccctgagcggccacgtgtccacagtgaagctgctgctggagaacaatgcccaggtggatgccacagatgtgatgaagcacacccccctcttccgggcctgtgagatgggccacaaggatgtgatccagaccctcatcaagggcggggcccgggtggacctggtggaccaggacggccacagcctgctgcactgggccgccctgggcggcaatgctgatgtgtgccagatcctgattgagaacaagatcaaccccaacgtgcaggactatgccggccgcacccccctgcagtgtgccgcctatggaggctacatcaactgcatggctgtgctgatggagaacaatgctgaccccaacatccaggacaaggagggccgcacagccctgcactggagctgcaacaacggctacctggatgccatcaagctgctgctggactttgctgccttccccaaccagatggagaacaatgaggagcgctacacccccctggactatgccctgctgggggagagacatgaagtcatccagttcatgctggagcacggggccctgagcattgctgccatccaggacattgctgccttcaagatccaggccgtgtacaagggctacaaggtgaggaaggccttccgggacaggaagaacctgctgatgaagcatgagcagctgaggaaggatgctgctgccaagaagcgggaggaggagaacaagaggaaggaggccgagcagcagaagggccgccgcagcccagacagctgccggccccaggccctgccctgcctgcccagcacccaggatgtgcccagccggcagagccgggcccccagcaagcagcccccagctggaaatgtggcccagggccctgagccccgggacagccggggcagccctgggggcagcctgggcggggccctgcagaaggagcagcacgtgtccagtgacctgcagggcaccaacagccggcggcccaatgaaacagcccgggagcacagcaagggccagagcgcctgtgtgcacttccggcccaatgaaggaagtgatggcagccgccaccctggggtgcccagcgtggagaagagcagaggagaaacagctggagatgagcgctgtgccaagggcaaaggatttgtgaagcagcccagctgcatccgggtggccggcccagatgagaagggggaggacagcagaagagctgctgccagcctgccccctcatgacagccactggaagcccagcagaagacatgacacagagcccaaggccaagtgtgccccccagaagaggaggacccaggagctgcggggcggccgctgcagccctgctggcagcagcaggcctggcagcgcccggggggaggccgtgcatgctggccagaaccccccccaccacaggacccccaggaacaaggtgacccaggccaagctgactggaggcctgtacagccacctgccccagagcacagaggagctgcggagcggggcccggcggctggagaccagcaccctgtctgaggacttccaggtgtccaaggagacagatcctgcccctggccccctgagcggccagagcgtgaacatcgacctgctgcctgtggagctgcggctgcagatcatccagcgggagaggaggaggaaggagctgttcaggaagaagaacaaggctgctgctgtgatccagagggcctggaggagctaccagctgaggaagcacctgagccacctgcggcacatgaagcagctgggcgctggagatgtggaccgctggaggcaggagagcacagccctgctgctgcaggtgtggaggaaggagctggagctgaagttcccccagaccacagctgtgtccaaggcccccaagagccccagcaagggcaccagcggcaccaagagcaccaagcacagcgtgctgaagcagatctacggctgcagccatgagggcaagatccaccaccccaccaggtctgtgaaggccagctctgtgctgcggctgaacagcggcaaggccgccacagccaagcagatggtgggcaagaacatgggcaagcacttccccctcttccacccccagaggcagaagaccctggagcagatctggccaggcttcagcaatggccacctgatctcctgggactactactgcagccagcacctgagcccctag

SEQ ID NO: 156556 - DNA, 3723 bp, synthetic construct
  misc_feature 1..3723: note = Description of Artificial Sequence: Synthetic coding sequence
  source 1..3723: mol_type = other DNA
atgtctgtgaaggagggcgcccagaggaagtgggccgccctgaaggagaagctgggcccccaggacagcgaccccacagaggccaacctggagagcgctgaccctgagctgtgcatccggctgctgcagatgcccagcgtggtgaactacagcggcctgaggaagaggctggagggcagtgatggcggctggatggtgcagttcctggagcagagcggcctggacctgctgctggaggccctggcccggctgagcggccggggcgtggcccgcatcagtgatgccctgctgcagctgacctgtgtgtcctgtgtgcgggctgtgatgaacagccggcagggcatcgagtacatcctgagcaaccagggctacgtgcggcagctgagccaggccctggacaccagcaatgtgatggtgaagaagcaggtgtttgagctgctggccgccctgtgcatctacagccctgagggccacgtgctgaccctggatgccctggaccactacaagacagtgtgcagccagcagtaccgcttcagcatcgtgatgaatgagctgagcggcagtgacaacgtgccctacgtggtgaccctgctgagcgtcatcaatgctgtgatcctgggccctgaggacctgcgggcccggacccagctgagaaatgagttcatcggcctgcagctgctggatgtgctggcccggctgcgggacctggaggatgctgacctgctgatccagctggaggcctttgaggaggccaaggccgaggatgaggaggagctgctgcgggtgtctggaggagtggacatgagcagccaccaggaggtgtttgccagcctcttccacaaggtgtcctgcagccctgtgtctgcccagctgctgtctgtgctgcagggcctgctgcacctggagcccaccctgcggagcagccagctgctgtgggaggccctggagagcctggtgaacagagctgtgctgctggccagtgatgcccaggagtgcaccctggaggaggtggtggagcggctgctgtctgtgaagggccggccccggcccagccccctggtgaaggcccacaagtctgtgcaggccaacctggaccagagccagaggggcagcagcccccagaacaccaccacccccaagcccagcgtggagggccagcagcctgctgctgctgctgcctgtgagcctgtggaccacgcccagagcgagagcatcctgaaggtgtcccagccccgggccctggagcagcaggccagcaccccacctcctcctcctcctccacccctgctgcccggcagcagcgctgagcccccacctcctcctcctcctccacccctgcccagcgtgggcgccaaggccctgcccacagcccctcctcctccacccctgcccggcctgggcgccatggcccccccagccccacccctgcccccacccctgcccggcagctgtgagttcctgcccccacctcctccacccctgcccggcctgggctgccccccacctcctccacccctgctgcccggcatgggctggggccccccacctcctcctccacccctgctgccctgcacctgcagcccccctgtggccggcggcatggaggaggtgattgtggcccaggtggaccacggcctgggcagcgcctgggtgcccagccacagaagagtgaacccccccaccctgaggatgaagaagctgaactggcagaagctgcccagcaatgtggcccgggagcacaacagcatgtgggccagcctgagcagcccagatgctgaggccgtggagccagacttcagcagcattgaaagactcttctccttccctgctgccaagcccaaggagcccaccatggtggccccccgggccaggaaggagcccaaggagatcaccttcctggatgccaagaagagcctgaacctgaacatcttcctgaagcagttcaagtgcagcaatgaggaggtggccgccatgatccgggccggggacaccaccaagtttgatgtggaggtgctgaagcagctgctgaagctgctgcctgagaagcatgaaattgagaacctgcgggccttcacagaggagcgggccaagctggccagcgctgaccacttctacctgctgctgctggccatcccctgctaccagctgagaattgagtgcatgctgctgtgtgagggcgctgctgctgtgctggacatggtgcggcccaaggcccagctggtgctggccgcctgtgagagcctgctgaccagccggcagctgcccatcttctgccagctgatcctgcgcatcggcaacttcctgaactacggcagccacactggagatgctgatggcttcaagatcagcaccctgctgaagctgacagagaccaagagccagcagaacagagtgaccctgctgcaccacgtgctggaggaggccgagaagagccacccagacctgctgcagctgccccgggacctggagcagcccagccaggccgccggcatcaacctggagatcatccgctctgaggccagcagcaacctgaagaagctgctggagacagagaggaaggtgtctgcctctgtggccgaggtgcaggagcagtacacagagcggctgcaggccagcatcagcgccttccgggccctggatgagctgtttgaggccatcgagcagaagcagcgggagctggccgactacctgtgtgaagatgcccagcagctgagcctggaggacaccttcagcaccatgaaggccttccgggacctcttcctgcgggccctgaaggagaacaaggacaggaaggagcaggccgccaaggccgagaggaggaagcagcagctggccgaggaggaggcccggcggcccagaggagaagatggcaagcctgtgaggaagggccctgggaagcaggaggaggtgtgtgtgattgatgccctgctggccgacatcaggaagggcttccagctgaggaagacagcccggggccgcggggacacagatggcggcagcaaggccgcctccatggaccccccccgggccacagagcctgtggccaccagcaacccagctggggaccctgtgggcagcacccgctgcccagccagcgagcccggcctggatgccaccacagccagcgagagccggggctgggacctggtggatgctgtgaccccaggcccccagcccaccctggagcagctggaggagggcggcccccggcccctggagcggcgcagctcctggtacgtggatgccagtgatgtgctgaccacagaggacccccagtgcccccagcccctggagggcgcctggcctgtgaccctgggagatgcccaggccctgaagcccctgaagttcagcagcaaccagcccccagctgctggcagcagccggcaggatgccaaggaccccaccagcctgctgggcgtgctgcaggccgaggccgacagcaccagcgagggcctggaggatgctgtgcacagcagaggagcccggcccccagctgctggccctggaggagatgaagatgaagatgaggaggacacagcccctgagagcgccctggacaccagcctggacaagagcttctctgaagatgctgtgacagacagcagcggcagcggcaccctgccccgggcccggggccgggccagcaagggcaccgggaagaggaggaagaagaggcccagccgcagccaggagggcctgcggccccggcccaaggccaagtag

SEQ ID NO: 156557 - DNA, 3750 bp, synthetic construct
  misc_feature 1..3750: note = Description of Artificial Sequence: Synthetic coding sequence
  source 1..3750: mol_type = other DNA
atgtctgtgaaggagggcgcccagaggaagtgggccgccctgaaggagaagctgggcccccaggacagcgaccccacagaggccaacctggagagcgctgaccctgagctgtgcatccggctgctgcagatgcccagcgtggtgaactacagcggcctgaggaagaggctggagggcagtgatggcggctggatggtgcagttcctggagcagagcggcctggacctgctgctggaggccctggcccggctgagcggccggggcgtggcccgcatcagtgatgccctgctgcagctgacctgtgtgtcctgtgtgcgggctgtgatgaacagccggcagggcatcgagtacatcctgagcaaccagggctacgtgcggcagctgagccaggccctggacaccagcaatgtgatggtgaagaagcaggtgtttgagctgctggccgccctgtgcatctacagccctgagggccacgtgctgaccctggatgccctggaccactacaagacagtgtgcagccagcagtaccgcttcagcatcgtgatgaatgagctgagcggcagtgacaacgtgccctacgtggtgaccctgctgagcgtcatcaatgctgtgatcctgggccctgaggacctgcgggcccggacccagctgagaaatgagttcatcggcctgcagctgctggatgtgctggcccggctgcgggacctggaggatgctgacctgctgatccagctggaggcctttgaggaggccaaggccgaggatgaggaggagctgctgcgggtgtctggaggagtggacatgagcagccaccaggaggtgtttgccagcctcttccacaaggtgtcctgcagccctgtgtctgcccagctgctgtctgtgctgcagggcctgctgcacctggagcccaccctgcggagcagccagctgctgtgggaggccctggagagcctggtgaacagagctgtgctgctggccagtgatgcccaggagtgcaccctggaggaggtggtggagcggctgctgtctgtgaagggccggccccggcccagccccctggtgaaggcccacaagtctgtgcaggccaacctggaccagagccagaggggcagcagcccccagaacaccaccacccccaagcccagcgtggagggccagcagcctgctgctgctgctgcctgtgagcctgtggaccacgcccagagcgagagcatcctgaaggtgtcccagccccgggccctggagcagcaggccagcaccccacctcctcctcctcctccacccctgctgcccggcagcagcgctgagcccccacctcctcctcctcctccacccctgcccagcgtgggcgccaaggccctgcccacagcccctcctcctccacccctgcccggcctgggcgccatggcccccccagccccacccctgcccccacccctgcccggcagctgtgagttcctgcccccacctcctccacccctgcccggcctgggctgccccccacctcctccacccctgctgcccggcatgggctggggccccccacctcctcctccacccctgctgccctgcacctgcagcccccctgtggccggcggcatggaggaggtgattgtggcccaggtggaccacggcctgggcagcgcctgggtgcccagccacagaagagtgaacccccccaccctgaggatgaagaagctgaactggcagaagctgcccagcaatgtggcccgggagcacaacagcatgtgggccagcctgagcagcccagatgctgaggccgtggagccagacttcagcagcattgaaagactcttctccttccctgctgccaagcccaaggagcccaccatggtggccccccgggccaggaaggagcccaaggagatcaccttcctggatgccaagaagagcctgaacctgaacatcttcctgaagcagttcaagtgcagcaatgaggaggtggccgccatgatccgggccggggacaccaccaagtttgatgtggaggtgctgaagcagctgctgaagctgctgcctgagaagcatgaaattgagaacctgcgggccttcacagaggagcgggccaagctggccagcgctgaccacttctacctgctgctgctggccatcccctgctaccagctgagaattgagtgcatgctgctgtgtgagggcgctgctgctgtgctggacatggtgcggcccaaggcccagctggtgctggccgcctgtgagagcctgctgaccagccggcagctgcccatcttctgccagctgatcctgcgcatcggcaacttcctgaactacggcagccacactggagatgctgatggcttcaagatcagcaccctgctgaagctgacagagaccaagagccagcagaacagagtgaccctgctgcaccacgtgctggaggaggccgagaagagccacccagacctgctgcagctgccccgggacctggagcagcccagccaggccgccggcatcaacctggagatcatccgctctgaggccagcagcaacctgaagaagctgctggagacagagaggaaggtgtctgcctctgtggccgaggtgcaggagcagtacacagagcggctgcaggccagcatcagcgccttccgggccctggatgagctgtttgaggccatcgagcagaagcagcgggagctggccgactacctgtgtgaagatgcccagcagctgagcctggaggacaccttcagcaccatgaaggccttccgggacctcttcctgcgggccctgaaggagaacaaggacaggaaggagcaggccgccaaggccgagaggaggaagcagcagctggccgaggaggaggcccggcggcccagaggagaagatggcaagcctgtgaggaagggccctgggaagcaggaggaggtgtgtgtgattgatgccctgctggccgacatcaggaagggcttccagctgaggaagacagcccggggccgcggggacacagatggcggcagcaaggccgcctccatggaccccccccgggccacagagcctgtggccaccagcaacccagctggggaccctgtgggcagcacccgctgcccagccagcgagcccggcctggatgccaccacagccagcgagagccggggctgggacctggtggatgctgtgaccccaggcccccagcccaccctggagcagctggaggagggcggcccccggcccctggagcggcgcagctcctggtacgtggatgccagtgatgtgctgaccacagaggacccccagtgcccccagcccctggagggcgcctggcctgtgaccctgggagatgcccaggccctgaagcccctgaagttcagcagcaaccagcccccagctgctggcagcagccggcaggatgccaaggaccccaccagcctgctgggcgtgctgcaggccgaggccgacagcaccagcgagggcctggaggatgctgtgcacagcagaggagcccggcccccagctgctggccctggaggagatgaagatgaagatgaggaggacacagcccctgagagcgccctggacaccagcctggacaagagcttctctgaagatgctgtgacagacagcagcggcagcggcaccctgccccgggcccggggccgggccagcaagggcaccgggaagaggaggaagaagaggcccagccgcagccaggaggaggtgcccccagacagtgatgacaacaagaccaagaagctgtgtgtgatccagtag

SEQ ID NO: 156558 - DNA, 705 bp, synthetic construct
  misc_feature 1..705: note = Description of Artificial Sequence: Synthetic coding sequence
  source 1..705: mol_type = other DNA
atgtctgtgaaggagggcgcccagaggaagtgggccgccctgaaggagaagctgggcccccaggacagcgaccccacagaggccaacctggagagcgctgaccctgagctgtgcatccggctgctgcagatgcccagcgtggtgaactacagcggcctgaggaagaggctggagggcagtgatggcggctggatggtgcagttcctggagcagagcggcctggacctgctgctggaggccctggcccggctgagcggccggggcgtggcccgcatcagtgatgccctgctgcagctgacctgtgtgtcctgtgtgcgggctgtgatgaacagccggcagggcatcgagtacatcctgagcaaccagggctacgtgcggcagctgagccaggccctggacaccagcaatgtgatggtgaagaagcaggtgtttgagctgctggccgccctgtgcatctacagccctgagggccacgtgctgaccctggatgccctggaccactacaagacagtgtgcagccagcagtaccgcttcagcatcgtgatgaatgagctgagcggcagtgacaacgtgccctacgtggtgaccctgctgagcgtcatcaatgctgtgatcctgggccctgaggacctgcgggcccggacccagctgagaaatgagttcatcggcctgcagctgctggatgtgctggcccggctgaggtag

SEQ ID NO: 156559 - DNA, 1758 bp, synthetic construct
  misc_feature 1..1758: note = Description of Artificial Sequence: Synthetic coding sequence
  source 1..1758: mol_type = other DNA
atgagccagcagcacaccctgcctgtgaccctgagccctgccctgagccaggagctgctgaagacagtgcccccacctgtgaacacccaccaggagcagatgaagcagcccacccccctgcccccaccctgccagaaggtgcctgtggagctgcctgtggaggtgcccagcaagcaggaggagaagcacatgacagctgtgaagggcctgcctgagcaggagtgtgagcagcagcagaaggagccccaggagcaggagctgcagcagcagcactgggagcagcacgaggagtaccagaaggccgagaaccctgagcagcagctgaagcaggagaagacccagagggaccagcagctgaacaagcagctggaggaggagaagaagctgctggaccagcagctggaccaggagctggtgaagagagatgagcagctgggcatgaagaaggagcagctgctggagctgcctgagcagcaggagggccacctgaagcacctggagcagcaggagggccagctgaagcaccctgagcagcaggagggccagctggagctgcctgagcagcaggagggccagctggagctgcctgagcagcaggagggccagctggagctgcctgagcagcaggagggccagctggagctgcctgagcagcaggagggccagctggagctgcctgagcagcaggagggccagctggagctgccccagcagcaggagggccagctggagctgtctgagcagcaggagggccagctggagctgtctgagcagcaggagggccagctgaagcacctggagcaccaggagggccagctggaggtgcctgaggagcagatgggccagctgaagtacctggagcagcaggagggccagctgaagcacctggaccagcaggagaagcagcctgagctgcctgagcagcagatgggccagctgaagcacctggagcagcaggagggccagcccaagcacctggagcagcaggagggccagctggagcagctggaggagcaggagggccagctgaagcacctggagcagcaggagggccagctggagcacctggagcaccaggagggccagctgggcctgcctgagcagcaggtgctgcagctgaagcagctggagaagcagcagggccagcccaagcacctggaggaggaggagggccagctgaagcacctggtgcagcaggagggccagctgaagcacctggtgcagcaggagggccagctggagcagcaggagcggcaggtggagcacctggagcagcaggtgggccagctgaagcacctggaggagcaggagggccagctgaagcacctggagcagcagcagggccagctggaggtgcctgagcagcaggtgggccagcccaagaacctggagcaggaggagaagcagctggagctgcctgagcagcaggagggccaggtgaagcacctggagaagcaggaggcccagctggagctgcctgagcagcaggtgggccagcccaagcacctggagcagcaggagaagcacctggagcaccctgagcagcaggacggccagctgaagcacctggagcagcaggagggccagctgaaggacctggagcagcagaagggccagctggagcagcctgtgtttgccccagcccctggccaggtgcaggacatccagcctgccctgcccaccaagggggaggtgctgctgcctgtggagcaccagcagcagaagcaggaggtgcagtggccacccaagcacaagtag

SEQ ID NO: 156560 - DNA, 1320 bp, synthetic construct
  misc_feature 1..1320: note = Description of Artificial Sequence: Synthetic coding sequence
  source 1..1320: mol_type = other DNA
atgaagaaggagcagctgctggagctgcctgagcagcaggagggccacctgaagcacctggagcagcaggagggccagctgaagcaccctgagcagcaggagggccagctggagctgcctgagcagcaggagggccagctggagctgcctgagcagcaggagggccagctggagctgcctgagcagcaggagggccagctggagctgcctgagcagcaggagggccagctggagctgcctgagcagcaggagggccagctggagctgccccagcagcaggagggccagctggagctgtctgagcagcaggagggccagctggagctgtctgagcagcaggagggccagctgaagcacctggagcaccaggagggccagctggaggtgcctgaggagcagatgggccagctgaagtacctggagcagcaggagggccagctgaagcacctggaccagcaggagaagcagcctgagctgcctgagcagcagatgggccagctgaagcacctggagcagcaggagggccagcccaagcacctggagcagcaggagggccagctggagcagctggaggagcaggagggccagctgaagcacctggagcagcaggagggccagctggagcacctggagcaccaggagggccagctgggcctgcctgagcagcaggtgctgcagctgaagcagctggagaagcagcagggccagcccaagcacctggaggaggaggagggccagctgaagcacctggtgcagcaggagggccagctgaagcacctggtgcagcaggagggccagctggagcagcaggagcggcaggtggagcacctggagcagcaggtgggccagctgaagcacctggaggagcaggagggccagctgaagcacctggagcagcagcagggccagctggaggtgcctgagcagcaggtgggccagcccaagaacctggagcaggaggagaagcagctggagctgcctgagcagcaggagggccaggtgaagcacctggagaagcaggaggcccagctggagctgcctgagcagcaggtgggccagcccaagcacctggagcagcaggagaagcacctggagcaccctgagcagcaggacggccagctgaagcacctggagcagcaggagggccagctgaaggacctggagcagcagaagggccagctggagcagcctgtgtttgccccagcccctggccaggtgcaggacatccagcctgccctgcccaccaagggggaggtgctgctgcctgtggagcaccagcagcagaagcaggaggtgcagtggccacccaagcacaagtag

SEQ ID NO: 156561 - DNA, 1914 bp, synthetic construct
  misc_feature 1..1914: note = Description of Artificial Sequence: Synthetic coding sequence
  source 1..1914: mol_type = other DNA
atgggcctgctgagccagggcagccccctgtcctgggaggagaccaagagacatgctgaccacgtgagaagacatggcatcctgcagttcctgcacatctaccacgctgtgaaggacagacacaaggatgtgctgaagtggggagatgaggtggagtacatgctggtgtcctttgaccacgagaacaagaaggtgcggctggtgctgagcggggagaaggtgctggagaccctgcaggagaagggggagaggaccaaccccaaccaccccaccctgtggaggccagaatatggcagctacatgattgagggcaccccaggccagccctacggcggcaccatgtctgagttcaacacagtggaggccaacatgaggaagaggaggaaggaggccaccagcatcctggaggagaaccaggccctgtgcaccatcaccagcttcccccggctgggctgccccggcttcaccctgcctgaggtgaagcccaaccctgtggagggcggggccagcaagagcctcttcttcccagatgaggccatcaacaagcacccccgcttcagcaccctgaccaggaacatccgccaccggcggggggagaaggtggtgatcaacgtgcccatcttcaaggacaagaacacccccagccccttcatcgagaccttcacagaagatgatgaggccagccgggccagcaagccagaccacatctacatggatgccatgggcttcggcatgggcaactgctgcctgcaggtgaccttccaggcctgcagcatcagcgaggcccgctacctgtatgaccagctggccaccatctgccccatcgtgatggccctgtctgctgccagccccttctaccggggctacgtgtctgacatcgactgccgctggggcgtcatcagcgcctctgtggatgacaggacccgggaggagcggggcctggagcccctgaagaacaacaactaccgcatcagcaagagccgctatgacagcattgacagctacctgagcaaatgtggggagaagtacaatgacatcgacctgaccatcgacaaggagatctatgagcagctgctgcaggagggcatcgaccacctgctggcccagcacgtggcccacctgttcatccgggaccccctgaccctgtttgaggagaagatccacctggatgatgccaatgaaagtgaccactttgagaacatccagagcaccaactggcagaccatgaggttcaagcccccaccacccaacagcgacatcggctggagggtggagttccggcccatggaggtgcagctgacagactttgaaaattctgcctacgtggtgtttgtggtgctgctgaccagggtcatcctgagctacaagctggacttcctgatccccctgagcaaggtggatgagaacatgaaggtggcccagaagagagatgctgtgctgcagggcatgttctacttcaggaaggacatctgcaagggcggcaatgctgtggtggatggctgcggcaaggcccagaacagcacagagctggccgctgaggagtacaccctgatgagcattgacaccatcatcaatggcaaggagggcgtcttccctggcctcatccccatcctgaacagctacctggagaacatggaggtggatgtggacacccgctgcagcatcctgaactacctgaagctgatcaagaagagggccagcggggagctgatgacagtggcccgctggatgagggagttcatcgccaaccacccagactacaagcaggacagcgtcatcacagatgagatgaactacagcctcatcctgaagtgcaaccagatcgccaatgagctgtgtgagtgcccagagctgctgggcagcgccttcaggaaggtgaagtacagcggcagcaagacagacagcagcaactag

SEQ ID NO: 156562 - DNA, 870 bp, synthetic construct
  misc_feature 1..870: note = Description of Artificial Sequence: Synthetic coding sequence
  source 1..870: mol_type = other DNA
atgtacttcctgacccccatcctggtggccatcctgtgcatcctggtggtgtggatcttcaagaatgctgaccgctccatggagaagaagaagggggagcccaggaccagggctgaggcccggccctgggtggatgaggacctgaaggacagcagtgacctgcaccaggccgaggaggatgctgatgagtggcaggagagtgaagaaaatgtggagcacatccccttcagccacaaccactacccagagaaggagatggtgaagaggagccaggagttctatgagctgctgaacaagagaagatctgtgcgcttcatcagcaatgagcaggtgcccatggaggtgattgacaacgtcatcagaacagctggaacagcccccagcggggcccacacagagccctggacctttgtggtggtgaaggaccctgatgtgaagcacaagatcaggaagatcatcgaggaggaggaggagatcaactacatgaagaggatgggccaccgctgggtgacagacctgaagaagctgcggaccaactggatcaaggagtacctggacacagcccccatcctgatcctgatcttcaagcaggtgcacggctttgctgccaacgggaagaagaaggtgcactactacaatgagatctctgtgtccatcgcctgtggcatcctgctggccgccctgcagaatgccggcctggtgacagtgaccaccacccccctgaactgtggcccccggctgcgggtgctgctgggccggcctgcccacgagaagctgctgatgctgctgcctgtgggctaccccagcaaggaggccaccgtgcctgacctgaagaggaagcccctggaccagatcatggtgacagtgtag

SEQ ID NO: 156563 - DNA, 813 bp, synthetic construct
  misc_feature 1..813: note = Description of Artificial Sequence: Synthetic coding sequence
  source 1..813: mol_type = other DNA
atgtacttcctgacccccatcctggtggccatcctgtgcatcctggtggtgtggatcttcaagaatgctgaccgctccatggagaagaagaagggggagcccaggaccagggctgaggcccggccctgggtggatgaggacctgaaggacagcagtgacctgcaccaggccgaggaggatgctgatgagtggcaggagagtgaagaaaatgtggagcacatccccttcagccacaaccactacccagagaaggagatggtgaagaggagccaggagttctatgagctgctgaacaagagaagatctgtgcgcttcatcagcaatgagcaggtgcccatggaggtgattgacaacgtcatcagaacagctggaacagcccccagcggggcccacacagagccctggacctttgtggtggtgaaggaccctgatgtgaagcacaagatcaggaagatcatcgaggaggaggaggagatcaactacatgaagaggatgggccaccgctgggtgacagacctgaagaagctgcggaccaactggatcaaggagtacctggacacagcccccatcctgatcctgatcttcaagcaggtgcacggctttgctgccaacgggaagaagaaggtgcactactacaatgagatctctgtgtccatcgcctgtggcatcctgctggccgccctgcaggtgaacaacggcatcaccatgaggcaccagacagcccggcaccgccacctgattgagggccctggccgcagcagcgaggcctgcagcaagctgagcagccagggctgccccggcttctactgctag

SEQ ID NO: 156564 - DNA, 744 bp, synthetic construct
  misc_feature 1..744: note = Description of Artificial Sequence: Synthetic coding sequence
  source 1..744: mol_type = other DNA
atgtacttcctgacccccatcctggtggccatcctgtgcatcctggtggtgtggatcttcaagaatgctgaccgctccatggagaagaagaagggggagcccaggaccagggctgaggcccggccctgggtggatgaggacctgaaggacagcagtgacctgcaccaggccgaggaggatgctgatgagtggcaggagagtgaagaaaatgtggagcacatccccttcagccacaaccactacccagagaaggagatggtgaagaggagccaggagttctatgagctgctgaacaagagaagatctgtgcgcttcatcagcaatgagcaggtgcccatggaggtgattgacaacgtcatcagaacagctggaacagcccccagcggggcccacacagagccctggacctttgtggtggtgaaggaccctgatgtgaagcacaagatcaggaagatcatcgaggaggaggaggagatcaactacatgaagaggatgggccaccgctgggtgacagacctgaagaagctgcggaccaactggatcaaggagtacctggacacagcccccatcctgatcctgatcttcaagcaggtgcacggctttgctgccaacgggaagaagaaggtgcactactacaatgagatctctgtgtccatcgcctgtggcatcctgctggccgccctgcaggtgtttgggaagatcatcctgaaggagctggccctgatctccttcctgaacctgtag

SEQ ID NO: 156565 - DNA, 855 bp, synthetic construct
  misc_feature 1..855: note = Description of Artificial Sequence: Synthetic coding sequence
  source 1..855: mol_type = other DNA
atgtacttcctgacccccatcctggtggccatcctgtgcatcctggtggtgtggatcttcaagaatgctgaccgctccatggagaagaagaagggggagcccaggaccagggctgaggcccggccctgggtggatgaggacctgaaggacagcagtgacctgcaccaggccgaggaggatgctgatgagtggcaggagagtgaagaaaatgtggagcacatccccttcagccacaaccactacccagagaaggagatggtgaagaggagccaggagttctatgagctgctgaacaagagaagatctgtgcgcttcatcagcaatgagcaggtgcccatggaggtgattgacaacgtcatcagaacagctggaacagcccccagcggggcccacacagagccctggacctttgtggtggtgaaggaccctgatgtgaagcacaagatcaggaagatcatcgaggaggaggaggagatcaactacatgaagaggatgggccaccgctgggtgacagacctgaagaagctgcggaccaactggatcaaggagtacctggacacagcccccatcctgatcctgatcttcaagcaggtgcacggctttgctgccaacgggaagaagaaggtgcactactacaatgagatctctgtgtccatcgcctgtggcatcctgctggccgccctgcaggtgaacaacggcatcaccatgaggcaccagacagcccggcaccgccacctgattgagggccctggccgcagcagcgaggcctgcagcaagctgagcagccagggctgccctggggccagcgctgctggcagcctcttccactttgccattgaatttgctgccccctag

SEQ ID NO: 156566 - DNA, 2850 bp, synthetic construct
  misc_feature 1..2850: note = Description of Artificial Sequence: Synthetic coding sequence
  source 1..2850: mol_type = other DNA
atggagcccccaggccgcagcagccgcagcacagccagccacaccctgcaccagtactgctgccccacccaggtgctggacagcatgaagctgacccccagcggccgcctggccgagagctctgtggagggagatgcccctggcagtgacctgagcacagctgtggacagccctggcagccagcccccctaccgcctgagccagctgccccccagcagcagccacatgggcggccccccagctggggtgggcctgccctgggcccagagggcccggctgcagcctgcctctgtggccctgaggaagcaggaggaggaggagatcaagaggagcaaggccctgagtgacagctatgagctgagcacagacctgcaggacaagaaggtggagatgctggagaggaaatatggaggcagcttcctgagcagaagagctgcccggaccatccagacagccttccggcagtacaggatgaacaagaactttgagcggctgcggagcagcgccagcgagagcaggatgagccgccgcatcatcctgagcaacatgaggatgcagttctcctttgaggagtatgagaaggcccagaacccagcctactttgagggcaagccagccagcctggatgaaggagccatggccggggcccggagccaccggctggagcggggcctgccctatggaggcagctgtggcggcggcattgatggcggcggcagctctgtgaccaccagcggggagttcagcaatgacatcacagagctggaggacagcttcagcaagcaggtgaagagcctggccgagagcattgatgaggccctgaactgccaccccagcggccccatgtctgaggagcccggcagcgcccagctggagaagcgggagagcaaggagcagcaggaggacagcagcgccaccagcttcagtgacctgcccctgtacctggatgacacagtgccccagcagagccctgagcggctgcccagcacagagcccccaccccagggccggcctgagttctgggccccagcccccctgccccctgtgcccccacctgtgcccagcggcaccagagaagatggcagccgggaggagggcacccggcggggccctggctgcctggagtgccgggacttccggctgcgggccgcccacctgcccctgctgaccatcgagcccccaagtgacagctctgtggacctgagtgacagaagtgaccggggctctgtgcaccggcagctggtgtatgaagcagatggctgcagcccccacggcaccctgaagcacaagggccccccaggccgggcccccatcccccaccgccactacccagcccctgagggccctgccccagcccctcctggccccctgcccccagcccccaacagcggcaccggccccagcggcgtggccggcggccggcggctgggcaaatgtgaggccgccggggagaacagtgatggaggagacaatgaaagcctggagagcagcagcaacagcaatgagaccatcaactgcagcagcggcagcagcagccgggacagcctgcgggagcccccagccaccggcctgtgcaagcagacctaccagcgggagaccaggcacagctgggacagccctgccttcaacaatgatgtggtgcagaggaggcactaccgcatcggcctgaacctcttcaacaagaagccagagaagggcatccagtacctgattgagcggggcttcctgagtgacacccctgtgggcgtggcccacttcatcctggagaggaagggcctgagccggcagatgattggagagttcctgggcaaccggcagaagcagttcaacagagatgtgctggactgtgtggtggatgagatggacttcagctccatggacctggatgatgccctgaggaagttccagagccacatccgggtgcagggcgaggcccagaaggtggagcggctcatcgaggccttcagccagcgctactgtgtgtgcaacccagccctggtgcggcagttcagaaatccagacaccatcttcatcctggcctttgccatcatcctgctgaacacagacatgtacagccccagcgtgaaggccgagaggaagatgaagctggatgacttcatcaagaacctgcggggcgtggacaatggagaggacatcccccgggacctgctggtgggcatctaccagaggatccagggccgggagctgcggaccaatgatgaccacgtgtcccaggtgcaggccgtggagaggatgattgtgggcaagaagcctgtgctgagcctgccccaccggcggctggtgtgctgctgccagctgtatgaggtgcctgaccccaaccggccccagaggctgggcctgcaccagcgggaggtgttcctgttcaatgacctgctggtggtgaccaagatcttccagaagaagaagatcctggtgacctacagcttccggcagagcttccccctggtggagatgcacatgcagctgttccagaacagctactaccagtttggcatcaagctgctgtctgctgtgcctggaggagagaggaaggtgctgatcatcttcaatgcccccagcctgcaggaccggctgcgcttcaccagtgacctgcgggagagcattgctgaggtgcaggagatggagaagtacagagtggagagcgagctggagaagcagaagggcatgatgaggcccaatgccagccagcccggcggggccaaggacagcgtgaatggcaccatggcccggagcagcctggaggacacctacggggctggagatggcctgaagagaggagccctgagcagcagcctgcgggacctgagtgatgctggggtgtgctactag

SEQ ID NO: 156567 - DNA, 4437 bp, synthetic construct
  misc_feature 1..4437: note = Description of Artificial Sequence: Synthetic coding sequence
  source 1..4437: mol_type = other DNA
atggaggccggcagcggccccccaggcggccctggcagcgagagccccaacagagctgtggagtacctgctggagctgaacaacatcatcgagagccagcagcagctgctggagacccagaggcggcgcatcgaggagctggagggccagctggaccagctgacccaggagaacagagacctgcgggaggagagccagctgcacagaggagagctgcaccgggacccccatggagcccgggacagccctggccgggagagccagtaccagaacctgcgggagacccagttccaccaccgggagctgcgggagagccagttccaccaggccgccagagatgtgggctaccccaaccgggagggcgcctaccagaaccgggaggccgtgtacagagacaaggagagagatgccagctaccccctgcaggacaccaccggctacacagcccgggagagagatgtggcccagtgccacctgcaccacgagaacccagccctgggccgggagcggggcggccgggaggccggccctgcccaccctggccgggagaaggaggccggctacagcgctgctgtgggcgtgggcccccggcccccccgggagcggggccagctgagcagaggagccagccgcagcagcagccctggagctgggggcggccacagcaccagcaccagcaccagccctgccaccaccctgcagagaaatgtggagggagatgcccctggcagtgacctgagcacagctgtggacagccctggcagccagcccccctaccgcctgagccagctgccccccagcagcagccacatgggcggccccccagctggggtgggcctgccctgggcccagagggcccggctgcagcctgcctctgtggccctgaggaagcaggaggaggaggagatcaagaggagcaaggccctgagtgacagctatgagctgagcacagacctgcaggacaagaaggtggagatgctggagaggaaatatggaggcagcttcctgagccggcgggccgcccggaccatccagacagccttccggcagtacaggatgaacaagaactttgagcggctgcggagcagcgccagcgagagcaggatgagccgccgcatcatcctgagcaacatgaggatgcagttctcctttgaggagtatgagaaggcccagaacccagcctactttgagggcaagccagccagcctggatgagggcgccatggccggggcccggagccaccggctggagcggggcctgccctacggcggcagctgtggcggcggcattgatggcggcggcagctctgtgaccaccagcggggagttcagcaatgacatcacagagctggaggacagcttcagcaagcaggtgaagagcctggccgagagcattgatgaggccctgaactgccaccccagcggccccatgtctgaggagcccggcagcgcccagctggagaagcgggagagcaaggagcagcaggaggacagcagcgccaccagcttcagtgacctgcccctgtacctggatgacacagtgccccagcagagccctgagcggctgcccagcacagagcccccaccccagggccggcctgagttctgggccccagcccccctgccccctgtgcccccacctgtgcccagcggcacccgggaggatggcagccgggaggagggcacccggcggggccctggctgcctggagtgccgggacttccggctgcgggccgcccacctgcccctgctgaccatcgagccccccagcgacagctctgtggacctgagtgacagaagtgaccggggctctgtgcaccggcagctggtgtatgaagcagatggctgcagcccccacggcaccctgaagcacaagggccccccaggccgggcccccatcccccaccgccactacccagcccctgagggccctgccccagcccctcctggccccctgcccccagcccccaacagcggcaccggccccagcggcgtggccggcggccgccgcctgggcaaatgtgaggccgctggagaaaattctgatggaggagacaatgaaagcctggagagcagcagcaacagcaatgagaccatcaactgcagcagcggcagcagcagccgggacagcctgcgggagcccccagccaccggcctgtgcaagcagacctaccagcgggagaccaggcacagctgggacagccctgccttcaacaatgatgtggtgcagaggaggcactacagaattggcctgaacctcttcaacaagaagccagagaagggcatccagtacctgattgaaagaggcttcctgagtgacacccctgtgggcgtggcccacttcatcctggagaggaagggcctgagccggcagatgattggagagttcctgggcaaccggcagaagcagttcaacagagatgtgctggactgtgtggtggatgagatggacttcagctccatggacctggatgatgccctgaggaagttccagagccacatccgggtgcagggcgaggcccagaaggtggagcggctgattgaggccttcagccagcgctactgtgtgtgcaacccagccctggtgcggcagttcaggaacccagacaccatcttcatcctggcctttgccatcatcctgctgaacacagacatgtacagccccagcgtgaaggccgagaggaagatgaagctggatgacttcatcaagaacctgcggggcgtggacaacggggaggacatcccccgggacctgctggtgggcatctaccagaggatccagggccgggagctgcggaccaatgatgaccacgtgtcccaggtgcaggccgtggagaggatgattgtgggcaagaagcctgtgctgagcctgccccaccggcggctggtgtgctgctgccagctgtatgaggtgcctgaccccaaccggccccagaggctgggcctgcaccagcgggaggtgttcctgttcaatgacctgctggtggtgaccaagatcttccagaagaagaagatcctggtgacctacagcttccggcagagcttccccctggtggagatgcacatgcagctgttccagaacagctactaccagtttggcatcaagctgctgtctgctgtgcctggaggagagaggaaggtgctgatcatcttcaatgcccccagcctgcaggaccggctgcgcttcaccagtgacctgcgggagagcattgctgaggtgcaggagatggagaagtacagagtggagagcgagctggagaagcagaagggcatgatgaggcccaatgccagccagcctggaggagccaaggacagcgtgaatggcaccatggcccggagcagcctggaggacacctatggagctggagatggcctgaagagaggagccctgagcagcagcctgcgggacctgagtgatgctgggaagagaggaagaagaaacagcgtgggcagcctggacagcaccatcgagggcagcgtcatcagcagcccccggccccaccagaggatgcctcctcctcctcctcctcctcctcctgaggagtacaagagccagaggcctgtgagcaacagcagcagcttcctgggcagcctgtttggcagcaagaggggcaagggccccttccagatgcctcctccacccaccggccaggccagcgccagcagcagcagcgccagcagcacccaccaccaccaccaccaccaccaccacggccacagccatggaggcctgggcgtgctgcctgatggccagagcaagctgcaggccctgcacgcccagtactgccagggccctggccctgcccccccaccctacctgcccccccagcagcccagcctgcccccaccaccccagcagcccccacccctgccccagctgggcagcatccccccacctccagccagcgcccctcctgtgggcccccaccgccacttccacgcccacggccctgtgcccggcccccagcactacaccctgggccggcccggccgggcccccaggagaggagctgggggccacccccagtttgccccccacggccgccaccccctgcaccagcccaccagccccctgcccctgtacagccctgccccccagcaccccccagcccacaagcagggccccaagcacttcatcttcagccaccacccccagatgatgcctgctgctggagctgctgggggccctggcagccggcccccaggcggcagctacagccacccccaccacccccagagccccctgagcccccacagccccatccccccccaccccagctacccacccctgcccccacccagcccccacaccccccacagccccctgccccccaccagcccccacggccccctgcacgccagcggccccccaggcacagccaacccccccagcgccaaccccaaggccaagcccagccgcatcagcacagtggtgtag

SEQ ID NO: 156568 - DNA, 4467 bp, synthetic construct
  misc_feature 1..4467: note = Description of Artificial Sequence: Synthetic coding sequence
  source 1..4467: mol_type = other DNA
atggaggccggcagcggccccccaggcggccctggcagcgagagccccaacagagctgtggagtacctgctggagctgaacaacatcatcgagagccagcagcagctgctggagacccagaggcggcgcatcgaggagctggagggccagctggaccagctgacccaggagaacagagacctgcgggaggagagccagctgcacagaggagagctgcaccgggacccccatggagcccgggacagccctggccgggagagccagtaccagaacctgcgggagacccagttccaccaccgggagctgcgggagagccagttccaccaggccgccagagatgtgggctaccccaaccgggagggcgcctaccagaaccgggaggccgtgtacagagacaaggagagagatgccagctaccccctgcaggacaccaccggctacacagcccgggagagagatgtggcccagtgccacctgcaccacgagaacccagccctgggccgggagcggggcggccgggaggccggccctgcccaccctggccgggagaaggaggccggctacagcgctgctgtgggcgtgggcccccggcccccccgggagcggggccagctgagcagaggagccagccgcagcagcagccctggagctgggggcggccacagcaccagcaccagcaccagccctgccaccaccctgcagaggaagagtgatggagagaacagcaggacagtgtctgtggagggagatgcccctggcagtgacctgagcacagctgtggacagccctggcagccagcccccctaccgcctgagccagctgccccccagcagcagccacatgggcggccccccagctggggtgggcctgccctgggcccagagggcccggctgcagcctgcctctgtggccctgaggaagcaggaggaggaggagatcaagaggagcaaggccctgagtgacagctatgagctgagcacagacctgcaggacaagaaggtggagatgctggagaggaaatatggaggcagcttcctgagccggcgggccgcccggaccatccagacagccttccggcagtacaggatgaacaagaactttgagcggctgcggagcagcgccagcgagagcaggatgagccgccgcatcatcctgagcaacatgaggatgcagttctcctttgaggagtatgagaaggcccagaacccagcctactttgagggcaagccagccagcctggatgagggcgccatggccggggcccggagccaccggctggagcggggcctgccctacggcggcagctgtggcggcggcattgatggcggcggcagctctgtgaccaccagcggggagttcagcaatgacatcacagagctggaggacagcttcagcaagcaggtgaagagcctggccgagagcattgatgaggccctgaactgccaccccagcggccccatgtctgaggagcccggcagcgcccagctggagaagcgggagagcaaggagcagcaggaggacagcagcgccaccagcttcagtgacctgcccctgtacctggatgacacagtgccccagcagagccctgagcggctgcccagcacagagcccccaccccagggccggcctgagttctgggccccagcccccctgccccctgtgcccccacctgtgcccagcggcacccgggaggatggcagccgggaggagggcacccggcggggccctggctgcctggagtgccgggacttccggctgcgggccgcccacctgcccctgctgaccatcgagccccccagcgacagctctgtggacctgagtgacagaagtgaccggggctctgtgcaccggcagctggtgtatgaagcagatggctgcagcccccacggcaccctgaagcacaagggccccccaggccgggcccccatcccccaccgccactacccagcccctgagggccctgccccagcccctcctggccccctgcccccagcccccaacagcggcaccggccccagcggcgtggccggcggccgccgcctgggcaaatgtgaggccgctggagaaaattctgatggaggagacaatgaaagcctggagagcagcagcaacagcaatgagaccatcaactgcagcagcggcagcagcagccgggacagcctgcgggagcccccagccaccggcctgtgcaagcagacctaccagcgggagaccaggcacagctgggacagccctgccttcaacaatgatgtggtgcagaggaggcactacagaattggcctgaacctcttcaacaagaagccagagaagggcatccagtacctgattgaaagaggcttcctgagtgacacccctgtgggcgtggcccacttcatcctggagaggaagggcctgagccggcagatgattggagagttcctgggcaaccggcagaagcagttcaacagagatgtgctggactgtgtggtggatgagatggacttcagctccatggacctggatgatgccctgaggaagttccagagccacatccgggtgcagggcgaggcccagaaggtggagcggctgattgaggccttcagccagcgctactgtgtgtgcaacccagccctggtgcggcagttcaggaacccagacaccatcttcatcctggcctttgccatcatcctgctgaacacagacatgtacagccccagcgtgaaggccgagaggaagatgaagctggatgacttcatcaagaacctgcggggcgtggacaacggggaggacatcccccgggacctgctggtgggcatctaccagaggatccagggccgggagctgcggaccaatgatgaccacgtgtcccaggtgcaggccgtggagaggatgattgtgggcaagaagcctgtgctgagcctgccccaccggcggctggtgtgctgctgccagctgtatgaggtgcctgaccccaaccggccccagaggctgggcctgcaccagcgggaggtgttcctgttcaatgacctgctggtggtgaccaagatcttccagaagaagaagatcctggtgacctacagcttccggcagagcttccccctggtggagatgcacatgcagctgttccagaacagctactaccagtttggcatcaagctgctgtctgctgtgcctggaggagagaggaaggtgctgatcatcttcaatgcccccagcctgcaggaccggctgcgcttcaccagtgacctgcgggagagcattgctgaggtgcaggagatggagaagtacagagtggagagcgagctggagaagcagaagggcatgatgaggcccaatgccagccagcctggaggagccaaggacagcgtgaatggcaccatggcccggagcagcctggaggacacctatggagctggagatggcctgaagagaggagccctgagcagcagcctgcgggacctgagtgatgctgggaagagaggaagaagaaacagcgtgggcagcctggacagcaccatcgagggcagcgtcatcagcagcccccggccccaccagaggatgcctcctcctcctcctcctcctcctcctgaggagtacaagagccagaggcctgtgagcaacagcagcagcttcctgggcagcctgtttggcagcaagaggggcaagggccccttccagatgcctcctccacccaccggccaggccagcgccagcagcagcagcgccagcagcacccaccaccaccaccaccaccaccaccacggccacagccatggaggcctgggcgtgctgcctgatggccagagcaagctgcaggccctgcacgcccagtactgccagggccctggccctgcccccccaccctacctgcccccccagcagcccagcctgcccccaccaccccagcagcccccacccctgccccagctgggcagcatccccccacctccagccagcgcccctcctgtgggcccccaccgccacttccacgcccacggccctgtgcccggcccccagcactacaccctgggccggcccggccgggcccccaggagaggagctgggggccacccccagtttgccccccacggccgccaccccctgcaccagcccaccagccccctgcccctgtacagccctgccccccagcaccccccagcccacaagcagggccccaagcacttcatcttcagccaccacccccagatgatgcctgctgctggagctgctgggggccctggcagccggcccccaggcggcagctacagccacccccaccacccccagagccccctgagcccccacagccccatccccccccaccccagctacccacccctgcccccacccagcccccacaccccccacagccccctgccccccaccagcccccacggccccctgcacgccagcggccccccaggcacagccaacccccccagcgccaaccccaaggccaagcccagccgcatcagcacagtggtgtag

SEQ ID NO: 156569 - DNA, 3549 bp, synthetic construct
  misc_feature 1..3549: note = Description of Artificial Sequence: Synthetic coding sequence
  source 1..3549: mol_type = other DNA
atggagagcctgctggagaaccctgtgcgggctgtgctgtacctgaaggagctgacagccatcgtgcagaaccagcagagcctcatccacacccagcgggagagaattgatgagctggagcggcggctggatgagctgtctgcagaaaatagaagcctgtgggagcaccagcagctgctgcaggcccagcccccacctggcctggtgccccccagcagcgcccccctgcctgctgccccagccacagccccagctgctgctgcccgggcccaggagcccctgcaggaccagggccagaggtctgctgctgccccccacccagccccagaccggcccccccggcagcaccacggccagctgctggagcagccccagaggggccctggcagccgggcccacaccccccagagcccccacaagcacctgggcacccagggcgctgtgacagacaaggagaaggagcggccccccagctgctgtgccgctgctggggccctgctgcagcacaagagccccagcgccctgggcaaaggagtgctgagccggcggccagaaaatgagaccgtgctgcaccagttctgctgcccagctgctgatgcctgcagcgacctggccagccagagtgatggcagctgcacccaggccggcggcggcatggaggacagcgtggtggccgctgctgctgtggccgccggccggcccagcgcccacgcccccaaggcccaggcccaggagctgcaggaggaggaggagaggcctggagctggagctgccagcccccgggccggcccccagcacaaggccagccctggccggcagcagcctgccctggccacagccctgtgcccccacgccccagctgccagtgactatgagctgagcctggacctgaagaacaagcagatcgagatgctggagcacaagtatggaggccacctggtgtcccggcgggccgcctgcaccatccagacagccttccggcagtaccagctgagcaagaactttgagaagatccggaacagcctgctggagagccggctgccccggcgcatcagcctgaggaaggtgcgcagccccacagctgagagcctggccgctgagaaggccctgatggagggctacggcctggtgggcctgcccctggtgcgcagccccagcctgccccccacctttgctggcaccctgacagagctggaggacagcttcacagagcaggtgcagagcctggccaagagcattgatgatgccctgagcacctggagcctgaagaccatgtgcagcctgcgggagagcggggcctaccagctgcaccaggccctgcaggccgccgccggccccccaggcctggaggccgagggccgggcccctgagagcgctggccctggccctggagatgatgctgctgagaccccaggcctgcccccagcccacagcggcaccctgatgatggccttcagagatgtgacagtgcagatcgccaaccagaacatctctgtgagcagcagcacagccctgtctgtggccaactgcctgggcgcccagacagtgcaggccccagctgagcctgctgctgggaaggccgagcagggcgagaccagcggccgggaggcccctgaggccccagctgtgggccgggaggatgccagcgctgaggacagctgtgccgaggccgccgccagcggggctgctgatggagccacagcccccaagacagaggaggaggaggaggaggaggagacagctgaggtgggcagaggagctgaggccgaggccggggacctggagcagctgagcagcagcagcaccagcaccaagagcgccaagagcggcagcgaggccagcgccagcgccagcaaggatgccctgcaggccatgatcctgagcctgccccgctaccactgtgaaaatcctgccagctgcaagagccccaccctgagcacagacaccctgaggaagaggctgtacagaattggcctgaacctcttcaacatcaacccagacaagggcatccagttcctgatcagccggggcttcatcccagacacccccatcggcgtggcccacttcctgctgcagaggaagggcctgagccggcagatgattggagagttcctgggcaacagcaagaagcagttcaacagagatgtgctggactgtgtggtggatgagatggacttcagctccatggagctggatgaggccctgaggaagttccaggcccacatccgggtgcagggcgaggcccagaaggtggagcggctgattgaggccttcagccagcgctactgcatgtgcaaccctgaggtggtgcagcagttccacaacccagacaccatcttcatcctggcctttgccatcatcctgctgaacacagacatgtacagccccaacatcaagccagacaggaagatgatgctggaggacttcatccggaacctgcggggcgtggatgatggagctgacatcccccgggagctggtggtgggcatctatgagcgcatccagcagaaggagctgaagagcaatgaagatcatgtgacctacgtgaccaaggtggagaagagcatcgtgggcatgaagacagtgctgtctgtgccccaccggcggctggtgtgctgcagccggctgtttgaggtgacagatgtgaacaagctgcagaagcaggccgcccaccagcgggaggtgttcctgttcaatgacctgctggtgatcctgaagctgtgccccaagaagaagagcagcagcacctacaccttctgcaagtctgtgggcctgctgggcatgcagttccagctgtttgaaaatgagtactacagccacggcatcaccctggtgacccccctgagcggcagcgagaagaagcaggtgctgcacttctgtgccctgggcagtgatgagatgcagaagtttgtggaggacctgaaggagagcattgctgaggtgacagagctggagcagatcagaattgagtgggagctggagaagcagcagggcaccaagaccctgtccttcaagccctgtggggcccagggcgacccccagagcaagcagggcagccccacagccaagcgggaggccgccctgcgggagaggcctgctgagagcacagtggaggtgtccatccacaaccggctgcagaccagccagcacaacagcggcctgggcgctgagcggggggcccctgtgcccccaccagacctgcagcccagccccccccggcagcagaccccacccctgcccccacctccacccaccccacctggcaccctggtgcagtgccagcagatcgtgaaggtgattgtgctggacaagccctgcctggccaggatggagcccctgctgagccaggccctgagctgctacaccagcagcagcagtgacagctgtggcagcacccccctgggcggccctggcagccctgtgaaggtgacccaccagccccccctgcccccacctcctccaccctacaaccacccccaccagttctgccccccaggcagcctgctgcacggccaccgctacagcagcggcagccgcagcctggtgtag

SEQ ID NO: 156570 - DNA, 2280 bp, synthetic construct
  misc_feature 1..2280: note = Description of Artificial Sequence: Synthetic coding sequence
  source 1..2280: mol_type = other DNA
atgctggagcacaagtatggaggccacctggtgtccagaagagctgcctgcaccatccagacagccttccggcagtaccagctgagcaagaactttgagaagatccggaacagcctgctggagagccggctgccccggcgcatcagcctgaggaaggtgcgcagccccacagctgagagcctggccgctgagaaggccctgatggagggctacggcctggtgggcctgcccctggtgcgcagccccagcctgccccccacctttgctggcaccctgacagagctggaggacagcttcacagagcaggtgcagagcctggccaagagcattgatgatgccctgagcacctggagcctgaagaccatgtgcagcctgcgggagagcggggcctaccagctgcaccaggccctgcaggccgctgctggccccccaggcctggaggccgagggccgggcccctgagagcgctggccctggccctggagatgatgctgctgagaccccaggcctgcccccagcccacagcggcaccctgatgatggccttcagagatgtgacagtgcagatcgccaaccagaacatctctgtgagcagcagcacagccctgtctgtggccaactgcctgggcgcccagacagtgcaggccccagctgagcctgctgctgggaaggccgagcagggcgagaccagcggccgggaggcccctgaggccccagctgtgggcagagaagatgccagcgctgaggacagctgtgccgaggccgccgccagcggggctgctgatggagccacagcccccaagacagaggaggaggaggaggaggaggagacagctgaggtgggccgcggggctgaggccgaggccggggacctggagcagctgagcagcagcagcaccagcaccaagagcgccaagagcggcagcgaggccagcgccagcgccagcaaggatgccctgcaggccatgatcctgagcctgccccgctaccactgtgagaacccagccagctgcaagagccccaccctgagcacagacaccctgaggaagaggctgtaccgcatcggcctgaacctcttcaacatcaacccagacaagggcatccagttcctgatcagccggggcttcatcccagacacccccatcggcgtggcccacttcctgctgcagaggaagggcctgagccggcagatgattggagagttcctgggcaacagcaagaagcagttcaacagagatgtgctggactgtgtggtggatgagatggacttcagctccatggagctggatgaggccctgaggaagttccaggcccacatccgggtgcagggcgaggcccagaaggtggagcggctcatcgaggccttcagccagcgctactgcatgtgcaaccctgaggtggtgcagcagttccacaacccagacaccatcttcatcctggcctttgccatcatcctgctgaacacagacatgtacagccccaacatcaagccagacaggaagatgatgctggaggacttcatccggaacctgcggggcgtggatgatggagctgacatcccccgggagctggtggtgggcatctatgaaagaatccagcagaaggagctgaagagcaatgaagaccacgtgacctacgtgaccaaggtggagaagagcatcgtgggcatgaagacagtgctgtctgtgccccaccggcggctggtgtgctgcagccggctgtttgaggtgacagatgtgaacaagctgcagaagcaggccgcccaccagcgggaggtgttcctgttcaatgacctgctggtgatcctgaagctgtgccccaagaagaagagcagcagcacctacaccttctgcaagtctgtgggcctgctgggcatgcagttccagctgtttgaaaatgagtactacagccacggcatcaccctggtgacccccctgagcggcagcgagaagaagcaggtgctgcacttctgtgccctgggcagtgatgagatgcagaagtttgtggaggacctgaaggagagcattgctgaggtgacagagctggagcagatccgcatcgagtgggagctggagaagcagcagggcaccaagaccctgtccttcaagccctgtggggcccagggcgacccccagagcaagcagggcagccccacagccaagcgggaggccgccctgcgggagaggcctgctgagagcacagtggaggtgctgatcaatgccagccctgcccggctgaccatcctgcccatcagccgggacaccatcaagagctactgctag

SEQ ID NO: 156571 - DNA, 3549 bp, synthetic construct; identical to SEQ ID NO: 156569
  misc_feature 1..3549: note = Description of Artificial Sequence: Synthetic coding sequence
  source 1..3549: mol_type = other DNA

SEQ ID NO: 156572 - DNA, 1797 bp, synthetic construct
  misc_feature 1..1797: note = Description of Artificial Sequence: Synthetic coding sequence
  source 1..1797: mol_type = other DNA
atgaagcccaccggcacagacccccgcatcctgagcattgctgctgaggtggccaagagccctgagcagaatgtgcctgtgatcctgctgaagctgaaggagatcatcaacatcacccccctgggcagcagcgagctgaagaagatcaagcaggacatctactgctatgacctgatccagtactgcctgctggtgctgagccaggactacagccgcatccagggcggctggaccaccatcagccagctgacccagatcctgagccactgctgcgtgggcctggagcccggggaggatgctgaggagttctacaatgagctgctgcccagcgctgctgagaacttcctggtgctgggccggcagctgcagacctgcttcatcaatgctgccaaggccgaggagaaggatgagctgctgcacttcttccagatcgtgacagacagcctcttctggctgctgggcggccacgtggagctgatccagaatgtgctgcagagcgaccacttcctgcacctgctgcaggccgacaacgtgcagatcggcagcgctgtgatgatgatgctgcagaacatcctgcagatcaacagcggggacctgctgcgcatcggcaggaaggccctgtacagcatcctggatgaggtgatcttcaagctgttcagcacccccagccctgtgatccgcagcacagccaccaagctgctgctgctgatggccgagagccaccaggagatcctgatcctgctgcggcagagcacctgctacaagggcctgcggcggctgctgagcaagcaggagaccggcacagagttcagccaggagctgcggcagctggtgggcctgctgagccccatggtgtaccaggaggtggaggagcagaagctgcaccaggccgcctgcctgatccaggcctactggaagggcttccagaccaggaagaggctgaagaagctgcccagcgctgtgattgccctgcagaggagcttccgcagcaagaggagcaagatgctgctggagatcaaccggcagaaggaggaggaggacctgaagctgcagctgcagctgcagaggcagagggccatgaggctgagccgggagctgcagctgtccatgctggagatcgtgcaccctggccaggtggagaagcactaccgggagatggaggagaagagcgccctgatcatccagaagcactggaggggctaccgggagaggaagaacttccaccagcagaggcagagcctgattgagtacaaggctgctgtgaccctgcagagagctgccctgaagttcctggccaagtgcaggaagaagaagaagctgtttgccccctggaggggcctgcaggagctgacagatgcccggcgggtggagctgaagaagagggtggatgattatgtgagaagacacctgggcagccccatgtctgatgtggtgtcccgggagctgcacgcccaggcccaggagcggctgcagcactacttcatgggccgggccctggaggagcgggcccagcagcaccgggaggccctgattgcccagatcagcaccaacgtggagcagctgatgaaggcccccagcctgaaggaggccgagggcaaggagcctgagctgttcctgagccgcagcaggcctgtggccgccaaggccaagcaggcccacctgaccaccctgaagcacatccaggccccctggtggaagaagctgggggaggagagcggagatgaaattgatgtgcccaaggatgagctgagcattgagctggagaacctcttcatcggcggcaccaagcccccatag

SEQ ID NO: 156573 - DNA, 1398 bp, synthetic construct
  misc_feature 1..1398: note = Description of Artificial Sequence: Synthetic coding sequence
  source 1..1398: mol_type = other DNA
atgaagcccaccggcacagacccccgcatcctgagcattgctgctgaggtggccaagagccctgagcagaatgtgcctgtgatcctgctgaagctgaaggagatcatcaacatcacccccctgggcagcagcgagctgaagaagatcaagcaggacatctactgctatgacctgatccagtactgcctgctggtgctgagccaggactacagccgcatccagggcggctggaccaccatcagccagctgacccagatcctgagccactgctgcgtgggcctggagcccggggaggatgctgaggagttctacaatgagctgctgcccagcgctgctgagaacttcctggtgctgggccggcagctgcagacctgcttcatcaatgctgccaaggccgaggagaaggatgagctgctgcacttcttccagatcgtgacagacagcctcttctggctgctgggcggccacgtggagctgatccagaatgtgctgcagagcgaccacttcctgcacctgctgcaggccgacaacgtgcagatcggcagcgctgtgatgatgatgctgcagaacatcctgcagatcaacagaagcaagaggagcaagatgctgctggagatcaaccggcagaaggaggaggaggacctgaagctgcagctgcagctgcagaggcagagggccatgaggctgagccgggagctgcagctgtccatgctggagatcgtgcaccctggccaggtggagaagcactaccgggagatggaggagaagagcgccctgatcatccagaagcactggaggggctaccgggagaggaagaacttccaccagcagaggcagagcctcatcgagtacaaggctgctgtgaccctgcagagagctgccctgaagttcctggccaagtgcaggaagaagaagaagctgtttgccccctggaggggcctgcaggagctgacagatgccaggagagtggagctgaagaagagggtggatgattatgtgcggcggcacctgggcagccccatgtctgatgtggtgtcccgggagctgcacgcccaggcccaggagcggctgcagcactacttcatgggccgggccctggaggagcgggcccagcagcaccgggaggccctgattgcccagatcagcaccaacgtggagcagctgatgaaggcccccagcctgaaggaggccgagggcaaggagcctgagctgttcctgagccgcagcaggcctgtggccgccaaggccaagcaggcccacctgaccaccctgaagcacatccaggccccctggtggaagaagctgggggaggagagcggagatgaaattgatgtgcccaaggatgagctgagcattgagctggagaacctcttcatcggcggcaccaagccaccctag

SEQ ID NO: 156574 - DNA, 264 bp, synthetic construct
  misc_feature 1..264: note = Description of Artificial Sequence: Synthetic coding sequence
  source 1..264: mol_type = other DNA
atgaagcccaccggcacagacccccgcatcctgagcattgctgctgaggtggccaagagccctgagcagaatgtgcctgtgatcctgctgaagctgaaggagatcatcaacatcacccccctgggcagcagcgagctgaagaagatcaagcaggacatctactgctatgacctgatccagtactgcctgctggtgctgagccaggactacagccgcatccagggcggctggaccaccatcagccagctgacccagatcctgtag

SEQ ID NO: 156575 - DNA, 1332 bp, synthetic construct
  misc_feature 1..1332: note = Description of Artificial Sequence: Synthetic coding sequence
  source 1..1332: mol_type = other DNA
atggaggaggacagcctggaggacagcaacctgccccccaaggtgtggcacagcgagatgacagtgtctgtgactggagagccccccagcacagtggaggaggagggcatccccaaggagacagacatcgagatcatccctgagatccctgagaccctggagcccctgagcctgcctgatgtgctgcgcatctctgctgtgctggaggacaccacagaccagctgagcatcctgaactacatcatgcctgtgcagtatgagggccggcagagcatctgtgtgaagagccgggagatgaacctggagggcaccaacctggacaagctgcccatggccagcaccatcaccaagatccccagccccctcatcacagaggagggccccaacctgcctgagatccgccaccggggccgctttgctgtggagttcaacaagatgcaggacctggtgttcaagaagcccacccggcagaccatcatgaccacagagaccctgaagaagatccagattgaccggcagttcttcagtgatgtgattgctgacaccatcaaggagctgcaggacagcgccacctacaacagcctgctgcaggccctgagcaaggagcgggagaacaagatgcacttctatgacatcatcgcccgggaggagaagggcaggaagcagatcatcagcctgcagaagcagctgatcaacgtgaagaaggagtggcagtttgaggtgcagagccagaatgagtacatcgccaacctgaaggaccagctgcaggagatgaaggccaagagcaacctggagaaccgctacatgaagaccaacacagagctgcagatcgcccagacccagaagaagtgcaacagaacagaggagctgctggtggaggagattgagaagctgaggatgaagacagaggaggaggcccggacccacacagaaattgagatgttcctgaggaaggagcagcagaagctggaggagcggctggagttctggatggagaagtatgacaaggacacagagatgaagcagaatgagctgaatgccctgaaggccaccaaggccagtgacctggcccacctgcaggacctggccaagatgatccgggagtatgagcaggtgatcattgaagatcgcatcgagaaggagaggagcaagaagaaggtgaagcaggacctgctggagctgaagagcgtcatcaagctgcaggcctggtggaggggcaccatgatccggcgggagattggaggcttcaagatgcccaaggacaaggtggacagcaaggacagcaagggcaagggcaagggcaaggacaagaggcggggcaagaagaagtag

SEQ ID NO: 156576 - DNA, 165 bp, synthetic construct
  misc_feature 1..165: note = Description of Artificial Sequence: Synthetic coding sequence
  source 1..165: mol_type = other DNA
atggaggaggacagcctggaggacagcaacctgccccccaaggtgtggcacagcgagatgacagtgtctgtgactggagagccccccagcacagtggaggaggagggcatccccaaggagacagacatcgagatcatccctgagatccctgagaccctggagtag

SEQ ID NO: 156577 - DNA, 1332 bp, synthetic construct; identical to SEQ ID NO: 156575
  misc_feature 1..1332: note = Description of Artificial Sequence: Synthetic coding sequence
  source 1..1332: mol_type = other DNA

SEQ ID NO: 156578 - DNA, 4974 bp, synthetic construct
  misc_feature 1..4974: note = Description of Artificial Sequence: Synthetic coding sequence
  source 1..4974: mol_type = other DNA
atgtctgctgctgatgaggtggatggcctgggcgtggcccggccccactacggctctgtgctggacaatgaaaggctgacagctgaggagatggatgagcggcggcggcagaatgtggcctatgagtacctgtgccacctggaggaggccaagcgctggatggaggcctgcctgggggaggacctgccccccaccacagagctggaggagggcctgagaaatggagtgtacctggccaagctgggcaacttcttcagccccaaggtggtgtccctgaagaagatctatgaccgggagcagacccgctacaaggccaccggcctgcacttccgccacacagacaacgtcatccagtggctgaatgccatggatgagatcggcctgcccaagatcttctacccagagaccacagacatctatgacaggaagaacatgccccgctgcatctactgcatccacgccctgagcctgtacctgttcaagctgggcctggccccccagatccaggacctgtatggcaaggtggacttcacagaggaggagatcaacaacatgaagacagagctggagaagtatggcatccagatgcctgccttcagcaagattggaggcatcctggccaatgagctgtctgtggatgaagctgccctgcatgctgctgtgattgccatcaatgaggccatcgaccggcgcatcccagctgacacctttgctgccctgaagaaccccaatgccatgctggtgaacctggaggagcccctggccagcacctaccaggacatcctgtaccaggccaagcaggacaagatgaccaatgccaagaacagaacagagaacagcgagcgggagagagatgtgtatgaggagctgctgacccaggccgagatccagggcaacatcaacaaggtgaacaccttcagcgccctggccaacatcgacctggccctggagcagggagatgccctggccctcttccgggccctgcagagccctgccctgggcctgcggggcctgcagcagcagaacagcgactggtacctgaagcagctgctgagtgacaagcagcagaagaggcagagcggccagacagaccccctgcagaaggaggagctgcagagcggcgtggatgctgccaacagcgctgcccagcagtaccagaggcggctggccgctgtggccctgatcaatgctgccatccagaagggcgtggccgagaagacagtgctggagctgatgaaccctgaggcccagctgccccaggtgtacccctttgctgctgacctgtaccagaaggagctggccaccctgcagaggcagagccctgagcacaacctgacccaccctgagctgtctgtggccgtggagatgctgagctctgtggccctgatcaacagagccctggagagcggagatgtgaacacagtgtggaagcagctgagcagctctgtgacaggcctgaccaacatcgaggaggagaactgccagcgctacctggatgagctgatgaagctgaaggcccaggcccacgcagaaaataatgagttcatcacctggaatgacatccaggcctgtgtggaccacgtgaacctggtggtgcaggaggagcacgagcgcatcctggccatcggcctcatcaatgaggccctggatgaaggagatgcccagaagaccctgcaggccctgcagatcccagctgccaagctggagggcgtgctggccgaggtggcccagcactaccaggacaccctcatccgggccaagcgggagaaggcccaggagatccaggatgagagcgctgtgctgtggctggatgagatccagggcggcatctggcagagcaacaaggacacccaggaggcccagaagtttgccctgggcatctttgccatcaatgaagctgtggagagcggagatgtgggcaagaccctgagcgccctgcggagcccagatgtgggcctgtatggagtcatcccagaatgtggggagacctaccacagcgacctggccgaggccaagaagaagaagctggccgtgggggacaacaacagcaagtgggtgaagcactgggtgaagggcggctactactactaccacaacctggagacccaggagggcggctgggatgagccccccaactttgtgcagaacagcatgcagctgagccgggaggagatccagagcagcatcagcggcgtgacagctgcctacaaccgggagcagctgtggctggccaatgaaggcctcatcacccggctgcaggcccgctgccggggctacctggtgcggcaggagttccgcagcaggatgaacttcctgaagaagcagatcccagccatcacctgcatccagagccagtggaggggctacaagcagaagaaggcctaccaggaccggctggcctacctgcggagccacaaggatgaggtggtgaagatccagagcctggccaggatgcaccaggccaggaagcgctacagagaccggctgcagtacttccgggaccacatcaatgacatcatcaagatccaggccttcatccgggccaacaaggccagagatgactacaagaccctcatcaatgctgaggacccccccatggtggtggtgaggaagtttgtgcacctgctggaccagagcgaccaggacttccaggaggagctggacctgatgaagatgagggaggaggtgatcaccctcatccgcagcaaccagcagctggagaatgacctgaacctgatggacatcaagattggcctgctggtgaagaacaagatcaccctgcaggatgtggtgagccacagcaagaagctgaccaagaagaacaaggagcagctgagtgacatgatgatgatcaacaagcagaagggcggcctgaaggccctgagcaaggagaagcgggagaagctggaggcctaccagcacctgttctacctgctgcagaccaaccccacctacctggccaagctgatcttccagatgccccagaacaagagcaccaagttcatggacagcgtcatcttcaccctgtacaactatgccagcaaccagcgggaggagtacctgctgctgcggctcttcaagacagccctgcaggaggagatcaagagcaaggtggaccagatccaggagatcgtgacaggcaaccccaccgtcatcaagatggtggtgtccttcaacagaggagcccggggccagaatgccctgcggcagatcctggcccctgtggtgaaggagatcatggatgacaagagcctgaacatcaagacagatcctgtggacatctacaagtcctgggtgaaccagatggagagccagacaggagaggccagcaagctgccctatgatgtgaccccagagcaggccctggcccacgaggaggtgaagacccggctggacagcagcatccggaacatgagagctgtgacagacaagttcctgagcgccatcgtgtcctctgtggacaagatcccctacggcatgaggttcatcgccaaggtgctgaaggacagcctgcacgagaagttcccagatgctggggaggatgagctgctgaagatcatcggcaacctgctgtactaccgctacatgaacccagccatcgtggccccagatgcctttgacatcatcgacctgtctgctgggggccagctgaccacagaccagaggaggaacctgggcagcatcgccaagatgctgcagcacgccgccagcaacaagatgttcctgggggacaatgcccacctgagcatcatcaatgagtacctgagccagagctaccagaagttccgccgcttcttccagacagcctgtgatgtgcctgagctgcaggacaagttcaacgtggatgagtacagcgacctggtgaccctgaccaagcctgtgatctacatcagcattggagagatcatcaacacccacaccctgctgctggaccaccaggatgccatcgcccctgagcacaatgaccccatccacgagctgctggatgacctgggggaggtgcccaccatcgagagcctgattggagagagcagcggcaacctgaatgaccccaacaaggaggccctggccaagacagaggtgtccctgaccctgaccaacaagtttgatgtgcctggagatgaaaatgctgagatggatgcccggaccatcctgctgaacaccaagaggctcatcgtggatgtgatccgcttccagcccggggagaccctgacagagatcctggagaccccagccaccagcgagcaggaggccgagcaccagagggccatgcagaggcgggccatcagagatgccaagaccccagacaagatgaagaagagcaagtctgtgaaggaggacagcaacctgaccctgcaggagaagaaggagaagatccagacaggcctgaagaagctgacagagctgggcaccgtggaccccaagaacaagtaccaggagctgatcaatgacatcgcccgggacatccggaaccagaggcgctaccggcagaggaggaaggccgagctggtgaagctgcagcagacctatgctgccctgaacagcaaggccaccttctacggggagcaggtggactactacaagagctacatcaagacctgcctggacaacctggccagcaagggcaaggtgtccaagaagccccgggagatgaagggcaagaagagcaagaagatcagcctgaagtacacagctgcccggctgcacgagaagggcgtgctgctggagattgaggacctgcaggtgaaccagttcaagaatgtcatctttgagatcagccccacagaggaggtgggggactttgaggtgaaggccaagttcatgggcgtgcagatggagaccttcatgctgcactaccaggacctgctgcagctgcagtatgaaggagtggccgtgatgaagctgtttgaccgggccaaggtgaatgtgaacctgctgatcttcctgctgaacaagaagttctacggcaagtag

SEQ ID NO: 156579 - DNA, 4728 bp, synthetic construct
  misc_feature 1..4728: note = Description of Artificial Sequence: Synthetic coding sequence
  source 1..4728: mol_type = other DNA
atgcctcatgaggagctgcccagcctgcagaggcccaggtatggcagcatcgtggatgatgagcggctgtctgctgaggagatggatgaaagaagacggcagaacatcgcctatgagtacctgtgccacctggaggaggccaagcgctggatggaggtgtgcctggtggaggagctgccccccaccacagagctggaggagggcctgagaaatggagtgtacctggccaagctggccaagttctttgcccccaagatggtgtctgagaagaagatctatgatgtggagcagacccgctacaagaagagcggcctgcacttccgccacacagacaacacagtgcagtggctgcgggccatggagagcatcggcctgcccaagatcttctacccagagaccacagatgtgtatgacaggaagaacatccccaggatgatctactgcatccacgccctgagcctgtacctgttcaagctgggcatcgccccccagatccaggacctgctgggcaaggtggacttcacagaggaggagatcagcaacatgaggaaggagctggagaagtatggcatccagatgcccagcttcagcaagattggaggcatcctggccaatgagctgtctgtggatgaggccgccctgcacgccgctgtgattgccatcaatgaggccgtggagaagggcattgctgagcagacagtggtgaccctgaggaaccccaatgctgtgctgaccctggtggatgacaacctggcccctgagtaccagaaggagctgtgggatgccaagaagaagaaggaggagaatgcccggctgaagaacagctgcatcagcgaggaggagagagatgcctatgaggagctgctgacccaggccgagatccagggcaacatcaacaaggtgaaccggcaggccgctgtggaccacatcaatgctgtgattcctgagggggaccctgagaacaccctgctggccctgaagaagccagaggcccagctgcctgctgtgtacccctttgctgctgccatgtaccagaatgagctgttcaacctgcagaagcagaacaccatgaactacctggcccacgaggagctgctgattgctgtggagatgctgtctgctgtggccctgctgaaccaggccctggagagcaatgacctggtgtctgtgcagaaccagctgcggagccctgccatcggcctgaacaacctggacaaggcctacgtggagagatatgccaacaccctgctgtctgtgaagctggaggtgctgagccagggccaggacaacctgtcctggaatgagatccagaactgcatcgacatggtgaatgcccagatccaggaggagaatgacagagtggtggccgtgggctacatcaatgaggccattgatgagggcaaccccctgcggaccctggagaccctgctgctgcccacagccaacatcagtgatgtggaccctgcccacgcccagcactaccaggatgtgctgtaccacgccaagagccagaagctgggggacagcgagagcgtgtccaaggtgctgtggctggatgagatccagcaggccgtggatgatgccaacgtggacaaggaccgggccaagcagtgggtgaccctggtggtggatgtgaaccagtgcctggagggcaagaagagcagtgacatcctgtctgtgctgaagagcagcaccagcaatgccaatgacatcatcccagaatgtgccgacaagtactatgatgccctggtgaaggccaaggagctgaagtctgagcgggtgtccagtgatggctcctggctgaagctgaacctgcacaagaagtatgactactactacaacacagacagcaaggagagctcctgggtgaccccagagagctgcctgtacaaggagagctggctgaccgggaaggagattgaggacatcatcgaggaggtgacagtgggctacatccgggagaacatctggagcgccagcgaggagctgctgctgcgcttccaggccaccagcagcggccccatcctgcgggaggagtttgaggccaggaagagcttcctgcacgagcaggaggagaatgtggtgaagatccaggccttctggaagggctacaagcagaggaaggagtacatgcaccggcggcagaccttcatcgacaacacagacagcatcgtgaagatccagagctggttcaggatggccacagccaggaagagctacctgagccggctgcagtacttccgggaccacaacaatgagatcgtgaagatccagagcctgctgcgggccaacaaggccagagatgactacaagaccctggtgggctctgaaaatccacccctgaccgtcatcaggaagtttgtgtacctgctggaccagagcgacctggacttccaggaggagctggaggtggcccggctgcgggaggaggtggtgaccaagatccgggccaaccagcagctggagaaggacctgaacctgatggacatcaagattggcctgctggtgaagaaccgcatcaccctggaggatgtgatcagccacagcaagaagctgaacaagaagaagggcggggagatggagatcctgaacaacacagacaaccagggcatcaagagcctgagcaaggagaggaggaagaccctggagacctaccagcagctgttctacctgctgcagaccaaccccctgtacctggccaagctgatcttccagatgccccagaacaagagcaccaagttcatggacaccgtcatcttcaccctgtacaactatgccagcaaccagcgggaggagtacctgctgctgaagctgttcaagacagccctggaggaggagatcaagagcaaggtggaccaggtgcaggacatcgtgactggaaaccccaccgtcatcaagatggtggtgtccttcaacagaggagcccggggccagaacaccctgcggcagctgctggcccctgtggtgaaggagatcattgatgacaagagcctcatcatcaacaccaaccctgtggaggtgtacaaggcctgggtgaaccagctggagacccagacaggagaggccagcaagctgccctatgatgtgaccacagagcaggccctgacctacccagaggtgaagaacaagctggaggccagcattgagaacctgcggcgggtgacagacaaggtgctgaacagcatcatcagcagcctggacctgctgccctacggcctgcgctacatcgccaaggtgctgaagaacagcatccacgagaagttcccagatgccacagaagatgagctgctgaagatcgtgggcaacctgctgtactaccgctacatgaacccagccatcgtggccccagatggctttgacatcatcgacatgacagctgggggccagatcaacagcgaccagaggaggaacctgggctctgtggccaaggtgctgcagcacgccgccagcaacaagctgtttgaaggagaaaatgagcacctgagctccatgaacaactacctgtctgagacctaccaggagttcaggaagtacttcaaggaggcctgcaatgtgcctgagcctgaggagaagttcaacatggacaagtacacagacctggtgacagtgtccaagcctgtgatctacatcagcattgaggagatcatcagcacccacagcctgctgctggagcaccaggatgccatcgcccctgagaagaatgacctgctgtctgagctgctgggcagcctgggggaggtgcccaccgtggagagcttcctgggggagggcgctgtggaccccaatgaccccaacaaggccaacaccctgagccagctgagcaagacagagatcagcctggtgctgaccagcaaatatgacattgaagatggagaggccatcgacagccgcagcctgatgatcaagaccaagaagctgatcattgatgtgatccggaaccagcccggcaacaccctgacagagatcctggagaccccagccacagcccagcaggaggtggaccacgccacagacatggtgtcccgggccatgattgacagcaggaccccagaggagatgaagcacagccagagcatgattgaagatgcccagctgcccctggagcagaagaagaggaagatccagaggaacctgcggaccctggagcagacaggccacgtgtcctctgagaacaagtaccaggacatcctgaatgagatcgccaaggacatccggaaccagaggatctacaggaagctgaggaaggccgagctggccaagctgcagcagaccctgaatgccctgaacaagaaggccgccttctatgaggagcagatcaactactatgacacctacatcaagacctgcctggacaacctgaagaggaagaacaccaggaggagcatcaagctggatggaaaaggagagcccaagggggccaagagggccaagcctgtgaagtacacagctgccaagctgcacgagaagggcgtgctgctggacattgatgacctgcagaccaaccagttcaagaatgtgacctttgacatcatcgccacagaagatgtgggcatctttgatgtgcgcagcaagttcctgggcgtggagatggagaaggtgcagctgaacatccaggacctgctgcagatgcagtatgaaggagtggccgtgatgaagatgtttgacaaggtgaaggtgaatgtgaacctgctgatctacctgctgaacaagaagttctacggcaagtag

SEQ ID NO: 156580 - DNA, 3234 bp, synthetic construct
  misc_feature 1..3234: note = Description of Artificial Sequence: Synthetic coding sequence
  source 1..3234: mol_type = other DNA
atggtgaatgcccagatccaggaggagaatgacagagtggtggccgtgggctacatcaatgaggccattgatgagggcaaccccctgcggaccctggagaccctgctgctgcccacagccaacatcagtgatgtggaccctgcccacgcccagcactaccaggatgtgctgtaccacgccaagagccagaagctgggggacagcgagagcgtgtccaaggtgctgtggctggatgagatccagcaggccgtggatgatgccaacgtggacaaggaccgggccaagcagtgggtgaccctggtggtggatgtgaaccagtgcctggagggcaagaagagcagtgacatcctgtctgtgctgaagagcagcaccagcaatgccaatgacatcatcccagaatgtgccgacaagtactatgatgccctggtgaaggccaaggagctgaagtctgagcgggtgtccagtgatggctcctggctgaagctgaacctgcacaagaagtatgactactactacaacacagacagcaaggagagctcctgggtgaccccagagagctgcctgtacaaggagagctggctgaccgggaaggagattgaggccttctggaagggctacaagcagaggaaggagtacatgcaccggcggcagaccttcatcgacaacacagacagcatcgtgaagatccagagctggttcaggatggccacagccaggaagagctacctgagccggctgcagtacttccgggaccacaacaatgagatcgtgaagatccagagcctgctgcgggccaacaaggccagagatgactacaagaccctggtgggctctgaaaatccacccctgaccgtcatcaggaagtttgtgtacctgctggaccagagcgacctggacttccaggaggagctggaggtggcccggctgcgggaggaggtggtgaccaagatccgggccaaccagcagctggagaaggacctgaacctgatggacatcaagattggcctgctggtgaagaaccgcatcaccctggaggatgtgatcagccacagcaagaagctgaacaagaagaagggcggggagatggagatcctgaacaacacagacaaccagggcatcaagagcctgagcaaggagaggaggaagaccctggagacctaccagcagctgttctacctgctgcagaccaaccccctgtacctggccaagctgatcttccagatgccccagaacaagagcaccaagttcatggacaccgtcatcttcaccctgtacaactatgccagcaaccagcgggaggagtacctgctgctgaagctgttcaagacagccctggaggaggagatcaagagcaaggtggaccaggtgcaggacatcgtgactggaaaccccaccgtcatcaagatggtggtgtccttcaacagaggagcccggggccagaacaccctgcggcagctgctggcccctgtggtgaaggagatcattgatgacaagagcctcatcatcaacaccaaccctgtggaggtgtacaaggcctgggtgaaccagctggagacccagacaggagaggccagcaagctgccctatgatgtgaccacagagcaggccctgacctacccagaggtgaagaacaagctggaggccagcattgagaacctgcggcgggtgacagacaaggtgctgaacagcatcatcagcagcctggacctgctgccctacggcctgcgctacatcgccaaggtgctgaagaacagcatccacgagaagttcccagatgccacagaagatgagctgctgaagatcgtgggcaacctgctgtactaccgctacatgaacccagccatcgtggccccagatggctttgacatcatcgacatgacagctgggggccagatcaacagcgaccagaggaggaacctgggctctgtggccaaggtgctgcagcacgccgccagcaacaagctgtttgaaggagaaaatgagcacctgagctccatgaacaactacctgtctgagacctaccaggagttcaggaagtacttcaaggaggcctgcaatgtgcctgagcctgaggagaagttcaacatggacaagtacacagacctggtgacagtgtccaagcctgtgatctacatcagcattgaggagatcatcagcacccacagcctgctgctggagcaccaggatgccatcgcccctgagaagaatgacctgctgtctgagctgctgggcagcctgggggaggtgcccaccgtggagagcttcctgggggagggcgctgtggaccccaatgaccccaacaaggccaacaccctgagccagctgagcaagacagagatcagcctggtgctgaccagcaaatatgacattgaagatggagaggccatcgacagccgcagcctgatgatcaagaccaagaagctgatcattgatgtgatccggaaccagcccggcaacaccctgacagagatcctggagaccccagccacagcccagcaggaggtggaccacgccacagacatggtgtcccgggccatgattgacagcaggaccccagaggagatgaagcacagccagagcatgattgaagatgcccagctgcccctggagcagaagaagaggaagatccagaggaacctgcggaccctggagcagacaggccacgtgtcctctgagaacaagtaccaggacatcctgaatgagatcgccaaggacatccggaaccagaggatctacaggaagctgaggaaggccgagctggccaagctgcagcagaccctgaatgccctgaacaagaaggccgccttctatgaggagcagatcaactactatgacacctacatcaagacctgcctggacaacctgaagaggaagaacaccaggaggagcatcaagctggatggaaaaggagagcccaagggggccaagagggccaagcctgtgaagtacacagctgccaagctgcacgagaagggcgtgctgctggacattgatgacctgcagaccaaccagttcaagaatgtgacctttgacatcatcgccacagaagatgtgggcatctttgatgtgcgcagcaagttcctgggcgtggagatggagaaggtgcagctgaacatccaggacctgctgcagatgcagtatgaaggagtggccgtgatgaagatgtttgacaaggtgaaggtgaatgtgaacctgctgatctacctgctgaacaagaagttctacggcaagtag

SEQ ID NO: 156581 - DNA, 3216 bp, synthetic construct
  misc_feature 1..3216: note = Description of Artificial Sequence: Synthetic coding sequence
  source 1..3216: mol_type = other DNA
atgcacagcctgcccggggtggtggccgtgggctacatcaatgaggccattgatgagggcaaccccctgcggaccctggagaccctgctgctgcccacagccaacatcagtgatgtggaccctgcccacgcccagcactaccaggatgtgctgtaccacgccaagagccagaagctgggggacagcgagagcgtgtccaaggtgctgtggctggatgagatccagcaggccgtggatgatgccaacgtggacaaggaccgggccaagcagtgggtgaccctggtggtggatgtgaaccagtgcctggagggcaagaagagcagtgacatcctgtctgtgctgaagagcagcaccagcaatgccaatgacatcatcccagaatgtgccgacaagtactatgatgccctggtgaaggccaaggagctgaagtctgagcgggtgtccagtgatggctcctggctgaagctgaacctgcacaagaagtatgactactactacaacacagacagcaaggagagctcctgggtgaccccagagagctgcctgtacaaggagagctggctgaccgggaaggagattgaggccttctggaagggctacaagcagaggaaggagtacatgcaccggcggcagaccttcatcgacaacacagacagcatcgtgaagatccagagctggttcaggatggccacagccaggaagagctacctgagccggctgcagtacttccgggaccacaacaatgagatcgtgaagatccagagcctgctgcgggccaacaaggccagagatgactacaagaccctggtgggctctgaaaatccacccctgaccgtcatcaggaagtttgtgtacctgctggaccagagcgacctggacttccaggaggagctggaggtggcccggctgcgggaggaggtggtgaccaagatccgggccaaccagcagctggagaaggacctgaacctgatggacatcaagattggcctgctggtgaagaaccgcatcaccctggaggatgtgatcagccacagcaagaagctgaacaagaagaagggcggggagatggagatcctgaacaacacagacaaccagggcatcaagagcctgagcaaggagaggaggaagaccctggagacctaccagcagctgttctacctgctgcagaccaaccccctgtacctggccaagctgatcttccagatgccccagaacaagagcaccaagttcatggacaccgtcatcttcaccctgtacaactatgccagcaaccagcgggaggagtacctgctgctgaagctgttcaagacagccctggaggaggagatcaagagcaaggtggaccaggtgcaggacatcgtgactggaaaccccaccgtcatcaagatggtggtgtccttcaacagaggagcccggggccagaacaccctgcggcagctgctggcccctgtggtgaaggagatcattgatgacaagagcctcatcatcaacaccaaccctgtggaggtgtacaaggcctgggtgaaccagctggagacccagacaggagaggccagcaagctgccctatgatgtgaccacagagcaggccctgacctacccagaggtgaagaacaagctggaggccagcattgagaacctgcggcgggtgacagacaaggtgctgaacagcatcatcagcagcctggacctgctgccctacggcctgcgctacatcgccaaggtgctgaagaacagcatccacgagaagttcccagatgccacagaagatgagctgctgaagatcgtgggcaacctgctgtactaccgctacatgaacccagccatcgtggccccagatggctttgacatcatcgacatgacagctgggggccagatcaacagcgaccagaggaggaacctgggctctgtggccaaggtgctgcagcacgccgccagcaacaagctgtttgaaggagaaaatgagcacctgagctccatgaacaactacctgtctgagacctaccaggagttcaggaagtacttcaaggaggcctgcaatgtgcctgagcctgaggagaagttcaacatggacaagtacacagacctggtgacagtgtccaagcctgtgatctacatcagcattgaggagatcatcagcacccacagcctgctgctggagcaccaggatgccatcgcccctgagaagaatgacctgctgtctgagctgctgggcagcctgggggaggtgcccaccgtggagagcttcctgggggagggcgctgtggaccccaatgaccccaacaaggccaacaccctgagccagctgagcaagacagagatcagcctggtgctgaccagcaaatatgacattgaagatggagaggccatcgacagccgcagcctgatgatcaagaccaagaagctgatcattgatgtgatccggaaccagcccggcaacaccctgacagagatcctggagaccccagccacagcccagcaggaggtggaccacgccacagacatggtgtcccgggccatgattgacagcaggaccccagaggagatgaagcacagccagagcatgattgaagatgcccagctgcccctggagcagaagaagaggaagatccagaggaacctgcggaccctggagcagacaggccacgtgtcctctgagaacaagtaccaggacatcctgaatgagatcgccaaggacatccggaaccagaggatctacaggaagctgaggaaggccgagctggccaagctgcagcagaccctgaatgccctgaacaagaaggccgccttctatgaggagcagatcaactactatgacacctacatcaagacctgcctggacaacctgaagaggaagaacaccaggaggagcatcaagctggatggaaaaggagagcccaagggggccaagagggccaagcctgtgaagtacacagctgccaagctgcacgagaagggcgtgctgctggacattgatgacctgcagaccaaccagttcaagaatgtgacctttgacatcatcgccacagaagatgtgggcatctttgatgtgcgcagcaagttcctgggcgtggagatggagaaggtgcagctgaacatccaggacctgctgcagatgcagtatgaaggagtggccgtgatgaagatgtttgacaaggtgaaggtgaatgtgaacctgctgatctacctgctgaacaagaagttctacggcaagtag

SEQ ID NO: 156582 - DNA, 1134 bp, synthetic construct
  misc_feature 1..1134: note = Description of Artificial Sequence: Synthetic coding sequence
  source 1..1134: mol_type = other DNA
atgggctgcttcaagggcgtggtggccgtgggctacatcaatgaggccattgatgagggcaaccccctgcggaccctggagaccctgctgctgcccacagccaacatcagtgatgtggaccctgcccacgcccagcactaccaggatgtgctgtaccacgccaagagccagaagctgggggacagcgagagcgtgtccaaggtgctgtggctggatgagatccagcaggccgtggatgatgccaacgtggacaaggaccgggccaagcagtgggtgaccctggtggtggatgtgaaccagtgcctggagggcaagaagagcagtgacatcctgtctgtgctgaagagcagcaccagcaatgccaatgacatcatcccagaatgtgccgacaagtactatgatgccctggtgaaggccaaggagctgaagtctgagcgggtgtccagtgatggctcctggctgaagctgaacctgcacaagaagtatgactactactacaacacagacagcaaggagagctcctgggtgaccccagagagctgcctgtacaaggagagctggctgaccgggaaggagattgaggacatcatcgaggaggtgacagtgggctacatccgggagaacatctggagcgccagcgaggagctgctgctgcgcttccaggccaccagcagcggccccatcctgcgggaggagtttgaggccaggaagagcttcctgcacgagcaggaggagaatgtggtgaagatccaggccttctggaagggctacaagcagaggaaggagtacatgcaccggcggcagaccttcatcgacaacacagacagcatcgtgaagatccagagctggttcaggatggccacagccaggaagagctacctgagccggctgcagtacttccgggaccacaacaatgaaattgtgaagatccagagcctgctgcgggccaacaaggccagagatgactacaagaccctggtgggcagcgagaacccccccctgaccgtcatcaggaagtttgtgtacctgctggaccagagcgacctggacttccaggaggagctggaggtggcccggctgcgggaggaggtggtgaccaagatccgggccaaccagcagctggagaagacctag

SEQ ID NO: 156583 - DNA, 3084 bp, synthetic construct
  misc_feature 1..3084: note = Description of Artificial Sequence: Synthetic coding sequence
  source 1..3084: mol_type = other DNA
atggcccagaacacagagaaccacgaccctgtgggcagcatcctgatccagatccacgaggacctgtaccagctgaaggagaagctgaccaagttcagccctgaggagaagggggagaccctggacatccagagcctggagacagccatcaagaggacagaggtgggcctgcgcatccacatcgagaagtacctgaatgtggtgaaccagaatgtgctgaccacctctgtgaatgatgagagcctgtacaccccccaggccagcaagtggctgctgcccaccgtcatcgaccagaagagcttcatcttcccccaggagagcgagggcaccttctggcagccccagaggcagcacagcagcagcctgcctgtgttcccccgggccaagatcaaggtgtccaagctgatcaagggcagcaacatcagcagcctgactgtgctgcccagcagccactgcacagacccctacttcacccccatccctgtgctgcaggctgatgcccacaagggcatcctgtccatgattgagcggggcctcatccccccaacagcccgcatcaccttccagaacccccccatcacccccagggctgcccccctgcacagctttgatgaggccaggaagatccccaccgtggccaccttcaccatcccccgggagcccccacccagccctgctgaggtgaagttcttccccaagaagcagaggagcaagggcaagagccgccgcagccggggccaccacgacaggaaggccatgaaggtgaagacccccctgcgggccctgaagagcctgtgggactatgacttcctgatctatgatggagtgattgacaacacagccccagacttcctggccttcaaggagcacttcagcctggcctggggcggcatcttcagcctgctggagcacgtggagaagttcctgaggaactatgccatccctgaggtgaagatcaagggcaacaacctggtggccctgctgcctgagtttgagctgaccaacaagctgaccaggtatgacctgctgtctgtgctggaggaccctgcccacgtgcagatgctgatcaacctgcccggccagcgctacaagggccaggacggcaacagcgaggccgccatgaagatccaggccacctggaagtgctacaaggccaggaagttcttcctgttctaccggcagcagaagtgggccagcggggtcatcgccatcgcctggctgctgtactgccacaagacccggctgaagaagatcctgaaggagagccggcagaggcacctggagaacttccgcatccgggccaagcacctggccgccaactggaaccgcatccgcaccagcaggaggaccatcatccacatccccagcctgggctacagccagcctgtgcgggagcacatcgctgacttcaacacccagcagaacatgcagctgggccgcctgtgtgacatcctggatgccaacgtgaatgtcatctacatctgcagccaccacatgaatgatgagctggtgctgtactacaagaagatcctgagcctgcatgctgctgtgaagagcggcaacctggaggacagaagtgacctgcaggaccgcttcaagatcatcaccccagaggccgtgaacatcttccccaagcaccacatgtgcctggccacccacctgatgtacagccccaaggccatcaagaggatcaagaacctgatccggggcacagaggcctacatcgtgtctggcctgctgcacagagatgacctggccgtggccgacatgctggacatccccatcctgggcagcgagcctgagctggcccacctgtacagcaccaagagcggcggcaagagggtgtttgacagcgccaacgtggccgtgcccccaggcatctatgacatctacagccagcagcagatgattgagcagctgagccagctgatcacagaccacctgcagatccagcgctggctgttcaagatggattctgagttcagaggaaatggaacagccttctgtgacatccccagctacctgaagtgctacaagtgggtgctgaaggagagcagccgctatggcctggaggactggaggaagaagtgggcccaggagcccgccctggtgaagatcagcgaggagctggccggcatcctggcccagcacgcccagcctgtgaatgagaagcgcttccccacctggaggaagttcctgcagaccttcctgagccagggcggcgtgattgaggccttccccccagctgacaacgtgaccaacctgactgtggacatgctgattgagcccaacgggaagatctctgtgctgagcactggagaccagctgcacgccgagagccccttcatcagcagcggcaccaccgtgccccagacctctgtggacccccaggtgctgacctacctgtgcctgcagatcggcaaggcctgcaggatgagagatgtggtgggctacttcagcattgacctggtgaccttcatcgaccccagcaccctggagcagcaggtgtgggccaccggcctgaacctggcctacagcgaccagctggccctgacccagctgaccctgtacctgaccaacggccacctggactgcagcctgagcaccctggaggtgcccaggtttgtgcccaaggagaggaagaagaccaagtgcatgtctgccctgtccatgcccatgctggccaccagccgctatgctgtgatgaccacccagctgcggcacagcaacctgagcctggtgttccactacgtgttcctgcagatctgccgggcccacggcatcggctatgatgtggaggagcggcagggcaccgtcttcatcctgtatgagcacctgaagaggcacaagctgggcatgctgaccatcggggaggacctgcagggcgtgctgatgacctttgcccggcacctgttcatcatccaccaggagatcagcgcccccaacatgcagggcgagaccaacttcaagaccaccatcgctgacatcgagaccatcctgcgggtgaccaaggagaacaagatgagatttgaggaggagcagcagagcaaggatgacaagaacctgagcaagcccaagaagtag

SEQ ID NO: 156584 - DNA, 2091 bp, synthetic construct
  misc_feature 1..2091: note = Description of Artificial Sequence: Synthetic coding sequence
  source 1..2091: mol_type = other DNA
atgattgaaagaggcctcatccccccaacagcccgcatcaccttccagaacccccccatcaccccccgggccgcccccctgcacagctttgatgaggccaggaagatccccaccgtggccaccttcaccatcccccgggagcccccacccagccctgctgaggtgaagttcttccccaagaagcagaggagcaagggcaagagcagaagaagccggggccaccacgacaggaaggccatgaaggtgaagacccccctgcgggccctgaagagcctgtgggactatgacttcctgatctatgatggagtcatcgacaacacagccccagacttcctggccttcaaggagcacttcagcctggcctggggcggcatcttcagcctgctggagcacgtggagaagttcctgagaaattatgccatccctgaggtgaagatcaagggcaacaacctggtggccctgctgcctgagtttgagctgaccaacaagctgaccaggtatgacctgctgtctgtgctggaggaccctgcccacgtgcagatgctgatcaacctgcccggccagcgctacaagggccaggacggcaacagcgaggccgccatgaagatccaggccacctggaagtgctacaaggccaggaagttcttcctgttctaccggcagcagaagtgggccagcggcgtgattgccatcgcctggctgctgtactgccacaagacccggctgaagaagatcctgaaggagagccggcagaggcacctggagaacttccgcatccgggccaagcacctggccgccaactggaaccgcatccgcaccagcaggaggaccatcatccacatccccagcctgggctacagccagcctgtgcgggagcacatcgctgacttcaacacccagcagaacatgcagctgggccgcctgtgtgacatcctggatgccaacgtgaatgtcatctacatctgcagccaccacatgaatgatgagctggtgctgtactacaagaagatcctgagcctgcacgccgctgtgaagagcggcaacctggaggacagaagtgacctgcaggaccgcttcaagatcatcaccccagaggccgtgaacatcttccccatgattgagcagctgagccagctgatcacagaccacctgcagatccagcgctggctgttcaagatggattctgagttcagaggaaatggaacagccttctgtgacatccccagctacctgaagtgctacaagtgggtgctgaaggagagcagccgctatggcctggaggactggaggaagaagtgggcccaggagcccgccctggtgaagatcagcgaggagctggccggcatcctggcccagcacgcccagcctgtgaatgagaagcgcttccccacctggaggaagttcctgcagaccttcctgagccagggcggcgtgattgaggccttccccccagctgacaacgtgaccaacctgactgtggacatgctgattgagcccaacgggaagatctctgtgctgagcactggagaccagctgcacgccgagagccccttcatcagcagcggcaccaccgtgccccagacctctgtggacccccaggtgctgacctacctgtgcctgcagatcggcaaggcctgcaggatgagagatgtggtgggctacttcagcattgacctggtgaccttcatcgaccccagcaccctggagcagcaggtgtgggccaccggcctgaacctggcctacagcgaccagctggccctgacccagctgaccctgtacctgaccaacggccacctggactgcagcctgagcaccctggaggtgcccaggtttgtgcccaaggagaggaagaagaccaagtgcatgtctgccctgtccatgcccatgctggccaccagccgctatgctgtgatgaccacccagctgcggcacagcaacctgagcctggtgttccactacgtgttcctgcagatctgccgggcccacggcatcggctatgatgtggagaacaacagaagaggcagccctgggggcccccatgacctgtgcagccccagcctgcaccaccccagcaggaacatcagcacctag

SEQ ID NO: 156585 - DNA, 1866 bp, synthetic construct
  misc_feature 1..1866: note = Description of Artificial Sequence: Synthetic coding sequence
  source 1..1866: mol_type = other DNA
atgaccaaggccatgaaggtgaagacccccctgcgggccctgaagagcctgtgggactatgacttcctgatctatgatggagtgattgacaacacagccccagacttcctggccttcaaggagcacttcagcctggcctggggcggcatcttcagcctgctggagcacgtggagaagttcctgaggaactatgccatccctgaggtgaagatcaagggcaacaacctggtggccctgctgcctgagtttgagctgaccaacaagctgaccaggtatgacctgctgtctgtgctggaggaccctgcccacgtgcagatgctgatcaacctgcccggccagcgctacaagggccaggacggcaacagcgaggccgccatgaagatccaggccacctggaagtgctacaaggccaggaagttcttcctgttctaccggcagcagaagtgggccagcggggtcatcgccatcgcctggctgctgtactgccacaagacccggctgaagaagatcctgaaggagagccggcagaggcacctggagaacttccgcatccgggccaagcacctggccgccaactggaaccgcatccgcaccagcaggaggaccatcatccacatccccagcctgggctacagccagcctgtgcgggagcacatcgctgacttcaacacccagcagaacatgcagctgggccgcctgtgtgacatcctggatgccaacgtgaatgtcatctacatctgcagccaccacatgaatgatgagctggtgctgtactacaagaagatcctgagcctgcatgctgctgtgaagagcggcaacctggaggacagaagtgacctgcaggaccgcttcaagatcatcaccccagaggccgtgaacatcttccccatgattgagcagctgagccagctgatcacagaccacctgcagatccagcgctggctgttcaagatggacagcgagttcagaggaaatggaacagccttctgtgacatccccagctacctgaagtgctacaagtgggtgctgaaggagagcagccgctatggcctggaggactggaggaagaagtgggcccaggagcccgccctggtgaagatcagcgaggagctggccggcatcctggcccagcacgcccagcctgtgaatgagaagcgcttccccacctggaggaagttcctgcagaccttcctgagccagggcggcgtcatcgaggccttccccccagctgacaacgtgaccaacctgactgtggacatgctgattgagcccaacgggaagatctctgtgctgagcactggagaccagctgcatgctgagagccccttcatcagcagcggcaccaccgtgccccagacctctgtggacccccaggtgctgacctacctgtgcctgcagatcggcaaggcctgcaggatgagagatgtggtgggctacttcagcattgacctggtgaccttcatcgaccccagcaccctggagcagcaggtgtgggccaccggcctgaacctggcctacagcgaccagctggccctgacccagctgaccctgtacctgaccaacggccacctggactgcagcctgagcaccctggaggtgcccaggtttgtgcccaaggagaggaagaagaccaagtgcatgtctgccctgtccatgcccatgctggccaccagccgctatgctgtgatgaccacccagctgcggcacagcaacctgagcctggtgttccactacgtgttcctgcagatctgccgggcccatggaattggctatgatgtggagaacaacagaagaggcagccctgggggcccccatgacctgtgcagccccagcctgcaccaccccagcaggaacatcagcacctag

SEQ ID NO: 156586 - DNA, 2055 bp, synthetic construct
  misc_feature 1..2055: note = Description of Artificial Sequence: Synthetic coding sequence
  source 1..2055: mol_type = other DNA
atgaaggtgaagacccccctgcgggccctgaagagcctgtgggactatgacttcctgatctatgatggagtgattgacaacacagccccagacttcctggccttcaaggagcacttcagcctggcctggggcggcatcttcagcctgctggagcacgtggagaagttcctgaggaactatgccatccctgaggtgaagatcaagggcaacaacctggtggccctgctgcctgagtttgagctgaccaacaagctgaccaggtatgacctgctgtctgtgctggaggaccctgcccacgtgcagatgctgatcaacctgcccggccagcgctacaagggccaggacggcaacagcgaggccgccatgaagatccaggccacctggaagtgctacaaggccaggaagttcttcctgttctaccggcagcagaagtgggccagcggggtcatcgccatcgcctggctgctgtactgccacaagacccggctgaagaagatcctgaaggagagccggcagaggcacctggagaacttccgcatccgggccaagcacctggccgccaactggaaccgcatccgcaccagcaggaggaccatcatccacatccccagcctgggctacagccagcctgtgcgggagcacatcgctgacttcaacacccagcagaacatgcagctgggccgcctgtgtgacatcctggatgccaacgtgaatgtcatctacatctgcagccaccacatgaatgatgagctggtgctgtactacaagaagatcctgagcctgcatgctgctgtgaagagcggcaacctggaggacagaagtgacctgcaggaccgcttcaagatcatcaccccagaggccgtgaacatcttccccatgattgagcagctgagccagctgatcacagaccacctgcagatccagcgctggctgttcaagatggacagcgagttcagaggaaatggaacagccttctgtgacatccccagctacctgaagtgctacaagtgggtgctgaaggagagcagccgctatggcctggaggactggaggaagaagtgggcccaggagcccgccctggtgaagatcagcgaggagctggccggcatcctggcccagcacgcccagcctgtgaatgagaagcgcttccccacctggaggaagttcctgcagaccttcctgagccagggcggcgtcatcgaggccttccccccagctgacaacgtgaccaacctgactgtggacatgctgattgagcccaacgggaagatctctgtgctgagcactggagaccagctgcatgctgagagccccttcatcagcagcggcaccaccgtgccccagacctctgtggacccccaggtgctgacctacctgtgcctgcagatcggcaaggcctgcaggatgagagatgtggtgggctacttcagcattgacctggtgaccttcatcgaccccagcaccctggagcagcaggtgtgggccaccggcctgaacctggcctacagcgaccagctggccctgacccagctgaccctgtacctgaccaacggccacctggactgcagcctgagcaccctggaggtgcccaggtttgtgcccaaggagaggaagaagaccaagtgcatgtctgccctgtccatgcccatgctggccaccagccgctatgctgtgatgaccacccagctgcggcacagcaacctgagcctggtgttccactacgtgttcctgcagatctgccgggcccatggaattggctatgatgtggaggagcggcagggcaccgtcttcatcctgtatgagcacctgaagaggcacaagctgggcatgctgaccatcggggaggacctgcagggcgtgctgatgacctttgcccggcacctgttcatcatccaccaggagatcagcgcccccaacatgcagggcgagaccaacttcaagaccaccatcgctgacatcgagaccatcctgcgggtgaccaaggagaacaagatgagatttgaggaggagcagcagagcaaggatgacaagaacctgagcaagcccaagaagtag

SEQ ID NO: 156587 - DNA, 507 bp, synthetic construct
  misc_feature 1..507: note = Description of Artificial Sequence: Synthetic coding sequence
  source 1..507: mol_type = other DNA
atggcccagaacacagagaaccacgaccctgtgggcagcatcctgatccagatccacgaggacctgtaccagctgaaggagaagctgaccaagttcagccctgaggagaagggggagaccctggacatccagagcctggagacagccatcaagaggacagaggtgggcctgcgcatccacatcgagaagtacctgaatgtggtgaaccagaatgtgctgaccacctctgtgaatgatgagagcctgtacaccccccaggccagcaagtggctgctgcccaccgtcatcgaccagaagagcttcatcttcccccaggagagcgagggcaccttctggcagccccagaggcagcacagcagcagcctgcctgtgttcccccgggccaagaggaagattggcctgaatgtgaagatcctgcaggaccctgagaacatccaccacagagctgctgtgaatgccaactacggcatcagcctgccctacatcaaccagaggaaggcctgctag

SEQ ID NO: 156588 - DNA, 339 bp, synthetic construct
  misc_feature 1..339: note = Description of Artificial Sequence: Synthetic coding sequence
  source 1..339: mol_type = other DNA
atgaggctggaggagctgaagaggctgcagaaccccctggagcaggtgaatgatggcaagtacagctttgagaaccaccagctggccatggatgctgagaacaacatcgagaagtaccccctgaacctgcagcccctggagagcaaggtgaagatcatccagagggcctggagggagtacctgcagaggcaggagcccctgggcaagaggagccccagcccccccagcgtgtcctctgagaagctgagcagctctgtgtccatgaacaccttcagtgacagcagcacccctgtgtctgtgatgttcctgttcctgtgcccagacctgaccttcaactag

SEQ ID NO: 156589 - DNA, 480 bp, synthetic construct
  misc_feature 1..480: note = Description of Artificial Sequence: Synthetic coding sequence
  source 1..480: mol_type = other DNA
atgaggctggaggagctgaagaggctgcagaaccccctggagcaggtgaatgatggcaagtacagctttgagaaccaccagctggccatggatgctgagaacaacatcgagaagtaccccctgaacctgcagcccctggagagcaaggtgaagatcatccagagggcctggagggagtacctgcagaggcaggagcccctgggcaagaggagccccagcccccccagcgtgtcctctgagaagctgagcagctctgtgtccatgaacaccttcagtgacagcagcaccccatttgcccgggcccctgtgggcaagatccacccctacatctcctggaggctgcagagccctggggacaagctgcccggcggcaggaaggtgatcctgctgtacctggaccagctggcccggcccaccggcttcatccacaccctgaaggagccccagatcgagcggctgggcttcctgaccctgcagtag

SEQ ID NO: 156590 - DNA, 399 bp, synthetic construct
  misc_feature 1..399: note = Description of Artificial Sequence: Synthetic coding sequence
  source 1..399: mol_type = other DNA
atgaggctggaggagctgaagaggctgcagaaccccctggagcaggtgaatgatggcaagtacagctttgagaacatccagagggcctggagggagtacctgcagaggcaggagcccctgggcaagaggagccccagccccccatctgtgagcagcgagaagctgagcagctctgtgtccatgaacaccttcagtgacagcagcaccccatttgcccgggcccctgtgggcaagatccacccctacatctcctggaggctgcagagccctggggacaagctgcccggcggcaggaaggtgatcctgctgtacctggaccagctggcccggcccaccggcttcatccacaccctgaaggagccccagatcgagcggctgggcttcctgaccctgcagtag

SEQ ID NO: 156591 - DNA, 2892 bp, synthetic construct
  misc_feature 1..2892: note = Description of Artificial Sequence: Synthetic coding sequence
  source 1..2892: mol_type = other DNA
atggatgcccccaaggccggctacgcctttgagtacctgattgagaccctgaatgacagcagccacaagaagttctttgatgtgtccaagctgggcaccaagtatgatgtgctgccctacagcatccgggtgctgctggaggccgctgtgaggaactgtgatggcttcctgatgaagaaggaggatgtgatgaacatcctggactggaagaccaagcagagcaatgtggaggtgcccttcttccctgcccgggtgctgctgcaggacttcaccggcatcccagccatggtggactttgctgccatgagggaggccgtgaagaccctgggcggggaccctgagaaggtgcacccagcctgccccacagacctgactgtggaccacagcctgcagattgacttcagcaaatgtgccatccagaatgcccccaaccctgggggcggggacctgcagaaggccggcaagctgagccctgtgaaggtgcagcccaagaagctgccctgccggggccagaccacctgccggggcagctgtgacagcggggagctgggcagaaattctggcaccttcagcagccagatcgagaacacccccatcctgtgccccttccacctgcagcctgtgcctgagcctgagaccgtgctgaagaaccaggaggtggagtttggaagaaaccgggagcggctgcagttcttcaagtggagcagcagggtcttcaagaatgtggccgtcatccccccaggcaccggcatggcccaccagatcaacctggagtacctgagccgggtggtgtttgaggagaaggacctgctcttcccagattctgtggtgggcacagacagccacatcaccatggtgaatggcctgggcatcctgggctggggcgtgggcggcattgaaacagaagctgtgatgctgggcctgcctgtgtccctgaccctgcctgaggtggtgggctgtgagctgaccggcagcagcaacccctttgtgaccagcattgatgtggtgctgggcatcaccaagcacctgcggcaggtgggcgtggccggcaagtttgtggagttcttcggcagcggcgtgtcccagctgagcatcgtggacaggaccaccatcgccaacatgtgcccagaatatggagccatcctgtccttcttccctgtggacaacgtgaccctgaagcacctggagcacacaggcttcagcaaggccaagctggagagcatggagacctacctgaaggctgtgaagctgttcagaaatgaccagaacagcagtggagagcctgagtacagccaggtgatccagatcaacctgaacagcatcgtgcccagcgtgtctggccccaagaggccccaggacagagtggccgtgacagacatgaagagtgacttccaggcctgcctgaatgagaaggtgggcttcaagggcttccagattgctgctgagaagcagaaggacatcgtgtccatccactatgagggcagcgagtacaagctgagccacggctctgtggtgattgctgctgtgatcagctgcaccaacaactgcaaccccagcgtgatgctggccgccggcctgctggccaagaaggctgtggaggccggcctgcgggtgaagccctacatccgcaccagcctgagccctggcagcggcatggtgacccactacctgagcagcagcggcgtgctgccctacctgagcaagctgggctttgaaattgtgggctacggctgcagcatctgtgtgggcaacacagcccccctgagtgatgctgtgctgaatgctgtgaagcagggcgacctggtgacctgtggcatcctgagcggcaacaagaactttgagggccgcctgtgtgactgtgtgcgggccaactacctggccagcccccccctggtggtggcctatgccatcgccggcaccgtgaacatcgacttccagacagagcccctgggcacagaccccaccgggaagaacatctacctgcatgacatctggcccagccgggaggaggtgcaccgggtggaggaggagcacgtgatcctgtccatgttcaaggccctgaaggacaagattgagatgggcaacaagcgctggaacagcctggaggccccagacagcgtgctcttcccctgggacctgaagagcacctacatccgctgccccagcttctttgacaagctgaccaaggagcccatcgccctgcaggccattgaaaatgcccacgtgctgctgtacctgggggacagcgtgaccacagaccacatcagccctgctggcagcatcgccagaaattctgctgctgccaagtacctgaccaacagaggcctgaccccccgggagttcaacagctatggagccaggagaggaaatgatgctgtgatgacccggggcacctttgccaacatcaagctgttcaacaagttcatcggcaagccagcccccaagaccatccacttccccagcggccagaccctggatgtgtttgaggccgctgagctgtaccagaaggagggcatccccctcatcatcctggccggcaagaagtatggcagcggcaacagccgggactgggccgccaagggcccctacctgctgggcgtgaaggctgtgctggccgagagctatgagaagatccacaaggaccacctgattggcatcggcatcgcccccctgcagttcctgcctggagaaaatgctgacagcctgggcctgagcggccgggagaccttcagcctgaccttccctgaggagctgagccctggcatcaccctgaacatccagaccagcacaggcaaggtgttttctgtgattgccagctttgaagatgatgtggagatcaccctgtacaagcatggaggcctgctgaactttgtggccaggaagttctcctag

SEQ ID NO: 156592 - DNA, 96 bp, synthetic construct
  misc_feature 1..96: note = Description of Artificial Sequence: Synthetic coding sequence
  source 1..96: mol_type = other DNA
atggactatgtggaggacaagctgagcagcgagtttgtgttcaacaaccccaacatcaagggcacctgtggctgtggggagagcttcaacatctag

SEQ ID NO: 156593 - DNA, 261 bp, synthetic construct
  misc_feature 1..261: note = Description of Artificial Sequence: Synthetic coding sequence
  source 1..261: mol_type = other DNA
atgtctgccagcctggtgcgggccaccgtgcgggctgtgtccaagaggaagctgcagcccaccagggctgccctgaccctgacccccagcgctgtgaacaagatcaagcagctgctgaaggacaagccagagcacgtgggcgtgaaggtgggcgtgaggacccggggctgcaatggcctgagctacaccctggagtacaccaagaccaagggggacagtgatgaggaggtgatccaggacggctggagcgctgtggtgtag

SEQ ID NO: 156594 - DNA, 390 bp, synthetic construct
  misc_feature 1..390: note = Description of Artificial Sequence: Synthetic coding sequence
  source 1..390: mol_type = other DNA
atgtctgccagcctggtgcgggccaccgtgcgggctgtgtccaagaggaagctgcagcccaccagggctgccctgaccctgacccccagcgctgtgaacaagatcaagcagctgctgaaggacaagccagagcacgtgggcgtgaaggtgggcgtgaggacccggggctgcaatggcctgagctacaccctggagtacaccaagaccaagggggacagtgatgaggaggtgatccaggatggagtgcgggtcttcatcgagaagaaggcccagctgaccctgctgggcacagagatggactatgtggaggacaagctgagcagcgagtttgtgttcaacaaccccaacatcaagggcacctgtggctgtggggagagcttcaacatctag

SEQ ID NO: 156595 - DNA, 531 bp, synthetic construct
  misc_feature 1..531: note = Description of Artificial Sequence: Synthetic coding sequence
  source 1..531: mol_type = other DNA
atggtggccgccggcggcggggccaggacagagggcgctgtgagaagaagcctgtggaggcagtgtgcccggcgggtgcatggagagaagctgcggcggcccaccttcggccccaggcacagaggagctggaacagccaagatgtctgccagcctggtgcgggccaccgtgcgggctgtgtccaagaggaagctgcagcccacccgggccgccctgaccctgaccccatctgctgtgaacaagatcaagcagctgctgaaggacaagccagagcacgtgggcgtgaaggtgggcgtgaggacccggggctgcaatggcctgagctacaccctggagtacaccaagaccaagggggacagtgatgaggaggtgatccaggatggagtgcgggtcttcatcgagaagaaggcccagctgaccctgctgggcacagagatggactatgtggaggacaagctgagcagcgagtttgtgttcaacaaccccaacatcaagggcacctgtggctgtggggagagcttcaacatctag

SEQ ID NO: 156596 - DNA, 504 bp, synthetic construct
  misc_feature 1..504: note = Description of Artificial Sequence: Synthetic coding sequence
  source 1..504: mol_type = other DNA
atggctgctgctggggccttccggctgcggcgggccgccagcgccctgctgctgcggagcccccggctgcctgcccgggagctgagcgccccagcccggctgtaccacaagaaggtggtggaccactatgagaaccccagaaatgtgggcagcctggacaagaccagcaagaatgtgggcaccggcctggtgggcgccccagcctgtggagatgtgatgaagctgcagatccaggtggatgagaagggcaagatcgtggatgcccgcttcaagaccttcggctgcggcagcgccatcgccagcagcagcctggccacagagtgggtgaagggcaagacagtggaggaggccctgaccatcaagaacacagacatcgccaaggagctgtgcctgccccctgtgaagctgcactgcagcatgctggctgaagatgccatcaaggccgccctggccgactacaagctgaagcaggagcccaagaagggggaggccgagaagaagtag

SEQ ID NO: 156597 - DNA, 390 bp, synthetic construct
  misc_feature 1..390: note = Description of Artificial Sequence: Synthetic coding sequence
  source 1..390: mol_type = other DNA
atggtgctgattgacatgtctgtggacctgagcacccaggtggtggaccactatgagaaccccagaaatgtgggcagcctggacaagaccagcaagaatgtgggcaccggcctggtgggcgccccagcctgtggagatgtgatgaagctgcagatccaggtggatgagaagggcaagatcgtggatgcccgcttcaagaccttcggctgcggcagcgccatcgccagcagcagcctggccacagagtgggtgaagggcaagacagtggaggaggccctgaccatcaagaacacagacatcgccaaggagctgtgcctgccccctgtgaagctgcactgcagcaagtctgtgctcttccctgctgaggagaagacccagctgagcccctag

SEQ ID NO: 156598 - DNA, 429 bp, synthetic construct
  misc_feature 1..429: note = Description of Artificial Sequence: Synthetic coding sequence
  source 1..429: mol_type = other DNA
atggtgctgattgacatgtctgtggacctgagcacccaggtggtggaccactatgagaaccccagaaatgtgggcagcctggacaagaccagcaagaatgtgggcaccggcctggtgggcgccccagcctgtggagatgtgatgaagctgcagatccaggtggatgagaagggcaagatcgtggatgcccgcttcaagaccttcggctgcggcagcgccatcgccagcagcagcctggccacagagtgggtgaagggcaagacagtggaggaggccctgaccatcaagaacacagacatcgccaaggagctgtgcctgccccctgtgaagctgcactgcagcatgctggccgaggatgccatcaaggccgccctggccgactacaagctgaagcaggagcccaagaagggggaggccgagaagaagtag

SEQ ID NO: 156599 - DNA, 1443 bp, synthetic construct
  misc_feature 1..1443: note = Description of Artificial Sequence: Synthetic coding sequence
  source 1..1443: mol_type = other DNA
atgtccttcccccagctgggctacccccagtacctgtctgctgctggccctggggcctacggcggggagaggcctggggtgctggccgctgctgctgctgctgctgctgctgccagcagcggccggcctggagctgctgagctgggcggcggggccggggctgctgctgtgacctctgtgctgggcatgtatgctgctgctggcccctatgctggggcccccaactacagcgccttcctgccctatgctgctgacctgagcctcttcagccagatgggcagccagtatgagctgaaggacaaccctggggtgcacccagccacctttgctgcccacacagccccagcctactacccctacggccagttccagtatggagaccccggccggcccaagaatgccacccgggagagcaccagcaccctgaaggcctggctgaatgagcacaggaagaacccctaccccaccaagggggagaagatcatgctggccatcatcaccaagatgaccctgacccaggtgtccacctggtttgccaatgcccggcggcggctgaagaaggagaacaaggtgacctggggcgcccggagcaaggaccaggaggatggagccctgtttggaagtgacacagaaggagaccctgagaaggccgaggatgatgaggagattgacctggagagcattgacatcgacaagattgatgaacatgatggagaccagagcaatgaagatgatgaggacaaggccgaggcccctcatgccccagctgcccccagcgccctggcccgggaccagggcagccccctggccgctgctgatgtgctgaagccccaggacagccccctgggcctggccaaggaggcccctgagcccggcagcacccggctgctgagccctggagctgctgctgggggcctgcagggcgcccctcatggcaagcccaagatctggagcctggccgagacagccaccagcccagatggagcccccaaggccagccccccacctcctgctggccaccctggggcccacggccccagcgctggggcccccctgcagcacccagccttcctgcccagccacggcctgtacacctgccacatcggcaagttcagcaactggaccaacagcgccttcctggcccagggcagcctgctgaacatgaggagcttcctgggcgtgggcgcccctcatgctgccccccacggcccccacctgcctgcccctcctccaccccagccccctgtggccatcgcccctggggccctgaatggagacaaggcctctgtgcgcagcagccccaccctgcctgagcgggacctggtgcccaggccagacagccctgcccagcagctgaagagccccttccagcctgtgcgggacaacagcctggccccccaggagggcaccccccgcatcctggccgccctgcccagcgcctag

SEQ ID NO: 156600 - DNA, 1416 bp, synthetic construct
  misc_feature 1..1416: note = Description of Artificial Sequence: Synthetic coding sequence
  source 1..1416: mol_type = other DNA
atgagctacccccagggctacctgtaccaggcccctggcagcctggccctgtacagctgcccagcctatggagccagcgccctggccgcccccaggtctgaggagctggcccggagcgccagcggcagcgccttcagcccctacccaggcagcgctgccttcaccgcccaggccgccaccggcttcggcagccccctgcagtacagcgcagatgctgctgctgctgctgctggcttccccagctacatgggcgccccctatgatgcccacaccaccggcatgactggagccatctcctaccacccctacggcagcgctgcctacccctaccagctgaatgaccctgcctacaggaagaatgccaccagagatgccacagccaccctgaaggcctggctgaatgagcacaggaagaacccctaccccaccaagggggagaagatcatgctggccatcatcaccaagatgaccctgacccaggtgtccacctggtttgccaatgcccggcggcggctgaagaaggagaacaagatgacctgggcccccaggaacaagtcagaagatgaagatgaagatgaaggagatgccaccaggagcaaggatgagagcccagacaaggcccaggagggcacagagaccagcgcagaagatgagggcatcagcctgcacgtggacagcctgacagaccacagctgcagcgctgagagtgatggagagaagctgccctgcagagctggggaccccctgtgtgagagcggcagcgagtgcaaggacaagtatgatgacctggaggatgatgaagatgatgatgaggagggggagcggggcctggccccacccaagcctgtgaccagcagccccctgaccggcctggaggcccccctgctgagccccccacctgaggccgccccccggggcggcaggaagaccccccagggcagcaggaccagccctggggcccctcctccagccagcaagcccaagctgtggagcctggccgagatcgccaccagtgacctgaagcagcccagcctgggccctggctgcggccccccaggcctgcctgctgctgctgccccagccagcactggagcccctcctgggggcagcccctacccagccagccccctgctgggccggcccctgtactacaccagccccttctacggcaactacaccaactacggcaacctgaatgctgccctgcagggccagggcctgctgcgctacaacagcgctgctgctgcccctggagaggccctgcacacagcccccaaggccgccagtgatgctgggaaggccggggcccaccccctggagagccactaccgcagccctgggggcggctatgagcccaagaaggatgccagcgagggctgcaccgtggtgggcggcggcgtgcagccctacctgtag

SEQ ID NO: 156601 - DNA, 1416 bp, synthetic construct; identical to SEQ ID NO: 156600
  misc_feature 1..1416: note = Description of Artificial Sequence: Synthetic coding sequence
  source 1..1416: mol_type = other DNA

SEQ ID NO: 156602 - DNA, 1506 bp, synthetic construct
  misc_feature 1..1506: note = Description of Artificial Sequence: Synthetic coding sequence
  source 1..1506: mol_type = other DNA
atgtccttcccccagctgggctaccagtacatccggcccctgtaccccagcgagaggcctggagctgctgggggcagcggcggcagcgctggggcccggggcggcctgggcgctggggccagcgagctgaatgccagcggcagcctgagcaatgtgctgagctctgtgtatggagccccctatgctgctgctgctgctgctgctgctgcccagggctatggagccttcctgccctatgctgctgagctgcccatcttcccccagctgggcgcccagtatgagctgaaggacagccctggggtgcagcaccctgctgctgctgctgccttcccccacccccacccagccttctacccctacggccagtaccagtttggagaccccagccggcccaagaatgccacccgggagagcaccagcaccctgaaggcctggctgaatgagcacaggaagaacccctaccccaccaagggggagaagatcatgctggccatcatcaccaagatgaccctgacccaggtgtccacctggtttgccaatgcccggcggcggctgaagaaggagaacaagatgacctgggcccccaggagcaggacagatgaggagggcaatgcctacggcagcgagcgggaggaggaggatgaggaggaggatgaggaggatggcaagcgggagctggagctggaggaggaggagctgggcggggaggaggaggacaccggcggggagggcctggctgatgatgatgaagatgaggagattgacctggagaacctggatggagctgccacagagcctgagctgagcctggccggggccgccaggagagatggagacctgggcctgggccccatcagtgacagcaagaacagcgacagcgaggacagcagcgagggcctggaggaccggcccctgcctgtgctgagcctggccccagcccctcctcctgtggccgtggccagccccagcctgcccagcccccctgtgtccctggacccctgtgccccagccccagccccagccagcgccctgcagaagcccaagatctggagcctggccgagacagccaccagcccagacaaccccaggaggagccccccaggagctgggggcagccccccaggagctgctgtggcccccagcgccctgcagctgagccctgctgctgctgctgctgctgcccaccggctggtgtctgcccccctgggcaagtttcctgcctggaccaaccggcccttccctggccccccacctggcccccggctgcaccccctgagcctgctgggcagcgccccaccccacctgctgggcctgcctggagctgctggccaccctgctgctgctgctgcctttgcccggcctgctgagcctgagggcggcacagaccgctgcagcgccctggaggtggagaagaagctgctgaagacagccttccagcctgtgccccggcggccccagaaccacctggatgctgccctggtgctgagcgccctgagcagcagctag

SEQ ID NO: 156603 - DNA, 741 bp, synthetic construct
  misc_feature 1..741: note = Description of Artificial Sequence: Synthetic coding sequence
  source 1..741: mol_type = other DNA
atgctgtggaggcagctgatctactggcagctgctggccctcttcttcctgcccttctgcctgtgccaggatgagtacatggagagcccccagacaggaggcctgcccccagactgcagcaagtgctgccacggggactacagcttccggggctaccagggccccccaggccccccaggccccccaggcatccctggcaaccacggcaacaatggaaacaacggggccactggacatgaaggagccaagggggagaagggggacaagggggacctgggccccagaggagagcggggccagcacggccccaagggggagaagggctacccaggcatccccccagagctgcagatcgccttcatggccagcctggccacccacttcagcaaccagaacagcggcatcatcttcagctctgtggagaccaacatcggcaacttctttgatgtgatgacaggccgctttggagcccctgtgtctggagtgtacttcttcaccttctccatgatgaagcatgaagatgtggaggaggtgtatgtgtacctgatgcacaatggaaacacagtgttctccatgtacagctatgagatgaagggcaagagtgacaccagcagcaaccacgctgtgctgaagctggccaagggagatgaggtgtggctgaggatgggaaatggagccctgcacggggaccaccagcgcttcagcacctttgctggcttcctgctgtttgagaccaagtag

SEQ ID NO: 156604 - DNA, 1560 bp, synthetic construct
  misc_feature 1..1560: note = Description of Artificial Sequence: Synthetic coding sequence
  source 1..1560: mol_type = other DNA
atgagctacccccagtttggctacccctacagcagcgccccccagttcctgatggccaccaacagcctgagcacctgctgtgagagcggcggccgcaccctggccgacagcggccctgctgccagcgcccaggcccctgtgtactgccctgtgtatgagagccggctgctggccacagcccggcatgagctgaacagcgctgctgccctgggcgtgtatggaggcccctatggaggcagccagggctacggcaactacgtgacctacggcagcgaggccagcgccttctacagcctgaacagctttgacagcaaggatggcagcggcagcgcccacggcggcctggccccagctgctgctgcctactacccctatgagcccgccctgggccagtacccctatgacagatatggcaccatggacagcggcaccaggaggaagaatgccacccgggagaccaccagcaccctgaaggcctggctgcaggagcacaggaagaacccctaccccaccaagggggagaagatcatgctggccatcatcaccaagatgaccctgacccaggtgtccacctggtttgccaatgcccggcggcggctgaagaaggagaacaagatgacctggcccccaagaaataaatgtgctgatgagaagaggccctatgcagagggggaggaggaggagggcggggaggaggaggcccgggaggagcccctgaagagcagcaagaatgctgagcctgtgggcaaggaggagaaggagctggagctgagtgacctggatgactttgaccccctggaggccgagcccccagcctgtgagctgaagccacccttccacagcctggatggcggcctggagcgggtgcctgctgccccagatggccctgtgaaggaggccagcggggccctgaggatgagcctggccgccggcggcggggccgccctggatgaggacctggagcgggcccggagctgcctgcggtctgctgctgctggccctgagcccctgcccggggctgagggcggcccccaggtgtgtgaggccaagctgggctttgtgcctgctggggccagcgctggcctggaggccaagccccgcatctggagcctggcccacacagccacagctgctgctgctgctgccaccagcctgagccagacagagttccccagctgcatgctgaagaggcagggccctgctgccccagctgctgtgagcagcgccccagccaccagccccagcgtggccctgccccacagcggggccctggacagacaccaggacagccctgtgaccagcctgaggaactgggtggatggagtcttccatgaccccatcctgcggcacagcaccctgaaccaggcctgggccacagccaagggggccctgctggaccccggccccctgggccgcagcctgggcgctggggccaacgtgctgacagcccccctggcccgggccttccccccagctgtgccccaggatgccccagctgctggggccgcccgggagctgctggccctgcccaaggccggcggcaagcccttctgtgcctag

SEQ ID NO: 156605 - DNA, 1560 bp, synthetic construct; identical to SEQ ID NO: 156604
  misc_feature 1..1560: note = Description of Artificial Sequence: Synthetic coding sequence
  source 1..1560: mol_type = other DNA

SEQ ID NO: 156606 - DNA, 1452 bp, synthetic construct
  misc_feature 1..1452: note = Description of Artificial Sequence: Synthetic coding sequence
  source 1..1452: mol_type = other DNA
atgagctacccccagggctacctgtaccagcccagcgccagcctggccctgtacagctgcccagcctacagcaccagcgtcatcagcggccccaggacagatgagctgggccgcagcagcagcggcagcgccttcagcccctatgccggcagcacagccttcaccgcccccagccctggctacaacagccacctgcagtatggagctgaccctgctgctgctgctgctgctgccttcagcagctatgtgggcagcccctatgaccacaccccaggcatggccggcagcctgggctaccacccctatgctgcccccctgggcagctacccctatggagaccctgcctacaggaagaatgccaccagagatgccacagccaccctgaaggcctggctgaatgagcacaggaagaacccctaccccaccaagggggagaagatcatgctggccatcatcaccaagatgaccctgacccaggtgtccacctggtttgccaatgcccggcggcggctgaagaaggagaacaagatgacctggacccccaggaacagaagtgaagatgaggaggaggaggagaacatcgacctggagaagaatgatgaagatgagccccagaagccagaggacaagggggaccctgagggccctgaggccggcggcgctgagcagaaggccgccagcggctgtgagcggctgcagggcccccccaccccagctgggaaggagacagagggcagcctgagtgacagcgacttcaaggagcccccatctgagggccgcctggatgccctgcagggcccccccaggactggaggccccagccctgctggccctgctgctgcccggctggctgaagatcctgccccccactacccagctggggccccagcccctggcccccaccctgctgctggggaggtgcccccaggccctgggggccccagcgtcatccacagccccccacctcctcctcctcctgctgtgctggccaagcccaagctgtggagcctggccgagatcgccaccagcagtgacaaggtgaaggatggcggcggcggcaatgaaggcagcccctgccccccctgccccggccccatcgccggccaggccctgggcggcagccgggccagccctgccccagcccccagccgcagccccagcgcccagtgccccttccctgggggcaccgtgctgagccggcccctgtactacacagcccccttctacccaggctacaccaactacggcagctttggccacctgcacggccaccctggccctggccctggccccaccactggacctggcagccacttcaacggcctgaaccagacagtgctgaacagagcagatgccctggccaaggaccccaagatgctgcggagccagagccagctggacctgtgcaaggacagcccctatgagctgaagaagggcatgtctgacatctag

SEQ ID NO: 156607 - DNA, 441 bp, synthetic construct
  misc_feature 1..441: note = Description of Artificial Sequence: Synthetic coding sequence
  source 1..441: mol_type = other DNA
atgagctacccccagggctacctgtaccagcccagcgccagcctggccctgtacagctgcccagcctacagcaccagcgtcatcagcggccccaggacagatgagctgggccgcagcagcagcggcagcgccttcagcccctatgccggcagcacagccttcaccgcccccagccctggctacaacagccacctgcagtatggagctgaccctgctgctgctgctgctgctgccttcagcagctatgtgctgctgaagaaggagaagaagagcctggacttcccctgcttcccccccctgcggcccacctgtgtgcgcagccctgctgagcggggcgtggcctctgtggcccaggccagcatctgcatggagggccgggctgctgtggcccggagcgcccacggcggcagcccctatgcccaccgggtgcccggcccctag

SEQ ID NO: 156608 - DNA, 498 bp, synthetic construct
  misc_feature 1..498: note = Description of Artificial Sequence: Synthetic coding sequence
  source 1..498: mol_type = other DNA
atgggctgggacctgactgtgaagatgctggccggaaatgagttccaggtgtccctgagcagctccatgtctgtgtctgagctgaaggcccagatcacccagaagattggagtgcacgccttccagcagaggctggccgtgcaccccagcggcgtggccctgcaggacagagtgcccctggccagccagggcctgggccctggcagcacagtgctgctggtggtggacaagtgtgatgagcccctgagcatcctggtgaggaacaacaagggccgcagcagcacctatgaggtgcggctgacccagacagtggcccacctgaagcagcaggtgtctggcctggagggcgtgcaggatgacctcttctggctgacctttgagggcaagcccctggaggaccagctgcccctgggggagtatggcctgaagcccctgagcacagtgttcatgaacctgcggctgcggggcggcggcacagagcccggcggccgctcctag

SEQ ID NO: 156609 - DNA, 3129 bp, synthetic construct
  misc_feature 1..3129: note = Description of Artificial Sequence: Synthetic coding sequence
  source 1..3129: mol_type = other DNA
atggctgatgcctttggagatgagctgttctctgtgtttgaaggagacagcaccacagctgctggcaccaagaaggacaaggagaaggacaagggcaagtggaagggccccccaggcagcgctgacaaggccggcaagagatttgatggcaagctgcagagcgagagcaccaacaacgggaagaacaagagagatgtggactttgagggcacagatgagcccatctttgggaagaagccccgcatcgaggagagcatcacagaggacctgagcctggccgacctgatgccccgggtgaaggtgcagagcgtggagaccgtggagggctgcacccatgaggtggccctgcctgctgaggaggactacctgcccctgaagccccgggtgggcaaggccgccaaggagtaccccttcatcctggatgccttccagcgggaggccatccagtgtgtggacaacaaccagagcgtgctggtgtctgcccacaccagcgctgggaagacagtgtgtgccgagtatgccatcgccctggccctgcgggagaagcagagggtcatcttcaccagccccatcaaggccctgagcaaccagaagtaccgggagatgtatgaggagttccaggatgtgggcctgatgactggagatgtgaccatcaaccccacagccagctgcctggtgatgaccacagagatcctgcgctccatgctgtaccggggcagcgaggtgatgagggaggtggcctgggtgatctttgatgagatccactacatgagggacagcgagcggggcgtggtgtgggaggagaccatcatcctgctgcctgacaacgtgcactacgtgttcctgagcgccaccatccccaatgcccggcagtttgctgagtggatctgccacctgcacaagcagccctgccacgtgatctacacagactaccggcccacccccctgcagcactacatcttccctgctggaggagatggcctgcacctggtggtggatgaaaatggagacttccgggaggacaacttcaacacagccatgcaggtgctgagagatgctggggacctggccaagggggaccagaagggcaggaaaggaggcaccaagggccccagcaatgtgttcaagatcgtgaagatgatcatggagaggaacttccagcccgtcatcatcttctccttcagcaagaaggactgtgaggcctatgccctgcagatgaccaagctggacttcaacacagatgaggagaagaagatggtggaggaggtgttcagcaatgccatcgactgcctgagtgatgaggacaagaagctgccccaggtggagcacgtgctgcccctgctgaagaggggcatcggcatccaccacggcggcctgctgcccatcctgaaggagaccatcgagatcctcttcagcgagggcctcatcaaggccctgtttgccacagagacctttgccatgggcatcaacatgcctgccaggacagtgctcttcaccaatgccaggaagtttgatggcaaggacttccgctggatcagcagcggggagtacatccagatgagcggccgggccggccggcggggcatggatgaccggggcatcgtcatcctgatggtggatgagaagatgagccccaccatcggcaagcagctgctgaagggcagcgctgaccccctgaacagcgccttccacctgacctacaacatggtgctgaacctgctgcgggtggaggagatcaaccctgagtacatgctggagaagagcttctaccagttccagcactaccgggccatccctggggtggtggagaaggtgaagaacagcgaggagcagtacaacaagatcgtcatccccaatgaggagagcgtggtgatctactacaagatccggcagcagctggccaagctgggcaaggagattgaggagtacatccacaagcccaagtactgcctgcccttcctgcagcccggccgcctggtgaaggtgaagaatgaaggagatgactttggctggggcgtggtggtgaacttcagcaagaagagcaatgtgaagcccaacagcggggagctggaccccctgtatgtggtggaggtgctgctgcgctgcagcaaggagagcctgaagaacagcgccacagaggccgccaagccagccaagccagatgagaagggggagatgcaggtggtgcctgtgctggtgcacctgctgagcgccatcagctctgtgcggctgtacatccccaaggacctgcggcctgtggacaaccggcagagcgtgctgaagagcatccaggaggtgcagaagcgcttcccagatggcatccccctgctggaccccattgatgacatgggcatccaggaccagggcctgaagaaggtgatccagaaggtggaggcctttgagcacaggatgtacagccaccccctgcacaatgaccccaacctggagaccgtgtacaccctgtgtgagaagaaggcccagatcgccatcgacatcaagagcgccaagcgggagctgaagaaggccaggacagtgctgcagatggatgagctgaagtgcaggaagagggtgctgcggcggctgggctttgccaccagcagtgatgtgattgagatgaagggccgggtggcctgtgagatcagcagcgcagatgagctgctgctgacagagatgatgttcaacggcctcttcaatgacctgtctgctgagcaggccacagccctgctgagctgctttgtgttccaggagaacagcagcgagatgcccaagctgacagagcagctggccggccccctgcggcagatgcaggagtgtgccaagagaattgccaaggtgtctgctgaggccaagctggagattgatgaggagacctacctgagcagcttcaagccccacctgatggatgtggtgtacacctgggccactggagccacctttgcccacatctgcaagatgacagatgtgtttgagggcagcatcatccgctgcatgaggcggctggaggagctgctgcggcagatgtgccaggccgccaaggccatcggcaacacagagctggagaacaagtttgctgagggcatcaccaagatcaagagggacatcgtgtttgctgccagcctgtacctgtag

SEQ ID NO: 156610 - DNA, 981 bp, synthetic construct
  misc_feature 1..981: note = Description of Artificial Sequence: Synthetic coding sequence
  source 1..981: mol_type = other DNA
atgggagacatgggagacccccccaagaagaagaggctcatcagcctgtgtgtgggctgcggcaaccagatccatgaccagtacatcctgcgggtgtccccagacctggagtggcacgccgcctgcctgaagtgtgccgagtgcaaccagtacctggatgagagctgcacctgctttgtgagagatggcaagacctactgcaagagggactacatccggctgtatggcatcaagtgtgccaagtgcagcatcggcttcagcaagaatgactttgtgatgagggcccggagcaaggtgtaccacatcgagtgcttccgctgtgtggcctgcagccggcagctgatccctggagatgaatttgccctgcgggaggatggcctcttctgcagagctgaccatgatgtggtggagcgggccagcctgggcgctggggaccccctgagccccctgcacccagcccggcccctgcagatggctgctgagcccatcagcgcccggcagcctgccctgcggccccacgtgcacaagcagcctgagaagaccaccagggtgaggacagtgctgaatgagaagcagctgcacaccctgcggacctgctatgctgccaaccccaggccagatgccctgatgaaggagcagctggtggagatgacaggcctgagccccagggtcatccgggtgtggttccagaacaagcgctgcaaggacaagaagaggagcatcatgatgaagcagctgcagcagcagcagcccaatgacaagacagccaaccctgtggaggtgcagagctaccagcccccctggaaggtgctgagtgactttgccctgcagagcgacatcgaccagcctgccttccagcagctggtgaacttcagcgagggcggccctggcagcaacagcactggaagtgaggtggcctccatgagcagccagctgcctgacacccccaacagcatggtggccagccccatcgaggcctag

SEQ ID NO: 156611 - DNA, 270 bp, synthetic construct
  misc_feature 1..270: note = Description of Artificial Sequence: Synthetic coding sequence
  source 1..270: mol_type = other DNA
atgggcatcctgaagctgcaggtgttcctgattgtgctgtctgtggccctgaaccacctgaaggccacccccatcgagagccaccaggtggagaagaggaagtgcaacacagccacctgtgccacccagaggctggccaacttcctggtgcacagcagcaacaactttggagccatcctgagcagcaccaacgtgggcagcaacacctacggcaagagaaatgctgtggaggtgctgaagcgggagcccctgaactacctgcccctgtag

SEQ ID NO: 156612 - DNA, 240 bp, synthetic construct
  misc_feature 1..240: note = Description of Artificial Sequence: Synthetic coding sequence
  source 1..240: mol_type = other DNA
atgggcatcctgaagctgcaggtgttcctgattgtgctgtctgtggccctgaaccacctgaaggccacccccatcgagagccaccaggtggagaagaggaagtgcaacacagccacctgtgccacccagaggctggccaacttcctggtgcacagcagcaacaactttggagccatcctgagcagcaccaacgtgggcagcaacacctacggcaagagaaatgctgtggaggtgctgtag

SEQ ID NO: 156613 - DNA, 270 bp, synthetic construct; identical to SEQ ID NO: 156611
  misc_feature 1..270: note = Description of Artificial Sequence: Synthetic coding sequence
  source 1..270: mol_type = other DNA

SEQ ID NO: 156614 - DNA, 1449 bp, synthetic construct
  misc_feature 1..1449: note = Description of Artificial Sequence: Synthetic coding sequence
  source 1..1449: mol_type = other DNA
atgagcggccacaagtgctacccctgggacctgcaggacagatatgcccaggacaagtctgtggtgaacaagatgcagcagaagtactgggagaccaagcaggccttcatcaaggccaccgggaagaaggaggatgaacatgtggtggccagtgatgctgacctggatgccaagctggagctgttccacagcatccagaggacctgcctggacctgagcaaggccatcgtgctgtaccagaagaggatctgcttcctgagccaggaggagaatgagctgggcaagttcctgcggagccagggcttccaggacaagacccgggccggcaagatgatgcaggccaccgggaaggccctgtgcttcagcagccagcagaggctggccctgaggaaccccctgtgccgcttccaccaggaggtggagaccttccgccaccgggccatcagtgacacctggctgactgtgaacaggatggagcagtgcaggacagagtacagaggagccctgctgtggatgaaggatgtgtcccaggagctggaccctgacctgtacaagcagatggagaagttcaggaaggtgcagacccaggtgcggctggccaagaagaactttgacaagctgaagatggatgtgtgccagaaggtggacctgctgggcgccagccgctgcaacctgctgagccacatgctggccacctaccagaccaccctgctgcacttctgggagaagaccagccacaccatggccgccatccacgagagcttcaagggctaccagccctatgagttcaccaccctgaagagcctgcaggaccccatgaagaagctggtggagaaggaggagaagaagaagatcaaccagcaggagagcacagatgctgctgtgcaggagcccagccagctgatcagcctggaggaggagaaccagaggaaggagagcagcagcttcaagacagaagatggcaagagcatcctgagcgccctggacaagggcagcacccacacagcctgcagcggccccattgatgagctgctggacatgaagtctgaggagggcgcctgcctgggccctgtggccggcaccccagagcctgagggcgctgacaaggatgacctgctgctgctgtctgagatcttcaatgccagcagcctggaggagggggagttcagcaaggagtgggccgctgtgtttggagatggccaggtgaaggagcctgtgcccaccatggccctgggggagccagaccccaaggcccagacaggcagcggcttcctgcccagccagctgctggaccagaacatgaaggacctgcaggccagcctgcaggagcccgccaaggccgccagtgacctgacagcctggttcagcctgtttgctgacctggaccccctgagcaacccagatgctgtgggcaagacagacaaggagcacgagctgctgaatgcctag

SEQ ID NO: 156615 - DNA, 774 bp, synthetic construct
  misc_feature 1..774: note = Description of Artificial Sequence: Synthetic coding sequence
  source 1..774: mol_type = other DNA
atgagcggccacaagtgcagctacccctgggacctgcaggacagatatgcccaggacaagtctgtggtgaacaagatgcagcagaagtactgggagaccaagcaggccttcatcaaggccaccgggaagaaggaggatgagcacgtggtggccagtgatgctgacctggatgccaagctggagctgttccacagcatccagaggacctgcctggacctgagcaaggccatcgtgctgtaccagaagaggatctgcttcctgagccaggaggagaatgagctgggcaagttcctgcggagccagggcttccaggacaagaccagggctgggaagatgatgcaggccaccgggaaggccctgtgcttcagcagccagcagaggctggccctgaggaaccccctgtgccgcttccaccaggaggtggagaccttccgccaccgggccatcagtgacacctggctgactgtgaacaggatggagcagtgcaggacagagtacagaggagccctgctgtggatgaaggatgtgtcccaggagctggaccctgacctgtacaagcagatggagaagttcaggaaggtgcagacccaggtgcggctggccaagaagaactttgacaagctgaagatggatgtgtgccagaaggtggacctgctgggcgccagccgctgcaacctgctgagccacatgctggccacctaccagctggcctgggaccagtggcagggccccaggaacctgaaggtgctgaccaagatgacctgctgctgctag

SEQ ID NO: 156616 - DNA, 1452 bp, synthetic construct
  misc_feature 1..1452: note = Description of Artificial Sequence: Synthetic coding sequence
  source 1..1452: mol_type = other DNA
atgagcggccacaagtgcagctacccctgggacctgcaggacagatatgcccaggacaagtctgtggtgaacaagatgcagcagaagtactgggagaccaagcaggccttcatcaaggccaccgggaagaaggaggatgagcacgtggtggccagtgatgctgacctggatgccaagctggagctgttccacagcatccagaggacctgcctggacctgagcaaggccatcgtgctgtaccagaagaggatctgcttcctgagccaggaggagaatgagctgggcaagttcctgcggagccagggcttccaggacaagaccagggctgggaagatgatgcaggccaccgggaaggccctgtgcttcagcagccagcagaggctggccctgaggaaccccctgtgccgcttccaccaggaggtggagaccttccgccaccgggccatcagtgacacctggctgactgtgaacaggatggagcagtgcaggacagagtacagaggagccctgctgtggatgaaggatgtgtcccaggagctggaccctgacctgtacaagcagatggagaagttcaggaaggtgcagacccaggtgcggctggccaagaagaactttgacaagctgaagatggatgtgtgccagaaggtggacctgctgggcgccagccgctgcaacctgctgagccacatgctggccacctaccagaccaccctgctgcacttctgggagaagaccagccacaccatggccgccatccacgagagcttcaagggctaccagccctatgagttcaccaccctgaagagcctgcaggaccccatgaagaagctggtggagaaggaggagaagaagaagatcaaccagcaggagagcacagatgctgctgtgcaggagcccagccagctgatcagcctggaggaggagaaccagaggaaggagagcagcagcttcaagacagaagatggcaagagcatcctgagcgccctggacaagggcagcacccacacagcctgcagcggccccattgatgagctgctggacatgaagtctgaggagggcgcctgcctgggccctgtggccggcaccccagagcctgagggcgctgacaaggatgacctgctgctgctgtctgagatcttcaatgccagcagcctggaggagggggagttcagcaaggagtgggccgctgtgtttggagatggccaggtgaaggagcctgtgcccaccatggccctgggggagccagaccccaaggcccagacaggcagcggcttcctgcccagccagctgctggaccagaacatgaaggacctgcaggccagcctgcaggagcccgccaaggccgccagtgacctgacagcctggttcagcctgtttgctgacctggaccccctgagcaacccagatgctgtgggcaagacagacaaggagcacgagctgctgaatgcctag

SEQ ID NO: 156617 - DNA, 1452 bp, synthetic construct; identical to SEQ ID NO: 156616
  misc_feature 1..1452: note = Description of Artificial Sequence: Synthetic coding sequence
  source 1..1452: mol_type = other DNA

SEQ ID NO: 156618 - DNA, 1452 bp, synthetic construct; identical to SEQ ID NO: 156616
  misc_feature 1..1452: note = Description of Artificial Sequence: Synthetic coding sequence
  source 1..1452: mol_type = other DNA

SEQ ID NO: 156619 - DNA, 1539 bp, synthetic construct
  misc_feature 1..1539: note = Description of Artificial Sequence: Synthetic coding sequence
  source 1..1539: mol_type = other DNA
atgagcggccacaagtgcagctacccctgggacctgcaggacagatatgcccaggacaagtctgtggtgaacaagatgcagcagaagtactgggagaccaagcaggccttcatcaaggccaccgggaagaaggaggatgagcacgtggtggccagtgatgctgacctggatgccaagctggagctgttccacagcatccagaggacctgcctggacctgagcaaggccatcgtgctgtaccagaagaggatctgcttcctgagccaggaggagaatgagctgggcaagttcctgcggagccagggcttccaggacaagaccagggctgggaagatgatgcaggccaccgggaaggccctgtgcttcagcagccagcagaggctggccctgaggaaccccctgtgccgcttccaccaggaggtggagaccttccgccaccgggccatcagtgacacctggctgactgtgaacaggatggagcagtgcaggacagagtacagaggagccctgctgtggatgaaggatgtgtcccaggagctggaccctgacctgtacaagcagatggagaagttcaggaaggtgcagacccaggtgcggctggccaagaagaactttgacaagctgaagatggatgtgtgccagaaggtggacctgctgggcgccagccgctgcaacctgctgagccacatgctggccacctaccagaccaccctgctgcacttctgggagaagaccagccacaccatggccgccatccacgagagcttcaagggctaccagccctatgagttcaccaccctgaagagcctgcaggaccccatgaagaagctggtggagaaggaggagaagaagaagatcaaccagcaggagagcacagatgctgctgtgcaggagcccagccagtacctgcagaacatctgcctggagatgaaggccaacagcgacatcaagatgctgcagaagggcaaggagggccagcagatcggcatcctgatcagcctggaggaggagaaccagaggaaggagagcagcagcttcaagacagaagatggcaagagcatcctgagcgccctggacaagggcagcacccacacagcctgcagcggccccattgatgagctgctggacatgaagtctgaggagggcgcctgcctgggccctgtggccggcaccccagagcctgagggcgctgacaaggatgacctgctgctgctgtctgagatcttcaatgccagcagcctggaggagggggagttcagcaaggagtgggccgctgtgtttggagatggccaggtgaaggagcctgtgcccaccatggccctgggggagccagaccccaaggcccagacaggcagcggcttcctgcccagccagctgctggaccagaacatgaaggacctgcaggccagcctgcaggagcccgccaaggccgccagtgacctgacagcctggttcagcctgtttgctgacctggaccccctgagcaacccagatgctgtgggcaagacagacaaggagcacgagctgctgaatgcctag

SEQ ID NO: 156620 - DNA, 405 bp, synthetic construct
  misc_feature 1..405: note = Description of Artificial Sequence: Synthetic coding sequence
  source 1..405: mol_type = other DNA
atgagcggccacaagtgctacccctgggacctgcaggacagatatgcccaggacaagtctgtggtgaacaagatgcagcagaagtactgggagaccaagcaggccttcatcaaggccaccgggaagaaggaggatgaacatgtggtggccagtgatgctgacctggatgccaagctggagctgttccacagcatccagaggacctgcctggacctgagcaaggccatcgtgctgtaccagaagaggatctgcttcctgagccaggaggagaatgagctgggcaagttcctgcggagccagggcttccaggacaagacccgggccggcaagatgatgcaggccaccgggaaggccctgtgcttcagcagccagcagaggctggccctgaggaaccccctgtgctag

SEQ ID NO: 156621 - DNA, 489 bp, synthetic construct
  misc_feature 1..489: note = Description of Artificial Sequence: Synthetic coding sequence
  source 1..489: mol_type = other DNA
atgagcggccacaagtgcagctacccctgggacctgcaggacagatatgcccaggacaagtctgtggtgaacaagatgcagcagaagtactgggagaccaagcaggccttcatcaaggccaccgggaagaaggaggatgagcacgtggtggccagtgatgctgacctggatgccaagctggagctgttccacagcatccagaggacctgcctggacctgagcaaggccatcgtgctgtaccagaagaggatctgcttcctgagccaggaggagaatgagctgggcaagttcctgcggagccagggcttccaggacaagaccagggctgggaagatgatgcaggccaccgggaaggccctgtgcttcagcagccagcagaggctggccctgaggaaccccctgtgccgcttccaccaggaggtggagaccttccgccaccgggccatcagtgacacctggctgactgtgaacaggatggagcagtgctag

SEQ ID NO: 156622 - DNA, 666 bp, synthetic construct
  misc_feature 1..666: note = Description of Artificial Sequence: Synthetic coding sequence
  source 1..666: mol_type = other DNA
atggctgctgcccggcccagcctgggccgggtgctgcccggcagctctgtgctcttcctgtgtgacatgcaggagaagttccgccacaacatcgcctacttcccccagatcgtgtctgtggccgccaggatgctgaaggtggcccggctgctggaggtgcctgtgatgctgacagagcagtacccccagggcctgggccccaccgtgcctgagctgggcacagagggcctgcggcccctggccaagacctgcttctccatggtgcctgccctgcagcaggagctggacagccggccccagctgcggtctgtgctgctgtgtggcatcgaggcccaggcctgcatcctggaccccaggagctacccaggcctggccctgaccagcctgtacccccagaacaccaccctggacctgctggaccggggcctgcaggtgcacgtggtggtggatgcctgcagcagccgcagccaggtggaccggctggtggccctggccaggatgaggcagagcggggccttcctgagcaccagcgagggcctcatcctgcagctggtgggagatgctgtgcacccccagttcaaggagatccagaagctgatcaaggagcccgccccagattctggcctgctgggcctcttccagggccagaacagcctgctgcactag

SEQ ID NO: 156623 - DNA, 618 bp, synthetic construct
  misc_feature 1..618: note = Description of Artificial Sequence: Synthetic coding sequence
  source 1..618: mol_type = other DNA
atggctgctgcccggcccagcctgggccgggtgctgcccggcagctctgtgctcttcctgtgtgacatgcaggagaagttccgccacaacatcgcctacttcccccagatcgtgtctgtggccgccaggatgctgaaggtggcccggctgctggaggtgcctgtgatgctgacagagcagtacccccagggcctgggccccaccgtgcctgagctgggcacagagggcctgcggcccctggccaagacctgcttctccatggtgcctgccctgcagcaggagctggacagccggccccagctgcggtctgtgctgctgtgtggcatcgaggcccaggcctgcatcctgaacaccaccctggacctgctggaccggggcctgcaggtgcacgtggtggtggatgcctgcagcagccgcagccaggtggaccggctggtggccctggccaggatgaggcagagcggggccttcctgagcaccagcgagggcctcatcctgcagctggtgggagatgctgtgcacccccagttcaaggagatccagaagctgatcaaggagcccgccccagattctggcctgctgggcctcttccagggccagaacagcctgctgcactag

SEQ ID NO: 156624 - DNA, 408 bp, synthetic construct
  misc_feature 1..408: note = Description of Artificial Sequence: Synthetic coding sequence
  source 1..408: mol_type = other DNA
atggctgctgcccggcccagcctgggccgggtgctgcccggcagctctgtgctcttcctgtgtgacatgcaggagaagttccgccacaacatcgcctacttcccccagatcgtgtctgtggccgccaggatgctgaagaacaccaccctggacctgctggaccggggcctgcaggtgcacgtggtggtggatgcctgcagcagccgcagccaggtggaccggctggtggccctggccaggatgaggcagagcggggccttcctgagcaccagcgagggcctcatcctgcagctggtgggagatgctgtgcacccccagttcaaggagatccagaagctgatcaaggagcccgccccagattctggcctgctgggcctcttccagggccagaacagcctgctgcactag

SEQ ID NO: 156625 - DNA, 1101 bp, synthetic construct
  misc_feature 1..1101: note = Description of Artificial Sequence: Synthetic coding sequence
  source 1..1101: mol_type = other DNA
atggccggccctgcctggatcagcaaggtgtcccggctgctgggcgccttccacaaccccaagcaggtgacccggggcttcaccggcggcgtgcagacagtgaccctcatccctggagatggcatcggccctgagatctctgctgctgtgatgaagatctttgatgctgccaaggcccccatccagtgggaggagagaaatgtgacagccatccagggccctgggggcaagtggatgatccccagcgaggccaaggagagcatggacaagaacaagatgggcctgaagggccccctgaagacccccatcgctgctggccaccccagcatgaacctgctgctgaggaagacctttgacctgtatgccaacgtgcggccctgtgtgtccattgagggctacaagaccccctacacagatgtgaacatcgtgaccatcagagaaaatacagaaggagagtacagcggcatcgagcacgtgattgtggatggagtggtgcagagcatcaagctgatcacagagggcgccagcaagagaattgctgagtttgcctttgaatatgccaggaacaaccacaggagcaatgtgacagctgtgcacaaggccaacatcatgaggatgtctgatggcctcttcctgcagaagtgccgggaggtggccgagagctgcaaggacatcaagttcaatgagatgtacctggacacagtgtgcctgaacatggtgcaggaccccagccagtttgatgtgctggtgatgcccaacctgtatggagacatcctgagtgacctgtgtgccggcctgattggaggcctgggcgtgaccccatctggcaacatcggggccaatggagtggccatctttgagagcgtgcacggcacagccccagacattgctgggaaggacatggccaaccccacagccctgctgctgtctgctgtgatgatgctgcggcacatgggcctgtttgaccacgccgccagaattgaagctgcctgctttgccaccatcaaggatggcaagagcctgaccaaggacctgggcggcaatgccaagtgcagcgacttcacagaggagatctgccggcgggtgaaggacctggactag

SEQ ID NO: 156626 - DNA, 774 bp, synthetic construct
  misc_feature 1..774: note = Description of Artificial Sequence: Synthetic coding sequence
  source 1..774: mol_type = other DNA
atgaacctgctgctgaggaagacctttgacctgtatgccaacgtgcggccctgtgtgtccattgagggctacaagaccccctacacagatgtgaacatcgtgaccatccgggagaacacagaaggagagtacagcggcattgaacatgtgattgtggatggagtggtgcagagcatcaagctgatcacagaaggagccagcaagagaattgctgagtttgcctttgaatatgccaggaacaaccacaggagcaatgtgacagctgtgcacaaggccaacatcatgaggatgtctgatggcctcttcctgcagaagtgccgggaggtggccgagagctgcaaggacatcaagttcaatgagatgtacctggacacagtgtgcctgaacatggtgcaggaccccagccagtttgatgtgctggtgatgcccaacctgtatggagacatcctgagtgacctgtgtgccggcctcatcggcggcctgggcgtgacccccagcggcaacattggagccaacggggtggccatctttgaatctgtgcatggaacagccccagacattgctgggaaggacatggccaaccccacagccctgctgctgtctgctgtgatgatgctgcggcacatgggcctgtttgaccatgctgcccgcatcgaggccgcctgctttgccaccatcaaggatggcaagagcctgaccaaggacctgggcggcaatgccaagtgcagcgacttcacagaggagatctgcagaagagtgaaggacctggactag

SEQ ID NO: 156627 - DNA, 495 bp, synthetic construct
  misc_feature 1..495: note = Description of Artificial Sequence: Synthetic coding sequence
  source 1..495: mol_type = other DNA
atggccgccctgtctggagtgcgctggctgacccgggccctggtgtctgctggcaaccctggggcctggaggggcctgagcaccagcgctgctgcccacgccgccagccgcagccaggctgaagatgtgcgggtggagggcagcttccctgtgaccatgctgcctggagatggagtgggccctgagctgatgcatgctgtgaaggaggtgttcaaggctgctgctgtgcctgtggagttccaggagcaccacctgtctgaggtgcagaacatggccagcgaggagaagctggagcaggtgctgagctccatgaaggagaacaaggtggccatcatcggcaagatccacacccccatggagtacaagggggagctggccagctatgacatgaggctgcggaggaagctggacctgtttgccaacgtggtgcacgtgaagagcctgcccggctatgattctgcccagcagagcaggcctggggaccacagcaggtag

SEQ ID NO: 156628 - DNA, 1158 bp, synthetic construct
  misc_feature 1..1158: note = Description of Artificial Sequence: Synthetic coding sequence
  source 1..1158: mol_type = other DNA
atggccgccctgtctggagtgcgctggctgacccgggccctggtgtctgctggcaaccctggggcctggaggggcctgagcaccagcgctgctgcccacgccgccagccgcagccaggctgaagatgtgcgggtggagggcagcttccctgtgaccatgctgcctggagatggagtgggccctgagctgatgcatgctgtgaaggaggtgttcaaggctgctgctgtgcctgtggagttccaggagcaccacctgtctgaggtgcagaacatggccagcgaggagaagctggagcaggtgctgagctccatgaaggagaacaaggtggccatcatcggcaagatccacacccccatggagtacaagggggagctggccagctatgacatgaggctgcggaggaagctggacctgtttgccaacgtggtgcacgtgaagagcctgcccggctacatgaccaggcacaacaacctggacctggtgatcatccgggagcagacagaaggagagtacagcagcctggagcacgagagcgcccggggcgtgattgagtgcctgaagatcgtgacccgggccaagagccagagaattgccaagtttgcctttgattatgccaccaagaagggccggggcaaggtgacagctgtgcacaaggccaacatcatgaagctgggagatggcctcttcctgcagtgctgtgaggaggtggccgagctgtaccccaagatcaagtttgagaccatgatcatcgacaactgctgcatgcagctggtgcagaacccctaccagtttgatgtgctggtgatgcccaacctgtatggcaacatcatcgacaacctggccgccggcctggtgggcggggccggcgtggtgcctggagagagctacagcgcagaatatgctgtgtttgaaacaggagcccggcacccctttgcccaggccgtgggcagaaatattgccaaccccacagccatgctgctgagcgccagcaacatgctgcggcacctgaacctggagtaccacagctccatgattgctgatgctgtgaagaaggtgatcaaggtgggcaaggtgaggacccgggacatgggcggctacagcaccaccacagacttcatcaagtctgtgattggccacctgcagaccaagggcagctag

SEQ ID NO: 156629 - DNA, 1152 bp, synthetic construct
  misc_feature 1..1152: note = Description of Artificial Sequence: Synthetic coding sequence
  source 1..1152: mol_type = other DNA
atggccgccctgtctggagtgcgctggctgacccgggccctggtgtctgctggcaaccctggggcctggaggggcctgagcaccagcgctgctgcccacgccgccagccgcagccaggctgaagatgtgcgggtggagggcagcttccctgtgaccatgctgcctggagatggagtgggccctgagctgatgcatgctgtgaaggaggtgttcaaggctgctgctgtgcctgtggagttccaggagcaccacctgtctgaggtgcagaacatggccagcgaggagaagctggagcaggtgctgagctccatgaaggagaacaaggtggccatcatcggcaagatccacacccccatggagtacaagggggagctggccagctatgacatgaggctgcggaggaagctggacctgtttgccaacgtggtgcacgtgaagagcctgcccggctacatgaccaggcacaacaacctggacctggtgatcatccgggagcagacagaaggagagtacagcagcctggagcacgagagcgcccggggcgtgattgagtgcctgaagatcgtgacccgggccaagagccagagaattgccaagtttgcctttgattatgccaccaagaagggccggggcaaggtgacagctgtgcacaaggccaacatcatgaagctgggagatggcctcttcctgcagtgctgtgaggaggtggccgagctgtaccccaagatcaagtttgagaccatgatcatcgacaactgctgcatgcagctggtgcagaacccctaccagtttgatgtgctggtgatgcccaacctgtatggcaacatcatcgacaacctggccgccggcctggtgggcggggccggcgtggtgcctggagagagctacagcgcagaatatgctgtgtttgaaacaggagcccggcacccctttgcccaggccgtgggcagaaatattgccaaccccacagccatgctgctgagcgccagcaacatgctgcggcacctgaacctggagtaccacagctccatgattgctgatgctgtgaagaaggtgatcaaggtgggcaaggtgaggaccagtgacatgggcggctacgccacctgccacgacttcacagaagctgtgattgctgccctgccccacccctag

SEQ ID NO: 156630 - DNA, 702 bp, synthetic construct
  misc_feature 1..702: note = Description of Artificial Sequence: Synthetic coding sequence
  source 1..702: mol_type = other DNA
atgaagatgggagagcgctggagcagcctcttccccttccctgtgagccccagctgctgcttcctgctgacccagagcgcccggggcgtgattgagtgcctgaagatcgtgacccgggccaagagccagagaattgccaagtttgcctttgattatgccaccaagaagggccggggcaaggtgacagctgtgcacaaggccaacatcatgaagctgggagatggcctcttcctgcagtgctgtgaggaggtggccgagctgtaccccaagatcaagtttgagaccatgatcatcgacaactgctgcatgcagctggtgcagaacccctaccagtttgatgtgctggtgatgcccaacctgtatggcaacatcatcgacaacctggccgccggcctggtgggcggggccggcgtggtgcctggagagagctacagcgcagaatatgctgtgtttgaaacaggagcccggcacccctttgcccaggccgtgggcagaaatattgccaaccccacagccatgctgctgagcgccagcaacatgctgcggcacctgaacctggagtaccacagctccatgattgctgatgctgtgaagaaggtgatcaaggtgggcaaggtgaggacccgggacatgggcggctacagcaccaccacagacttcatcaagtctgtgattggccacctgcagaccaagggcagctag

SEQ ID NO: 156631 - DNA, 795 bp, synthetic construct
  misc_feature 1..795: note = Description of Artificial Sequence: Synthetic coding sequence
  source 1..795: mol_type = other DNA
atggagagcggcaagacagccagccccaagtccatgcccaaggatgcccagatgatggcccagatcctgaaggacatgggcatcacagaatatgagcccagggtcatcaaccagatgctggagtttgccttccgctacgtgaccaccatcctggatgatgccaagatctacagcagccacgccaagaaggccaccgtggatgctgatgatgtgcggctggccatccagtgcagagctgaccagagcttcaccagccccccaccccgggacttcctgctggacatcgcccggcagaggaaccagacccccctgcccctcatcaagccctacagcggcccccggctgcccccagaccgctactgcctgacagcccccaactaccgcctgaagagcctgcagaagaaggccagcaccagcgctggccgcatcaccgtgccccggctgtctgtgggctctgtgaccagccggcccagcacccccaccctgggcacccccaccccccagaccatgtctgtgtccaccaaggtgggcacccccatgagcctgaccggccagcgcttcaccgtgcagatgcccaccagccagagccctgctgtgaaggccagcatcccagccaccagcgctgtgcagaatgtgctgatcaaccccagcctgattggcagcaagaacatcctgatcaccaccaacatgatgagcagccagaacacagccaatgaaagcagcaatgccctgaagaggaagagagaagatgatgatgatgatgatgatgatgatgatgattatgacaacctgtag

SEQ ID NO: 156632 - DNA, 906 bp, synthetic construct
  misc_feature 1..906: note = Description of Artificial Sequence: Synthetic coding sequence
  source 1..906: mol_type = other DNA
atggccatcagaagaaacagagtggccctgaagggcaacatcgagaccaaccacaacctgccccccagccacaagagcaggaacaacatcctgcggaccagcctggacctgtatgccaacgtcatccactgcaagagcctgcccggggtggtgaccaggcacaaggacatcgacatcctgattgtgcgggagaacacagaaggagagtacagcagcctggagcatgaatctgtggccggcgtggtggagagcctgaagatcatcaccaaggccaagagcctgagaattgctgaatatgccttcaagctggcccaggagagcggcaggaagaaggtgacagctgtgcacaaggccaacatcatgaagctgggagatggcctcttcctgcagtgctgccgggaggtggccgcccgctacccccagatcacctttgagaacatgattgtggacaacaccaccatgcagctggtgtcccggccccagcagtttgatgtgatggtgatgcccaacctgtatggcaacatcgtgaacaacgtgtgtgccggcctggtgggcggccctggcctggtggccggggccaactacggccacgtgtatgctgtgtttgaaacagccaccaggaacacaggcaagagcatcgccaacaagaacatcgccaaccccacagccaccctgctggccagctgcatgatgctggaccacctgaagctgcacagctatgccaccagcatcaggaaggctgtgctggcctccatggacaatgaaaatggcctggtgtgtgccgagcccgcctgtgtgctgcagatgcacaccccagacatcggcggccagggcaccaccagcgaggccatccaggacgtcatccgccacatccgggtcatcaatggccgggctgtggaggcctag

SEQ ID NO: 156633 - DNA, 1143 bp, synthetic construct
  misc_feature 1..1143: note = Description of Artificial Sequence: Synthetic coding sequence
  source 1..1143: mol_type = other DNA
atggccctgaaggtggccaccgtggccggcagcgctgccaaggctgtgctgggccctgccctgctgtgccggccctgggaggtgctgggcgcccacgaggtgcccagcaggaacatcttcagcgagcagaccatcccccccagcgccaagtatggaggccgccacacagtgaccatgatccctggagatggcatcggccctgagctgatgctgcacgtgaagtctgtgttcagacatgcctgtgtgcctgtggactttgaggaggtgcacgtgagcagcaatgctgatgaggaggacatcagaaatgccatcatggccatcagaagaaacagagtggccctgaagggcaacatcgagaccaaccacaacctgccccccagccacaagagcaggaacaacatcctgcggaccagcctggacctgtatgccaacgtcatccactgcaagagcctgcccggggtggtgaccaggcacaaggacatcgacatcctgattgtgcgggagaacacagaaggagagtacagcagcctggagcatgaatctgtggccggcgtggtggagagcctgaagatcatcaccaaggccaagagcctgagaattgctgaatatgccttcaagctggcccaggagagcggcaggaagaaggtgacagctgtgcacaaggccaacatcatgaagctgggagatggcctcttcctgcagtgctgccgggaggtggccgcccgctacccccagatcacctttgagaacatgattgtggacaacaccaccatgcagctggtgtcccggccccagcagtttgatgtgatggtgatgcccaacctgtatggcaacatcgtgaacaacgtgtgtgccggcctggtgggcggccctggcctggtggccggggccaactacggccacgtgtatgctgtgtttgaaacagccaccaggaacacaggcaagagcatcgccaacaagaacatcgccaaccccacagccaccctgctggccagctgcatgatgctggaccacctgaagctgcacagctatgccaccagcatcaggaaggctgtgctggcctccatggacaatgaaaatgtgcgcttccccagccaccccaccctgctgcccaggcctgtgagcccctgcagcctgctgtag

SEQ ID NO: 156634 - DNA, 525 bp, synthetic construct
  misc_feature 1..525: note = Description of Artificial Sequence: Synthetic coding sequence
  source 1..525: mol_type = other DNA
atgtacacctttgaccaggccaccggcggcacagcccagtttgaggcccacagtgatgcccaggccctggtgctgctggatgtgaccccagaccagagcatggtggatgagggcatggcccgggaggtgatcaaccgcatccagaagctgaggaagaagtgcaacctggtgcccacagatgagatcaccgtgtactacaaggccaagtctgagggcacctacctgaacagcgtgattgagagccacacagagttcatcttcaccaccatcaaggcccccctgaagccctaccctgtgagccccagcgacaaggtgctgatccaggagaagacccagctgaagggcagcgagctggagatcaccctgacccggggcagcagcctgcccggccctgcctgtgcctacgtgaacctgaacatctgtgccaatggaagtgagcagggcgagatgcagtggatcatccctgagatctaccacttctggaagccccgctggagcatcgcccctgggaagagcaagaggtag

SEQ ID NO: 156635 - DNA, 525 bp, synthetic construct; identical to SEQ ID NO: 156634
  misc_feature 1..525: note = Description of Artificial Sequence: Synthetic coding sequence
  source 1..525: mol_type = other DNA

SEQ ID NO: 156636 - DNA, 3789 bp, synthetic construct
  misc_feature 1..3789: note = Description of Artificial Sequence: Synthetic coding sequence
  source 1..3789: mol_type = other DNA
atgctgcagcaggtgcctgagaacatcaacttccctgctgaggaggagaagatcctggagttctggacagagttcaactgcttccaggagtgcctgaagcagagcaagcacaagcccaagttcaccttctatgatggccccccatttgccaccggcctgccccactacggccacatcctggccggcaccatcaaggacatcgtgaccaggtatgcccaccagagcggcttccacgtggacagaagatttggctgggactgccacggcctgcctgtggagtatgaaattgacaagaccctgggcatccggggcccagaagatgtggccaagatgggcatcacagagtacaacaaccagtgccgggccatcgtgatgagatacagcgctgagtggaagagcacagtgtcccggctgggccgctggattgactttgacaatgactacaagaccctgtacccccagttcatggagagcgtgtggtgggtgttcaagcagctgtatgacaagggcctggtgtacagaggagtgaaggtgatgcccttcagcacagcctgcaacacccccctgagcaactttgagagccaccagaactacaaggatgtgcaggaccccagcgtgtttgtgaccttccccctggaggaggatgaaacagtgtccctggtggcctggaccaccaccccctggaccctgcccagcaacctggccgtgtgtgtgaaccctgagatgcagtatgtgaagatcaaggatgtggcccggggccgcctgctgatcctgatggaggcccggctgagcgccctgtacaagctggagagtgactatgagatcctggagcgcttccctggggcctacctgaagggcaagaagtaccggcccctgtttgactacttcctgaagtgcaaggaaaatggagccttcaccgtgctggtggacaactacgtgaaggaggaggagggcactggagtggtgcaccaggccccctactttggagctgaggactacagagtgtgcatggacttcaacatcatcaggaaggacagcctgcctgtgtgccctgtggatgccagcggctgcttcaccacagaggtgacagactttgctggccagtatgtgaaggatgctgacaagagcatcatccgcaccctgaaggagcagggccgcctgctggtggccaccaccttcacccacagctaccccttctgctggaggagtgacacccccctcatctacaaggctgtgcccagctggtttgtgcgggtggagaacatggtggaccagctgctgaggaacaatgacctgtgctactgggtgcctgagctggtgcgggagaagagatttggaaactggctgaaggatgcccgggactggaccatcagcaggaaccgctactggggcacccccatccccctgtgggtgtctgatgactttgaggaggtggtgtgcatcggctctgtggccgagctggaggagctgagcggggccaagatcagtgacctgcaccgggagagcgtggaccacctgaccatccccagccgctgtgggaagggcagcctgcaccgcatcagcgaggtgtttgactgctggtttgagagcggctccatgccctatgcccaggtgcactacccctttgagaacaagcgggagtttgaagatgccttccctgctgacttcatcgccgagggcatcgaccagacccggggctggttctacaccctgctggtgctggccacagccctgtttggccagccccccttcaagaatgtcatcgtgaatggcctggtgctggccagtgatggccagaagatgagcaagaggaagaagaactacccagaccctgtgtccatcatccagaagtacggggctgatgccctgcggctgtacctgatcaacagccctgtggtgcgggcagagaacctgcgcttcaaggaggagggcgtgagagatgtgctgaaggatgtgctgctgccctggtacaatgcctaccgcttcctgatccagaatgtgctgcggctgcagaaggaggaggagattgagttcctgtacaatgaaaatacagtgcgggagagccccaacatcacagaccgctggatcctgtccttcatgcagagcctcatcggcttctttgaaacagagatggccgcctaccgcctgtacacagtggtgccccggctggtgaagtttgtggacatcctgaccaactggtacgtgaggatgaacagaagaaggctgaagggagaaaatggcatggaggactgtgtgatggccctggagaccctcttctctgtgctgctgagcctgtgccgcctgatggccccctacacccccttcctgacagagctgatgtaccagaacctgaaggtgctgattgatcctgtgtctgtgcaggacaaggacaccctgagcatccactacctgatgctgccccgggtgcgggaggagctgattgacaagaagacagagagcgctgtgtcccagatgcagagcgtgattgagctgggccgggtcatccgggacaggaagaccatccccatcaagtaccccctgaaggagatcgtggtgatccaccaggaccctgaggccctgaaggacatcaagagcctggagaagtacatcatcgaggagctgaatgtgaggaaggtgaccctgagcacagacaagaacaagtatggcatccggctgcgggcagagccagaccacatggtgctgggcaagaggctgaagggggccttcaaggctgtgatgaccagcatcaagcagctgagcagcgaggagctggagcagttccagaagacaggcaccatcgtggtggagggccacgagctgcatgatgaggacatccggctgatgtacacctttgaccaggccactggaggaacagcccagtttgaggcccacagtgatgcccaggccctggtgctgctggatgtgaccccagaccagagcatggtggatgagggcatggcccgggaggtgatcaaccgcatccagaagctgaggaagaagtgcaacctggtgcccacagatgagatcaccgtgtactacaaggccaagtctgagggcacctacctgaacagcgtcatcgagagccacacagagttcatcttcaccaccatcaaggcccccctgaagccctaccctgtgagccccagcgacaaggtgctgatccaggagaagacccagctgaagggcagcgagctggagatcaccctgacccggggcagcagcctgcccggccctgcctgtgcctacgtgaacctgaacatctgtgccaacggcagcgagcagggcggcgtgctgctgctggagaaccccaagggggacaaccggctggacctgctgaagctgaagtctgtggtgaccagcatcttcggcgtgaagaacacagagctggccgtgttccatgatgaaacagagatccagaaccagacagacctgctgagcctgagcggcaagaccctgtgtgtgacagctggcagcgcccccagcctcatcaacagcagcagcaccctgctgtgccagtacatcaacctgcagctgctgaatgccaagccccaggagtgcctgatgggcaccgtgggcaccctgctgctggagaaccccctgggccagaatggcctgacccaccagggcctgctgtatgaggccgccaaggtgtttggcctgcggagcaggaagctgaagctgttcctgaatgagacccagacccaggagatcacagaggacatccctgtgaagaccctgaacatgaagacagtgtatgtgtctgtgctgcccaccacagctgacttctag

SEQ ID NO: 156637 - DNA, 3729 bp, synthetic construct
  misc_feature 1..3729: note = Description of Artificial Sequence: Synthetic coding sequence
  source 1..3729: mol_type = other DNA
atgctgcagcaggtgcctgagaacatcaacttccctgctgaggaggagaagatcctggagttctggacagagttcaactgcttccaggagtgcctgaagcagagcaagcacaagcccaagttcaccttctatgatggccccccatttgccaccggcctgccccactacggccacatcctggccggcaccatcaaggacatcgtgaccaggtatgcccaccagagcggcttccacgtggacagaagatttggctgggactgccacggcctgcctgtggagtatgaaattgacaagaccctgggcatccggggcccagaagatgtggccaagatgggcatcacagagtacaacaaccagtgccgggccatcgtgatgagatacagcgctgagtggaagagcacagtgtcccggctgggccgctggattgactttgacaatgactacaagaccctgtacccccagttcatggagagcgtgtggtgggtgttcaagcagctgtatgacaagggcctggtgtacagaggagtgaaggtgatgcccttcagcacagcctgcaacacccccctgagcaactttgagagccaccagaactacaaggatgtgcaggaccccagcgtgtttgtgaccttccccctggaggaggatgaaacagtgtccctggtggcctggaccaccaccccctggaccctgcccagcaacctggccgtgtgtgtgaaccctgagatgcagtatgtgaagatcaaggatgtggcccggggccgcctgctgatcctgatggaggcccggctgagcgccctgtacaagctggagagtgactatgagatcctggagcgcttccctggggcctacctgaagggcaagaagtaccggcccctgtttgactacttcctgaagtgcaaggaaaatggagccttcaccgtgctggtggacaactacgtgaaggaggaggagggcactggagtggtgcaccaggccccctactttggagctgaggactacagagtgtgcatggacttcaacatcatcaggaaggacagcctgcctgtgtgccctgtggatgccagcggctgcttcaccacagaggtgacagactttgctggccagtatgtgaaggatgctgacaagagcatcatccgcaccctgaaggagcagggccgcctgctggtggccaccaccttcacccacagctaccccttctgctggaggagtgacacccccctcatctacaaggctgtgcccagctggtttgtgcgggtggagaacatggtggaccagctgctgaggaacaatgacctgtgctactgggtgcctgagctggtgcgggagaagagatttggaaactggctgaaggatgcccgggactggaccatcagcaggaaccgctactggggcacccccatccccctgtgggtgtctgatgactttgaggaggtggtgtgcatcggctctgtggccgagctggaggagctgagcggggccaagatcagtgacctgcaccgggagagcgtggaccacctgaccatccccagccgctgtgggaagggcagcctgcaccgcatcagcgaggtgtttgactgctggtttgagagcggctccatgccctatgcccaggtgcactacccctttgagaacaagcgggagtttgaagatgccttccctgctgacttcatcgccgagggcatcgaccagacccggggctggttctacaccctgctggtgctggccacagccctgtttggccagccccccttcaagaatgtcatcgtgaatggcctggtgctggccagtgatggccagaagatgagcaagaggaagaagaactacccagaccctgtgtccatcatccagaagtacggggctgatgccctgcggctgtacctgatcaacagccctgtggtgcgggcagagaacctgcgcttcaaggaggagggcgtgagagatgtgctgaaggatgtgctgctgccctggtacaatgcctaccgcttcctgatccagaatgtgctgcggctgcagaaggaggaggagattgagttcctgtacaatgaaaatacagtgcgggagagccccaacatcacagaccgctggatcctgtccttcatgcagagcctcatcggcttctttgaaacagagatggccgcctaccgcctgtacacagtggtgccccggctggtgaagtttgtggacatcctgaccaactggtacgtgaggatgaacagaagaaggctgaagggagaaaatggcatggaggactgtgtgatggccctggagaccctcttctctgtgctgctgagcctgtgccgcctgatggccccctacacccccttcctgacagagctgatgtaccagaacctgaaggtgctgattgatcctgtgtctgtgcaggacaaggacaccctgagcatccactacctgatgctgccccgggtgcgggaggagctgattgacaagaagacagagagcgctgtgtcccagatgcagagcgtgattgagctgggccgggtcatccgggacaggaagaccatccccatcaagtaccccctgaaggagatcgtggtgatccaccaggaccctgaggccctgaaggacatcaagagcctggagaagtacatcatcgaggagctgaatgtgaggaaggtgaccctgagcacagacaagaacaagtatggcatccggctgcgggcagagccagaccacatggtgctgggcaagaggctgaagggggccttcaaggctgtgatgaccagcatcaagcagctgagcagcgaggagctggagcagttccagaagacaggcaccatcgtggtggagggccacgagctgcatgatgaggacatccggctgatgtacacctttgaccaggccactggaggaacagcccagtttgaggcccacagtgatgcccaggccctggtgctgctggatgtgaccccagaccagagcatggtggatgagggcatggcccgggaggtgatcaaccgcatccagaagctgaggaagaagtgcaacctggtgcccacagatgagatcaccgtgtactacaaggccaagtctgagggcacctacctgaacagcgtcatcgagagccacacagagttcatcttcaccaccatcaaggcccccctgaagccctaccctgtgagccccagcgacaaggtgctgatccaggagaagacccagctgaagggcagcgagctggagatcaccctgacccggggcagcagcctgcccggccctgcctgtgcctacgtgaacctgaacatctgtgccaacggcagcgagcagggcggcgtgctgctgctggagaaccccaagggggacaaccggctggacctgctgaagctgaagtctgtggtgaccagcatcttcggcgtgaagaacacagagctggccgtgttccatgatgaaacagagatccagaaccagacagacctgctgagcctgagcggcaagaccctgtgtgtgacagctggcagcgcccccagcctcatcaacagcagcagcaccctgctgtgccagtacatcaacctgcagctgctgaatgccaagccccaggagtgcctgatgggcaccgtgggcaccctgctgctggagaaccccctgggccagaatggcctgacccaccagggcctgctgtatgaggccgccaaggtgtttggcctgcggagcaggaagctgaagctgttcctgaatgagacccagacccaggagatcacagaggacatcccctag

SEQ ID NO: 156638 - DNA, 993 bp, synthetic construct
  misc_feature 1..993: note = Description of Artificial Sequence: Synthetic coding sequence
  source 1..993: mol_type = other DNA
atgctgcagcaggtgcctgagaacatcaacttccctgctgaggaggagaagatcctggagttctggacagagttcaactgcttccaggagtgcctgaagcagagcaagcacaagcccaagttcaccttctatgatggccccccatttgccaccggcctgccccactacggccacatcctggccggcaccatcaaggacatcgtgaccaggtatgcccaccagagcggcttccacgtggacagaagatttggctgggactgccacggcctgcctgtggagtatgaaattgacaagaccctgggcatccggggcccagaagatgtggccaagatgggcatcacagagtacaacaaccagtgccgggccatcgtgatgagatacagcgctgagtggaagagcacagtgtcccggctgggccgctggattgactttgacaatgactacaagaccctgtacccccagttcatggagagcgtgtggtgggtgttcaagcagctgtatgacaagggcctggtgtacagaggagtgaaggtgatgcccttcagcacagcctgcaacacccccctgagcaactttgagagccaccagaactacaaggatgtgcaggaccccagcgtgtttgtgaccttccccctggaggaggatgaaacagtgtccctggtggcctggaccaccaccccctggaccctgcccagcaacctggccgtgtgtgtgaaccctgagatgcagtatgtgaagatcaaggatgtggcccggggccgcctgctgatcctgatggaggcccggctgagcgccctgtacaagctggagagtgactatgagatcctggagcgcttccctggggcctacctgaagggcaagaagtaccggcccctgtttgactacttcctgaagtgcaaggaaaatggagccttcaccgtgctggtggacaactacgtgaaggaggaggagggcactggagtggtgcaccaggccccctactttggagcctag

SEQ ID NO: 156639 - DNA, 513 bp, synthetic construct
  misc_feature 1..513: note = Description of Artificial Sequence: Synthetic coding sequence
  source 1..513: mol_type = other DNA
atggccccctacacccccttcctgacagagctgatgtaccagaacctgaaggtgctgattgatcctgtgtctgtgcaggacaaggacaccctgagcatccactacctgatgctgccccgggtgcgggaggagctgattgacaagaagacagagagcgctgtgtcccagatgcagagcgtgattgagctgggccgggtcatccgggacaggaagaccatccccatcaagctgaagggcagcgagctggagatcaccctgacccggggcagcagcctgcccggccctgcctgtgcctacgtgaacctgaacatctgtgccaatggaagtgagcagggcggcgtgctgctgctggagaaccccaagggggacaaccggctggacctgctgaagctgaagtctgtggtgaccagcatctttggagtgaagaacacagagctggccgtgttccatgatgaaacagagatccagaaccagacagacctgctgagcctgagcggcaagaccctgtgctag

SEQ ID NO: 156640 - DNA, 3789 bp, synthetic construct; identical to SEQ ID NO: 156636
  misc_feature 1..3789: note = Description of Artificial Sequence: Synthetic coding sequence
  source 1..3789: mol_type = other DNA

SEQ ID NO: 156641 - DNA, 3459 bp, synthetic construct
  misc_feature 1..3459: note = Description of Artificial Sequence: Synthetic coding sequence
  source 1..3459: mol_type = other DNA
atgggcatcacagagtacaacaaccagtgccgggccatcgtgatgagatacagcgctgagtggaagagcacagtgtcccggctgggccgctggattgactttgacaatgactacaagaccctgtacccccagttcatggagagcgtgtggtgggtgttcaagcagctgtatgacaagggcctggtgtacagaggagtgaaggtgatgcccttcagcacagcctgcaacacccccctgagcaactttgagagccaccagaactacaaggatgtgcaggaccccagcgtgtttgtgaccttccccctggaggaggatgaaacagtgtccctggtggcctggaccaccaccccctggaccctgcccagcaacctggccgtgtgtgtgaaccctgagatgcagtatgtgaagatcaaggatgtggcccggggccgcctgctgatcctgatggaggcccggctgagcgccctgtacaagctggagagtgactatgagatcctggagcgcttccctggggcctacctgaagggcaagaagtaccggcccctgtttgactacttcctgaagtgcaaggaaaatggagccttcaccgtgctggtggacaactacgtgaaggaggaggagggcactggagtggtgcaccaggccccctactttggagctgaggactacagagtgtgcatggacttcaacatcatcaggaaggacagcctgcctgtgtgccctgtggatgccagcggctgcttcaccacagaggtgacagactttgctggccagtatgtgaaggatgctgacaagagcatcatccgcaccctgaaggagcagggccgcctgctggtggccaccaccttcacccacagctaccccttctgctggaggagtgacacccccctcatctacaaggctgtgcccagctggtttgtgcgggtggagaacatggtggaccagctgctgaggaacaatgacctgtgctactgggtgcctgagctggtgcgggagaagagatttggaaactggctgaaggatgcccgggactggaccatcagcaggaaccgctactggggcacccccatccccctgtgggtgtctgatgactttgaggaggtggtgtgcatcggctctgtggccgagctggaggagctgagcggggccaagatcagtgacctgcaccgggagagcgtggaccacctgaccatccccagccgctgtgggaagggcagcctgcaccgcatcagcgaggtgtttgactgctggtttgagagcggctccatgccctatgcccaggtgcactacccctttgagaacaagcgggagtttgaagatgccttccctgctgacttcatcgccgagggcatcgaccagacccggggctggttctacaccctgctggtgctggccacagccctgtttggccagccccccttcaagaatgtcatcgtgaatggcctggtgctggccagtgatggccagaagatgagcaagaggaagaagaactacccagaccctgtgtccatcatccagaagtacggggctgatgccctgcggctgtacctgatcaacagccctgtggtgcgggcagagaacctgcgcttcaaggaggagggcgtgagagatgtgctgaaggatgtgctgctgccctggtacaatgcctaccgcttcctgatccagaatgtgctgcggctgcagaaggaggaggagattgagttcctgtacaatgaaaatacagtgcgggagagccccaacatcacagaccgctggatcctgtccttcatgcagagcctcatcggcttctttgaaacagagatggccgcctaccgcctgtacacagtggtgccccggctggtgaagtttgtggacatcctgaccaactggtacgtgaggatgaacagaagaaggctgaagggagaaaatggcatggaggactgtgtgatggccctggagaccctcttctctgtgctgctgagcctgtgccgcctgatggccccctacacccccttcctgacagagctgatgtaccagaacctgaaggtgctgattgatcctgtgtctgtgcaggacaaggacaccctgagcatccactacctgatgctgccccgggtgcgggaggagctgattgacaagaagacagagagcgctgtgtcccagatgcagagcgtgattgagctgggccgggtcatccgggacaggaagaccatccccatcaagtaccccctgaaggagatcgtggtgatccaccaggaccctgaggccctgaaggacatcaagagcctggagaagtacatcatcgaggagctgaatgtgaggaaggtgaccctgagcacagacaagaacaagtatggcatccggctgcgggcagagccagaccacatggtgctgggcaagaggctgaagggggccttcaaggctgtgatgaccagcatcaagcagctgagcagcgaggagctggagcagttccagaagacaggcaccatcgtggtggagggccacgagctgcatgatgaggacatccggctgatgtacacctttgaccaggccactggaggaacagcccagtttgaggcccacagtgatgcccaggccctggtgctgctggatgtgaccccagaccagagcatggtggatgagggcatggcccgggaggtgatcaaccgcatccagaagctgaggaagaagtgcaacctggtgcccacagatgagatcaccgtgtactacaaggccaagtctgagggcacctacctgaacagcgtcatcgagagccacacagagttcatcttcaccaccatcaaggcccccctgaagccctaccctgtgagccccagcgacaaggtgctgatccaggagaagacccagctgaagggcagcgagctggagatcaccctgacccggggcagcagcctgcccggccctgcctgtgcctacgtgaacctgaacatctgtgccaacggcagcgagcagggcggcgtgctgctgctggagaaccccaagggggacaaccggctggacctgctgaagctgaagtctgtggtgaccagcatcttcggcgtgaagaacacagagctggccgtgttccatgatgaaacagagatccagaaccagacagacctgctgagcctgagcggcaagaccctgtgtgtgacagctggcagcgcccccagcctcatcaacagcagcagcaccctgctgtgccagtacatcaacctgcagctgctgaatgccaagccccaggagtgcctgatgggcaccgtgggcaccctgctgctggagaaccccctgggccagaatggcctgacccaccagggcctgctgtatgaggccgccaaggtgtttggcctgcggagcaggaagctgaagctgttcctgaatgagacccagacccaggagatcacagaggacatccctgtgaagaccctgaacatgaagacagtgtatgtgtctgtgctgcccaccacagctgacttctag

SEQ ID NO: 156642 - DNA, 750 bp, synthetic construct
  misc_feature 1..750: note = Description of Artificial Sequence: Synthetic coding sequence
  source 1..750: mol_type = other DNA
atggccccctacacccccttcctgacagagctgatgtaccagaacctgaaggtgctgattgatcctgtgtctgtgcaggacaaggacaccctgagcatccactacctgatgctgccccgggtgcgggaggagctgattgacaagaagacagagagcgctgtgtcccagatgcagagcgtgattgagctgggccgggtcatccgggacaggaagaccatccccatcaagtaccccctgaaggagatcgtggtgatccaccaggaccctgaggccctgaaggacatcaagagcctggagaagtacatcatcgaggagctgaatgtgaggaaggtgaccctgagcacagacaagaacaagtatggcatccggctgcgggcagagccagaccacatggtgctgggcaagaggctgaagggggccttcaaggctgtgatgaccagcatcaagcagctgagcagcgaggagctggagcagttccagaagacaggcaccatcgtggtggagggccacgagctgcatgatgaggacatccggctgatgtacacctttgaccaggccactggaggaacagcccagtttgaggcccacagtgatgcccaggccctggtgctgctggatgtgaccccagaccagagcatggtggatgagggcatggcccgggaggtgatcaaccgcatccagaagctgaggaagaagtgcaacctggtgcccacagatgagatcaccgtgtactacaaggccaagagctag

SEQ ID NO: 156643 - DNA, 513 bp, synthetic construct; identical to SEQ ID NO: 156639
  misc_feature 1..513: note = Description of Artificial Sequence: Synthetic coding sequence
  source 1..513: mol_type = other DNA

SEQ ID NO: 156644 - DNA, 816 bp, synthetic construct
  misc_feature 1..816: note = Description of Artificial Sequence: Synthetic coding sequence
  source 1..816: mol_type = other DNA
atgatggtgctgctgctgcagctggactgcctgaccatggacatctacctgcgggacaaggacaccctgagcatccactacctgatgctgccccgggtgcgggaggagctgattgacaagaagacagagagcgctgtgtcccagatgcagagcgtgattgagctgggccgggtcatccgggacaggaagaccatccccatcaagctgaagggcagcgagctggagatcaccctgacccggggcagcagcctgcccggccctgcctgtgcctacgtgaacctgaacatctgtgccaatggaagtgagcagggcggcgtgctgctgctggagaaccccaagggggacaaccggctggacctgctgaagctgaagtctgtggtgaccagcatctttggagtgaagaacacagagctggccgtgttccatgatgaaacagagatccagaaccagacagacctgctgagcctgagcggcaagaccctgtgtgtgacagctggcagcgcccccagcctcatcaacagcagcagcaccctgctgtgccagtacatcaacctgcagctgctgaatgccaagccccaggagtgcctgatgggcaccgtgggcaccctgctgctggagaaccccctgggccagaatggcctgacccaccagggcctgctgtatgaagctgccaaggtgtttggcctgcggagcaggaagctgaagctgttcctgaatgagacccagacccaggagatcacagaggacatccctgtgaagaccctgaacatgaagacagtgtatgtgtctgtgctgcccaccacagctgacttctag

SEQ ID NO: 156645 - DNA, 3039 bp, synthetic construct
  misc_feature 1..3039: note = Description of Artificial Sequence: Synthetic coding sequence
  source 1..3039: mol_type = other DNA
atgcgctggggcctgcggccccggggccctggagctgctgccctggccacagcccggagcctgtggggcaccccccggctgccctgcagccctggctggcagggcgccaccaagaggctgctggtgcgctctgtgtctggggccagcaaccaccagcccaacagcaacagcggccgctacagagacacagtgctgctgccccagaccagcttccccatgaagctgctgggccggcagcagcctgacacagagctggagatccagcagaagtgtggcttcagcgagctgtacagctggcagcgggagaggaaggtgaagacagagttctgcctgcatgatggccccccctatgccaatggagacccccacgtgggccacgccctgaacaagatcctgaaggacatcgccaaccgcttccacatgatgaatggcagcaagatccactttgtgcccggctgggactgccacggcctgcccatcgagatcaaggtgctgtctgagctgggccgggaggcccagaacctgagcgccatggagatcaggaagaaggcccggagctttgccaaggccgccatcgagaagcagaagagcgccttcatccgctggggcatcatggctgactggaacaactgctactacacctttgatggcaagtatgaggccaagcagctgcggaccttctaccagatgtatgacaagggcctggtgtaccgcagctacaagcctgtgttctggagccccagcagcaggacagccctggccgaggccgagctggagtacaaccctgagcacgtgagccgcagcatctacgtgaagttccccctgctgaagcccagccccaagctggccagcctgattgatggcagcagccctgtgtccatcctggtgtggaccacccagccctggaccatcccagccaatgaagctgtgtgctacatgcctgagagcaaatatgctgtggtgaagtgcagcaagagcggggacctgtatgtgctggccgctgacaaggtggcctctgtggccagcaccctggagaccacctttgagaccatcagcaccctgtctggagtggacctggagaatggcacctgcagccaccccctcatcccagacaaggccagccccctgctgcctgccaaccacgtgaccatggccaagggcaccggcctggtgcacacagccccagcccacggcatggaggactatggagtggccagccagcacaacctgcccatggactgcctggtggatgaagatggagtcttcacagatgtggccggccctgagctgcagaacaaggctgtgctggaggagggcacagatgtggtgatcaagatgctgcagacagccaagaacctgctgaaggaggagaagctggtgcacagctacccctatgactggaggaccaagaagcctgtggtgatccgggccagcaagcagtggttcatcaacatcacagacatcaagacagctgccaaggagctgctgaagaaggtgaagttcatccctggcagcgccctgaatggcatggtggagatgatggaccggcggccctactggtgcatcagccggcagagggtgtggggcgtgcccatccctgtgttccaccacaagaccaaggatgagtacctgatcaacagccagaccacagagcacatcgtgaagctggtggagcagcacggcagtgacatctggtggaccctgcccccagagcagctgctgcccaaggaggtgctgtctgaggtgggcggcccagatgccctggagtatgtgcccggccaggacatcctggacatctggtttgattctggcacctcctggagctatgtgctgcccggccctgaccagagagctgacctgtacctggagggcaaggaccagctgggcggctggttccagagcagcctgctgacctctgtggccgccaggaagagggccccctacaagacagtcatcgtgcacggcttcaccctgggggagaagggggagaagatgagcaagagcctgggcaatgtcatccacccagatgtggtggtgaatggaggccaggaccagagcaaggagcccccctatggagcagatgtgctgcgctggtgggtggccgacagcaatgtgttcacagaggtggccatcggccccagcgtgctgaatgctgccagagatgacatcagcaagctgaggaacaccctgcgcttcctgctgggcaatgtggccgacttcaaccctgagacagacagcatccctgtgaatgacatgtatgtgattgaccagtacatgctgcacctgctgcaggacctggccaacaagatcacagagctgtacaagcagtatgactttgggaaggtggtgcggctgctgcggaccttctacacccgggagctgagcaacttctacttcagcatcatcaaggaccggctgtactgtgagaaggaaaatgaccccaagaggaggagctgccagacagccctggtggagatcctggatgtgattgtgcgcagctttgcccccatcctgccccacctggccgaggaggtgttccagcacatcccctacatcaaggagcccaagtctgtgttcagaacaggctggatcagcaccagcagcatctggaagaagccaggcctggaggaggccgtggagagcgcctgtgccatgagggacagcttcctgggcagcatccctgggaagaatgctgctgagtacaaggtgatcaccgtgattgagcccggcctgctgtttgagatcatcgagatgctgcagagcgaggagaccagcagcaccagccagctgaatgagctgatgatggccagcgagagcaccctgctggcccaggagccccgggagatgacagcagatgtgattgagctgaagggcaagttcctgatcaacctggagggcggggacatccgggaggagagcagctacaaggtgattgtgatgcccaccaccaaggagaagtgcccccgctgctggaagtacacagctgagagcagtgacaccctgtgcccccgctgtgccgaggtggtgtctgggaagtag

SEQ ID NO: 156646 - DNA, 2823 bp, synthetic construct
  misc_feature 1..2823: note = Description of Artificial Sequence: Synthetic coding sequence
  source 1..2823: mol_type = other DNA
atgaagctgctgggccggcagcagcctgacacagagctggagatccagcagaagtgtggcttcagcgagctgtacagctggcagcgggagaggaaggtgaagacagagttctgcctgcatgatggccccccctatgccaatggagacccccacgtgggccacgccctgaacaagatcctgaaggacatcgccaaccgcttccacatgatgaatggcagcaagatccactttgtgcccggctgggactgccacggcctgcccatcgagatcaaggtgctgtctgagctgggccgggaggcccagaacctgagcgccatggagatcaggaagaaggcccggagctttgccaaggccgccatcgagaagcagaagagcgccttcatccgctggggcatcatggctgactggaacaactgctactacacctttgatggcaagtatgaggccaagcagctgcggaccttctaccagatgtatgacaagggcctggtgtaccgcagctacaagcctgtgttctggagccccagcagcaggacagccctggccgaggccgagctggagtacaaccctgagcacgtgagccgcagcatctacgtgaagttccccctgctgaagcccagccccaagctggccagcctgattgatggcagcagccctgtgtccatcctggtgtggaccacccagccctggaccatcccagccaatgaagctgtgtgctacatgcctgagagcaaatatgctgtggtgaagtgcagcaagagcggggacctgtatgtgctggccgctgacaaggtggcctctgtggccagcaccctggagaccacctttgagaccatcagcaccctgtctggagtggacctggagaatggcacctgcagccaccccctcatcccagacaaggccagccccctgctgcctgccaaccacgtgaccatggccaagggcaccggcctggtgcacacagccccagcccacggcatggaggactatggagtggccagccagcacaacctgcccatggactgcctggtggatgaagatggagtcttcacagatgtggccggccctgagctgcagaacaaggctgtgctggaggagggcacagatgtggtgatcaagatgctgcagacagccaagaacctgctgaaggaggagaagctggtgcacagctacccctatgactggaggaccaagaagcctgtggtgatccgggccagcaagcagtggttcatcaacatcacagacatcaagacagctgccaaggagctgctgaagaaggtgaagttcatccctggcagcgccctgaatggcatggtggagatgatggaccggcggccctactggtgcatcagccggcagagggtgtggggcgtgcccatccctgtgttccaccacaagaccaaggatgagtacctgatcaacagccagaccacagagcacatcgtgaagctggtggagcagcacggcagtgacatctggtggaccctgcccccagagcagctgctgcccaaggaggtgctgtctgaggtgggcggcccagatgccctggagtatgtgcccggccaggacatcctggacatctggtttgattctggcacctcctggagctatgtgctgcccggccctgaccagagagctgacctgtacctggagggcaaggaccagctgggcggctggttccagagcagcctgctgacctctgtggccgccaggaagagggccccctacaagacagtcatcgtgcacggcttcaccctgggggagaagggggagaagatgagcaagagcctgggcaatgtcatccacccagatgtggtggtgaatggaggccaggaccagagcaaggagcccccctatggagcagatgtgctgcgctggtgggtggccgacagcaatgtgttcacagaggtggccatcggccccagcgtgctgaatgctgccagagatgacatcagcaagctgaggaacaccctgcgcttcctgctgggcaatgtggccgacttcaaccctgagacagacagcatccctgtgaatgacatgtatgtgattgaccagtacatgctgcacctgctgcaggacctggccaacaagatcacagagctgtacaagcagtatgactttgggaaggtggtgcggctgctgcggaccttctacacccgggagctgagcaacttctacttcagcatcatcaaggaccggctgtactgtgagaaggaaaatgaccccaagaggaggagctgccagacagccctggtggagatcctggatgtgattgtgcgcagctttgcccccatcctgccccacctggccgaggaggtgttccagcacatcccctacatcaaggagcccaagtctgtgttcagaacaggctggatcagcaccagcagcatctggaagaagccaggcctggaggaggccgtggagagcgcctgtgccatgagggacagcttcctgggcagcatccctgggaagaatgctgctgagtacaaggtgatcaccgtgattgagcccggcctgctgtttgagatcatcgagatgctgcagagcgaggagaccagcagcaccagccagctgaatgagctgatgatggccagcgagagcaccctgctggcccaggagccccgggagatgacagcagatgtgattgagctgaagggcaagttcctgatcaacctggagggcggggacatccgggaggagagcagctacaaggtgattgtgatgcccaccaccaaggagaagtgcccccgctgctggaagtacacagctgagagcagtgacaccctgtgcccccgctgtgccgaggtggtgtctgggaagtag

SEQ ID NO: 156647 - DNA, 855 bp, synthetic construct
  misc_feature 1..855: note = Description of Artificial Sequence: Synthetic coding sequence
  source 1..855: mol_type = other DNA
atggccggctgtgccgcccgggcccctcctggcagcgaggcccggctgagcctggccaccttcctgctgggcgcctctgtgctggccctgcccctgctgacccgggccggcctgcagggccgcacaggcctggccctgtatgtggccggcctgaatgccctgctgctgctgctgtacagaccaccccgctaccagatcgccatccgggcctgcttcctgggctttgtgtttggctgcggcaccctgctgtccttcagccagagctcctggagccacttcggctggtacatgtgcagcctgagcctcttccactacagcgagtacctggtgacagctgtgaacaaccccaagagcctgagcctggacagcttcctgctgaaccacagcctggagtacacagtggccgccctgagctcctggctggagttcaccctggagaacatcttctggccagagctgaagcagatcacctggctgtctgtgacaggcctgctgatggtggtgtttggagaatgtctgaggaaggccgccatgttcaccgctggcagcaacttcaaccacgtggtgcagaatgagaagagtgacacccacaccctggtgaccagcggcgtgtatgcctggttccgccaccccagctatgtgggctggttctactggagcatcggcacccaggtgatgctgtgcaaccccatctgtggggtgtcctatgccctgactgtgtggaggttcttccgggacagaacagaggaggaggagatcagcctcatccacttctttggagaggagtacctggagtacaagaagagggtgcccaccggcctgcccttcatcaagggcgtgaaggtggacctgtag

SEQ ID NO: 156648 - DNA, 351 bp, synthetic construct
  misc_feature 1..351: note = Description of Artificial Sequence: Synthetic coding sequence
  source 1..351: mol_type = other DNA
atggccggctgtgccgcccgggcccctcctggcagcgaggcccggctgagcctggccaccttcctgctgggcgcctctgtgctggccctgcccctgctgacccgggccggcctgcagggccgcacaggcctggccctgtatgtggccggcctgaatgccctgctgctgctgctgtacagaccaccccgctaccagatcgccatccgggcctgcttcctgggctttgtgtttggctgcggcaccctgctgtccttcagccagagctcctggagccacttcggctggagccacctggtgcacccccacagccactgccgcatcttcccctacaccatgatctctgtgccctag

SEQ ID NO: 156649 - DNA, 567 bp, synthetic construct
  misc_feature 1..567: note = Description of Artificial Sequence: Synthetic coding sequence
  source 1..567: mol_type = other DNA
atgtgcagcctgagcctcttccactacagcgagtacctggtgacagctgtgaacaaccccaagagcctgagcctggacagcttcctgctgaaccacagcctggagtacacagtggccgccctgagctcctggctggagttcaccctggagaacatcttctggccagagctgaagcagatcacctggctgtctgtgacaggcctgctgatggtggtgtttggagaatgtctgaggaaggccgccatgttcaccgctggcagcaacttcaaccacgtggtgcagaatgagaagagtgacacccacaccctggtgaccagcggcgtgtatgcctggttccgccaccccagctatgtgggctggttctactggagcatcggcacccaggtgatgctgtgcaaccccatctgtggggtgtcctatgccctgactgtgtggaggttcttccgggacagaacagaggaggaggagatcagcctcatccacttctttggagaggagtacctggagtacaagaagagggtgcccaccggcctgcccttcatcaagggcgtgaaggtggacctgtag

SEQ ID NO: 156650 - DNA, 1272 bp, synthetic construct
  misc_feature 1..1272: note = Description of Artificial Sequence: Synthetic coding sequence
  source 1..1272: mol_type = other DNA
atggccacagccacccggctgctgggctggagggtggcctcctggaggctgcggccccccctggccggctttgtgtcccagagggcccacagcctgctgcctgtggatgatgccatcaatggcctgtctgaggagcagaggcagctgcggcagaccatggccaagttcctgcaggagcacctggcccccaaggcccaggagattgacaggagcaatgagttcaagaacctgcgggagttctggaagcagctgggcaacctgggcgtgctgggcatcacagcccctgtgcagtatggaggcagcggcctgggctacctggagcacgtgctggtgatggaggagatcagccgggccagcggggctgtgggcctgtcctatggagcccacagcaacctgtgcatcaaccagctggtgagaaatggaaatgaggcccagaaggagaagtacctgcccaagctgatctctggagagtacatcggggccctggccatgtctgagcccaatgccggcagtgatgtggtgtccatgaagctgaaggccgagaagaagggcaaccactacatcctgaatggaaacaagttctggatcaccaacggcccagatgctgatgtgctgattgtgtatgccaagacagacctggccgctgtgcctgccagccggggcatcacagccttcatcgtggagaagggcatgcctggcttcagcaccagcaagaagctggacaagctgggcatgaggggcagcaacacctgtgagctgatctttgaggactgcaagatcccagctgccaacatcctgggccatgaaaataaaggagtgtatgtgctgatgagcggcctggacctggagcggctggtgctggccggcggccccctgggcctgatgcaggccgtgctggaccacaccatcccctacctgcacgtgcgggaggccttcggccagaagattggccacttccagctgatgcagggcaagatggctgacatgtacacccggctgatggcctgccggcagtatgtgtacaacgtggccaaggcctgtgatgagggccactgcacagccaaggactgtgccggggtcatcctgtacagcgcagaatgtgccacccaggtggccctggatggcatccagtgctttggaggaaatggctacatcaatgacttccccatgggccgcttcctgagagatgccaagctgtatgagatcggggccggcaccagcgaggtgcggcggctggtgattggccgggccttcaatgctgacttccactag

SEQ ID NO: 156651 - DNA, 1191 bp, synthetic construct
  misc_feature 1..1191: note = Description of Artificial Sequence: Synthetic coding sequence
  source 1..1191: mol_type = other DNA
atggccgagatggccacagccacccggctgctgggctggagggtggcctcctggaggctgcggccccccctggccggctttgtgtcccagagggcccacagcctgctgcctgtggatgatgccatcaatggcctgtctgaggagcagaggcaggagttctggaagcagctgggcaacctgggcgtgctgggcatcacagcccctgtgcagtatggaggcagcggcctgggctacctggagcacgtgctggtgatggaggagatcagccgggccagcggggctgtgggcctgtcctatggagcccacagcaacctgtgcatcaaccagctggtgagaaatggaaatgaggcccagaaggagaagtacctgcccaagctgatcagcggggagtacatcggggccctggccatgtctgagcccaatgccggcagtgatgtggtgtccatgaagctgaaggccgagaagaagggcaaccactacatcctgaatggaaacaagttctggatcaccaatggaccagatgctgatgtgctgattgtgtatgccaagacagacctggccgctgtgcctgccagccggggcatcacagccttcatcgtggagaagggcatgcctggcttcagcaccagcaagaagctggacaagctgggcatgaggggcagcaacacctgtgagctgatctttgaggactgcaagatcccagctgccaacatcctgggccacgagaacaagggcgtgtatgtgctgatgagcggcctggacctggagcggctggtgctggccggcggccccctgggcctgatgcaggccgtgctggaccacaccatcccctacctgcacgtgcgggaggccttcggccagaagattggccacttccagctgatgcagggcaagatggctgacatgtacacccggctgatggcctgccggcagtatgtgtacaacgtggccaaggcctgtgatgagggccactgcacagccaaggactgtgccggggtcatcctgtacagcgcagaatgtgccacccaggtggccctggatggcatccagtgcttcggcggcaatggctacatcaatgacttccccatgggccgcttcctgagagatgccaagctgtatgaaattggagctggcaccagcgaggtgcggcggctggtgattggccgggccttcaatgctgacttccactag

SEQ ID NO: 156652 - DNA, 1281 bp, synthetic construct
  misc_feature 1..1281: note = Description of Artificial Sequence: Synthetic coding sequence
  source 1..1281: mol_type = other DNA
atggccgagatggccacagccacccggctgctgggctggagggtggcctcctggaggctgcggccccccctggccggctttgtgtcccagagggcccacagcctgctgcctgtggatgatgccatcaatggcctgtctgaggagcagaggcagctgcggcagaccatggccaagttcctgcaggagcacctggcccccaaggcccaggagattgacaggagcaatgagttcaagaacctgcgggagttctggaagcagctgggcaacctgggcgtgctgggcatcacagcccctgtgcagtatggaggcagcggcctgggctacctggagcacgtgctggtgatggaggagatcagccgggccagcggggctgtgggcctgtcctatggagcccacagcaacctgtgcatcaaccagctggtgagaaatggaaatgaggcccagaaggagaagtacctgcccaagctgatcagcggggagtacatcggggccctggccatgtctgagcccaatgccggcagtgatgtggtgtccatgaagctgaaggccgagaagaagggcaaccactacatcctgaatggaaacaagttctggatcaccaatggaccagatgctgatgtgctgattgtgtatgccaagacagacctggccgctgtgcctgccagccggggcatcacagccttcatcgtggagaagggcatgcctggcttcagcaccagcaagaagctggacaagctgggcatgaggggcagcaacacctgtgagctgatctttgaggactgcaagatcccagctgccaacatcctgggccacgagaacaagggcgtgtatgtgctgatgagcggcctggacctggagcggctggtgctggccggcggccccctgggcctgatgcaggccgtgctggaccacaccatcccctacctgcacgtgcgggaggccttcggccagaagattggccacttccagctgatgcagggcaagatggctgacatgtacacccggctgatggcctgccggcagtatgtgtacaacgtggccaaggcctgtgatgagggccactgcacagccaaggactgtgccggggtcatcctgtacagcgcagaatgtgccacccaggtggccctggatggcatccagtgcttcggcggcaatggctacatcaatgacttccccatgggccgcttcctgagagatgccaagctgtatgaaattggagctggcaccagcgaggtgcggcggctggtgattggccgggccttcaatgctgacttccactag

SEQ ID NO: 156653 - DNA, 1716 bp, synthetic construct
  misc_feature 1..1716: note = Description of Artificial Sequence: Synthetic coding sequence
  source 1..1716: mol_type = other DNA
atgagggccctgcgggaccgggccggcctgctgctgtgtgtgctgctgctggccgccctgctggaggccgccctgggcctgcctgtgaagaagccccggctgcggggccccaggcctggcagcctgacccggctggccgaggtgtctgccagcccagacccccggcccctgaaggaggaggaggaggcccccctgctgcccaggacccacctgcaggccgagccccaccagcacggctgctggacagtgacagagcctgctgccatgaccccaggaaatgccaccccacccaggaccccagaggtgacccccctgcggctggagctgcagaagctgcccggcctggccaacaccaccctgagcacccccaacccagacacccaggccagcgccagcccagacccccggcccctgcgggaggaggaggaggcccggctgctgcccaggacccacctgcaggccgagctgcaccagcacggctgctggacagtgacagagcctgctgccctgaccccaggaaatgccaccccacccaggacccaggaggtgacccccctgctgctggagctgcagaagctgcctgagctggtgcacgccaccctgagcacccccaacccagacaaccaggtgaccatcaaggtggtggaggacccccaggccgaggtgtccattgacctgctggccgagcccagcaaccccccaccccaggacaccctgtcctggctgcctgccctgtggagcttcctgtggggagactacaagggggaggagaaggaccgggcccctggagagaagggggaggagaaggaggaggatgaggactaccccagcgaggacatcgagggggaggaccaggaggacaaggaggaggatgaggaggagcaggccctgtggttcaacggcaccacagacaactgggaccagggctggctggcccctggggactgggtgttcaaggacagcgtgtcctatgactatgagccccagaaggagtggagcccctggagcccctgcagcggcaactgcagcacaggcaagcagcagaggacccggccctgtggctacggctgcacagccacagagaccaggacctgtgacctgcccagctgccctggaacagaggacaaggacaccctgggcctgcccagcgaggagtggaagctgctggccagaaatgccacagacatgcatgaccaggatgtggacagctgtgagaagtggctgaactgcaagagtgacttcctgatcaagtacctgagccagatgctgcgggacctgcccagctgcccctgtgcctaccccctggaggccatggacagccctgtgtccctgcaggatgagcaccagggccgctccttccgctggagagatgccagcggcccccgggagcggctggacatctaccagcccacagcccgcttctgcctgcgctccatgctgtctggagagagcagcaccctggccgcccagcactgctgctatgatgaggacagccggctgctgacccggggcaaaggagctggcatgcccaacctgatcagcacagacttcagccccaagctgcacttcaagtttgacaccaccccctggatcctgtgcaagggggactggagccggctgcatgctgtgctgccccccaacaacggccgggcctgcacagacaaccccctggaggaggagtacctggcccagctgcaggaggccaaggagtactag

SEQ ID NO: 156654 - DNA, 1452 bp, synthetic construct
  misc_feature 1..1452: note = Description of Artificial Sequence: Synthetic coding sequence
  source 1..1452: mol_type = other DNA
atgaccccaggaaatgccaccccacccaggaccccagaggtgacccccctgcggctggagctgcagaagctgcccggcctggccaacaccaccctgagcacccccaacccagacacccaggccagcgccagcccagacccccggcccctgcgggaggaggaggaggcccggctgctgcccaggacccacctgcaggccgagctgcaccagcacggctgctggacagtgacagagcctgctgccctgaccccaggaaatgccaccccacccaggacccaggaggtgacccccctgctgctggagctgcagaagctgcctgagctggtgcacgccaccctgagcacccccaacccagacaaccaggtgaccatcaaggtggtggaggacccccaggccgaggtgtccattgacctgctggccgagcccagcaaccccccaccccaggacaccctgtcctggctgcctgccctgtggagcttcctgtggggagactacaagggggaggagaaggaccgggcccctggagagaagggggaggagaaggaggaggatgaggactaccccagcgaggacatcgagggggaggaccaggaggacaaggaggaggatgaggaggagcaggccctgtggttcaacggcaccacagacaactgggaccagggctggctggcccctggggactgggtgttcaaggacagcgtgtcctatgactatgagccccagaaggagtggagcccctggagcccctgcagcggcaactgcagcacaggcaagcagcagaggacccggccctgtggctacggctgcacagccacagagaccaggacctgtgacctgcccagctgccctggaacagaggacaaggacaccctgggcctgcccagcgaggagtggaagctgctggccagaaatgccacagacatgcatgaccaggatgtggacagctgtgagaagtggctgaactgcaagagtgacttcctgatcaagtacctgagccagatgctgcgggacctgcccagctgcccctgtgcctaccccctggaggccatggacagccctgtgtccctgcaggatgagcaccagggccgctccttccgctggagagatgccagcggcccccgggagcggctggacatctaccagcccacagcccgcttctgcctgcgctccatgctgtctggagagagcagcaccctggccgcccagcactgctgctatgatgaggacagccggctgctgacccggggcaaaggagctggcatgcccaacctgatcagcacagacttcagccccaagctgcacttcaagtttgacaccaccccctggatcctgtgcaagggggactggagccggctgcatgctgtgctgccccccaacaacggccgggcctgcacagacaaccccctggaggaggagtacctggcccagctgcaggaggccaaggagtactag

SEQ ID NO: 156655 - DNA, 1473 bp, synthetic construct
  misc_feature 1..1473: note = Description of Artificial Sequence: Synthetic coding sequence
  source 1..1473: mol_type = other DNA
atgagggccctgcgggaccgggccggcctgctgctgtgtgtgctgctgctggccgccctgctggaggccgccctgggcctgcctgtgaagaagccccggctgcggggccccaggcctggcagcctgacccggctggccgaggtgtctgccagcccagacccccggcccctgaaggaggaggaggaggcccccctgctgcccaggacccacctgcaggccgagccccaccagcacggctgctggacagtgacagagcctgctgccatgaccccaggaaatgccaccccacccaggaccccagaggtgacccccctgcggctggagctgcagaagctgcccggcctggccaacaccaccctgagcacccccaacccagacacccaggtgaccatcaaggtggtggaggacccccaggccgaggtgtccattgacctgctggccgagcccagcaaccccccaccccaggacaccctgtcctggctgcctgccctgtggagcttcctgtggggagactacaagggggaggagaaggaccgggcccctggagagaagggggaggagaaggaggaggatgaggactaccccagtgaagatattgaaggagaggaccaggaggacaaggaggaggatgaggaggagcaggccctgtggttcaacggcaccacagacaactgggaccagggctggctggcccctggggactgggtgttcaaggacagcgtgtcctatgactatgagccccagaaggagtggagcccctggagcccctgcagcggcaactgcagcacaggcaagcagcagaggacccggccctgtggctacggctgcacagccacagagaccaggacctgtgacctgcccagctgccccggcacagaggacaaggacaccctgggcctgcccagcgaggagtggaagctgctggccagaaatgccacagacatgcatgaccaggatgtggacagctgtgagaagtggctgaactgcaagagtgacttcctgatcaagtacctgagccagatgctgcgggacctgcccagctgcccctgtgcctaccccctggaggccatggacagccctgtgtccctgcaggatgagcaccagggccgctccttccgctggagagatgccagcggcccccgggagcggctggacatctaccagcccacagcccgcttctgcctgcgctccatgctgagcggggagagcagcaccctggccgcccagcactgctgctatgatgaggacagccggctgctgacccggggcaagggggccggcatgcccaacctgatcagcacagacttcagccccaagctgcacttcaagtttgacaccaccccctggatcctgtgcaagggggactggagccggctgcatgctgtgctgccccccaacaacggccgggcctgcacagacaaccccctggaggaggagtacctggcccagctgcaggaggccaaggagtactag

SEQ ID NO: 156656 - DNA, 1473 bp, synthetic construct
  misc_feature 1..1473: note = Description of Artificial Sequence: Synthetic coding sequence
  source 1..1473: mol_type = other DNA
atgagggccctgcgggaccgggccggcctgctgctgtgtgtgctgctgctggccgccctgctggaggccgccctgggcctgcctgtgaagaagccccggctgcggggccccaggcctggcagcctgacccggctggccgaggccagcgccagcccagacccccggcccctgcgggaggaggaggaggcccggctgctgcccaggacccacctgcaggccgagctgcaccagcacggctgctggacagtgacagagcctgctgccctgaccccaggaaatgccaccccacccaggacccaggaggtgacccccctgctgctggagctgcagaagctgcctgagctggtgcacgccaccctgagcacccccaacccagacaaccaggtgaccatcaaggtggtggaggacccccaggccgaggtgtccattgacctgctggccgagcccagcaaccccccaccccaggacaccctgtcctggctgcctgccctgtggagcttcctgtggggagactacaagggggaggagaaggaccgggcccctggagagaagggggaggagaaggaggaggatgaggactaccccagtgaagatattgaaggagaggaccaggaggacaaggaggaggatgaggaggagcaggccctgtggttcaacggcaccacagacaactgggaccagggctggctggcccctggggactgggtgttcaaggacagcgtgtcctatgactatgagccccagaaggagtggagcccctggagcccctgcagcggcaactgcagcacaggcaagcagcagaggacccggccctgtggctacggctgcacagccacagagaccaggacctgtgacctgcccagctgccccggcacagaggacaaggacaccctgggcctgcccagcgaggagtggaagctgctggccagaaatgccacagacatgcatgaccaggatgtggacagctgtgagaagtggctgaactgcaagagtgacttcctgatcaagtacctgagccagatgctgcgggacctgcccagctgcccctgtgcctaccccctggaggccatggacagccctgtgtccctgcaggatgagcaccagggccgctccttccgctggagagatgccagcggcccccgggagcggctggacatctaccagcccacagcccgcttctgcctgcgctccatgctgagcggggagagcagcaccctggccgcccagcactgctgctatgatgaggacagccggctgctgacccggggcaagggggccggcatgcccaacctgatcagcacagacttcagccccaagctgcacttcaagtttgacaccaccccctggatcctgtgcaagggggactggagccggctgcatgctgtgctgccccccaacaacggccgggcctgcacagacaaccccctggaggaggagtacctggcccagctgcaggaggccaaggagtactag

SEQ ID NO: 156657 - DNA, 879 bp, synthetic construct
  misc_feature 1..879: note = Description of Artificial Sequence: Synthetic coding sequence
  source 1..879: mol_type = other DNA
atgagggccctgcgggaccgggccggcctgctgctgtgtgtgctgctgctggccgccctgctggaggccgccctgggcctgcctgtgaagaagccccggctgcggggccccaggcctggcagcctgacccggctggccgaggtgtctgccagcccagacccccggcccctgaaggaggaggaggaggcccccctgctgcccaggacccacctgcaggccgagccccaccagcacggctgctggacagtgacagagcctgctgccatgaccccaggaaatgccaccccacccaggaccccagaggtgacccccctgcggctggagctgcagaagctgcccggcctggccaacaccaccctgagcacccccaacccagacacccaggccagcgccagcccagacccccggcccctgcgggaggaggaggaggcccggctgctgcccaggacccacctgcaggccgagctgcaccagcacggctgctggacagtgacagagcctgctgccctgaccccaggaaatgccaccccacccaggacccaggaggtgacccccctgctgctggagctgcagaagctgcctgagctggtgcacgccaccctgagcacccccaacccagacaaccagaccatgagcctgcggcgcagcggcgtgcccggcctgcctgctgtgggcacagctgccctggccagcagccggggcctgggccctgtggccatggccgccctgccccccaggcctgtgcctgtgacctgcccccctgtgctggccctgcggaccaggaccccctgggccagccctgtgcgcagcggcagctcctggccagccatgctgcggacctgcatgatcaagatgtggacagctgtgcgctctggatag

SEQ ID NO: 156658 - DNA, 924 bp, synthetic construct
  misc_feature 1..924: note = Description of Artificial Sequence: Synthetic coding sequence
  source 1..924: mol_type = other DNA
atggccagaaatgctgagaaggccatgacagccctggcccgcttccggcaggcccagctggaggagggcaaggtgaaggagcggcggcccttcctggcctctgaatgtacagagctgcccaaggccgagaagtggaggcggcagatcatcggggagatcagcaagaaggtggcccagatccagaatgccggcctgggggagttccgcatccgggacctgaatgatgagatcaacaagctgctgcgggagaagggccactgggaggtgcgcatcaaggagctgggcggccctgactatggcaaggtgggccccaagatgctggaccacgagggcaaggaggtgcccggcaacagaggctacaagtactttggagctgccaaggacctgcccggggtgcgggagctgtttgagaaggagcggcaggtgcgctggctgatgcctgtgatcccagccctgtgggaggccgaggccggcggcagccaggccctgcccccacccaggaagaccagggctgagctgatgaaggccatcgactttgagtactacggctacctggatgaagatgatggagtcatcgtgcccctggagcaggagtatgagaagaagctgcgggcagagctggtggagaagtggaaggccgagcgggaggcccggctggcccggggggagaaggaggaggaggaggaggaggaggaggagatcaacatctatgctgtgacagaggaggagagtgatgaggagggcagccaggagaagggaggagatgacagccagcagaagttcatcgcccacgtgcctgtgcccagccagcaggagattgaggaggccctggtgcggaggaagaagatggagctgctgcagaagtatgccagcgagaccctgcaggcccagagcgaggaggcccggcggctgctgggctactag

SEQ ID NO: 156659 - DNA, 858 bp, synthetic construct
  misc_feature 1..858: note = Description of Artificial Sequence: Synthetic coding sequence
  source 1..858: mol_type = other DNA
atggccagaaatgctgagaaggccatgacagccctggcccgcttccggcaggcccagctggaggagggcaaggtgaaggagcggcggcccttcctggcctctgaatgtacagagctgcccaaggccgagaagtggaggcggcagatcatcggggagatcagcaagaaggtggcccagatccagaatgccggcctgggggagttccgcatccgggacctgaatgatgagatcaacaagctgctgcgggagaagggccactgggaggtgcgcatcaaggagctgggcggccctgactatggcaaggtgggccccaagatgctggaccacgagggcaaggaggtgcccggcaacagaggctacaagtactttggagctgccaaggacctgcccggggtgcgggagctgtttgagaaggagcccctgcccccacccaggaagaccagggctgagctgatgaaggccatcgactttgagtactacggctacctggatgaagatgatggagtcatcgtgcccctggagcaggagtatgagaagaagctgcgggcagagctggtggagaagtggaaggccgagcgggaggcccggctggcccggggggagaaggaggaggaggaggaggaggaggaggagatcaacatctatgctgtgacagaggaggagagtgatgaggagggcagccaggagaagggaggagatgacagccagcagaagttcatcgcccacgtgcctgtgcccagccagcaggagattgaggaggccctggtgcggaggaagaagatggagctgctgcagaagtatgccagcgagaccctgcaggcccagagcgaggaggcccggcggctgctgggctactag

SEQ ID NO: 156660 - DNA, 2712 bp, synthetic construct
  misc_feature 1..2712: note = Description of Artificial Sequence: Synthetic coding sequence
  source 1..2712: mol_type = other DNA
atgtctgacagcggcagccagctgggctccatgggcagcctgaccatgaagagccagctgcagatcaccgtcatcagcgccaagctgaaggagaacaagaagaactggtttggccccagcccctacgtggaggtgacagtggatggccagagcaagaagacagagaagtgcaacaacaccaacagccccaagtggaagcagcccctgaccgtcatcgtgacccctgtgtccaagctgcacttccgggtgtggagccaccagaccctgaagagtgatgtgctgctgggcacagctgccctggacatctatgagaccctgaagagcaacaacatgaagctggaggaggtggtggtgaccctgcagctgggcggggacaaggagcccacagagaccatcggggacctgagcatctgcctggatggcctgcagctggagagcgaggtggtgaccaatggagagaccacctgcagtgaaaatggagtgtccctgtgcctgccccggctggagtgcaacagcgccatcagcgcccactgcaacctgtgcctgcccggcctgagtgacagccccatcagcgccagccgggtggccggcttcaccggggccagccagaatgatgatggcagccgcagcaaggatgagaccagggtgtccaccaatggaagtgatgatcctgaagatgctggagctggagaaaatagaagagtgtctggcaacaacagccccagcctgagcaatggaggcttcaagcccagcaggcctccccggcccagcaggcctcctccacccaccccaagaagacctgcctctgtgaatggcagccccagcgccaccagcgagagtgatggcagcagcacaggcagcctgccccccaccaacaccaacaccaacaccagcgagggcgccaccagcggcctcatcatccccctgaccatcagcggcggcagcggcccccggcccctgaaccctgtgacccaggcccccctgcccccaggctgggagcagagggtggaccagcacggccgggtgtactacgtggaccacgtggagaagaggaccacctgggacaggcctgagcccctgcccccaggctgggagcggcgggtggacaacatgggccgcatctactacgtggaccacttcaccaggaccaccacctggcagaggcccaccctggagagcgtgagaaattatgagcagtggcagctgcagaggagccagctgcagggcgccatgcagcagttcaaccagcgcttcatctacggcaaccaggacctgtttgccaccagccagagcaaggagtttgaccccctgggccccctgcccccaggctgggagaagaggacagacagcaatggccgggtgtactttgtgaaccacaacacccgcatcacccagtgggaggaccccaggagccagggccagctgaatgagaagcccctgcctgagggctgggagatgaggttcaccgtggatggcatcccctactttgtggaccacaacagaaggaccaccacctacatcgaccccaggacaggcaagagcgccctggacaatggcccccagatcgcctacgtgcgggacttcaaggccaaggtgcagtacttccgcttctggtgccagcagctggccatgccccagcacatcaagatcaccgtgaccaggaagaccctgtttgaagattccttccagcagatcatgtccttcagcccccaggacctgcggcggcggctgtgggtgatcttccctggagaggagggcctggactatggaggagtggcccgggagtggttcttcctgctgagccatgaggtgctgaaccccatgtactgcctgtttgaatatgccggcaaggacaactactgcctgcagatcaacccagccagctacatcaacccagaccacctgaagtacttccgcttcatcggccgcttcatcgccatggccctcttccacggcaagttcatcgacaccggcttcagcctgcccttctacaagaggatcctgaacaagcctgtgggcctgaaggacctggagagcattgatcctgagttctacaacagcctcatctgggtgaaggagaacaacatcgaggagtgtgacctggagatgtacttctctgtggacaaggagatcctgggggagatcaagagccatgacctgaagcccaatggaggcaacatcctggtgacagaggagaacaaggaggagtacatccgcatggtggccgagtggaggctgagcagaggagtggaggagcagacccaggccttctttgagggcttcaatgagatcctgccccagcagtacctgcagtactttgatgccaaggagctggaggtgctgctgtgtggcatgcaggagattgacctgaatgactggcagagacatgccatctaccgccactacgcccggaccagcaagcagatcatgtggttctggcagtttgtgaaggagattgacaatgagaagaggatgaggctgctgcagtttgtgacaggcacctgccgcctgcctgtgggcggctttgctgacctgatgggcagcaatggcccccagaagttctgcatcgagaaggtgggcaaggagaactggctgcccaggagccacacctgcttcaaccggctggacctgcccccctacaagagctatgagcagctgaaggagaagctgctgtttgccatcgaggagacagagggcttcggccaggagtag

SEQ ID NO: 156661 - DNA, 2589 bp, synthetic construct
  misc_feature 1..2589: note = Description of Artificial Sequence: Synthetic coding sequence
  source 1..2589: mol_type = other DNA
atgtctgacagcggcagccagctgggctccatgggcagcctgaccatgaagagccagctgcagatcaccgtcatcagcgccaagctgaaggagaacaagaagaactggtttggccccagcccctacgtggaggtgacagtggatggccagagcaagaagacagagaagtgcaacaacaccaacagccccaagtggaagcagcccctgaccgtcatcgtgacccctgtgtccaagctgcacttccgggtgtggagccaccagaccctgaagagtgatgtgctgctgggcacagctgccctggacatctatgagaccctgaagagcaacaacatgaagctggaggaggtggtggtgaccctgcagctgggcggggacaaggagcccacagagaccatcggggacctgagcatctgcctggatggcctgcagctggagagcgaggtggtgaccaatggagagaccacctgcagcgagagcgccagccagaatgatgatggcagccgcagcaaggatgagaccagggtgtccaccaacggcagtgatgatcctgaagatgctggggccggggagaacagaagagtgtctggcaacaacagccccagcctgagcaatggaggcttcaagcccagccggcccccccggcccagccggcccccaccacccaccccccggcggcctgcctctgtgaatggcagccccagcgccaccagcgagagtgatggcagcagcacaggcagcctgccccccaccaacaccaacaccaacaccagcgagggcgccaccagcggcctcatcatccccctgaccatcagcggcggcagcggcccccggcccctgaaccctgtgacccaggcccccctgcccccaggctgggagcagagggtggaccagcacggccgggtgtactacgtggaccacgtggagaagaggaccacctgggacaggcctgagcccctgcccccaggctgggagaggagagtggacaacatgggccgcatctactacgtggaccacttcaccaggaccaccacctggcagaggcccaccctggagagcgtgaggaactatgagcagtggcagctgcagaggagccagctgcagggcgccatgcagcagttcaaccagcgcttcatctacggcaaccaggacctgtttgccaccagccagagcaaggagtttgaccccctgggccccctgcccccaggctgggagaagaggacagacagcaatggccgggtgtactttgtgaaccacaacacccgcatcacccagtgggaggaccccaggagccagggccagctgaatgagaagcccctgcctgagggctgggagatgaggttcaccgtggatggcatcccctactttgtggaccacaacagaaggaccaccacctacatcgaccccaggacaggcaagagcgccctggacaatggcccccagatcgcctacgtgcgggacttcaaggccaaggtgcagtacttccgcttctggtgccagcagctggccatgccccagcacatcaagatcaccgtgaccaggaagaccctgtttgaggacagcttccagcagatcatgtccttcagcccccaggacctgcggcggcggctgtgggtgatcttccctggagaggagggcctggactatggaggagtggcccgggagtggttcttcctgctgagccatgaggtgctgaaccccatgtactgcctgtttgaatatgctgggaaggacaactactgcctgcagatcaacccagccagctacatcaacccagaccacctgaagtacttccgcttcatcggccgcttcatcgccatggccctcttccacggcaagttcatcgacaccggcttcagcctgcccttctacaagaggatcctgaacaagcctgtgggcctgaaggacctggagagcattgatcctgagttctacaacagcctcatctgggtgaaggagaacaacattgaagaatgtgacctggagatgtacttctctgtggacaaggagatcctgggggagatcaagagccatgacctgaagcccaacggcggcaacatcctggtgacagaggagaacaaggaggagtacatccgcatggtggccgagtggaggctgagccggggcgtggaggagcagacccaggccttctttgagggcttcaatgagatcctgccccagcagtacctgcagtactttgatgccaaggagctggaggtgctgctgtgtggcatgcaggagattgacctgaatgactggcagagacatgccatctaccgccactacgcccggaccagcaagcagatcatgtggttctggcagtttgtgaaggagattgacaatgagaagaggatgaggctgctgcagtttgtgacaggcacctgccgcctgcctgtgggcggctttgctgacctgatgggcagcaatggcccccagaagttctgcatcgagaaggtgggcaaggagaactggctgcccaggagccacacctgcttcaaccggctggacctgcccccctacaagagctatgagcagctgaaggagaagctgctgtttgccatcgaggagacagagggcttcggccaggagtag

SEQ ID NO: 156662 - DNA, 2259 bp, synthetic construct
  misc_feature 1..2259: note = Description of Artificial Sequence: Synthetic coding sequence
  source 1..2259: mol_type = other DNA
atgaagctggaggaggtggtggtgaccctgcagctgggcggggacaaggagcccacagagaccatcggggacctgagcatctgcctggatggcctgcagctggagagcgaggtggtgaccaatggagagaccacctgcagcgagagcgccagccagaatgatgatggcagccgcagcaaggatgagaccagggtgtccaccaacggcagtgatgatcctgaagatgctggggccggggagaacagaagagtgtctggcaacaacagccccagcctgagcaatggaggcttcaagcccagccggcccccccggcccagccggcccccaccacccaccccccggcggcctgcctctgtgaatggcagccccagcgccaccagcgagagtgatggcagcagcacaggcagcctgccccccaccaacaccaacaccaacaccagcgagggcgccaccagcggcctcatcatccccctgaccatcagcggcggcagcggcccccggcccctgaaccctgtgacccaggcccccctgcccccaggctgggagcagagggtggaccagcacggccgggtgtactacgtggaccacgtggagaagaggaccacctgggacaggcctgagcccctgcccccaggctgggagaggagagtggacaacatgggccgcatctactacgtggaccacttcaccaggaccaccacctggcagaggcccaccctggagagcgtgaggaactatgagcagtggcagctgcagaggagccagctgcagggcgccatgcagcagttcaaccagcgcttcatctacggcaaccaggacctgtttgccaccagccagagcaaggagtttgaccccctgggccccctgcccccaggctgggagaagaggacagacagcaatggccgggtgtactttgtgaaccacaacacccgcatcacccagtgggaggaccccaggagccagggccagctgaatgagaagcccctgcctgagggctgggagatgaggttcaccgtggatggcatcccctactttgtggaccacaacagaaggaccaccacctacatcgaccccaggacaggcaagagcgccctggacaatggcccccagatcgcctacgtgcgggacttcaaggccaaggtgcagtacttccgcttctggtgccagcagctggccatgccccagcacatcaagatcaccgtgaccaggaagaccctgtttgaggacagcttccagcagatcatgtccttcagcccccaggacctgcggcggcggctgtgggtgatcttccctggagaggagggcctggactatggaggagtggcccgggagtggttcttcctgctgagccatgaggtgctgaaccccatgtactgcctgtttgaatatgctgggaaggacaactactgcctgcagatcaacccagccagctacatcaacccagaccacctgaagtacttccgcttcatcggccgcttcatcgccatggccctcttccacggcaagttcatcgacaccggcttcagcctgcccttctacaagaggatcctgaacaagcctgtgggcctgaaggacctggagagcattgatcctgagttctacaacagcctcatctgggtgaaggagaacaacattgaagaatgtgacctggagatgtacttctctgtggacaaggagatcctgggggagatcaagagccatgacctgaagcccaacggcggcaacatcctggtgacagaggagaacaaggaggagtacatccgcatggtggccgagtggaggctgagccggggcgtggaggagcagacccaggccttctttgagggcttcaatgagatcctgccccagcagtacctgcagtactttgatgccaaggagctggaggtgctgctgtgtggcatgcaggagattgacctgaatgactggcagagacatgccatctaccgccactacgcccggaccagcaagcagatcatgtggttctggcagtttgtgaaggagattgacaatgagaagaggatgaggctgctgcagtttgtgacaggcacctgccgcctgcctgtgggcggctttgctgacctgatgggcagcaatggcccccagaagttctgcatcgagaaggtgggcaaggagaactggctgcccaggagccacacctgcttcaaccggctggacctgcccccctacaagagctatgagcagctgaaggagaagctgctgtttgccatcgaggagacagagggcttcggccaggagtag

SEQ ID NO: 156663 - DNA, 3717 bp, synthetic construct
  misc_feature 1..3717: note = Description of Artificial Sequence: Synthetic coding sequence
  source 1..3717: mol_type = other DNA
atgagggcccagggccggggccgcctgccccggcggctgctgctgctgctggccctgtgggtgcaggccgcccggcccatgggctactttgagctgcagctgagcgccctgagaaatgtgaatggagagctgctgagcggggcctgctgtgatggagatggccgcaccaccagggctgggggctgcggccatgatgaatgtgacacctacgtgcgggtgtgcctgaaggagtaccaggccaaggtgacccccaccggcccctgcagctatggccacggggccacccctgtgctgggcggcaacagcttctacctgcccccagctggagctgctggggaccgggcccgggcccgggcccgggccggcggggaccaggaccccggcctggtggtgatccccttccagtttgcctggcccaggagcttcaccctgattgtggaggcctgggactgggacaatgacaccaccccaaatgaggagctgctgattgagcgggtgtcccatgctggcatgatcaacccagaagatcgctggaagagcctgcacttcagcggccacgtggcccacctggagctgcagatccgggtgcgctgtgatgagaactactacagcgccacctgcaacaagttctgccggcccagaaatgacttcttcggccactacacctgtgaccagtatggcaacaaggcctgcatggatggctggatgggcaaggagtgcaaggaggccgtgtgcaagcagggctgcaacctgctgcatggaggctgcaccgtgcctggagaatgtcgctgcagctatggctggcagggccgcttctgtgatgaatgtgtgccctacccaggctgtgtgcacggcagctgtgtggagccctggcagtgcaactgtgagaccaactggggcggcctgctgtgtgacaaggacctgaactactgcggcagccaccacccctgcaccaatggaggcacctgcatcaatgctgagccagaccagtaccgctgcacctgcccagatggctacagcggcaggaactgtgagaaggccgagcacgcctgcaccagcaacccctgtgccaacggcggcagctgccacgaggtgcccagcggctttgagtgccactgccccagcggctggagcggccccacctgtgccctggacattgatgaatgtgccagcaacccctgtgccgccggcggcacctgtgtggaccaggtggatggctttgagtgcatctgcccagagcagtgggtgggcgccacctgccagctggatgccaatgaatgtgagggcaagccctgcctgaatgccttcagctgcaagaacctgattggaggctactactgtgactgcatccctggctggaagggcatcaactgccacatcaacgtgaatgactgccggggccagtgccagcacggcggcacctgcaaggacctggtgaatggctaccagtgtgtgtgcccccggggctttggaggccgccactgtgagctggagagagatgaatgtgccagcagcccctgccacagcggcggcctgtgtgaggacctggctgatggcttccactgccactgcccccagggcttcagcggccccctgtgtgaggtggatgtggacctgtgtgagcccagcccctgcagaaatggagcccgctgctacaacctggagggggactactactgtgcctgcccagatgactttggaggcaagaactgcagcgtgccccgggagccctgccctggaggagcctgccgggtgattgatggctgcggcagtgatgctggccctggcatgcctggaacagctgccagcggcgtgtgtggcccccacggccgctgtgtgtcccagcccggcggcaacttcagctgcatctgtgacagcggcttcaccggcacctactgccatgaaaatattgatgactgcctgggccagccctgcagaaatggaggcacctgcattgatgaggtggatgccttccgctgcttctgccccagcggctgggagggggagctgtgtgacaccaaccccaatgactgcctgcctgacccctgccacagccggggccgctgctatgacctggtgaatgacttctactgtgcctgtgatgatggctggaagggcaagacctgccacagccgggagttccagtgtgatgcctacacctgcagcaatggaggcacctgctatgacagcggggacaccttccgctgtgcctgccccccaggctggaagggcagcacctgtgctgtggccaagaacagcagctgcctgcccaacccctgtgtgaatggaggcacctgtgtgggcagcggggccagcttcagctgcatctgcagagatggctgggagggccgcacctgcacccacaacaccaatgactgcaaccccctgccctgctacaacggcggcatctgtgtggatggagtgaactggttccgctgtgaatgtgcccctggctttgctggccctgactgccgcatcaacattgatgagtgccagagcagcccctgtgcctacggggccacctgtgtggatgagatcaatggctaccgctgcagctgccccccaggccgggccggcccccgctgccaggaggtgattggcttcggccgcagctgctggagccggggcacccccttcccccacggcagctcctgggtggaggactgcaacagctgccgctgcctggatggccggcgggactgcagcaaggtgtggtgtggctggaagccctgcctgctggccggccagcctgaggccctgagcgcccagtgccccctgggccagcgctgcctggagaaggcccctggccagtgcctgcggcccccctgtgaggcctggggagaatgtggggctgaggagccccccagcaccccctgcctgcccaggagcggccacctggacaacaactgtgcccggctgaccctgcacttcaacagagaccacgtgccccagggcaccaccgtgggcgccatctgcagcggcatccgcagcctgcctgccaccagggctgtggcccgggaccggctgctggtgctgctgtgtgaccgggccagcagcggggccagcgctgtggaggtggccgtgtccttcagccctgcccgggacctgcctgacagcagcctcatccagggcgccgcccacgccatcgtggccgccatcacccagaggggcaacagcagcctgctgctggccgtgacagaggtgaaggtggagaccgtggtgactggaggcagcagcacaggcctgctggtgcctgtgctgtgtggggccttctctgtgctgtggctggcctgtgtggtgctgtgtgtgtggtggaccaggaagaggaggaaggagcgggagaggagccggctgccccgggaggagagcgccaacaaccagtgggcccccctgaaccccatccggaaccccatcgagaggcctgggggccacaaggatgtgctgtaccagtgcaagaacttcaccccacctccaagaagagcagatgaggccctgcccggccctgctggccacgccgctgtgcgggaggatgaagaagatgaggacctgggccgcggggaggaggacagcctggaggccgagaagttcctgagccacaagttcaccaaggaccccggccgcagccctggccggcctgcccactgggccagcggccccaaggtggacaacagagctgtgcgcagcatcaatgaggcccgctatgccggcaaggagtag

SEQ ID NO: 156664 - DNA, 3603 bp, synthetic construct
  misc_feature 1..3603: note = Description of Artificial Sequence: Synthetic coding sequence
  source 1..3603: mol_type = other DNA
atgagggcccagggccggggccgcctgccccggcggctgctgctgctgctggccctgtgggtgcaggccgcccggcccatgggctactttgagctgcagctgagcgccctgagaaatgtgaatggagagctgctgagcggggcctgctgtgatggagatggccgcaccaccagggctgggggctgcggccatgatgaatgtgacacctacgtgcgggtgtgcctgaaggagtaccaggccaaggtgacccccaccggcccctgcagctatggccacggggccacccctgtgctgggcggcaacagcttctacctgcccccagctggagctgctggggaccgggcccgggcccgggcccgggccggcggggaccaggaccccggcctggtggtgatccccttccagtttgcctggcccaggagcttcaccctgattgtggaggcctgggactgggacaatgacaccaccccaaatgaggagctgctgattgagcgggtgtcccatgctggcatgatcaacccagaagatcgctggaagagcctgcacttcagcggccacgtggcccacctggagctgcagatccgggtgcgctgtgatgagaactactacagcgccacctgcaacaagttctgccggcccagaaatgacttcttcggccactacacctgtgaccagtatggcaacaaggcctgcatggatggctggatgggcaaggagtgcaaggaggccgtgtgcaagcagggctgcaacctgctgcatggaggctgcaccgtgcctggagaatgtcgctgcagctatggctggcagggccgcttctgtgatgaatgtgtgccctacccaggctgtgtgcacggcagctgtgtggagccctggcagtgcaactgtgagaccaactggggcggcctgctgtgtgacaaggacctgaactactgcggcagccaccacccctgcaccaatggaggcacctgcatcaatgctgagccagaccagtaccgctgcacctgcccagatggctacagcggcaggaactgtgagaaggccgagcacgcctgcaccagcaacccctgtgccaacggcggcagctgccacgaggtgcccagcggctttgagtgccactgccccagcggctggagcggccccacctgtgccctggacattgatgaatgtgccagcaacccctgtgccgccggcggcacctgtgtggaccaggtggatggctttgagtgcatctgcccagagcagtgggtgggcgccacctgccagctggatgtgaatgactgccggggccagtgccagcacggcggcacctgcaaggacctggtgaatggctaccagtgtgtgtgcccccggggctttggaggccgccactgtgagctggagagagatgaatgtgccagcagcccctgccacagcggcggcctgtgtgaggacctggctgatggcttccactgccactgcccccagggcttcagcggccccctgtgtgaggtggatgtggacctgtgtgagcccagcccctgcagaaatggagcccgctgctacaacctggagggggactactactgtgcctgcccagatgactttggaggcaagaactgcagcgtgccccgggagccctgccctggaggagcctgccgggtgattgatggctgcggcagtgatgctggccctggcatgcctggaacagctgccagcggcgtgtgtggcccccacggccgctgtgtgtcccagcccggcggcaacttcagctgcatctgtgacagcggcttcaccggcacctactgccatgaaaatattgatgactgcctgggccagccctgcagaaatggaggcacctgcattgatgaggtggatgccttccgctgcttctgccccagcggctgggagggggagctgtgtgacaccaaccccaatgactgcctgcctgacccctgccacagccggggccgctgctatgacctggtgaatgacttctactgtgcctgtgatgatggctggaagggcaagacctgccacagccgggagttccagtgtgatgcctacacctgcagcaatggaggcacctgctatgacagcggggacaccttccgctgtgcctgccccccaggctggaagggcagcacctgtgctgtggccaagaacagcagctgcctgcccaacccctgtgtgaatggaggcacctgtgtgggcagcggggccagcttcagctgcatctgcagagatggctgggagggccgcacctgcacccacaacaccaatgactgcaaccccctgccctgctacaacggcggcatctgtgtggatggagtgaactggttccgctgtgaatgtgcccctggctttgctggccctgactgccgcatcaacattgatgagtgccagagcagcccctgtgcctacggggccacctgtgtggatgagatcaatggctaccgctgcagctgccccccaggccgggccggcccccgctgccaggaggtgattggcttcggccgcagctgctggagccggggcacccccttcccccacggcagctcctgggtggaggactgcaacagctgccgctgcctggatggccggcgggactgcagcaaggtgtggtgtggctggaagccctgcctgctggccggccagcctgaggccctgagcgcccagtgccccctgggccagcgctgcctggagaaggcccctggccagtgcctgcggcccccctgtgaggcctggggagaatgtggggctgaggagccccccagcaccccctgcctgcccaggagcggccacctggacaacaactgtgcccggctgaccctgcacttcaacagagaccacgtgccccagggcaccaccgtgggcgccatctgcagcggcatccgcagcctgcctgccaccagggctgtggcccgggaccggctgctggtgctgctgtgtgaccgggccagcagcggggccagcgctgtggaggtggccgtgtccttcagccctgcccgggacctgcctgacagcagcctcatccagggcgccgcccacgccatcgtggccgccatcacccagaggggcaacagcagcctgctgctggccgtgacagaggtgaaggtggagaccgtggtgactggaggcagcagcacaggcctgctggtgcctgtgctgtgtggggccttctctgtgctgtggctggcctgtgtggtgctgtgtgtgtggtggaccaggaagaggaggaaggagcgggagaggagccggctgccccgggaggagagcgccaacaaccagtgggcccccctgaaccccatccggaaccccatcgagaggcctgggggccacaaggatgtgctgtaccagtgcaagaacttcaccccacctccaagaagagcagatgaggccctgcccggccctgctggccacgccgctgtgcgggaggatgaagaagatgaggacctgggccgcggggaggaggacagcctggaggccgagaagttcctgagccacaagttcaccaaggaccccggccgcagccctggccggcctgcccactgggccagcggccccaaggtggacaacagagctgtgcgcagcatcaatgaggcccgctatgccggcaaggagtag

SEQ ID NO: 156665 - DNA, 3465 bp, synthetic construct
  misc_feature 1..3465: note = Description of Artificial Sequence: Synthetic coding sequence
  source 1..3465: mol_type = other DNA
atgcagtacctgaacatcaaggaggactgcaatgccatggccttctgtgccaagatgaggagcagcaagaagacagaggtgaacctggaggcccctgagcccggggtggaggtgatcttctacctgagtgaccgggagcccctgcggctgggcagcggggagtacacagctgaggagctgtgcatccgggccgcccaggcctgccgcatcagccccctgtgccacaacctgtttgccctgtatgatgagaacaccaagctgtggtacgcccccaacagaaccatcaccgtggatgacaagatgagcctgcggctgcactacaggatgaggttctacttcaccaactggcacggcaccaatgacaatgagcagagcgtgtggaggcacagccccaagaagcagaagaatggctatgagaagaagaagatcccagatgccacccccctgctggatgccagcagcctggagtacctgtttgcccagggccagtatgacctggtgaagtgcctggcccccatccgggaccccaagacagagcaggacggccatgacattgaaaatgaatgtctgggcatggctgtgctggccatcagccactacgccatgatgaagaagatgcagctgcctgagctgcccaaggacatctcctacaagcgctacatccctgagaccctgaacaagagcatccggcagaggaacctgctgaccaggatgaggatcaacaacgtgttcaaggacttcctgaaggagttcaacaacaagaccatctgtgacagctctgtgtccacccatgacctgaaggtgaagtacctggccaccctggagaccctgaccaagcactatggagctgagatctttgagacctccatgctgctgatcagcagtgaaaatgagatgaactggttccacagcaatgatggcggcaatgtgctgtactatgaggtgatggtgacaggcaacctgggcatccagtggaggcacaagcccaacgtggtgtctgtggagaaggagaagaacaagctgaagaggaagaagctggagaacaagcacaagaaggatgaggagaagaacaagatccgggaggagtggaacaacttctcctacttccctgagatcacccacatcgtcatcaaggagagcgtggtgtccatcaacaagcaggacaacaagaagatggagctgaagctgagcagccatgaggaggccctgagctttgtgtccctggtggatggctacttccggctgacagcagatgcccaccactacctgtgcacagatgtggcccctcctctcatcgtgcacaacatccagaatggctgccacggccccatctgcacagaatatgccatcaacaagctgcggcaggagggcagcgaggagggcatgtatgtgctgcgctggagctgcacagactttgacaacatcctgatgacagtgacctgctttgagaagtctgagcaggtgcagggcgcccagaagcagttcaagaacttccagatcgaggtgcagaagggccgctacagcctgcacggcagtgaccgctccttccccagcctgggggacctgatgagccacctgaagaagcagatcctgaggacagacaacatctccttcatgctgaagcgctgctgccagcccaagccccgggagatcagcaacctgctggtggccaccaagaaggcccaggagtggcagcctgtgtaccccatgagccagctgagctttgaccgcatcctgaagaaggacctggtgcagggcgagcacctgggccggggcaccaggacccacatctacagcggcaccctgatggactacaaggatgatgagggcaccagcgaggagaagaagatcaaggtgatcctgaaggtgctggaccccagccaccgggacatcagcctggccttctttgaggccgcctccatgatgaggcaggtgagccacaagcacatcgtgtacctgtatggagtgtgtgtgagagatgtggagaacatcatggtggaggagtttgtggagggcggccccctggacctcttcatgcacaggaagagtgatgtgctgaccaccccctggaagttcaaggtggccaagcagctggccagcgccctgagctacctggaggacaaggacctggtgcacggcaatgtgtgcaccaagaacctgctgctggcccgggagggcattgattctgaatgtggccccttcatcaagctgagtgaccccggcatccccatcaccgtgctgagccggcaggagtgcatcgagcgcatcccctggatcgccccagaatgtgtggaggacagcaagaacctgtctgtggccgctgacaagtggagctttggcaccaccctgtgggagatctgctacaatggagagatccccctgaaggacaagaccctcatcgagaaggagcgcttctatgagagccgctgcaggcctgtgacccccagctgcaaggagctggccgacctgatgacccgctgcatgaactatgaccccaaccagaggcccttcttccgggccatcatgagggacatcaacaagctggaggagcagaacccagacatcgtgtctgagaagaagccagccacagaggtggaccccacccactttgagaagcgcttcctgaagaggatccgggacctgggggagggccactttgggaaggtggagctgtgccgctatgaccctgagggggacaacacaggagagcaggtggccgtgaagagcctgaagccagagagcggcggcaaccacatcgctgacctgaagaaggagattgagatcctgaggaacctgtaccatgaaaatattgtgaagtacaagggcatctgcacagaagatggcggcaatggcatcaagctgatcatggagttcctgcccagcggcagcctgaaggagtacctgcccaagaacaagaacaagatcaacctgaagcagcagctgaagtatgctgtgcagatctgcaagggcatggactacctgggcagccggcagtatgtgcaccgggacctggccgccagaaatgtgctggtggagagcgagcaccaggtgaagattggagactttggcctgaccaaggccatcgagacagacaaggagtactacacagtgaaggatgaccgggacagccctgtgttctggtacgccccagaatgtctgatgcagagcaagttctacatcgccagtgatgtgtggagctttggagtgaccctgcacgagctgctgacctactgtgacagcgacagcagccccatggccctcttcctgaagatgattggccccacccacggccagatgacagtgacccggctggtgaacaccctgaaggagggcaagaggctgccctgcccccccaactgcccagatgaggtgtaccagctgatgaggaagtgctgggagttccagcccagcaacagaaccagcttccagaacctgattgagggctttgaggccctgctgaagtag

SEQ ID NO: 156666 - DNA, 1860 bp, synthetic construct
  misc_feature 1..1860: note = Description of Artificial Sequence: Synthetic coding sequence
  source 1..1860: mol_type = other DNA
atggcccctccttctgaggagacccccctcatcccccagaggagctgcagcctgctgagcacagaagctggggccctgcacgtgctgctgcctgcccggggccctggccccccccagaggctgtccttctcctttggagaccacctggccgaggacctgtgtgtgcaggccgccaaggccagcggcatcctgcctgtgtaccacagcctgtttgccctggccacagaggacctgagctgctggttcccccccagccacatcttctctgtggaggatgccagcacccaggtgctgctgtaccgcatccgcttctacttccccaactggtttggcctggagaagtgccaccgcttcggcctgaggaaggacctggccagcgccatcctggacctgcctgtgctggagcacctgtttgcccagcacagaagtgacctggtgtctggccgcctgcctgtgggcctgagcctgaaggagcagggagaatgtctgagcctggccgtgctggacctggccaggatggcccgggagcaggcccagaggcctggagagctgctgaagacagtgtcctacaaggcctgcctgccccccagcctgcgggacctgatccagggcctgagctttgtgacccggcggcgcatccggaggacagtgcggcgggccctgcggcgggtggccgcctgccaggccgacagacacagcctgatggccaagtacatcatggacctggagcggctggaccctgctggagctgctgagaccttccacgtgggcctgcccggggccctgggcggccatgatggcctgggcctgctgcgggtggccggagatggcggcatcgcctggacccagggcgagcaggaggtgctgcagcccttctgtgacttccctgagatcgtggacatcagcatcaagcaggccccccgggtgggccctgctggggagcaccggctggtgacagtgaccaggacagacaaccagatcctggaggccgagttccctggcctgcctgaggccctgagctttgtggccctggtggatggctacttccggctgaccacagacagccagcacttcttctgcaaggaggtggccccaccccggctgctggaggaggtggccgagcagtgccacggccccatcaccctggactttgccatcaacaagctgaagacaggaggcagccggcccggcagctatgtgctgcggcgcagcccccaggactttgacagcttcctgctgactgtgtgtgtgcagaaccccctgggccctgactacaagggctgcctgatcagaagaagccccaccggcaccttcctgctggtgggcctgagccggccccacagcagcctgcgggagctgctggccacctgctgggatggcggcctgcacgtggatggagtggccgtgaccctgaccagctgctgcatcccccggcccaaggagaagagcaacctgattgtggtgcagaggggccacagcccccccaccagcagcctggtgcagccccagagccagtaccagctgagccagatgaccttccacaagatcccagctgacagcctggagtggcatgagaacctgggccacggcagcttcaccaagatctaccggggctgcagacatgaggtggtggatggagaggccaggaagacagaggtgctgctgaaggtgatggatgccaagcacaagaactgcatggagagcttcctggaggccgccagcctgatgagccaggtgtcctaccgccacctggtgctgctgcacggcgtgtgcatggccggggacagcgagagccccccacccacccaccccaccccagccagccccaagagccgcctcttcttccccccactcttctag

SEQ ID NO: 156667 - DNA, 3375 bp, synthetic construct
  misc_feature 1..3375: note = Description of Artificial Sequence: Synthetic coding sequence
  source 1..3375: mol_type = other DNA
atggcccctccttctgaggagacccccctcatcccccagaggagctgcagcctgctgagcacagaagctggggccctgcacgtgctgctgcctgcccggggccctggccccccccagaggctgtccttctcctttggagaccacctggccgaggacctgtgtgtgcaggccgccaaggccagcggcatcctgcctgtgtaccacagcctgtttgccctggccacagaggacctgagctgctggttcccccccagccacatcttctctgtggaggatgccagcacccaggtgctgctgtaccgcatccgcttctacttccccaactggtttggcctggagaagtgccaccgcttcggcctgaggaaggacctggccagcgccatcctggacctgcctgtgctggagcacctgtttgcccagcacagaagtgacctggtgtctggccgcctgcctgtgggcctgagcctgaaggagcagggagaatgtctgagcctggccgtgctggacctggccaggatggcccgggagcaggcccagaggcctggagagctgctgaagacagtgtcctacaaggcctgcctgccccccagcctgcgggacctgatccagggcctgagctttgtgacccggcggcgcatccggaggacagtgcggcgggccctgcggcgggtggccgcctgccaggccgacagacacagcctgatggccaagtacatcatggacctggagcggctggaccctgctggagctgctgagaccttccacgtgggcctgcccggggccctgggcggccatgatggcctgggcctgctgcgggtggccggagatggcggcatcgcctggacccagggcgagcaggaggtgctgcagcccttctgtgacttccctgagatcgtggacatcagcatcaagcaggccccccgggtgggccctgctggggagcaccggctggtgacagtgaccaggacagacaaccagatcctggaggccgagttccctggcctgcctgaggccctgagctttgtggccctggtggatggctacttccggctgaccacagacagccagcacttcttctgcaaggaggtggccccaccccggctgctggaggaggtggccgagcagtgccacggccccatcaccctggactttgccatcaacaagctgaagacaggaggcagccggcccggcagctatgtgctgcggcgcagcccccaggactttgacagcttcctgctgactgtgtgtgtgcagaaccccctgggccctgactacaagggctgcctgatcagaagaagccccaccggcaccttcctgctggtgggcctgagccggccccacagcagcctgcgggagctgctggccacctgctgggatggcggcctgcacgtggatggagtggccgtgaccctgaccagctgctgcatcccccggcccaaggagaagagcaacctgattgtggtgcagaggggccacagcccccccaccagcagcctggtgcagccccagagccagtaccagctgagccagatgaccttccacaagatcccagctgacagcctggagtggcatgagaacctgggccacggcagcttcaccaagatctaccggggctgcagacatgaggtggtggatggagaggccaggaagacagaggtgctgctgaaggtgatggatgccaagcacaagaactgcatggagagcttcctggaggccgccagcctgatgagccaggtgtcctaccgccacctggtgctgctgcacggcgtgtgcatggccggggacagcaccatggtgcaggagtttgtgcacctgggcgccatcgacatgtacctgaggaagaggggccacctggtgcctgcctcctggaagctgcaggtggtgaagcagctggcctatgccctgaactacctggaggacaagggcctgccccatggaaatgtgtctgccaggaaggtgctgctggcccgggagggcgcagatggcagcccccccttcatcaagctgagtgaccccggggtgtccccagctgtgctgagcctggagatgctgacagaccgcatcccctgggtggcccctgagtgcctgcgggaggcccagaccctgagcctggaggccgacaagtggggctttggagccaccgtgtgggaggtgttcagcggcgtgaccatgcccatcagcgccctggaccctgccaagaagctgcagttctatgaagatcggcagcagctgcctgcccccaagtggacagagctggccctgctgatccagcagtgcatggcctatgagcctgtgcagaggcccagcttccgggccgtcatccgggacctgaacagcctcatcagcagtgactatgagctgctgagtgaccccacccctggggccctggcccccagagatggcctgtggaatggagcccagctgtatgcctgccaggaccccaccatctttgaggagcggcacctgaagtacatcagccagctgggcaagggcaactttggatctgtggagctgtgccgctatgaccccctgggggacaacacaggagccctggtggccgtgaagcagctgcagcacagcggccctgaccagcagagggacttccagcgggagatccagatcctgaaggccctgcacagcgacttcatcgtgaagtaccggggcgtgtcctatggccctggccggcagagcctgcggctggtgatggagtacctgcccagcggctgcctgcgggacttcctgcagaggcaccgggcccggctggatgccagccggctgctgctgtacagcagccagatctgcaagggcatggagtacctgggcagcagaagatgtgtgcaccgggacctggccgccaggaacatcctggtggagagcgaggcccacgtgaagattgctgactttggcctggccaagctgctgcccctggacaaggactactacgtggtgcgggagcccggccagagccccatcttctggtacgcccctgagagcctgagtgacaacatcttcagccggcagagtgatgtgtggagctttggagtggtgctgtatgagctgttcacctactgtgacaagagctgcagccccagcgctgagttcctgaggatgatgggctgtgaaagagatgtgcctgccctgtgccgcctgctggagctgctggaggagggccagaggctgcctgcccccccagcctgcccagctgaggtgcatgagctgatgaagctgtgctgggcccccagcccccaggaccggcccagcttcagcgccctgggcccccagctggacatgctgtggagcggcagccggggctgtgagacccacgccttcaccgcccaccctgagggcaagcaccacagcctgtccttctcctag

SEQ ID NO: 156668 - DNA, 3375 bp, synthetic construct; identical to SEQ ID NO: 156667
  misc_feature 1..3375: note = Description of Artificial Sequence: Synthetic coding sequence
  source 1..3375: mol_type = other DNA

SEQ ID NO: 156669 - DNA, 3285 bp, synthetic construct
  misc_feature 1..3285: note = Description of Artificial Sequence: Synthetic coding sequence
  source 1..3285: mol_type = other DNA
atggcccctccttctgaggagacccccctcatcccccagaggagctgcagcctgctgagcacagaagctggggccctgcacgtgctgctgcctgcccggggccctggccccccccagaggctgtccttctcctttggagaccacctggccgaggacctgtgtgtgcaggccgccaaggccagcggcatcctgcctgtgtaccacagcctgtttgccctggccacagaggacctgagctgctggttcccccccagccacatcttctctgtggaggatgccagcacccaggtgctgctgtaccgcatccgcttctacttccccaactggtttggcctggagaagtgccaccgcttcggcctgaggaaggacctggccagcgccatcctggacctgcctgtgctggagcacctgtttgcccagcacagaagtgacctggtgtctggccgcctgcctgtgggcctgagcctgaaggagcagggagaatgtctgagcctggccgtgctggacctggccaggatggcccgggagcaggcccagaggcctggagagctgctgaagacagtgtcctacaaggcctgcctgccccccagcctgcgggacctgatccagggcctgagctttgtgacccggcggcgcatccggaggacagtgcggcgggccctgcggcgggtggccgcctgccaggccgacagacacagcctgatggccaagtacatcatggacctggagcggctggaccctgctggagctgctgagaccttccacgtgggcctgcccggggccctgggcggccatgatggcctgggcctgctgcgggtggccggagatggcggcatcgcctggacccagggcgagcaggaggtgctgcagcccttctgtgacttccctgagatcgtggacatcagcatcaagcaggccccccgggtgggccctgctggggagcaccggctggtgacagtgaccaggacagacaaccagatcctggaggccgagttccctggcctgcctgaggccctgagctttgtggccctggtggatggctacttccggctgaccacagacagccagcacttcttctgcaaggaggtggccccaccccggctgctggaggaggtggccgagcagtgccacggccccatcaccctggactttgccatcaacaagctgaagacaggaggcagccggcccggcagctatgtgctgcggcgcagcccccaggactttgacagcttcctgctgactgtgtgtgtgcagaaccccctgggccctgactacaagggctgcctgatcagaagaagccccaccggcaccttcctgctggtgggcctgagccggccccacagcagcctgcgggagctgctggccacctgctgggatggcggcctgcacgtggatggagtggccgtgaccctgaccagctgctgcatcccccggcccaaggagaagagcaacctgattgtggtgcagaggggccacagcccccccaccagcagcctggtgcagccccagagccagtaccagctgagccagatgaccttccacaagatcccagctgacagcctggagtggcatgagaacctgggccacggcagcttcaccaagatctaccggggctgcagacatgaggtggtggatggagaggccaggaagacagaggtgctgctgaaggtgatggatgccaagcacaagaactgcatggagagcttcctggaggccgccagcctgatgagccaggtgtcctaccgccacctggtgctgctgcacggcgtgtgcatggccggggacagcaccatggtgcaggagtttgtgcacctgggcgccatcgacatgtacctgaggaagaggggccacctggtgcctgcctcctggaagctgcaggtggtgaagcagctggcctatgccctgaactacctggaggacaagggcctgccccatggaaatgtgtctgccaggaaggtgctgctggcccgggagggcgcagatggcagcccccccttcatcaagctgagtgaccccggggtgtccccagctgtgctgagcctggagatgctgacagaccgcatcccctgggtggcccctgagtgcctgcgggaggcccagaccctgagcctggaggccgacaagtggggctttggagccaccgtgtgggaggtgttcagcggcgtgaccatgcccatcagcgccctggaccctgccaagaagctgcagttctatgaagatcggcagcagctgcctgcccccaagtggacagagctggccctgctgatccagcagtgcatggcctatgagcctgtgcagaggcccagcttccgggccgtcatccgggacctgaacagcctcatcagcagtgactatgagctgctgagtgaccccacccctggggccctggcccccagagatggcctgtggaatggagcccagctgtatgcctgccaggaccccaccatctttgaggagcggcacctgaagtacatcagccagctgggcaagggcaactttggatctgtggagctgtgccgctatgaccccctgggggacaacacaggagccctggtggccgtgaagcagctgcagcacagcggccctgaccagcagagggacttccagcgggagatccagatcctgaaggccctgcacagcgacttcatcgtgaagtaccggggcgtgtcctatggccctggccggcagagcctgcggctggtgatggagtacctgcccagcggctgcctgcgggacttcctgcagaggcaccgggcccggctggatgccagccggctgctgctgtacagcagccagatctgcaagggcatggagtacctgggcagcagaagatgtgtgcaccgggacctggccgccaggaacatcctggtggagagcgaggcccacgtgaagattgctgactttggcctggccaagctgctgcccctggacaaggactactacgtggtgcgggagcccggccagagccccatcttctggtacgcccctgagagcctgagtgacaacatcttcagccggcagagtgatgtgtggagctttggagtggtgctgtatgagctgttcacctactgtgacaagagctgcagccccagcgctgagttcctgaggatgatgggctgtgaaagagatgtgcctgccctgtgccgcctgctggagctgctggaggagggccagaggctgcctgcccccccagcctgcccagctgaggtgtctgctgctggcctggcctctgtgtcccagagcgtggactgggccggcgtgtctgggaagccagctggggcctag

SEQ ID NO: 156670 - DNA, 1575 bp, synthetic construct
  misc_feature 1..1575: note = Description of Artificial Sequence: Synthetic coding sequence
  source 1..1575: mol_type = other DNA
atgtctgggaagaggaagagggtggtgctgaccatcaaggacaagctggacatcatcaagaagctggaggatggcggcagcagcaagcagctggccgtcatctatggaattggagagaccaccgtgcgggacatcaggaagaacaaggagaagatcatcacctacgccagcagcagtgacagcaccagcctgctggccaagaggaagtccatgaagcccagcatgtatgaggagctggaccgggccatgctggagtggttcaaccagcagagggccaagggcaaccccatcagcggccccatctgtgccaagagagctgagttcttcttctacgccctgggcatggatggagacttcaaccccagcgctggctggctgacccgcttcaagcagaggcacagcatccgggagatcaacatcagaaatgaaaggctgaatggagatgaaacagctgtggaggacttctgcaacaacttccgggacttcatcgagcgggagaacctgcagcctgagcagatctacaatgctgatgaaacaggcctcttctggaagtgcctgcccagccgcatcagcgtcatcaagggcaagtgcaccgtgcccggccacaagagcattgaggagcgggtgaccatcatgtgctgtgccaatgccaccggcctgcacaagctgaagctgtgtgtggtgggcaaggccaagaagcccaggagcttcaagagcacagacaccctgaacctgcctgtgtcctacttcagccagaagggggcctggatggacctgagcatcttccggcagtggtttgacaagatctttgtgccccaggtgcgggagtacctgcggagcaagggcctgcaggagaaggctgtgctgctgctggacaacagccccacccaccccaatgaaaatgtgctgcggagtgatgatggccagatctttgccaagtacctgccccccaacgtggccagcctcatccagcccagcgaccagggcgtgattgccaccatgaagaggaactaccgggccggcctgctgcagaacaacctggaggagggcaatgacctgaagagcttctggaagaagctgaccctgctggatgccctgtatgaaattgccatggcctggaacctggtgaagcctgtgaccatcagccgggcctggaagaagatcctgcccatggtggaggagaaggagagcctggactttgatgtggaggacatctctgtggccaccgtggccgccatcctgcagcacaccaagggcctggagaatgtgaccacagagaacctggagaagtggctggaggtggacagcacagagcccggctatgaggtgctgacagattctgagatcatcagaagagcccagggccaggctgatgagagcagtgaaaatgaggaggaggagattgagctgatccctgagaagcacatcaaccacgccgccgccctgcagtggacagagaacctgctggactacctggagcagcagggcgacatgatcctgcctgaccggctggtgatcaggaagctgcgggccaccatccggaacaagcagaagatgaccaagagcagccagtag

SEQ ID NO: 156671 - DNA, 1575 bp, synthetic construct; identical to SEQ ID NO: 156670
  misc_feature 1..1575: note = Description of Artificial Sequence: Synthetic coding sequence
  source 1..1575: mol_type = other DNA

SEQ ID NO: 156672 - DNA, 1251 bp, synthetic construct
  misc_feature 1..1251: note = Description of Artificial Sequence: Synthetic coding sequence
  source 1..1251: mol_type = other DNA
atggccggggacacccactgcccagctgagcccctggcccgggagggcaccctgtgggaggccctgcgggccctgctgccccacagcaaagaagacctgaagctggacctgggggagaaggtggagaggtctgtggtgaccctgctgcagagggccacagagctgttctatgagggcagaagagatgaatgtctgcagagcagcgaggtgatcctggactacagctgggagaagctgaacacaggcacctggcaggatgtggacaaggactggaggagagtgtatgccatcggctgcctgctgaaggccctgtgcctgtgccaggccccagaagatgccaacacagtggccgccgccctgcgggtgtgtgacatgggcctgctgatgggcgccgccatcctgggggacatcctgctgaaggtggccgccatcctgcagacccacctgcccgggaagaggcctgcccggggcagcctgcctgagcagccctgcaccaagaaggcccgggctgaccacggcctcatcccagatgtgaagctggagaagacagtgccccggctgcaccggcccagcctgcagcacttccgggagcagttcctggtgcccggccggcctgtgatcctgaagggcgtggccgaccactggccctgcatgcagaagtggagcctggagtacatccaggagattgctggctgcaggacagtgcctgtggaggtgggcagccgctacacagatgaggagtggagccagaccctgatgacagtgaatgagttcatcagcaagtacatcgtgaatgagcccagagatgtgggctacctggcccagcaccagctgtttgaccagatccctgagctgaagcaggacatcagcatcccagactactgcagcctgggagatggagaggaggaggagatcaccatcaatgcctggtttggcccccagggcaccatcagccccctgcaccaggacccccagcagaacttcctggtgcaggtgatgggcaggaagtacatccggctgtacagcccccaggagagcggggccctgtacccccatgacacccacctgctgcacaacaccagccaggtggatgtggagaacccagacctggagaagttccccaagtttgccaaggcccccttcctgagctgcatcctgagccctggagagatcctcttcatccctgtgaagtactggcactacgtgcgggccctggacctgtccttctctgtgtccttctggtggagctag

SEQ ID NO: 156673 - DNA, 663 bp, synthetic construct
  misc_feature 1..663: note = Description of Artificial Sequence: Synthetic coding sequence
  source 1..663: mol_type = other DNA
atggccggggacacccactgcccagctgagcccctggcccgggagggcaccctgtgggaggccctgcgggccctgctgccccacagcaaagaagacctgaagctggacctgggggagaaggtggagaggtctgtggtgaccctgctgcagagggccacagagctgttctatgagggcagaagagatgaatgtctgcagagcagcgaggtgatcctggactacagctgggagaagctgaacacaggcacctggcaggatgtggacaaggactggaggagagtgtatgccatcggctgcctgctgaaggccctgtgcctgtgccaggccccagaagatgccaacacagtggccgccgccctgcgggtgtgtgacatgggcctgctgatgggcgccgccatcctgggggacatcctgctgaaggtggccgccatcctgcagacccacctgcccgggaagaggcctgcccggggcagcctgcctgagcagccctgcaccaaggtggatgtggagaacccagacctggagaagttccccaagtttgccaaggcccccttcctgagctgcatcctgagccctggagagatcctcttcatccctgtgaagtactggcactacgtgcgggccctggacctgtccttctctgtgtccttctggtggagctag

SEQ ID NO: 156674 - DNA, 1365 bp, synthetic construct
  misc_feature 1..1365: note = Description of Artificial Sequence: Synthetic coding sequence
  source 1..1365: mol_type = other DNA
atgagccgggagaagtgcagccctggagagggcgctgaggagggccggggcagcgaggccagcggcctgaaggccagcgctggccatggaacagagcctgctgggggcggccccatggccggggacacccactgcccagctgagcccctggcccgggagggcaccctgtgggaggccctgcgggccctgctgccccacagcaaagaagacctgaagctggacctgggggagaaggtggagaggtctgtggtgaccctgctgcagagggccacagagctgttctatgagggcagaagagatgaatgtctgcagagcagcgaggtgatcctggactacagctgggagaagctgaacacaggcacctggcaggatgtggacaaggactggaggagagtgtatgccatcggctgcctgctgaaggccctgtgcctgtgccaggccccagaagatgccaacacagtggccgccgccctgcgggtgtgtgacatgggcctgctgatgggcgccgccatcctgggggacatcctgctgaaggtggccgccatcctgcagacccacctgcccgggaagaggcctgcccggggcagcctgcctgagcagccctgcaccaagaaggcccgggctgaccacggcctcatcccagatgtgaagctggagaagacagtgccccggctgcaccggcccagcctgcagcacttccgggagcagttcctggtgcccggccggcctgtgatcctgaagggcgtggccgaccactggccctgcatgcagaagtggagcctggagtacatccaggagattgctggctgcaggacagtgcctgtggaggtgggcagccgctacacagatgaggagtggagccagaccctgatgacagtgaatgagttcatcagcaagtacatcgtgaatgagcccagagatgtgggctacctggcccagcaccagctgtttgaccagatccctgagctgaagcaggacatcagcatcccagactactgcagcctgggagatggagaggaggaggagatcaccatcaatgcctggtttggcccccagggcaccatcagccccctgcaccaggacccccagcagaacttcctggtgcaggtgatgggcaggaagtacatccggctgtacagcccccaggagagcggggccctgtacccccatgacacccacctgctgcacaacaccagccaggtggatgtggagaacccagacctggagaagttccccaagtttgccaaggcccccttcctgagctgcatcctgagccctggagagatcctcttcatccctgtgaagtactggcactacgtgcgggccctggacctgtccttctctgtgtccttctggtggagctag

SEQ ID NO: 156675 - DNA, 441 bp, synthetic construct
  misc_feature 1..441: note = Description of Artificial Sequence: Synthetic coding sequence
  source 1..441: mol_type = other DNA
atgacagtgaatgagttcatcagcaagtacatcgtgaatgagcccagagatgtgggctacctggcccagcaccagctgtttgaccagatccctgagctgaagcaggacatcagcatcccagactactgcagcctgggagatggagaggaggaggagatcaccatcaatgcctggtttggcccccagggcaccatcagccccctgcaccaggacccccagcagaacttcctggtgcaggtgatgggcaggaagtacatccggctgtacagcccccaggagagcggggccctgtacccccatgacacccacctgctgcacaacaccagccaggtggatgtggagaacccagacctggagaagttccccaagtttgccaaggcccccttcctgagctgcatcctgagccctggagagatcctcttcatccctgtgaagtactag

SEQ ID NO: 156676 - DNA, 1119 bp, synthetic construct
  misc_feature 1..1119: note = Description of Artificial Sequence: Synthetic coding sequence
  source 1..1119: mol_type = other DNA
atgaaccacaagagcaagaagaggatccgggaggccaagaggtctgcccggcctgagctgaaggacagcctggactggaccaggcacaactactatgagagcttcagcctgagccctgctgctgtggccgacaacgtggagcgggcagatgccctgcagctgtctgtggaggagtttgtggagagatatgagcggccctacaagcctgtggtgctgctgaatgcccaggagggctggagcgcccaggagaagtggaccctggagcggctgaagaggaagtacagaaaccagaagttcaagtgtggagaagataatgatggctacagcgtgaagatgaagatgaagtactacatcgagtacatggagagcaccagagatgacagccccctgtacatctttgacagcagctatggagagcaccccaagaggaggaagctgctggaggactacaaggtgcccaagttcttcacagatgacctcttccagtatgctggggagaagaggcggcccccctaccgctggtttgtgatgggccccccaagaagtggcaccggcatccacatcgaccccctgggcaccagcgcctggaatgccctggtgcagggccacaagcgctggtgcctcttccccaccagcaccccccgggagctgatcaaggtgaccagagatgaaggaggcaaccagcaggatgaggccatcacctggttcaacgtcatctaccccaggacccagctgcccacctggcccccagagttcaagcccctggagatcctgcagaagccaggagagaccgtgtttgtgcctgggggctggtggcacgtggtgctgaacctggacaccaccatcgccatcacccagaactttgccagcagcaccaacttccctgtggtgtggcacaagacagtgcggggccggcccaagctgagcaggaagtggtaccgcatcctgaagcaggagcaccctgagctggccgtgctggccgacagcgtggacctgcaggagagcacaggcatcgccagtgacagcagcagtgacagcagcagcagcagcagcagcagcagcagtgacagcgacagcgagcgcatccgggacacctgtggcggccgggcccacccctag

SEQ ID NO: 156677 - DNA, 1212 bp, synthetic construct
  misc_feature 1..1212: note = Description of Artificial Sequence: Synthetic coding sequence
  source 1..1212: mol_type = other DNA
atgaaccacaagagcaagaagaggatccgggaggccaagaggtctgcccggcctgagctgaaggacagcctggactggaccaggcacaactactatgagagcttcagcctgagccctgctgctgtggccgacaacgtggagcgggcagatgccctgcagctgtctgtggaggagtttgtggagagatatgagcggccctacaagcctgtggtgctgctgaatgcccaggagggctggagcgcccaggagaagtggaccctggagcggctgaagaggaagtacagaaaccagaagttcaagtgtggagaagataatgatggctacagcgtgaagatgaagatgaagtactacatcgagtacatggagagcaccagagatgacagccccctgtacatctttgacagcagctatggagagcaccccaagaggaggaagctgctggaggactacaaggtgcccaagttcttcacagatgacctcttccagtatgctggggagaagaggcggcccccctaccgctggtttgtgatgggccccccaagaagtggcaccggcatccacatcgaccccctgggcaccagcgcctggaatgccctggtgcagggccacaagcgctggtgcctcttccccaccagcaccccccgggagctgatcaaggtgaccagagatgaaggaggcaaccagcaggatgaggccatcacctggttcaacgtcatctaccccaggacccagctgcccacctggcccccagagttcaagcccctggagatcctgcagaagccaggagagaccgtgtttgtgcctgggggctggtggcacgtggtgctgaacctggacaccaccatcgccatcacccagaactttgccagcagcaccaacttccctgtggtgtggcacaagacagtgcggggccggcccaagctgagcaggaagtggtaccgcatcctgaagcaggagcaccctgagctggccgtgctggccgacagcgtggacctgcaggagagcacaggcatcgccagtgacagcagcagtgacagcagcagcagcagcagcagcagcagcagtgacagcgacagtgaatgtgagagcggctctgaaggagatggcaccgtgcacaggaggaagaagaggaggacctgcagcatggtgggcaatggagacaccaccagccaggatgactgtgtgtccaaggagaggagcagcagcaggtag

SEQ ID NO: 156678 - DNA, 1245 bp, synthetic construct
  misc_feature 1..1245: note = Description of Artificial Sequence: Synthetic coding sequence
  source 1..1245: mol_type = other DNA
atgaaccacaagagcaagaagaggatccgggaggccaagaggtctgcccggcctgagctgaaggacagcctggactggaccaggcacaactactatgagagcttcagcctgagccctgctgctgtggccgacaacgtggagcgggcagatgccctgcagctgtctgtggaggagtttgtggagagatatgagcggccctacaagcctgtggtgctgctgaatgcccaggagggctggagcgcccaggagaagtggaccctggagcggctgaagaggaagtacagaaaccagaagttcaagtgtggagaagataatgatggctacagcgtgaagatgaagatgaagtactacatcgagtacatggagagcaccagagatgacagccccctgtacatctttgacagcagctatggagagcaccccaagaggaggaagctgctggaggactacaaggtgcccaagttcttcacagatgacctcttccagtatgctggggagaagaggcggcccccctaccgctggtttgtgatgggccccccaagaagtggcaccggcatccacatcgaccccctgggcaccagcgcctggaatgccctggtgcagggccacaagcgctggtgcctcttccccaccagcaccccccgggagctgatcaaggtgaccagagatgaaggaggcaaccagcaggatgaggccatcacctggttcaacgtcatctaccccaggacccagctgcccacctggcccccagagttcaagcccctggagatcctgcagaagccaggagagaccgtgtttgtgcctgggggctggtggcacgtggtgctgaacctggacaccaccatcgccatcacccagaactttgccagcagcaccaacttccctgtggtgtggcacaagacagtgcggggccggcccaagctgagcaggaagtggtaccgcatcctgaagcaggagcaccctgagctggccgtgctggccgacagcgtggacctgcaggagagcacaggcatcgccagtgacagcagcagtgacagcagcagcagcagcagcagcagcagcagtgacagcgacagtgaatgtgagagcggctctgaaggagatggcaccgtgcacaggaggaagaagaggaggacctgcagcatggtgggcaatggagacaccaccagccaggatgactgtgtgtccaaggagaggagcagcagccgcatccgggacacctgtggcggccgggcccacccctag

SEQ ID NO: 156679 - DNA, 441 bp, synthetic construct
  misc_feature 1..441: note = Description of Artificial Sequence: Synthetic coding sequence
  source 1..441: mol_type = other DNA
atgctggccggggccggccggcccggcctgccccagggccgccacctgtgctggctgctgtgtgccttcaccctgaagctgtgccaggccgaggcccctgtgcaggaggagaagctgagcgccagcaccagcaacctgccctgctggctggtggaggagtttgtggtggccgaggagtgcagcccctgcagcaacttccgggccaagaccaccccagaatgtggccccaccggctacgtggagaagatcacctgcagcagcagcaagagaaatgagttcaagagctgccgcagcgccctgatggagcagaggctcttctggaagtttgaaggagctgtggtgtgtgtggccctgatctttgcctgcctggtgatcatccggcagaggcagctggacaggaaggccctggagaaggtgaggaagcagatcgagagcatctag

SEQ ID NO: 156680 - DNA, 354 bp, synthetic construct
  misc_feature 1..354: note = Description of Artificial Sequence: Synthetic coding sequence
  source 1..354: mol_type = other DNA
atggcctggggctggcacctgtccttcctgagcgccagcaccagcaacctgccctgctggctggtggaggagtttgtggtggccgaggagtgcagcccctgcagcaacttccgggccaagaccaccccagaatgtggccccaccggctacgtggagaagatcacctgcagcagcagcaagagaaatgagttcaagagctgccgcagcgccctgatggagcagaggctcttctggaagtttgagggcgctgtggtgtgtgtggccctgatctttgcctgcctggtgatcatccggcagaggcagctggacaggaaggccctggagaaggtgaggaagcagatcgagagcatctag

SEQ ID NO: 156681 - DNA, 354 bp, synthetic construct; identical to SEQ ID NO: 156680
  misc_feature 1..354: note = Description of Artificial Sequence: Synthetic coding sequence
  source 1..354: mol_type = other DNA

SEQ ID NO: 156682 - DNA, 354 bp, synthetic construct; identical to SEQ ID NO: 156680
  misc_feature 1..354: note = Description of Artificial Sequence: Synthetic coding sequence
  source 1..354: mol_type = other DNA

SEQ ID NO: 156683 - DNA, 1044 bp, synthetic construct
  misc_feature 1..1044: note = Description of Artificial Sequence: Synthetic coding sequence
  source 1..1044: mol_type = other DNA
atggagacccccttctatggagatgaggccctgagcggcctgggcggcggggccagcggcagcggcggcagctttgccagccctggccgcctcttccctggggccccacccacagctgctgctggctccatgatgaagaaggatgccctgaccctgagcctgtctgagcaggtggccgccgccctgaagccagctgctgcccccccacccacccccctgcgggcagatggagcccccagcgctgcccccccagatggcctgctggccagcccagacctgggcctgctgaagctggccagccctgagctggagcggctcatcatccagagcaatggcctggtgaccaccacccccaccagcagccagttcctgtaccccaaggtggccgccagcgaggagcaggagtttgctgagggctttgtgaaggccctggaggacctgcacaagcagaaccagctgggcgctggagctgctgctgctgctgctgctgctgctgctgggggccccagcggcacagccaccggcagcgcccctcctggagagctggccccagctgctgctgcccctgaggcccctgtgtatgccaacctgagcagctatgccggcggggccggcggggccggcggggccgccaccgtggcctttgctgctgagcctgtgcccttccccccacctcctcctcctggggccctgggccccccccggctggccgccctgaaggatgagccccagacagtgcctgatgtgcccagctttggagagagcccccccctgagccccatcgacatggacacccaggagcgcatcaaggccgagaggaagaggctgaggaacagaattgctgccagcaagtgcaggaagaggaagctggagcgcatcagccggctggaggagaaggtgaagaccctgaagagccagaacacagagctggccagcacagccagcctgctgcgggagcaggtggcccagctgaagcagaaggtgctgagccacgtgaacagcggctgccagctgctgccccagcaccaggtgcctgcctactag

SEQ ID NO: 156684 - DNA, 2934 bp, synthetic construct
  misc_feature 1..2934: note = Description of Artificial Sequence: Synthetic coding sequence
  source 1..2934: mol_type = other DNA
atgagctttgccctggaggagaccctggagagtgactgggtggccgtgcggccccacgtgtttgatgagcgggagaagcacaagtttgtgttcatcgtggcctggaatgaaattgagggcaagtttgccatcacctgccacaacagaacagcccagaggcagaggagcggcagccgggagcaggccggggcccggggcggcgctgaggccggcggggccgccagtgatggcagccggggccctggcagccctgctggccggggccggcctgaggccacagccagcgccaccctggtgcgcagccctggccccaggaggagcagcgcctgggccgagggcggcagccccaggagcaccaggagcctgctgggggacccccggctgcggagccctggcagcaaaggagctgagagccggctgcggagccctgtgcgggccaagcccatccctggccagaagaccagcgaggctgatgatgctgctggagctgctgctgctgctgcccggcctgccccccgggaggcccaggtgtcctctgtgcgcatcgtgtctgccagcggcaccgtgtctgaggagattgaggtgctggagatggtgaaggaggatgaggcccccctggccctgagtgatgctgagcagcccccaccagccacagagctggagagccctgctgaggagtgctcctgggccggcctcttctccttccaggacctgcgggctgtgcaccagcagctgtgcagcgtgaacagccagctggagccctgcctgcctgtgtttcctgaggagcccagcggcatgtggacagtgctgtttggaggagcccctgagatgacagagcaggagattgacaccctgtgctaccagctgcaggtgtacctgggccacggcctggacacctgtggctggaagatcctgagccaggtgctcttcacagaaacagatgatcctgaggagtactatgagagcctgtctgagctgcggcagaagggctatgaggaggtgctgcagagggccaggaagaggatccaggagctgctggacaagcacaagaacacagagagcatggtggagctgctggacctgtaccagatggaggatgaggcctacagcagcctggccgaggccaccacagagctgtaccagtacctgctgcagcccttccgggacatgagggagctggccatgctgcggcggcagcagatcaagatctccatggagaatgactacctgggccccaggagaattgagagcctgcagaaggaggatgctgactggcagaggaaggcccacatggctgtgctgagcatccaggacctgactgtgaagtactttgagatcacagccaaggcccagaaggctgtgtatgacaggatgagagctgaccagaagaagtttgggaaggcctcctgggccgctgctgctgagaggatggagaagctgcagtatgctgtgtccaaggagaccctgcagatgatgagggccaaggagatctgcctggagcagaggaagcacgccctgaaggaggagatgcagagcctgcggggcggcacagaggccatcgcccggctggaccagctggaggccgactactatgacctgcagctgcagctgtatgaggtgcagtttgagatcctgaagtgtgaggagctgctgctgacagcccagctggagagcatcaagaggctcatcagcgagaagagagatgaggtggtgtactatgacacctatgagagcatggaggccatgctggagaaggaggagatggccgccagcgcctacctgcagcgggaggagctgcagaagctgcagcagaaggcccggcagctggaggcccggcggggccgggtgtctgccaagaagagctacctgaggaacaagaaggagatctgcatcgccaagcacaatgagaagatccagcagaggaccagaattgaagatgagtaccgcacccaccacacagtgcagctgaagcgggagaagctgcatgatgaggaggagaggaagagcgcctgggtgtcccaggagcggcagaggaccctggaccggctgcggaccttcaagcagcgctacccaggccaggtgatcctgaagagcacccggctgcggctggcccacgcccggaggaaaggagctgccagccctgtgctgcaggaggaccactgtgacagcctgcccagcgtgctgcaggtggaggagaagacagaggaggtgggggagggccgggtgaagaggggccccagccagaccacagagccccagagcctggtgcagctggaggacaccagcctgacccagctggaggccaccagcctgcccctgagcggcgtgaccagcgagctgccccccaccatcagcctgcccctgctgaacaacaacctggagccctgcagcgtgaccatcaaccccctgcccagccccctgccccccaccccacctccacccctgcctgtggccaaggacagcggccctgagaccctggagaaggacctgcccaggaaggagggcaatgagaagaggatccccaagagcgccagcgcccccagcgcccacctgtttgacagcagccagctggtgtctgccaggaagaagctgaggaagacagctgagggcctgcagaggcggcgggtgagcagccccatggatgaggtgctggccagcctgaagaggggcagcttccacctgaagaaggtggagcagaggaccctgccccccttcccagatgaagatgacagcaacaacatcctggcccagatcaggaagggcgtgaagctgaagaaggtgcagaaggatgtgctgcgggagagcttcaccctgctgcctgacacagaccccctgaccaggagcatccacgaggccctgcggcgcatcaaggaggccagccctgagagtgaagatgaggaggaggccctgccctgcacagactgggagaactag

SEQ ID NO: 156685 - DNA, 2967 bp, synthetic construct
  misc_feature 1..2967: note = Description of Artificial Sequence: Synthetic coding sequence
  source 1..2967: mol_type = other DNA
atgagctttgccctggaggagaccctggagagtgactgggtggccgtgcggccccacgtgtttgatgagcgggagaagcacaagtttgtgttcatcgtggcctggaatgaaattgagggcaagtttgccatcacctgccacaacagaacagcccagaggcagaggagcggcagccgggagcaggccggggcccggggcggcgctgaggccggcggggccgccagtgatggcagccggggccctggcagccctgctggccggggccggcctgaggccacagccagcgccaccctggtgcgcagccctggccccaggaggagcagcgcctgggccgagggcggcagccccaggagcaccaggagcctgctgggggacccccggctgcggagccctggcagcaaaggagctgagagccggctgcggagccctgtgcgggccaagcccatccctggccagaagaccagcgaggctgatgatgctgctggagctgctgctgctgctgcccggcctgccccccgggaggcccaggtgtcctctgtgcgcatcgtgtctgccagcggcaccgtgtctgaggagattgaggtgctggagatggtgaaggaggatgaggcccccctggccctgagtgatgctgagcagcccccaccagccacagagctggagagccctgctgaggagtgctcctgggccggcctcttctccttccaggacctgcgggctgtgcaccagcagctgtgcagcgtgaacagccagctggagccctgcctgcctgtgtttcctgaggagcccagcggcatgtggacagtgctgtttggaggagcccctgagatgacagagcaggagattgacaccctgtgctaccagctgcaggtgtacctgggccacggcctggacacctgtggctggaagatcctgagccaggtgctcttcacagaaacagatgatcctgaggagtactatgagagcctgtctgagctgcggcagaagggctatgaggaggtgctgcagagggccaggaagaggatccaggagctgctggacaagcacaagaacacagagagcatggtggagctgctggacctgtaccagatggaggatgaggcctacagcagcctggccgaggccaccacagagctgtaccagtacctgctgcagcccttccgggacatgagggagctggccatgctgcggcggcagcagatcaagatctccatggagaatgactacctgggccccaggagaattgagagcctgcagaaggaggatgctgactggcagaggaaggcccacatggctgtgctgagcatccaggacctgactgtgaagtactttgagatcacagccaaggcccagaaggctgtgtatgacaggatgagagctgaccagaagaagtttgggaaggcctcctgggccgctgctgctgagaggatggagaagctgcagtatgctgtgtccaaggagaccctgcagatgatgagggccaaggagatctgcctggagcagaggaagcacgccctgaaggaggagatgcagagcctgcggggcggcacagaggccatcgcccggctggaccagctggaggccgactactatgacctgcagctgcagctgtatgaggtgcagtttgagatcctgaagtgtgaggagctgctgctgacagcccagctggagagcatcaagaggctcatcagcgagaagagagatgaggtggtgtactatgacacctatgagagcatggaggccatgctggagaaggaggagatggccgccagcgcctacctgcagcgggaggagctgcagaagctgcagcagaaggcccggcagctggaggcccggcggggccgggtgtctgccaagaagagctacctgaggaacaagaaggagatctgcatcgccaagcacaatgagaagatccagcagaggaccagaattgaagatgagtaccgcacccaccacacagtgcagctgaagcgggagaagctgcatgatgaggaggagaggaagagcgcctgggtgtcccaggagcggcagaggaccctggaccggctgcggaccttcaagcagcgctacccaggccaggtgatcctgaagagcacccggctgcggctggcccacgcccggaggaaaggagctgccagccctgtgctgcaggaggaccactgtgacagcctgcccagcgtgctgcaggtggaggagaagacagaggaggtgggggagggccgggtgaagaggggccccagccagaccacagagccccagagcctggtgcagctggaggacaccagcctgacccagctggaggccaccagcctgcccctgagcggcgtgaccagcgagctgccccccaccatcagcctgcccctgctgaacaacaacctggagccctgcagcgtgaccatcaaccccctgcccagccccctgccccccaccccacctcctcctcctcctcctcctcctcctcctcctcctccacccctgcctgtggccaaggacagcggccctgagaccctggagaaggacctgcccaggaaggagggcaatgagaagaggatccccaagagcgccagcgcccccagcgcccacctgtttgacagcagccagctggtgtctgccaggaagaagctgaggaagacagctgagggcctgcagaggagaagagtgagcagccccatggatgaggtgctggccagcctgaagaggggcagcttccacctgaagaaggtggagcagaggaccctgccccccttcccagatgaagatgacagcaacaacatcctggcccagatcagaaaaggagtgaagctgaagaaggtgcagaaggatgtgctgcgggagagcttcaccctgctgcctgacacagaccccctgaccaggagcatccacgaggccctgcggcgcatcaaggaggccagccctgagagtgaagatgaggaggaggccctgccctgcacagactgggagaactag

SEQ ID NO: 156686 - DNA, 2238 bp, synthetic construct
  misc_feature 1..2238: note = Description of Artificial Sequence: Synthetic coding sequence
  source 1..2238: mol_type = other DNA
atggaggtgatgaacctgatggagcagcccatcaaggtgacagagtggcagcagacctacacctatgacagcggcatccacagcggggccaacacctgtgtgcccagcgtgagcagcaagggcatcatggaggaggatgaggcctgtggccggcagtacaccctgaagaagaccaccacctacacccagggcgtgccccccagccagggcgacctggagtaccagatgagcaccacagcccgggccaagagggtgcgggaggccatgtgccctggggtgtctggagaggacagcagcctgctgctggccacccaggtggagggccaggccaccaacctgcagaggctggccgagcccagccagctgctgaagagcgccatcgtgcacctgatcaactaccaggatgatgctgagctggccacccgggccctgcctgagctgaccaagctgctgaatgatgaggaccctgtggtggtgaccaaggccgccatgattgtgaaccagctgagcaagaaggaggccagccggcgggccctgatgggcagcccccagctggtggccgctgtggtgaggaccatgcagaacaccagtgacctggacacagcccgctgcaccaccagcatcctgcacaacctgagccaccaccgggagggcctgctggccatcttcaagagcggcggcatcccagccctggtgaggatgctgagcagccctgtggagagcgtgctcttctacgccatcaccaccctgcacaacctgctgctgtaccaggagggcgccaagatggctgtgcggctggctgatggcctgcagaagatggtgcccctgctgaacaagaacaaccccaagttcctggccatcaccacagactgcctgcagctgctggcctacggcaaccaggagagcaagctgatcatcctggccaatggaggcccccaggccctggtgcagatcatgaggaactacagctatgagaagctgctgtggaccaccagccgggtgctgaaggtgctgtctgtgtgccccagcaacaagccagccatcgtggaggccggcggcatgcaggccctgggcaagcacctgaccagcaacagcccccggctggtgcagaactgcctgtggaccctgaggaacctgagtgatgtggccaccaagcaggagggcctggagagcgtgctgaagatcctggtgaaccagctgtctgtggatgatgtgaatgtgctgacctgtgccaccggcaccctgagcaacctgacctgcaacaacagcaagaacaagaccctggtgacccagaacagcggcgtggaggccctgatccacgccatcctgcgggccggggacaaggatgacatcacagagcctgctgtgtgtgccctgcggcacctgaccagccgccaccctgaggccgagatggcccagaacagcgtgcggctgaactacggcatcccagccatcgtgaagctgctgaaccagcccaaccagtggcccctggtgaaggccaccatcggcctcatccggaacctggccctgtgcccagccaaccacgcccccctgcaggaggccgccgtcatcccccggctggtgcagctgctggtgaaggcccaccaggatgcccagagacatgtggccgccggcacccagcagccctacacagatggagtgaggatggaggagatcgtggagggctgcaccggggccctgcacatcctggcccgggaccccatgaacaggatggagatcttccggctgaacaccatccccctgtttgtgcagctgctgtacagctctgtggagaacatccagagggtggccgccggcgtgctgtgtgagctggcccaggacaaggaggccgcagatgccattgatgctgagggcgccagcgcccccctgatggagctgctgcacagcagaaatgaaggaacagccacctatgctgctgctgtgctcttccgcatcagcgaggacaagaacccagactacaggaagagggtgtctgtggagctgaccaacagcctcttcaagcatgaccctgctgcctgggaggccgcccagagcatgatccccatcaatgagccctatggagatgacatggatgccacctaccggcccatgtacagcagtgatgtgcccctggaccccctggagatgcacatggacatggatggagactaccccatcgacacctacagtgatggcctgcggcccccctaccccacagctgaccacatgctggcctag

SEQ ID NO: 156687 - DNA, 2238 bp, synthetic construct; identical to SEQ ID NO: 156686
  misc_feature 1..2238: note = Description of Artificial Sequence: Synthetic coding sequence
  source 1..2238: mol_type = other DNA

SEQ ID NO: 156688 - DNA, 2238 bp, synthetic construct; identical to SEQ ID NO: 156686
  misc_feature 1..2238: note = Description of Artificial Sequence: Synthetic coding sequence
  source 1..2238: mol_type = other DNA

SEQ ID NO: 156689 - DNA, 834 bp, synthetic construct
  misc_feature 1..834: note = Description of Artificial Sequence: Synthetic coding sequence
  source 1..834: mol_type = other DNA
atggaggtgatgaacctgatggagcagcccatcaaggtgacagagtggcagcagacctacacctatgacagcggcatccacagcggggccaacacctgtgtgcccagcgtgagcagcaagggcatcatggaggaggatgaggcctgtggccggcagtacaccctgaagaagaccaccacctacacccagggcgtgccccccagccagggcgacctggagtaccagatgagcaccacagcccgggccaagagggtgcgggaggccatgtgccctggggtgtctggagaggacagcagcctgctgctggccacccaggtggagggccaggccaccaacctgcagaggctggccgagcccagccagctgctgaagagcgccatcgtgcacctgatcaactaccaggatgatgctgagctggccacccgggccctgcctgagctgaccaagctgctgaatgatgaggaccctgtggtggtgaccaaggccgccatgattgtgaaccagctgagcaagaaggaggccagccggcgggccctgatgggcagcccccagctggtggccgctgtggtgaggaccatgcagaacaccagtgacctggacacagcccgctgcaccaccagcatcctgcacaacctgagccaccaccgggagggcctgctggccatcttcaagagcggcggcatcccagccctggtgaggatgctgagcagccctgtggagagcgtgctcttctacgccatcaccaccctgcacaacctgctgctgtaccaggagggcgccaagatggctgtgcggctggctgatggcctgcagaagatggtgcccctgctgtag

SEQ ID NO: 156690 - DNA, 708 bp, synthetic construct
  misc_feature 1..708: note = Description of Artificial Sequence: Synthetic coding sequence
  source 1..708: mol_type = other DNA
atggaggtgatgaacctgatggagcagcccatcaaggtgacagagtggcagcagacctacacctatgacagcggcatccacagcggggccaacacctgtgtgcccagcgtgagcagcaagggcatcatggaggaggatgaggcctgtggccggcagtacaccctgaagaagaccaccacctacacccagggcgtgccccccagccagggcgacctggagtaccagatgagcaccacagcccgggccaagagggtgcgggaggccatgtgccctggggtgtctggagaggacagcagcctgctgctggccacccaggtggagggccaggccaccaacctgcagaggctggccgagcccagccagctgctgaagagcgccatcgtgcacctgatcaactaccaggatgatgctgagctggccacccgggccctgcctgagctgaccaagctgctgaatgatgaggaccctgtggtggtgaccaaggccgccatgattgtgaaccagctgagcaagaaggaggccagccggcgggccctgatgggcagcccccagctggtggccgctgtggtgaggaccatgcagaacaccagtgacctggacacagcccgctgcaccaccagcatcctgcacaacctgagccaccaccgggagggcctgctggccatcttcaagagcggcggcatcccagccctggtgaggatgctgtag

SEQ ID NO: 156691 - DNA, 891 bp, synthetic construct
  misc_feature 1..891: note = Description of Artificial Sequence: Synthetic coding sequence
  source 1..891: mol_type = other DNA
atggaggtgatgaacctgatggagcagcccatcaaggtgacagagtggcagcagacctacacctatgacagcggcatccacagcggggccaacacctgtgtgcccagcgtgagcagcaagggcatcatggaggaggatgaggcctgtggccggcagtacaccctgaagaagaccaccacctacacccagggcgtgccccccagccagggcgacctggagtaccagatgagcaccacagcccgggccaagagggtgcgggaggccatgtgccctggggtgtctggagaggacagcagcctgctgctggccacccaggtggagggccaggccaccaacctgcagaggctggccgagcccagccagctgctgaagagcgccatcgtgcacctgatcaactaccaggatgatgctgagctggccacccgggccctgcctgagctgaccaagctgctgaatgatgaggaccctgtggtggtgaccaaggccgccatgattgtgaaccagctgagcaagaaggaggccagccggcgggccctgatgggcagcccccagctggtggccgctgtggtgaggaccatgcagaacaccagtgacctggacacagcccgctgcaccaccagcatcctgcacaacctgagccaccaccgggagggcctgctggccatcttcaagagcggcggcatcccagccctggtgaggatgctgagcagccctgtggagagcgtgctcttctacgccatcaccaccctgcacaacctgctgctgtaccaggagggcgccaagatggctgtgcggctggctgatggcctgcagaagatggtgcccctgctgaacaagaacaaccccaagttcctggccatcaccacagactgcctgcagctgctggcctag

SEQ ID NO: 156692 - DNA, 261 bp, synthetic construct
  misc_feature 1..261: note = Description of Artificial Sequence: Synthetic coding sequence
  source 1..261: mol_type = other DNA
atggaggtgatgaacctgatggagcagcccatcaaggtgacagagtggcagcagacctacacctatgacagcggcatccacagcggggccaacacctgtgtgcccagcgtgagcagcaagggcatcatggaggaggatgaggcctgtggccggcagtacaccctgaagaagaccaccacctacacccagggcgtgccccccagccagggcgacctggagtaccagatgagcaccacagcccgggccaagagggtgaggtag

SEQ ID NO: 156693 - DNA, 897 bp, synthetic construct
  misc_feature 1..897: note = Description of Artificial Sequence: Synthetic coding sequence
  source 1..897: mol_type = other DNA
atggaggtgatgaacctgatggagcagcccatcaaggtgacagagtggcagcagacctacacctatgacagcggcatccacagcggggccaacacctgtgtgcccagcgtgagcagcaagggcatcatggaggaggatgaggcctgtggccggcagtacaccctgaagaagaccaccacctacacccagggcgtgccccccagccagggcgacctggagtaccagatgagcaccacagcccgggccaagagggtgcgggaggccatgtgccctggggtgtctggagaggacagcagcctgctgctggccacccaggtggagggccaggccaccaacctgcagaggctggccgagcccagccagctgctgaagagcgccatcgtgcacctgatcaactaccaggatgatgctgagctggccacccgggccctgcctgagctgaccaagctgctgaatgatgaggaccctgtggtggtgaccaaggccgccatgattgtgaaccagctgagcaagaaggaggccagccggcgggccctgatgggcagcccccagctggtggccgctgtggtgaggaccatgcagaacaccagtgacctggacacagcccgctgcaccaccagcatcctgcacaacctgagccaccaccgggagggcctgctggccatcttcaagagcggcggcatcccagccctggtgaggatgctgagcagccctgtggagagcgtgctcttctacgccatcaccaccctgcacaacctgctgctgtaccaggagggcgccaagatggctgtgcggctggctgatggcctgcagaagatggtgcccctgctgaacaagaacaaccccaagttcctggccatcaccacagactgcctgcagctgctggcctatggatag

SEQ ID NO: 156694 - DNA, 1776 bp, synthetic construct
  misc_feature 1..1776: note = Description of Artificial Sequence: Synthetic coding sequence
  source 1..1776: mol_type = other DNA
atggaggtgatgaacctgatggagcagcccatcaaggtgacagagtggcagcagacctacacctatgacagcggcatccacagcggggccaacacctgtgtgcccagcgtgagcagcaagggcatcatggaggaggatgaggcctgtggccggcagtacaccctgaagaagaccaccacctacacccagggcgtgccccccagccagggcgacctggagtaccagatgagcaccacagcccgggccaagagggtgcgggaggccatgtgccctggggtgtctggagaggacagcagcctgctgctggccacccaggtggagggccaggccaccaacctgcagaggctggccgagcccagccagctgctgaagagcgccatcgtgcacctgatcaactaccaggatgatgctgagctggccacccgggccctgcctgagctgaccaagctgctgaatgatgaggaccctgtggtggtgaccaaggccgccatgattgtgaaccagctgagcaagaaggaggccagccggcgggccctgatgggcagcccccagctggtggccgctgtggtgaggaccatgcagaacaccagtgacctggacacagcccgctgcaccaccagcatcctgcacaacctgagccaccaccgggagggcctgctggccatcttcaagagcggcggcatcccagccctggtgaggatgctgagcagccctgtggagagcgtgctcttctacgccatcaccaccctgcacaacctgctgctgtaccaggagggcgccaagatggctgtgcggctggctgatggcctgcagaagatggtgcccctgctgaacaagaacaaccccaagttcctggccatcaccacagactgcctgcagctgctggcctacggcaaccaggagagcaagatcctgacagccaccgtggacaatgccaacatcctgctgcagattgacaatgcccggctggccgcagatgacttccgcaccaagtttgaaacagagcaggccctgcggctgtctgtggaggccgacatcaatggcctgcggcgggtgctggatgagctgaccctggcccgggctgacctggagatgcagatcgagaacctgaaggaggagctggcctacctgaagaagaaccacgaggaggagatgaatgccctgcggggccaggtgggcggggagatcaacgtggagatggatgctgcccctggggtggacctgagccgcatcctgaatgagatgagggaccagtatgagaagatggccgagaagaacaggaaggatgctgaggactggttcttcagcaagacagaggagctgaaccgggaggtggccaccaacagcgagctggtgcagagcggcaagtctgagatcagcgagctgcggaggaccatgcaggccctggagattgagctgcagagccagctgtccatgaaggccagcctggagggcaacctggccgagacagaaaatcgctactgtgtgcagctgagccagatccagggcctgattggctctgtggaggagcagctggcccagctgcgctgtgagatggagcagcagaaccaggagtacaagatcctgctggatgtgaagacccggctggagcaggagatcgccacctaccgccgcctgctggagggggaggatgcccacctgacccagtacaagaaggagcctgtgaccacccggcaggtgaggaccatcgtggaggaggtgcaggacggcaaggtgatcagcagccgggagcaggtgcaccagaccaccaggtag

SEQ ID NO: 156695 - DNA, 897 bp, synthetic construct
  misc_feature 1..897: note = Description of Artificial Sequence: Synthetic coding sequence
  source 1..897: mol_type = other DNA
atggcccggcgcagccgccaccggctgctgctgctgctgctgcgctacctggtggtggccctgggctaccacaaggcctacggcttcagcgcccccaaggaccagcaggtggtgacagctgtggagtaccaggaggccatcctggcctgcaagacccccaagaagacagtgagcagccggctggagtggaagaagctgggccgctctgtgtcctttgtgtactaccagcagaccctgcagggcgacttcaagaacagagctgagatgattgacttcaacatccgcatcaagaatgtgaccaggagtgatgctgggaagtaccgctgtgaggtgtctgcccccagcgagcagggccagaacctggaggaggacacagtgaccctggaggtgctggtggccccagctgtgcccagctgtgaggtgcccagcagcgccctgtctggaacagtggtggagctgcgctgccaggacaaggagggcaacccagcccctgagtacacctggttcaaggatggcatccggctgctggagaacccccggctgggcagccagagcaccaacagcagctacaccatgaacaccaagacaggcaccctgcagttcaacacagtgtccaagctggacacaggagagtacagctgtgaggccagaaattctgtgggctaccgccgctgccctgggaagaggatgcaggtggatgacctgaacatcagcggcatcatcgctgctgtggtggtggtggccctggtgatctctgtgtgtggcctgggcgtgtgctacgcccagaggaagggctacttcagcagcaagtacatgttcatgaagagcaacagcagcagcaaggccaccaccatgtctgaaaatgacttcaagcacaccaagagcttcatcatctag

SEQ ID NO: 156696 - DNA, 789 bp, synthetic construct
  misc_feature 1..789: note = Description of Artificial Sequence: Synthetic coding sequence
  source 1..789: mol_type = other DNA
atggcccggcgcagccgccaccggctgctgctgctgctgctgcgctacctggtggtggccctgggctaccacaaggcctacggcttcagcgcccccaaggaccagcaggtggtgacagctgtggagtaccagggcgacttcaagaacagagctgagatgattgacttcaacatccgcatcaagaatgtgaccaggagtgatgctgggaagtaccgctgtgaggtgtctgcccccagcgagcagggccagaacctggaggaggacacagtgaccctggaggtgctggtggccccagctgtgcccagctgtgaggtgcccagcagcgccctgtctggaacagtggtggagctgcgctgccaggacaaggagggcaacccagcccctgagtacacctggttcaaggatggcatccggctgctggagaacccccggctgggcagccagagcaccaacagcagctacaccatgaacaccaagacaggcaccctgcagttcaacacagtgtccaagctggacacaggagagtacagctgtgaggccagaaattctgtgggctaccgccgctgccctgggaagaggatgcaggtggatgacctgaacatcagcggcatcatcgctgctgtggtggtggtggccctggtgatctctgtgtgtggcctgggcgtgtgctacgcccagaggaagggctacttcagcaaggagaccagcttccagaagagcaacagcagcagcaaggccaccaccatgtctgaaaatgacttcaagcacaccaagagcttcatcatctag

SEQ ID NO: 156697 - DNA, 897 bp, synthetic construct
  misc_feature 1..897: note = Description of Artificial Sequence: Synthetic coding sequence
  source 1..897: mol_type = other DNA
atggcccggcgcagccgccaccggctgctgctgctgctgctgcgctacctggtggtggccctgggctaccacaaggcctacggcttcagcgcccccaaggaccagcaggtggtgacagctgtggagtaccaggaggccatcctggcctgcaagacccccaagaagacagtgagcagccggctggagtggaagaagctgggccgctctgtgtcctttgtgtactaccagcagaccctgcagggcgacttcaagaacagagctgagatgattgacttcaacatccgcatcaagaatgtgaccaggagtgatgctgggaagtaccgctgtgaggtgtctgcccccagcgagcagggccagaacctggaggaggacacagtgaccctggaggtgctggtggccccagctgtgcccagctgtgaggtgcccagcagcgccctgtctggaacagtggtggagctgcgctgccaggacaaggagggcaacccagcccctgagtacacctggttcaaggatggcatccggctgctggagaacccccggctgggcagccagagcaccaacagcagctacaccatgaacaccaagacaggcaccctgcagttcaacacagtgtccaagctggacacaggagagtacagctgtgaggccagaaattctgtgggctaccgccgctgccctgggaagaggatgcaggtggatgacctgaacatcagcggcatcatcgctgctgtggtggtggtggccctggtgatctctgtgtgtggcctgggcgtgtgctacgcccagaggaagggctacttcagcaaggagaccagcttccagaagagcaacagcagcagcaaggccaccaccatgtctgaaaatgacttcaagcacaccaagagcttcatcatctag

SEQ ID NO: 156698 - DNA, 939 bp, synthetic construct
  misc_feature 1..939: note = Description of Artificial Sequence: Synthetic coding sequence
  source 1..939: mol_type = other DNA
atggcccggcgcagccgccaccggctgctgctgctgctgctgcgctacctggtggtggccctgggctaccacaaggcctacggcttcagcgcccccaaggaccagcaggtggtgacagctgtggagtaccaggaggccatcctggcctgcaagacccccaagaagacagtgagcagccggctggagtggaagaagctgggccgctctgtgtcctttgtgtactaccagcagaccctgcagggcgacttcaagaacagagctgagatgattgacttcaacatccgcatcaagaatgtgaccaggagtgatgctgggaagtaccgctgtgaggtgtctgcccccagcgagcagggccagaacctggaggaggacacagtgaccctggaggtgctggtggccccagctgtgcccagctgtgaggtgcccagcagcgccctgtctggaacagtggtggagctgcgctgccaggacaaggagggcaacccagcccctgagtacacctggttcaaggatggcatccggctgctggagaacccccggctgggcagccagagcaccaacagcagctacaccatgaacaccaagacaggcaccctgcagttcaacacagtgtccaagctggacacaggagagtacagctgtgaggccagaaattctgtgggctaccgccgctgccctgggaagaggatgcaggtggatgacctgaacatcagcggcatcatcgctgctgtggtggtggtggccctggtgatctctgtgtgtggcctgggcgtgtgctacgcccagaggaagggctacttcagcaaggagaccagcttccagaagagcaacagcagcagcaaggccaccaccatgtctgaaaatgtgcagtggctgacccctgtgatcccagccctgtggaaggctgctgctgggggcagccggggccaggagttctag

SEQ ID NO: 156699 - DNA, 933 bp, synthetic construct
  misc_feature 1..933: note = Description of Artificial Sequence: Synthetic coding sequence
  source 1..933: mol_type = other DNA
atggccctgcggcggcccccccggctgcggctgtgtgcccggctgcctgacttcttcctgctgctgctcttccggggctgcctgattggagctgtgaacctgaagagcagcaacagaacacctgtggtgcaggagtttgagagcgtggagctgagctgcatcatcacagacagccagaccagtgaccccagaattgagtggaagaagatccaggatgagcagaccacctacgtgttctttgacaacaagatccagggcgacctggccggccgggcagagatcctgggcaagaccagcctgaagatctggaatgtgacccggcgggacagcgccctgtaccgctgtgaggtggtggccagaaatgacaggaaggagattgatgaaattgtgattgagctgactgtgcaggtgaagcctgtgacccctgtgtgccgggtgcccaaggctgtgcctgtgggcaagatggccaccctgcactgccaggagagcgagggccacccccggccccactacagctggtacagaaatgatgtgcccctgcccacagacagccgggccaacccccgcttcaggaacagcagcttccacctgaacagcgagaccggcaccctggtgttcaccgctgtgcacaaggatgacagcggccagtactactgcatcgccagcaatgatgctggcagcgcccgctgtgaggagcaggagatggaggtgtatgacctgaacatcggcggcatcatcggcggcgtgctggtggtgctggccgtgctggccctgatcaccctgggcatctgctgtgcctaccgccggggctacttcatcaacaacaagcaggatggagagagctacaagaaccctgggaagccagatggagtgaactacatcagaacagatgaggagggggacttccgccacaagagcagctttgtgatctag

SEQ ID NO: 156700 - DNA, 780 bp, synthetic construct
  misc_feature 1..780: note = Description of Artificial Sequence: Synthetic coding sequence
  source 1..780: mol_type = other DNA
atggccctgcggcggcccccccggctgcggctgtgtgcccggctgcctgacttcttcctgctgctgctcttccggggctgcctgattggagctgtgaacctgaagagcagcaacagaacacctgtggtgcaggagtttgagagcgtggagctgagctgcatcatcacagacagccagaccagtgaccccagaattgagtggaagaagatccaggatgagcagaccacctacgtgttctttgacaacaagatccaggtgaagcctgtgacccctgtgtgccgggtgcccaaggctgtgcctgtgggcaagatggccaccctgcactgccaggagagcgagggccacccccggccccactacagctggtacagaaatgatgtgcccctgcccacagacagccgggccaacccccgcttcaggaacagcagcttccacctgaacagcgagaccggcaccctggtgttcaccgctgtgcacaaggatgattctggccagtactactgcatcgccagcaatgatgctggcagcgcccgctgtgaggagcaggagatggaggtgtatgacctgaacattggaggcatcattggaggagtgctggtggtgctggccgtgctggccctgatcaccctgggcatctgctgtgcctacagaagaggctacttcatcaacaacaagcaggatggagagagctacaagaaccctgggaagccagatggagtgaactacatcagaacagatgaggagggggacttccgccacaagagcagctttgtgatctag

SEQ ID NO: 156701 - DNA, 1068 bp, synthetic construct
  misc_feature 1..1068: note = Description of Artificial Sequence: Synthetic coding sequence
  source 1..1068: mol_type = other DNA
atggtgcctgcccggctgggccctgctgtggccatggtgactggagctggccggcgggtgctggccggctgggcccacgcccggggggactacaagccccggcgggctgctgctggccccagcgccaccctggacatggccctgcggcggcccccccggctgcggctgtgtgcccggctgcctgacttcttcctgctgctgctcttccggggctgcctgattggagctgtgaacctgaagagcagcaacagaacacctgtggtgcaggagtttgaatctgtggagctgagctgcatcatcacagacagccagaccagtgacccccgcatcgagtggaagaagatccaggatgagcagaccacctacgtgttctttgacaacaagatccagggcgacctggccggccgggcagagatcctgggcaagaccagcctgaagatctggaatgtgacccggcgggacagcgccctgtaccgctgtgaggtggtggccagaaatgacaggaaggagattgatgagatcgtcatcgagctgactgtgcaggtgaagcctgtgacccctgtgtgccgggtgcccaaggctgtgcctgtgggcaagatggccaccctgcactgccaggagagcgagggccacccccggccccactacagctggtacagaaatgatgtgcccctgcccacagacagccgggccaacccccgcttcaggaacagcagcttccacctgaacagcgagaccggcaccctggtgttcaccgctgtgcacaaggatgattctggccagtactactgcatcgccagcaatgatgctggcagcgcccgctgtgaggagcaggagatggaggtgtatgacctgaacattggaggcatcattggaggagtgctggtggtgctggccgtgctggccctgatcaccctgggcatctgctgtgcctacagaagaggctacttcatcaacaacaagcaggatggagagagctacaagaaccctgggaagccagatggagtgaactacatcagaacagatgaggagggggacttccgccacaagagcagctttgtgatctag

SEQ ID NO: 156702 - DNA, 1986 bp, synthetic construct
  misc_feature 1..1986: note = Description of Artificial Sequence: Synthetic coding sequence
  source 1..1986: mol_type = other DNA
atgactggaggccgctttgattttgatgatggcggcacctactgcggcggctgggaggagggcaaggcccacggccacggcatctgcaccggccccaagggccagggcgagtacagcggctcctggagccacggctttgaggtggtgggcggctacacctggcccagcggcaacacctaccagggctactgggcccagggcaagagacatggcctgggcgtggagaccaagggcaagtggatgtacagaggagagtggagccacggcttcaagggccgctatggagtgcggcagagcctgtgcaccccagcccgctatgagggcacctggagcaatggcctgcaggacggctacggcgtggagacctatggagatggcggcacctaccagggccagtgggccggcggcatgagacatggctatggagtgcggcagagcgtgccctacggcatggccaccgtcatccgcagccccctgcggaccagcctggccagcctgcggtctgagcagagcaatggatctgtgctgcatgatgctgctgctgctgctgacagccctgctggcacccggggcggctttgtgctgaacttccacgcagatgctgagctggccggcaagaagaagggcggcctcttcagaagaggcagcctgctgggctccatgaagctgaggaagtctgagagcaagagcagcatcagcagcaagaggagctctgtgcggagtgatgctgccatgagccgcatcagcagcagtgatgccaacagcaccatcagctttggagatgtggactgtgacttctgccctgtggaggaccacgtggatgccaccaccacagagacctacatgggagagtggaagaatgacaagagaaatggatttggagtgtctgagaggagcaatggcatgaagtatgaaggagagtgggccaacaacaagagacatggctacggctgcaccgtcttcccagatggcagcaaggaggagggcaagtacaagaacaacatcctggtgcggggcatcaggaagcagctgatccccatccgccacaccaagacccgggagaaggtggaccgggccatcgagggcgcccagagagctgctgccatggcccggaccaaggtggagatcgccaacagcaggacagcccacgcccgggccaaggcagatgctgctgaccaggccgccctggccgcccggcaggagtgtgacatcgcccgggctgtggcccgggagctgagcccagacttctaccagcccggccctgactatgtgaagcagcgcttccaggagggcgtggatgccaaggagaaccctgaggagaaggtgcctgagaagccacccacccccaaggagagcccccacttctacaggaagggcaccaccccacccaggagccctgaggccagccccaagcacagccacagccctgccagcagccccaagcccctgaagaagcagaaccccagcagcggggcccggctgaaccaggacaagaggtctgtggctgatgagcaggtgacagccatcgtgaacaagcccctgatgagcaaggcccccaccaaggaggccggggctgtggtgccccagagcaagtacagcggccgccaccacatccccaaccccagcaatggagagctgcacagccagtaccacggctactacgtgaagctgaatgccccccagcacccccctgtggatgtggaggatggagatggcagcagccagagcagcagcgccctggtgcacaagcccagcgccaacaagtggagccccagcaagtctgtgaccaagcctgtggccaaggagagcaaggccgagcccaaggccaagaagtctgagctggccatccccaagaacccagccagcaatgacagctgcccagccctggagaaggaggccaacagcggccccaacagcatcatgattgtgctggtgatgctgctgaacatcggcctggccatcctgtttgtgcacttcctgacctag

SEQ ID NO: 156703 - DNA, 390 bp, synthetic construct
  misc_feature 1..390: note = Description of Artificial Sequence: Synthetic coding sequence
  source 1..390: mol_type = other DNA
atgtctgggggccgctttgattttgatgatggaggagcctactgcggcggctgggagggcggcaaggcccacggccacggcctgtgcaccggccccaagggccagggcgagtacagcggctcctggaactttggatttgaggtggccggcgtgtacacctggcccagcggcaacacctttgagggctactggagccagggcaagagacatggcctgggcatcgagaccaagggccgctggctgtacaagggggagtggacccacggcttcaagggccgctatggcatccggcagagcagcagcagcggggccaagtatgagggcacctggaacaacggcctgcaggacggctacggcacagagacctatgcagatggcggcatgtgctag

SEQ ID NO: 156704 - DNA, 2091 bp, synthetic construct
  misc_feature 1..2091: note = Description of Artificial Sequence: Synthetic coding sequence
  source 1..2091: mol_type = other DNA
atgtctgggggccgctttgattttgatgatggaggagcctactgcggcggctgggagggcggcaaggcccacggccacggcctgtgcaccggccccaagggccagggcgagtacagcggctcctggaactttggatttgaggtggccggcgtgtacacctggcccagcggcaacacctttgagggctactggagccagggcaagagacatggcctgggcatcgagaccaagggccgctggctgtacaagggggagtggacccacggcttcaagggccgctatggcatccggcagagcagcagcagcggggccaagtatgagggcacctggaacaacggcctgcaggacggctacggcacagagacctatgcagatggcggcacctaccagggccagttcaccaacggcatgagacatggctatggagtgcggcagagcgtgccctacggcatggctgtggtggtgcgcagccccctgcggaccagcctgagcagcctgcggtctgagcacagcaatggcaccgtggccccagacagccctgccagccctgccagtgatggccctgccctgcccagccctgccatcccccggggcggctttgccctgagcctgctggccaatgctgaggccgccgcccgggcccccaagggcggcggcctcttccagagaggagccctgctgggcaagctgcggcgggcagagagcaggacctctgtgggcagccagaggagccgggtgtccttcctgaagagtgacctgagcagcggggccagtgatgctgccagcacagccagcctgggggaggccgctgagggcgcagatgaggccgccccctttgaagctgacattgatgccaccaccacagagacctacatgggagagtggaagaatgacaagaggagcggctttggagtgtctgagaggagcagcggcctgcgctatgaaggagagtggctggacaacctgcggcacggctacggctgcaccaccctgcctgatggccaccgggaggagggcaagtaccgccacaacgtgctggtgaaggacaccaagaggaggatgctgcagctgaagagcaacaaggtgcggcagaaggtggagcacagcgtggagggcgcccagagagctgctgccatcgcccggcagaaggccgagattgctgccagcaggaccagccacgccaaggccaaggccgaggccgctgagcaggccgccctggccgccaaccaggagagcaacatcgcccggaccctggcccgggagctggccccagacttctaccagcccggccctgagtaccagaagaggcggctgctgcaggagatcctggagaacagcgagagcctgctggagcccccagacagaggagctggagctgctggcctgccccagcccccccgggagagcccccagctgcacgagcgggagacccccaggcctgagggcggcagccccagccctgctggcaccccaccccagcccaagaggcccaggcctggggtgtccaaggatggcctgctgagccctggggcctggaatggagagcccagcggggagggcagccgctctgtgaccccatctgagggcgccggccgccgcagccctgcccggcctgccacagagaggatggccatcgaggccctgcaggcccccccagcccccagccgggagcctgaggtggccctgtaccagggctaccacagctatgctgtgaggaccaccccacctgagcccccaccatttgaggaccagcctgagcctgaggtgtctggcagcgagagcgcccccagcagccctgccacagcccccctgcaggcccccaccctgcggggccctgagcccgcccgggagaccccagccaagctggagcccaagcccatcatccccaaggccgagccccgggccaaggccaggaagacagaggcccggggcctgaccaaggccggggccaagaagaaggccaggaaggaggccgccctggccgctgaggccgaggtggaggtggaggaggtgcccaacaccatcctgatctgcatggtgatcctgctgaacatcggcctggccatcctgtttgtgcacctgctgacctag

SEQ ID NO: 156705 - DNA, 2247 bp, synthetic construct
  misc_feature 1..2247: note = Description of Artificial Sequence: Synthetic coding sequence
  source 1..2247: mol_type = other DNA
atgagcagcggcggccgcttcaactttgatgatggcggcagctactgcggcggctgggaggatggcaaggcccacggccatggagtgtgcaccggccccaagggccagggcgagtacacaggctcctggagccacggctttgaggtgctgggcgtgtacacctggcccagcggcaacacctaccagggcacctgggcccagggcaagagacatggaattggcctggagagcaagggcaagtgggtgtacaagggggagtggacccacggcttcaagggccgctatggagtgagagaatgtgctggaaatggagccaagtatgagggcacctggagcaatggcctgcaggacggctatggaacagagacctacagtgatggcggcacctaccagggccagtgggtgggcggcatgaggcagggctacggcgtgcggcagagcgtgccctacggcatggccgccgtcatccgcagccccctgcggaccagcatcaacagcctgcggtctgagcacaccaatggaacagccctgcacccagatgccagccctgctgtggccggcagccctgctgtgtcccggggcggctttgtgctggtggcccacagcgacagcgagatcctgaagagcaagaagaagggcctcttccgccgcagcctgctgagcggcctgaagctgaggaagtctgagagcaagagcagcctggccagccagaggagcaagcagagcagcttccgctctgaggccggcatgagcacagtgagcagcacagccagtgacatccacagcaccatcagcctgggggaggccgaggccgagctggccgtgattgaagatgacattgatgccaccaccacagagacctacgtgggggagtggaagaatgacaagaggagcggcttcggcgtgtcccagaggagtgatggcctgaagtatgaaggagagtgggccagcaacagaagacatggctacggctgcatgaccttcccagatggcaccaaggaggagggcaagtacaagcagaacatcctggtgggcggcaagaggaagaacctgatccccctgcgggccagcaagatccgggagaaggtggacagagctgtggaggccgctgagagagctgccaccatcgccaagcagaaggccgagattgctgccagcaggaccagccacagccgggccaaggccgaggccgccctgacagctgcccagaaggcccaggaggaggccagaattgcccgcatcacagccaaggagttcagccccagcttccagcacagagaaaatggcctggagtaccagaggcccaagaggcagaccagctgtgatgacatcgaggtgctgagcacaggcacccccctgcagcaggagagccctgagctgtacaggaagggcaccacccccagcgacctgaccccagatgacagccccctgcagagcttccccaccagccctgctgccaccccacctccagccccagctgccaggaacaaggtggcccacttcagccggcaggtgtctgtggatgaggagcggggcggggacatccagatgctgctggagggccgggccggggactgtgcccggagctcctggggcgaggagcaggccggcggcagcagaggagtgcgcagcggggccctgcggggcggcctgctggtggatgacttccgcacccggggcagcggcaggaagcagcccggcaaccccaagccccgggagaggagaacagagagcccccctgtgttcacctggaccagccaccaccgggccagcaaccacagccctgggggcagccggctgctggagctgcaggaggagaagctgagcaactacaggatggagatgaagcccctgctgaggatggagacccacccccagaagaggcgctacagcaagggcggggcctgccggggcctgggagatgaccacaggcctgaggaccggggcttcggcgtgcagaggctgcggagcaaggcccagaacaaggagaacttccggcctgccagcagcgctgagcctgctgtgcagaagctggccagcctgcggctgggcggcgctgagccccggctgctgcgctgggacctgaccttcagccccccccagaagagcctgcctgtggccctggagagtgatgaagaaaatggagatgagctgaagagcagcacaggcagcgcccccatcctggtggtgatggtgatcctgctgaacattggagtggccatcctcttcatcaacttcttcatctag

SEQ ID NO: 156706 - DNA, 561 bp, synthetic construct
  misc_feature 1..561: note = Description of Artificial Sequence: Synthetic coding sequence
  source 1..561: mol_type = other DNA
atgagcagcggcggccgcttcaactttgatgatggcggcagctactgcggcggctgggaggatggcaaggcccacggccatggagtgtgcaccggccccaagggccagggcgagtacacaggctcctggagccacggctttgaggtgctgggcgtgtacacctggcccagcggcaacacctaccagggcacctgggcccagggcaagagacatggaattggcctggagagcaagggcaagtgggtgtacaagggggagtggacccacggcttcaagggccgctatggagtgagagaatgtgctggaaatggagccaagtatgagggcacctggagcaatggcctgcaggacggctatggaacagagacctacagtgatggagatgccacagccttcggggctgagcccggccctgaggcccgggagctgcctgctgctgctgctgctgctgctgctgctgctgctgctgctgtgcgctggttcctgtgccgggagccctggccagccctgcagctgcctgcctgcctggacagccccatcagcaccccccagtgcacctag

SEQ ID NO: 156707 - DNA, 96 bp, synthetic construct
  misc_feature 1..96: note = Description of Artificial Sequence: Synthetic coding sequence
  source 1..96: mol_type = other DNA
atgccaccccacagcggccagagccggggcaggaagccaggcagctgcctgctgctgctgctgctgctgctgctgctgctgctgctgctgctgtag

SEQ ID NO: 156708 - DNA, 1836 bp, synthetic construct
  misc_feature 1..1836: note = Description of Artificial Sequence: Synthetic coding sequence
  source 1..1836: mol_type = other DNA
atgaggcagggctatggagtgcggcagagcgtgccctacggcatggctgctgtgatccgcagccccctgcggaccagcatcaacagcctgcggtctgagcacaccaacggcacagccctgcacccagatgccagccctgctgtggccggcagccctgctgtgtccagaggaggctttgtgctggtggcccacagcgacagcgagatcctgaagagcaagaagaagggcctcttcagaagaagcctgctgagcggcctgaagctgaggaagtctgagagcaagagcagcctggccagccagaggagcaagcagagcagcttccgctctgaggccggcatgagcacagtgagcagcacagccagtgacatccacagcaccatcagcctgggggaggccgaggccgagctggccgtgattgaagatgacattgatgccaccaccacagagacctacgtgggggagtggaagaatgacaagaggagcggctttggagtgtcccagaggagtgatggcctgaagtatgaaggagagtgggccagcaacagaagacatggctacggctgcatgaccttcccagatggcaccaaggaggagggcaagtacaagcagaacatcctggtgggcggcaagaggaagaacctgatccccctgcgggccagcaagatccgggagaaggtggacagagctgtggaggccgctgagcgggccgccaccatcgccaagcagaaggccgagattgctgccagcaggaccagccacagccgggccaaggccgaggccgccctgacagctgcccagaaggcccaggaggaggcccgcatcgcccgcatcacagccaaggagttcagccccagcttccagcaccgggagaatggcctggagtaccagaggcccaagaggcagaccagctgtgatgacatcgaggtgctgagcacaggcacccccctgcagcaggagagccctgagctgtacaggaagggcaccacccccagcgacctgaccccagatgacagccccctgcagagcttccccaccagccctgctgccaccccacctccagccccagctgccaggaacaaggtggcccacttcagccggcaggtgtctgtggatgaggagcggggcggggacatccagatgctgctggagggccgggccggggactgtgcccggagctcctggggcgaggagcaggccggcggcagccggggcgtgcgcagcggggccctgcggggcggcctgctggtggatgacttccgcacccggggcagcggcaggaagcagcccggcaaccccaagccccgggagaggagaacagagagcccccctgtgttcacctggaccagccaccaccgggccagcaaccacagccctgggggcagccggctgctggagctgcaggaggagaagctgagcaactacaggatggagatgaagcccctgctgaggatggagacccacccccagaagaggcgctacagcaaaggaggagcctgccggggcctgggagatgaccacaggccagaagatcggggctttggagtgcagaggctgcggagcaaggcccagaacaaggagaacttccggcctgccagcagcgctgagcctgctgtgcagaagctggccagcctgcggctgggcggcgctgagccccggctgctgcgctgggacctgaccttcagccccccccagaagagcctgcctgtggccctggagagtgatgaggagaatggagatgagctgaagagcagcactggaagtgcccccatcctggtggtgatggtgatcctgctgaacatcggcgtggccatcctcttcatcaacttcttcatctag

SEQ ID NO: 156709 - DNA, 1347 bp, synthetic construct
  misc_feature 1..1347: note = Description of Artificial Sequence: Synthetic coding sequence
  source 1..1347: mol_type = other DNA
atgaccagcagctgctgcgtgaccaacaacctgcaggccagcctgaagagctgccccaggcctgcctctgtgtgcagcagtggagtgaactgcaggcctgagctgtgcctgggctacgtgtgccagcccatggcctgcctgcccagcgtgtgcctgcccaccaccttccggcctgccagctgcctgagcaagacctacctgagcagcagctgccaggccgccagcggcatcagcggctccatgggccctggctcctggtacagcgagggcgccttcaatggaaatgagaaggagaccatgcagttcctgaatgaccggctggccagctacctgaccagggtgcggcagctggagcaggagaatgctgagctggagagccgcatccaggaggccagccacagccaggtgctgaccatgaccccagactaccagagccacttccgcaccatcgaggagctgcagcagaagatcctgtgcaccaaggcagaaaatgccaggatggtggtgaacatcgacaatgccaagctggccgcagatgacttccgggccaagtatgaagctgagctggccatgaggcagctggtggaggccgacatcaatggcctgcggcgcatcctggatgacctgaccctgtgcaaggctgacctggaggcccaggtggagagcctgaaggaggagctgatgtgcctgaagaagaaccacgaggaggaggtgggcagcctgcgctgccagctgggggaccggctgaacatcgaggtggatgctgcccctcctgtggacctgaccagggtgctggaggagatgcgctgccagtatgaggccatggtggaggccaacagaagagatgtggaggagtggttcaacatgcagatggaggagctgaaccagcaggtggccaccagcagcgagcagctgcagaactaccagagcgacatcatcgacctgcggaggacagtgaacaccctggagattgagctgcaggcccagcacagcctgcgggacagcctggagaacaccctgacagaaagtgaggcccgctacagcagccagctggcccagatgcagtgcatgatcaccaacgtggaggcccagctggccgagatccgggctgacctggagcggcagaaccaggagtaccaggtgctgctggatgtgcgggcccggctggagggggagatcaacacctaccgcagcctgctggagaatgaagactgcaagctgccctgcaacccctgcagcacccccagctgcaccacctgtgtgcccagcccctgtgtgcccaggacagtgtgtgtgcccaggacagtgggcatgccctgcagcccctgcccccagggccgctactag

SEQ ID NO: 156710 - DNA, 1641 bp, synthetic construct
  misc_feature 1..1641: note = Description of Artificial Sequence: Synthetic coding sequence
  source 1..1641: mol_type = other DNA
atggccgaggtggtgtcccctgtgcctggagctggaagaagagagcccggggaggtgggccgggcccggggcccccctgtggccgaccccggggtggccctgagcccccagggcgagatcatcgagggctgccgcctgcctgtgctgcggaggaaccaggacaatgaagatgagtggcccctggccgagatcctgtctgtgaaggacatcagcggcaggaagctgttctacgtgcactacatcgacttcaacaagaggctggatgagtgggtgacccatgagcggctggacctgaagaagatccagttccccaagaaggaggccaagacccccaccaagaatggcctgcccggcagcaggcctggcagccctgagcgggaggtgcctgccagcgcccaggccagcggcaagaccctgcccatccctgtgcagatcaccctgcgcttcaacctgcccaaggagcgggaggccatccctggaggagagccagaccagcccctgagcagcagcagctgcctgcagcccaaccacaggagcaccaagaggaaggtggaggtggtgtccccagccacccctgtgcccagcgagacagccccagcctctgtgttcccccagaatggagctgcccggcgggctgtggccgcccagcccggcaggaagaggaagagcaactgcctgggcacagatgaggacagccaggacagcagtgatggcatccccagcgcccccaggatgacaggcagcctggtgtctgacaggagccatgatgacatcgtgaccaggatgaagaacatcgagtgcatcgagctgggccgccaccggctgaagccctggtacttcagcccctacccccaggagctgaccaccctgcctgtgctgtacctgtgtgagttctgcctgaagtatggccgcagcctgaagtgcctgcagaggcacctgaccaagtgtgacctgcggcaccccccaggaaatgagatctacaggaagggcaccatctccttctttgaaattgatggcaggaagaacaagagctacagccagaacctgtgcctgctggccaagtgcttcctggaccacaagaccctgtactatgacacagaccccttcctgttctacgtgatgacagaatatgactgcaagggcttccacatcgtgggctacttcagcaaggagaaggagagcacagaggactacaacgtggcctgcatcctgaccctgcccccctaccagaggcggggctacggcaagctgctgattgagttctcctatgagctgagcaaggtggagggcaagacaggcaccccagagaagcccctgagtgacctgggcctgctgagctaccgcagctactggagccagaccatcctggagatcctgatgggcctgaagtctgagagcggggagcggccccagatcaccatcaatgagatcagcgagatcaccagcatcaagaaggaggatgtgatcagcaccctgcagtacctgaacctgatcaactactacaagggccagtacatcctgaccctgtctgaagatattgtggatggccacgagcgggccatgctgaagaggctgctgagaattgacagcaagtgcctgcacttcacccccaaggactggagcaagaggggcaagtggtag

SEQ ID NO: 156711 - DNA, 1386 bp, synthetic construct
  misc_feature 1..1386: note = Description of Artificial Sequence: Synthetic coding sequence
  source 1..1386: mol_type = other DNA
atggccgaggtgggggagatcatcgagggctgccgcctgcctgtgctgcggaggaaccaggacaatgaagatgagtggcccctggccgagatcctgtctgtgaaggacatcagcggcaggaagctgttctacgtgcactacatcgacttcaacaagaggctggatgagtgggtgacccatgagcggctggacctgaagaagatccagttccccaagaaggaggccaagacccccaccaagaatggcctgcccggcagccggcccggcagccctgagcgggaggtgaagaggaaggtggaggtggtgtccccagccacccctgtgcccagcgagacagccccagccagcgtcttcccccagaatggagctgccaggagagctgtggccgcccagcccggcaggaagaggaagagcaactgcctgggcacagatgaggacagccaggacagcagtgatggcatccccagcgcccccaggatgacaggcagcctggtgtctgacaggagccatgatgacatcgtgaccaggatgaagaacattgaatgtattgagctgggccgccaccggctgaagccctggtacttcagcccctacccccaggagctgaccaccctgcctgtgctgtacctgtgtgagttctgcctgaagtatggccgcagcctgaagtgcctgcagaggcacctgaccaagtgtgacctgcggcaccccccaggaaatgagatctacaggaagggcaccatctccttctttgaaattgatggcaggaagaacaagagctacagccagaacctgtgcctgctggccaagtgcttcctggaccacaagaccctgtactatgacacagaccccttcctgttctacgtgatgacagaatatgactgcaagggcttccacatcgtgggctacttcagcaaggagaaggagagcacagaggactacaacgtggcctgcatcctgaccctgcccccctaccagaggcggggctacggcaagctgctgattgagttctcctatgagctgagcaaggtggagggcaagacaggcaccccagagaagcccctgagtgacctgggcctgctgagctaccgcagctactggagccagaccatcctggagatcctgatgggcctgaagtctgagagcggggagcggccccagatcaccatcaatgagatcagcgagatcaccagcatcaagaaggaggatgtgatcagcaccctgcagtacctgaacctgatcaactactacaagggccagtacatcctgaccctgtctgaggacatcgtggatggccacgagcgggccatgctgaagaggctgctgagaattgacagcaagtgcctgcacttcacccccaaggactggagcaagaggggcaagtggtag

SEQ ID NO: 156712 - DNA, 1542 bp, synthetic construct
  misc_feature 1..1542: note = Description of Artificial Sequence: Synthetic coding sequence
  source 1..1542: mol_type = other DNA
atggccgaggtgggggagatcatcgagggctgccgcctgcctgtgctgcggaggaaccaggacaatgaagatgagtggcccctggccgagatcctgtctgtgaaggacatcagcggcaggaagctgttctacgtgcactacatcgacttcaacaagaggctggatgagtgggtgacccatgagcggctggacctgaagaagatccagttccccaagaaggaggccaagacccccaccaagaatggcctgcccggcagccggcccggcagccctgagcgggaggtgcctgccagcgcccaggccagcggcaagaccctgcccatccctgtgcagatcaccctgcgcttcaacctgcccaaggagcgggaggccatccctggaggagagccagaccagcccctgagcagcagcagctgcctgcagcccaaccacaggagcaccaagaggaaggtggaggtggtgtccccagccacccctgtgcccagcgagacagccccagccagcgtcttcccccagaatggagctgccaggagagctgtggccgcccagcccggcaggaagaggaagagcaactgcctgggcacagatgaggacagccaggacagcagtgatggcatccccagcgcccccaggatgacaggcagcctggtgtctgacaggagccatgatgacatcgtgaccaggatgaagaacattgaatgtattgagctgggccgccaccggctgaagccctggtacttcagcccctacccccaggagctgaccaccctgcctgtgctgtacctgtgtgagttctgcctgaagtatggccgcagcctgaagtgcctgcagaggcacctgaccaagtgtgacctgcggcaccccccaggaaatgagatctacaggaagggcaccatctccttctttgaaattgatggcaggaagaacaagagctacagccagaacctgtgcctgctggccaagtgcttcctggaccacaagaccctgtactatgacacagaccccttcctgttctacgtgatgacagaatatgactgcaagggcttccacatcgtgggctacttcagcaaggagaaggagagcacagaggactacaacgtggcctgcatcctgaccctgcccccctaccagaggcggggctacggcaagctgctgattgagttctcctatgagctgagcaaggtggagggcaagacaggcaccccagagaagcccctgagtgacctgggcctgctgagctaccgcagctactggagccagaccatcctggagatcctgatgggcctgaagtctgagagcggggagcggccccagatcaccatcaatgagatcagcgagatcaccagcatcaagaaggaggatgtgatcagcaccctgcagtacctgaacctgatcaactactacaagggccagtacatcctgaccctgtctgaggacatcgtggatggccacgagcgggccatgctgaagaggctgctgagaattgacagcaagtgcctgcacttcacccccaaggactggagcaagaggggcaagtggtag

SEQ ID NO: 156713 - DNA, 1485 bp, synthetic construct
  misc_feature 1..1485: note = Description of Artificial Sequence: Synthetic coding sequence
  source 1..1485: mol_type = other DNA
atggccgaggtggtgtcccctgtgcctggagctggaagaagagagcccggggaggtgggccgggcccggggcccccctgtggccgaccccggggtggccctgagcccccagggcgagatcatcgagggctgccgcctgcctgtgctgcggaggaaccaggacaatgaagatgagtggcccctggccgagatcctgtctgtgaaggacatcagcggcaggaagctgttctacgtgcactacatcgacttcaacaagaggctggatgagtgggtgacccatgagcggctggacctgaagaagatccagttccccaagaaggaggccaagacccccaccaagaatggcctgcccggcagcaggcctggcagccctgagcgggaggtgaagaggaaggtggaggtggtgtccccagccacccctgtgcccagcgagacagccccagcctctgtgttcccccagaatggagctgcccggcgggctgtggccgcccagcccggcaggaagaggaagagcaactgcctgggcacagatgaggacagccaggacagcagtgatggcatccccagcgcccccaggatgacaggcagcctggtgtctgacaggagccatgatgacatcgtgaccaggatgaagaacatcgagtgcatcgagctgggccgccaccggctgaagccctggtacttcagcccctacccccaggagctgaccaccctgcctgtgctgtacctgtgtgagttctgcctgaagtatggccgcagcctgaagtgcctgcagaggcacctgaccaagtgtgacctgcggcaccccccaggaaatgagatctacaggaagggcaccatctccttctttgaaattgatggcaggaagaacaagagctacagccagaacctgtgcctgctggccaagtgcttcctggaccacaagaccctgtactatgacacagaccccttcctgttctacgtgatgacagaatatgactgcaagggcttccacatcgtgggctacttcagcaaggagaaggagagcacagaggactacaacgtggcctgcatcctgaccctgcccccctaccagaggcggggctacggcaagctgctgattgagttctcctatgagctgagcaaggtggagggcaagacaggcaccccagagaagcccctgagtgacctgggcctgctgagctaccgcagctactggagccagaccatcctggagatcctgatgggcctgaagtctgagagcggggagcggccccagatcaccatcaatgagatcagcgagatcaccagcatcaagaaggaggatgtgatcagcaccctgcagtacctgaacctgatcaactactacaagggccagtacatcctgaccctgtctgaagatattgtggatggccacgagcgggccatgctgaagaggctgctgagaattgacagcaagtgcctgcacttcacccccaaggactggagcaagaggggcaagtggtag

SEQ ID NO: 156714 - DNA, 6222 bp, synthetic construct
  misc_feature 1..6222: note = Description of Artificial Sequence: Synthetic coding sequence
  source 1..6222: mol_type = other DNA
atggtgaagctggccaaccccctgtacacagagtggatcctggaggccatccagaagatcaagaagcagaagcagaggcccagcgaggagcgcatctgccacgctgtgtccaccagccacggcctggacaagaagacagtgtctgagcagctggagctgtctgtgcaggacggctctgtgctgaaggtgaccaacaagggcctggccagctacaaggaccctgacaaccctggccgcttcagctctgtgaagccaggcaccttccccaagagcgccaagggcagccggggcagctgcaatgacctgagaaatgtggactggaacaagctgctgcggcgggccatcgagggcctggaggagcccaacggcagcagcctgaagaacatcgagaagtacctgcggagccagagcgacctgaccagcaccaccaacaacccagccttccagcagaggctgcggctgggcgccaagagagctgtgaacaacggccgcctgctgaaggatggcccccagtacagagtgaactacggcagcctggatggcaagggggccccccagtaccccagcgccttccccagcagcctgccccctgtgtccctgctgccccatgagaaggaccagcccagggctgaccccatccccatctgcagcttctgcctgggcaccaaggagagcaaccgggagaagaagccagaggagctgctgagctgtgccgactgtggcagcagcggccaccccagctgcctgaagttctgcccagagctgaccaccaacgtgaaggccctgcgctggcagtgcatcgagtgcaagacctgcagcgcctgccgggtgcagggcagaaatgctgacaacatgctgttctgtgacagctgtgaccggggcttccacatggagtgctgtgacccccccctgagcaggatgcccaagggcatgtggatctgccaggtgtgccggcccaagaagaagggcaggaagctgctgcacgagaaggccgcccagatcaagagaagatatgccaagcccatcggccggcccaagaacaagctgaagcagaggctgctgtctgtgaccagtgatgagggctccatgaatgccttcaccggccggggcagccctggccggggccagaagaccaaggtgtgcaccacccccagcagcggccatgctgccagcggcaaggacagcagcagccggctggccgtgacagaccccaccaggcctggggccaccaccaagatcaccaccaccagcacctacatcagcgccagcaccctgaaggtgaacaagaagaccaagggcctgattgatggcctgaccaagttcttcacccccagcccagatggaagaagaagcagaggagagatcatcgacttcagcaagcactaccggcccaggaagaaggtgtcccagaagcagagctgcaccagccacgtgctggccaccggcaccacccagaagctgaagcccccacccagcagcctgcccccacccacccccatcagcggccagagccccagcagccagaagagcagcacagccaccagcagccccagcccccagagcagcagcagccagtgcagcgtgcccagcctgagcagcctgaccaccaacagccagctgaaggccctgtttgatggcctgagccacatctacaccacccagggccagagcaggaagaagggccaccccagctatgccccacccaagaggatgaggaggaagacagagctgagcagcacagccaagagcaaggcccacttcttcggcaagagggacatccgcagccgcttcatcagccacagcagcagcagctcctggggcatggcccggggcagcatcttcaaggccatcgcccacttcaagaggaccaccttcctgaagaagcacaggatgctgggccgcctgaagtacaaggtgaccccccagatgggcacccccagccctgggaagggcagcctgacagatggccgcatcaagccagaccaggatgatgacacagagatcaagatcaacatcaagcaggagagcgcagatgtgaatgtcatcggcaacaaggatgtggtgacagaggaggacctggatgtgttcaagcaggcccaggagctgtcctgggagaagattgaatgtgagagcggcgtggaggactgtggccgctaccccagcgtgattgaatttgggaagtatgagatccagacctggtacagcagcccctacccccaggagtatgcccggctgcccaagctgtacctgtgtgagttctgcctgaagtacatgaagagcaagaacatcctgctgcggcacagcaagaagtgtggctggttccaccccccagccaatgagatctacagaaggaaggacctgtctgtgtttgaggtggatggcaacatgagcaagatctactgccagaacctgtgcctgctggccaagctgttcctggaccacaagaccctgtactatgatgtggagcccttcctgttctacgtgctgaccaagaatgatgagaagggctgccacctggtgggctacttcagcaaggagaagctgtgccagcagaagtacaacgtgtcctgcatcatgatcatgccccagcaccagaggcagggcttcggccgcttcctgattgacttctcctacctgctgagccggcgggagggccaggccggcagccctgagaagcccctgagtgacctgggccgcctgagctacctggcctactggaagagcgtcatcctggagtacctgtaccaccaccacgagcggcacatcagcatcaaggccatcagccgggccaccggcatgtgcccccatgacatcgccaccaccctgcagcacctgcacatgattgacaagagagatggccgctttgtgatcatcagaagagagaagctgatcctgagccacatggagaagctgaagacctgcagccgggccaatgagctggaccctgacagcctgcgctggacccccatcctgatcagcaatgctgctgtgtctgaggaggagcgggaggccgagaaggaggccgagcggctgatggagcaggccagctgctgggagaaggaggagcaggagatcctgagcacccgggccaacagccggcagagccctgccaaggtgcagagcaagaacaagtacctgcacagccctgagagcaggcctgtgactggagagcggggccagctgctggagctgagcaaggagagcagcgaggaggaggaggaggaggaggatgaggaggaggaggaggaggaggaggaggaggaggaggatgaggaggaggaggaggaggaggaggaggaggaggaggaggagaacatccagagcagccccccccggctgaccaagccccagagcgtggccatcaagaggaagaggccctttgtgctgaagaagaagaggggcaggaagagaagacgcatcaacagctctgtgaccacagagaccatcagcgagaccacagaggtgctgaatgagccctttgacaacagtgatgaggagcggcccatgccccagctggagcccacctgtgaaattgaggtggaggaggatggcaggaagcctgtgctgaggaaggccttccagcaccagcccgggaagaagaggcagacagaggaggaggagggcaaggacaaccactgcttcaagaatgctgacccctgcaggaacaacatgaatgatgacagcagcaacctgaaggagggcagcaaggacaaccctgagcccctgaagtgcaagcaggtgtggcccaagggcaccaagaggggcctgagcaagtggaggcagaacaaggagaggaagacaggcttcaagctgaacctgtacaccccacctgagacccccatggagccagatgagcaggtgacagtggaggagcagaaggagaccagcgagggcaagaccagccccagccccatcagaattgaggaggaggtgaaggagaccggggaggccctgctgccccaggaggagaacagaagagaggagacctgtgcccctgtgagccccaacaccagccctggagagaagccagaagatgacctgatcaagccagaggaggaggaggaggaggaggaggaggaggaggaggaggaggaggaggaggagggggaggaggaggagggcggcggcaatgtggagaaggaccctgatggagccaagagccaggagaaggaggagcctgagatcagcacagagaaggaggacagcgcccggctggatgaccacgaggaggaggaggaggaggatgaggagcccagccacaatgaagatcatgatgctgatgatgaagatgacagccacatggagagcgctgaggtggagaaggaggagctgccccgggagagcttcaaggaggtgctggagaaccaggagaccttcctggacctgaatgtgcagcccggccacagcaaccctgaggtgctgatggactgtggggtggacctgacagccagctgcaacagcgagcccaaggagctggccggggaccctgaggccgtgcctgagagtgatgaggagcccccacctggagagcaggcccagaagcaggaccagaagaacagcaaggaggtggacacagagttcaaggagggcaacccagccaccatggagattgattctgaaacagtgcaggccgtgcagagcctgacccaggagagcagcgagcaggatgacaccttccaggactgtgccgagacccaggaggcctgccgcagcctgcagaactacaccagggctgaccagagcccccagatcgccaccaccctggatgactgccagcagagcgaccacagcagccctgtgtcctctgtgcacagccaccctggccagagcgtgcgctctgtgaacagccccagcgtgcctgccctggagaacagctatgcccagatcagcccagaccagagcgccatctctgtgcccagcctgcagaacatggagaccagccccatgatggatgtgcccagcgtgtctgaccacagccagcaggtggtggacagcggcttcagtgacctgggcagcattgagagcaccacagagaactatgagaaccccagcagctatgacagcaccatgggcggcagcatctgtggaaatggcagcagccagaacagctgcagctacagcaacctgaccagcagcagcctgacccagagcagctgtgctgtgacccagcagatgagcaacatcagcggcagctgcagcatgctgcagcagaccagcatcagcagcccccccacctgcagcgtgaagagcccccagggctgtgtggtggagaggcctcccagcagcagccagcagctggcccagtgcagcatggccgccaacttcaccccacccatgcagctggccgagatccctgagaccagcaatgccaacatcggcctgtatgaaagaatgggccagagcgactttggagctggccactacccccagcccagcgccaccttcagcctggccaagctgcagcagctgaccaacaccctgattgaccacagcctgccctacagccacagcgctgctgtgaccagctatgccaacagcgccagcctgagcacccccctgagcaacacaggcctggtgcagctgagccagagcccccacagcgtgcctgggggcccccaggcccaggccaccatgaccccaccacccaacctgaccccaccacccatgaacctgcccccacccctgctgcagaggaacatggccgccagcaacatcggcatcagccacagccagaggctgcagacccagatcgccagcaagggccacatctccatgaggaccaagagcgccagcctgagccctgctgctgccacccaccagagccagatctacggccgcagccagacagtggccatgcagggccctgcccggaccctgaccatgcagaggggcatgaacatgtctgtgaacctgatgcctgccccagcctacaacgtgaacagcgtgaacatgaacatgaacaccctgaatgccatgaatggctacagcatgagccagcccatgatgaacagcggctaccacagcaaccacggctacatgaaccagaccccccagtaccccatgcagatgcagatgggcatgatgggcacccagccctatgcccagcagcccatgcagaccccacctcatggcaacatgatgtacacagcccctggccaccacggctacatgaacacaggcatgagcaagcagagcctgaatggcagctacatgagaagatag

SEQ ID NO: 156715 - DNA, 5673 bp, synthetic construct
  misc_feature 1..5673: note = Description of Artificial Sequence: Synthetic coding sequence
  source 1..5673: mol_type = other DNA
atggtgaagctggccaaccccctgtacacagagtggatcctggaggccatccagaagatcaagaagcagaagcagaggcccagcgaggagcgcatctgccacgctgtgtccaccagccacggcctggacaagaagacagtgtctgagcagctggagctgtctgtgcaggacggctctgtgctgaaggtgaccaacaagggcctggccagctacaaggaccctgacaaccctggccgcttcagctctgtgaagccaggcaccttccccaagagcgccaagggcagccggggcagctgcaatgacctgagaaatgtggactggaacaagctgctgcggcgggccatcgagggcctggaggagcccaacggcagcagcctgaagaacatcgagaagtacctgcggagccagagcgacctgaccagcaccaccaacaacccagccttccagcagaggctgcggctgggcgccaagagagctgtgaacaacggccgcctgctgaaggatggcccccagtacagagtgaactacggcagcctggatggcaagggggccccccagtaccccagcgccttccccagcagcctgccccctgtgtccctgctgccccatgagaaggaccagcccagggctgaccccatccccatctgcagcttctgcctgggcaccaaggagagcaaccgggagaagaagccagaggagctgctgagctgtgccgactgtggcagcagcggccaccccagctgcctgaagttctgcccagagctgaccaccaacgtgaaggccctgcgctggcagtgcatcgagtgcaagacctgcagcgcctgccgggtgcagggcagaaatgctgacaacatgctgttctgtgacagctgtgaccggggcttccacatggagtgctgtgacccccccctgagcaggatgcccaagggcatgtggatctgccaggtgtgccggcccaagaagaagggcaggaagctgctgcacgagaaggccgcccagatcaagagaagatatgccaagcccatcggccggcccaagaacaagctgaagcagaggctgctgtctgtgaccagtgatgagggctccatgaatgccttcaccggccggggcagccctggccggggccagaagaccaaggtgtgcaccacccccagcagcggccatgctgccagcggcaaggacagcagcagccggctggccgtgacagaccccaccaggcctggggccaccaccaagatcaccaccaccagcacctacatcagcgccagcaccctgaaggtgaacaagaagaccaagggcctgattgatggcctgaccaagttcttcacccccagcccagatggaagaagaagcagaggagagatcatcgacttcagcaagcactaccggcccaggaagaaggtgtcccagaagcagagctgcaccagccacgtgctggccacagacacagagatcaagatcaacatcaagcaggagagcgcagatgtgaatgtgattggcaacaaggatgtggtgacagaggaggacctggatgtgttcaagcaggcccaggagctgtcctgggagaagattgaatgtgagagcggcgtggaggactgtggccgctaccccagcgtcatcgagtttgggaagtatgagatccagacctggtacagcagcccctacccccaggagtatgcccggctgcccaagctgtacctgtgtgagttctgcctgaagtacatgaagagcaagaacatcctgctgcggcacagcaagaagtgtggctggttccaccccccagccaatgagatctacagaaggaaggacctgtctgtgtttgaggtggatggcaacatgagcaagatctactgccagaacctgtgcctgctggccaagctgttcctggaccacaagaccctgtactatgatgtggagcccttcctgttctacgtgctgaccaagaatgatgagaagggctgccacctggtgggctacttcagcaaggagaagctgtgccagcagaagtacaacgtgtcctgcatcatgatcatgccccagcaccagaggcagggcttcggccgcttcctgattgacttctcctacctgctgagcagaagagagggccaggccggcagccctgagaagcccctgagtgacctgggccgcctgagctacctggcctactggaagagcgtcatcctggagtacctgtaccaccaccacgagcggcacatcagcatcaaggccatcagccgggccaccggcatgtgcccccatgacatcgccaccaccctgcagcacctgcacatgattgacaagagagatggccgcttcgtcatcatccggcgggagaagctgatcctgagccacatggagaagctgaagacctgcagccgggccaatgagctggaccctgacagcctgcgctggacccccatcctgatcagcaatgctgctgtgtctgaggaggagcgggaggccgagaaggaggccgagcggctgatggagcaggccagctgctgggagaaggaggagcaggagatcctgagcacccgggccaacagccggcagagccctgccaaggtgcagagcaagaacaagtacctgcacagccctgagagcaggcctgtgactggagagcggggccagctgctggagctgagcaaggagagcagcgaggaggaggaggaggaggaggatgaggaggaggaggaggaggaggaggaggaggaggaggatgaggaggaggaggaggaggaggaggaggaggaggaggaggagaacatccagagcagccccccccggctgaccaagccccagagcgtggccatcaagaggaagaggccctttgtgctgaagaagaagaggggcaggaagagaagacgcatcaacagctctgtgaccacagagaccatcagcgagaccacagaggtgctgaatgagccctttgacaacagtgatgaggagcggcccatgccccagctggagcccacctgtgaaattgaggtggaggaggatggcaggaagcctgtgctgaggaaggccttccagcaccagcccgggaagaagaggcagacagaggaggaggagggcaaggacaaccactgcttcaagaatgctgacccctgcaggaacaacatgaatgatgacagcagcaacctgaaggagggcagcaaggacaaccctgagcccctgaagtgcaagcaggtgtggcccaagggcaccaagaggggcctgagcaagtggaggcagaacaaggagaggaagacaggcttcaagctgaacctgtacaccccacctgagacccccatggagccagatgagcaggtgacagtggaggagcagaaggagaccagcgagggcaagaccagccccagccccatccgcatcgaggaggaggtgaaggagactggagaggccctgctgccccaggaggagaacagaagagaggagacctgtgcccctgtgagccccaacaccagccctggagagaagccagaagatgacctgatcaagccagaggaggaggaggaggaggaggaggaggaggaggaggaggaggaggaggaggagggggaggaggaggagggcggcggcaatgtggagaaggaccctgatggagccaagagccaggagaaggaggagcctgagatcagcacagagaaggaggacagcgcccggctggatgaccacgaggaggaggaggaggaggatgaggagcccagccacaatgaagatcatgatgctgatgatgaagatgacagccacatggagagcgctgaggtggagaaggaggagctgccccgggagagcttcaaggaggtgctggagaaccaggagaccttcctggacctgaatgtgcagcccggccacagcaaccctgaggtgctgatggactgtggggtggacctgacagccagctgcaacagcgagcccaaggagctggccggggaccctgaggccgtgcctgagagtgatgaggagcccccacctggagagcaggcccagaagcaggaccagaagaacagcaaggaggtggacacagagttcaaggagggcaacccagccaccatggagattgacagcgagaccgtgcaggccgtgcagagcctgacccaggagagcagcgagcaggatgacaccttccaggactgtgccgagacccaggaggcctgccgcagcctgcagaactacaccagggctgaccagagcccccagatcgccaccaccctggatgactgccagcagagcgaccacagcagccctgtgtcctctgtgcacagccaccctggccagagcgtgcgctctgtgaacagccccagcgtgcctgccctggagaacagctatgcccagatcagcccagaccagagcgccatctctgtgcccagcctgcagaacatggagaccagccccatgatggatgtgcccagcgtgtctgaccacagccagcaggtggtggacagcggcttcagtgacctgggcagcattgagagcaccacagaaaattatgagaaccccagcagctatgacagcaccatgggcggcagcatctgtggaaatggcagcagccagaacagctgcagctacagcaacctgaccagcagcagcctgacccagagcagctgtgctgtgacccagcagatgagcaacatcagcggcagctgcagcatgctgcagcagaccagcatcagcagcccccccacctgcagcgtgaagagcccccagggctgtgtggtggagcggccccccagcagcagccagcagctggcccagtgcagcatggccgccaacttcaccccacccatgcagctggccgagatccctgagaccagcaatgccaacatcggcctgtatgaaagaatgggccagagcgactttggagctggccactacccccagcccagcgccaccttcagcctggccaagctgcagcagctgaccaacaccctgattgaccacagcctgccctacagccacagcgctgctgtgaccagctatgccaacagcgccagcctgagcacccccctgagcaacacaggcctggtgcagctgagccagagcccccacagcgtgcctgggggcccccaggcccaggccaccatgaccccaccacccaacctgaccccaccacccatgaacctgcccccacccctgctgcagaggaacatggccgccagcaacatcggcatcagccacagccagaggctgcagacccagatcgccagcaagggccacatctccatgaggaccaagagcgccagcctgagccctgctgctgccacccaccagagccagatctacggccgcagccagacagtggccatgcagggccctgcccggaccctgaccatgcagaggggcatgaacatgtctgtgaacctgatgcctgccccagcctacaacgtgaacagcgtgaacatgaacatgaacaccctgaatgccatgaatggctacagcatgagccagcccatgatgaacagcggctaccacagcaaccacggctacatgaaccagaccccccagtaccccatgcagatgcagatgggcatgatgggcacccagccctatgcccagcagcccatgcagaccccaccccacggcaacatgatgtacacagcccctggccaccacggctacatgaacacaggcatgagcaagcagagcctgaatggcagctacatgagaagatag

SEQ ID NO: 156716 - DNA, 5346 bp, synthetic construct
  misc_feature 1..5346: note = Description of Artificial Sequence: Synthetic coding sequence
  source 1..5346: mol_type = other DNA
atggtgaagctggccaaccccctgtacacagagtggatcctggaggccatccagaagatcaagaagcagaagcagaggcccagcgaggagcgcatctgccacgctgtgtccaccagccacggcctggacaagaagacagtgtctgagcagctggagctgtctgtgcaggacggctctgtgctgaaggtgaccaacaagggcctggccagctacaaggaccctgacaaccctggccgcttcagctctgtgaagccaggcaccttccccaagagcgccaagggcagccggggcagctgcaatgacctgagaaatgtggactggaacaagctgctgcggcgggccatcgagggcctggaggagcccaacggcagcagcctgaagaacatcgagaagtacctgcggagccagagcgacctgaccagcaccaccaacaacccagccttccagcagaggctgcggctgggcgccaagagagctgtgaacaacggccgcctgctgaaggatggcccccagtacagagtgaactacggcagcctggatggcaagggggccccccagtaccccagcgccttccccagcagcctgccccctgtgtccctgctgccccatgagaaggaccagcccagggctgaccccatccccatctgcagcttctgcctgggcaccaaggagagcaaccgggagaagaagccagaggagctgctgagctgtgccgactgtggcagcagcggccaccccagctgcctgaagttctgcccagagctgaccaccaacgtgaaggccctgcgctggcagtgcatcgagtgcaagacctgcagcgcctgccgggtgcagggcagaaatgctgacaacatgctgttctgtgacagctgtgaccggggcttccacatggagtgctgtgacccccccctgagcaggatgcccaagggcatgtggatctgccaggtgtgccggcccaagaagaagggcaggaagctgctgcacgagaaggccgcccagatcaagagaagatatgccaagcccatcggccggcccaagaacaagctgaagcagaggctgctgtctgtgaccagtgatgagggctccatgaatgccttcaccggccggggcagcccagacacagagatcaagatcaacatcaagcaggagagcgcagatgtgaatgtcatcggcaacaaggatgtggtgacagaggaggacctggatgtgttcaagcaggcccaggagctgtcctgggagaagattgaatgtgagagcggcgtggaggactgtggccgctaccccagcgtgattgaatttgggaagtatgagatccagacctggtacagcagcccctacccccaggagtatgcccggctgcccaagctgtacctgtgtgagttctgcctgaagtacatgaagagcaagaacatcctgctgcggcacagcaagaagtgtggctggttccaccccccagccaatgagatctacagaaggaaggacctgtctgtgtttgaggtggatggcaacatgagcaagatctactgccagaacctgtgcctgctggccaagctgttcctggaccacaagaccctgtactatgatgtggagcccttcctgttctacgtgctgaccaagaatgatgagaagggctgccacctggtgggctacttcagcaaggagaagctgtgccagcagaagtacaacgtgtcctgcatcatgatcatgccccagcaccagaggcagggcttcggccgcttcctgattgacttctcctacctgctgagccggcgggagggccaggccggcagccctgagaagcccctgagtgacctgggccgcctgagctacctggcctactggaagagcgtcatcctggagtacctgtaccaccaccacgagcggcacatcagcatcaaggccatcagccgggccaccggcatgtgcccccatgacatcgccaccaccctgcagcacctgcacatgattgacaagagagatggccgctttgtgatcatcagaagagagaagctgatcctgagccacatggagaagctgaagacctgcagccgggccaatgagctggaccctgacagcctgcgctggacccccatcctgatcagcaatgctgctgtgtctgaggaggagcgggaggccgagaaggaggccgagcggctgatggagcaggccagctgctgggagaaggaggagcaggagatcctgagcacccgggccaacagccggcagagccctgccaaggtgcagagcaagaacaagtacctgcacagccctgagagcaggcctgtgactggagagcggggccagctgctggagctgagcaaggagagcagcgaggaggaggaggaggaggaggatgaggaggaggaggaggaggaggaggaggaggaggaggatgaggaggaggaggaggaggaggaggaggaggaggaggaggagaacatccagagcagccccccccggctgaccaagccccagagcgtggccatcaagaggaagaggccctttgtgctgaagaagaagaggggcaggaagagaagacgcatcaacagctctgtgaccacagagaccatcagcgagaccacagaggtgctgaatgagccctttgacaacagtgatgaggagcggcccatgccccagctggagcccacctgtgaaattgaggtggaggaggatggcaggaagcctgtgctgaggaaggccttccagcaccagcccgggaagaagaggcagacagaggaggaggagggcaaggacaaccactgcttcaagaatgctgacccctgcaggaacaacatgaatgatgacagcagcaacctgaaggagggcagcaaggacaaccctgagcccctgaagtgcaagcaggtgtggcccaagggcaccaagaggggcctgagcaagtggaggcagaacaaggagaggaagacaggcttcaagctgaacctgtacaccccacctgagacccccatggagccagatgagcaggtgacagtggaggagcagaaggagaccagcgagggcaagaccagccccagccccatcagaattgaggaggaggtgaaggagaccggggaggccctgctgccccaggaggagaacagaagagaggagacctgtgcccctgtgagccccaacaccagccctggagagaagccagaagatgacctgatcaagccagaggaggaggaggaggaggaggaggaggaggaggaggaggaggaggaggaggagggggaggaggaggagggcggcggcaatgtggagaaggaccctgatggagccaagagccaggagaaggaggagcctgagatcagcacagagaaggaggacagcgcccggctggatgaccacgaggaggaggaggaggaggatgaggagcccagccacaatgaagatcatgatgctgatgatgaagatgacagccacatggagagcgctgaggtggagaaggaggagctgccccgggagagcttcaaggaggtgctggagaaccaggagaccttcctggacctgaatgtgcagcccggccacagcaaccctgaggtgctgatggactgtggggtggacctgacagccagctgcaacagcgagcccaaggagctggccggggaccctgaggccgtgcctgagagtgatgaggagcccccacctggagagcaggcccagaagcaggaccagaagaacagcaaggaggtggacacagagttcaaggagggcaacccagccaccatggagattgattctgaaacagtgcaggccgtgcagagcctgacccaggagagcagcgagcaggatgacaccttccaggactgtgccgagacccaggaggcctgccgcagcctgcagaactacaccagggctgaccagagcccccagatcgccaccaccctggatgactgccagcagagcgaccacagcagccctgtgtcctctgtgcacagccaccctggccagagcgtgcgctctgtgaacagccccagcgtgcctgccctggagaacagctatgcccagatcagcccagaccagagcgccatctctgtgcccagcctgcagaacatggagaccagccccatgatggatgtgcccagcgtgtctgaccacagccagcaggtggtggacagcggcttcagtgacctgggcagcattgagagcaccacagagaactatgagaaccccagcagctatgacagcaccatgggcggcagcatctgtggaaatggcagcagccagaacagctgcagctacagcaacctgaccagcagcagcctgacccagagcagctgtgctgtgacccagcagatgagcaacatcagcggcagctgcagcatgctgcagcagaccagcatcagcagcccccccacctgcagcgtgaagagcccccagggctgtgtggtggagaggcctcccagcagcagccagcagctggcccagtgcagcatggccgccaacttcaccccacccatgcagctggccgagatccctgagaccagcaatgccaacatcggcctgtatgaaagaatgggccagagcgactttggagctggccactacccccagcccagcgccaccttcagcctggccaagctgcagcagctgaccaacaccctgattgaccacagcctgccctacagccacagcgctgctgtgaccagctatgccaacagcgccagcctgagcacccccctgagcaacacaggcctggtgcagctgagccagagcccccacagcgtgcctgggggcccccaggcccaggccaccatgaccccaccacccaacctgaccccaccacccatgaacctgcccccacccctgctgcagaggaacatggccgccagcaacatcggcatcagccacagccagaggctgcagacccagatcgccagcaagggccacatctccatgaggaccaagagcgccagcctgagccctgctgctgccacccaccagagccagatctacggccgcagccagacagtggccatgcagggccctgcccggaccctgaccatgcagaggggcatgaacatgtctgtgaacctgatgcctgccccagcctacaacgtgaacagcgtgaacatgaacatgaacaccctgaatgccatgaatggctacagcatgagccagcccatgatgaacagcggctaccacagcaaccacggctacatgaaccagaccccccagtaccccatgcagatgcagatgggcatgatgggcacccagccctatgcccagcagcccatgcagaccccacctcatggcaacatgatgtacacagcccctggccaccacggctacatgaacacaggcatgagcaagcagagcctgaatggcagctacatgagaagatag

SEQ ID NO: 156717 - DNA, 5346 bp, synthetic construct; identical to SEQ ID NO: 156716
  misc_feature 1..5346: note = Description of Artificial Sequence: Synthetic coding sequence
  source 1..5346: mol_type = other DNA

SEQ ID NO: 156718 - DNA, 5346 bp, synthetic construct; identical to SEQ ID NO: 156716
  misc_feature 1..5346: note = Description of Artificial Sequence: Synthetic coding sequence
  source 1..5346: mol_type = other DNA

SEQ ID NO: 156719 - DNA, 4992 bp, synthetic construct
  misc_feature 1..4992: note = Description of Artificial Sequence: Synthetic coding sequence
  source 1..4992: mol_type = other DNA
atgacagaccgcttctgggaccagtggtacctgtggtacctgcggctgctgcggctgctggaccggggcagcttcagaaatgatggcctgaaggccagtgatgtgctgcccatcctgaaggagaaggtggcctttgtgtctgggggccgggacaagaggggcggccccatcctgaccttccctgcccggagcaaccacgaccgcatccggcaggaggacctgaggaagctggtgacctacctggcctctgtgcccagtgaagatgtgtgcaagaggggcttcaccgtcatcatcgacatgaggggcagcaagtgggacctgatcaagcccctgctgaagaccctgcaggaggccttccctgctgagatccacgtggccctgatcatcaagccagacaacttctggcagaagcagaagaccaactttggcagcagcaagttcatctttgagacctccatggtgtctgtggagggcctgaccaagctggtggaccccagccagctgacagaggagtttgatggcagcctggactacaaccacgaggagtggattgagctgcggctgagcctggaggagttcttcaacagcgctgtgcacctgctgagccggctggaggacctgcaggagatgctggccaggaaggagttccctgtggatgtggagggcagccggcggctgattgatgagcacacccagctgaagaagaaggtgctgaaggcccctgtggaggagctggaccgggagggccagaggctgctgcagtgcatccgctgcagtgatggcttctctggaagaaactgcatccctggcagcgctgacttccagagcctggtgcccaagatcaccagcctgctggacaagctgcacagcacccggcagcacctgcaccagatgtggcacgtgaggaagctgaagctggaccagtgcttccagctgcggctgtttgagcaggatgctgagaagatgtttgactggatcagccacaacaaggagctgttcctgcagagccacacagaaattggagtgtcctaccagtatgccctggacctgcagacccagcacaaccactttgccatgaacagcatgaatgcctacgtgaacatcaaccgcatcatgtctgtggccagccggctgtctgaggccggccactacgccagccagcagatcaagcagatcagcacccagctggaccaggagtggaagagctttgctgctgccctggatgagaggagcaccatcctggccatgtctgctgtgttccaccagaaggccgagcagttcctgtctggagtggatgcctggtgcaagatgtgcagcgagggcggcctgcccagcgagatgcaggacctggagctggccatccaccaccaccagaccctgtatgagcaggtgacccaggcctacacagaggtgtcccaggacggcaaggccctgctggatgtgctgcagaggcccctgagccctggcaacagcgagagcctgacagccacagccaactacagcaaggctgtgcaccaggtgctggatgtggtgcatgaggtgctgcaccaccagaggcggctggagagcatctggcagcacaggaaggtgcggctgcaccagaggctgcagctgtgtgtgttccagcaggatgtgcagcaggtgctggactggattgaaaatcatggagaggccttcctgagcaagcacactggagtgggcaagagcctgcaccgggcccgggccctgcagaagagacatgatgactttgaggaggtggcccagaacacctacaccaatgctgacaagctgctggaggccgctgagcagctggcccagacaggagaatgtgaccctgaggagatctacaaggccgcccggcacctggaggtgcgcatccaggactttgtgagaagagtggagcagaggaagctgctgctggacatgtctgtgtccttccacacccacaccaaggagctgtggacctggatggaggacctgcagaaggagatgctggaggatgtgtgtgccgacagcgtggatgctgtgcaggagctgatcaagcagttccagcagcagcagacagccaccctggatgccaccctgaatgtcatcaaggagggggaggacctgatccagcagctgcggagcgccccacccagcctgggggagcccagcgaggcccgggacagcgctgtgagcaacaacaagaccccccacagcagcagcatcagccacatcgagagcgtgctgcagcagctggatgatgcccaggtgcagatggaggagctgttccacgagaggaagatcaagctggacatcttcctgcagctgcgcatctttgagcagtacaccatcgaggtgacagctgagctggatgcctggaatgaagacctgctgcggcagatgaatgacttcaacacagaggacctgaccctggccgagcagaggctgcagaggcacacagagaggaagctggccatgaacaacatgacctttgaggtgatccagcagggccaggacctgcaccagtacatcacagaggtgcaggccagcggcatcgagctgatctgtgagaaggacatcgacctggccgcccaggtgcaggagctgctggagttcctgcacgagaagcagcacgagctggagctgaatgctgagcagacccacaagaggctggagcagtgcctgcagctgcggcacctgcaggccgaggtgaagcaggtgctgggctggatcagaaatggagagagcatgctgaatgccagcctggtgaatgccagcagcctgtctgaggccgagcagctgcagcgggagcacgagcagttccagctggccatcgagagcctcttccacgccaccagcctgcagaagacccaccagagcgccctgcaggtgcagcagaaggccgaggtgctgctgcaggccggccactatgatgctgatgccatcagagaatgtgccgagaaggtggccctgcactggcagcagctgatgctgaagatggaggaccggctgaagctggtgaatgcctctgtggccttctacaagaccagcgagcaggtgtgcagcgtgctggagagcctggagcaggagtacagaagagatgaggactggtgtggcggccgggacaagctgggccctgctgctgagattgaccacgtgatccccctcatcagcaagcacctggagcagaaggaggccttcctgaaggcctgcaccctggccaggagaaatgctgaggtgttcctgaagtacatccacaggaacaacgtgtccatgcccagcgtggccagccacacccggggccctgagcagcaggtgaaggccatcctgtctgagctgctgcagcgggagaacagagtgctgcacttctggaccctgaagaagaggcggctggaccagtgccagcagtatgtggtgtttgagaggtctgccaagcaggccctggactggatccaggagactggagagttctacctgagcacccacaccagcactggagagaccacagaggagacccaggagctgctgaaggagtatggagagttccgggtgcctgccaagcagaccaaggagaaggtgaagctgctgatccagctggccgacagctttgtggagaagggccacatccacgccacagagatcaggaagtgggtgaccaccgtggacaagcactacagagacttcagcctgaggatgggcaagtaccgctacagcctggagaaggccctgggcgtgaacacagaggacaacaaggacctggagctggacatcatcccagccagcctgagtgaccgggaggtgaagctgagagatgccaaccacgaggtgaatgaggagaagaggaagagcgccaggaagaaggagttcatcatggccgagctgctgcagacagagaaggcctacgtgcgggacctgcacgagtgcctggagacctacctgtgggagatgaccagcggcgtggaggagatccccccaggcatcctgaacaaggagcacatcatcttcggcaacatccaggagatctatgacttccacaacaacatcttcctgaaggagctggagaagtatgagcagctgcctgaagatgtgggccactgctttgtgacctgggccgacaagttccagatgtatgtgacctactgcaagaacaagccagacagcaaccagctgatcctggagcacgccggcaccttctttgatgagatccagcagagacatggcctggccaacagcatcagcagctacctgatcaagcctgtgcagaggatcaccaagtaccagctgctgctgaaggagctgctgacctgctgtgaggagggcaagggggagctgaaggatggcctggaggtgatgctgtctgtgcccaagaaggccaatgatgccatgcacgtgtccatgctggagggctttgatgagaacctggatgtgcagggcgagctgatcctgcaggatgccttccaggtgtgggaccccaagagcctcatcaggaagggccgggagcggcacctgttcctgtttgagatcagcctggtgttcagcaaggagatcaaggacagcagcggccacaccaagtatgtgtacaagaacaagctgctgaccagcgagctgggcgtgacagagcacgtggagggggacccctgcaagtttgccctgtggagcggccgcacccccagcagtgacaacaagacagtgctgaaggccagcaacatcgagaccaagcaggagtggatcaagaacatccgggaggtgatccaggagcgcatcatccacctgaagggggccctgaaggagcccctgcagctgcccaagaccccagccaagcagaggaacaacagcaagagagatggagtggaggacatcgacagccagggagatggcagcagccagcctgacaccatcagcatcgccagcaggaccagccagaacacagtggacagcgacaaggatggcaacctggtgccccgctggcacctgggccctggggaccccttcagcacctacgtgtag

SEQ ID NO: 156720 - DNA, 3870 bp, synthetic construct
  misc_feature 1..3870: note = Description of Artificial Sequence: Synthetic coding sequence
  source 1..3870: mol_type = other DNA
atgaagggcggggaccgggcctacacccggggccccagcctgggctggctgtttgccaagtgctgctgctgcttcccctgcagagatgcctacagccacagcagcagtgaaaatggaggcaagtctgagagcgtggccaacctgcaggcccagcccagcctgaacagcatccacagcagccctggccccaagaggagcaccaacaccctgaagaagtggctgaccagccctgtgcggcggctgaacagcggcaaggcagatggcaacatcaagaagcagaagaaggtgagagatggcaggaagagctttgacctgggcagccccaagccaggagatgagaccaccccccagggcgacagcgcagatgagaagagcaagaagggctggggagaagatgagccagatgaggagagccacacccccctgcccccacccatgaagatctttgacaatgaccccacccaggatgagatgagcagcagcctgctggccgcccggcaggccagcacagaggtgcccacagctgctgacctggtgaatgccatcgagaagctggtgaagaacaagctgagcctggagggcagcagctaccggggcagcctgaaggaccctgctggctgcctgaatgaaggcatggccccacccaccccacccaagaaccctgaggaggagcagaaggccaaggccctgcggggccgcatgtttgtgctgaatgagctggtgcagacagagaaggactatgtgaaggacctgggcatcgtggtggagggcttcatgaagagaattgaggagaagggcgtgcctgaggacatgaggggcaaggacaagatcgtgtttggaaacatccaccagatctatgactggcacaaggacttcttcctggccgagctggagaagtgcatccaggagcaggaccggctggcccagctgttcatcaagcatgagaggaagctgcacatctacgtgtggtactgccagaacaagcccaggtctgagtacatcgtggccgagtatgatgcctactttgaggaggtgaagcaggagatcaaccagaggctgaccctgagtgacttcctgatcaagcccatccagaggatcaccaagtaccagctgctgctgaaggacttcctgcgctacagcgagaaggccggcctggagtgcagcgacatcgagaaggctgtggagctgatgtgcctggtgcccaagcgctgcaatgacatgatgaacctgggccgcctgcagggctttgagggcaccctgacagcccagggcaagctgctgcagcaggacaccttctacgtgattgagctggatgctggcatgcagagcaggaccaaggagcggcgggtcttcctgtttgagcagatcgtcatcttcagcgagctgctgaggaagggcagcctgaccccaggctacatgttcaagaggagcatcaagatgaactacctggtgctggaggagaatgtggacaatgacccctgcaagtttgccctgatgaaccgggagaccagcgagcgggtggtgctgcaggccgccaatgctgacatccagcaggcctgggtgcaggacatcaaccaggtgctggagacccagagggacttcctgaatgccctgcagagccccatcgagtaccagaggaaggagaggagcacagctgtgatgaggagccagcctgcccggctgccccaggccagcccccggccctacagctctgtgcctgctggcagcgagaagccacccaagggcagcagctacaacccccccctgccccccctgaagatcagcaccagcaatggcagccctggctttgagtaccaccagcccggggacaagtttgaggccagcaagcagaatgacctgggcggctgcaatggcaccagctccatggccgtcatcaaggactactatgccctgaaggaaaatgagatctgtgtgtcccagggcgaggtggtgcaggtgctggccgtgaaccagcagaacatgtgcctggtgtaccagcctgccagtgaccacagccctgctgctgagggctgggtgcccggcagcatcctggcccccctgaccaaggccacagctgctgagagcagtgatggcagcatcaagaagagctgctcctggcacaccctgaggatgaggaagagagctgaggtggagaacacaggcaagaatgaggccaccggccccaggaagcccaaggacatcctgggcaacaaggtgtctgtgaaggagaccaacagcagcgaggagagtgaatgtgatgacctggaccccaacacctccatggagatcctgaaccccaacttcatccaggaggtggcccctgagttcctggtgcccctggtggatgtgacctgcctgctgggggacaccgtcatcctgcagtgcaaggtgtgtggccggcccaagcccaccatcacctggaagggccctgaccagaacatcctggacacagacaacagcagcgccacctacacagtgagcagctgtgacagcggggagatcaccctgaagatctgcaacctgatgccccaggacagcggcatctacacctgcatcgccaccaatgaccacggcaccaccagcaccagcgccaccgtgaaggtgcagggcgtgcctgctgcccccaaccggcccatcgcccaggagaggagctgcaccagcgtcatcctgcgctggctgccccccagcagcacaggcaactgcaccatcagcggctacacagtggagtaccgggaggagggcagccagatctggcagcagagcgtggccagcaccctggacacctacctggtgattgaggacctgagccctggctgcccctaccagttccgggtgtctgccagcaacccctggggcatcagcctgcccagcgagcccagcgagtttgtgcggctgcctgaatatgatgctgctgctgatggagccaccatctcctggaaggaaaattttgattctgcctacacagagctgaatgaaattggccggggccgcttcagcatcgtgaagaagtgcatccacaaggccaccaggaaggatgtggccgtgaagtttgtgtccaagaagatgaagaagaaggagcaggccgcccacgaggccgccctgctgcagcacctgcagcacccccagtacatcaccctgcatgacacctatgagagccccaccagctacatcctgatcctggagctgatggatgatggccgcctgctggactacctgatgaaccatgatgagctgatggaggagaaggtggccttctacatccgggacatcatggaggccctgcagtacctgcacaactgccgggtggcccacctggacatcaagccagagaacctgctgattgacctgcgcatccctgtgccccgggtgaagctgattgacctggaggatgctgtgcagatcagcggccacttccacatccaccacctgctgggcaaccctgagtttgctgcccctgaggtgatccagggcatccctgtgtccctgggcacagacatctggagcattggagtgctgacctacgtgatgctgagcggcgtgagccccttcctggatgagagcaaggaggagacctgcatcaacgtgtgccgggtggacttctccttcccccatgagtacttctgtggggtgtccaatgctgcccgggacttcatcaacgtcatcctgcaggaggacttcagaagaagacccacagctgccacctgcctgcagcacccctggctgcagccccacaacggcagctacagcaagatccccctggacaccagccggctggcctgcttcatcgagaggaggaagcaccagaatgatgtgcggcccatccccaacgtgaagagctacatcgtgaacagagtgaaccagggcacctag

SEQ ID NO: 156721 - DNA, 8961 bp, synthetic construct
  misc_feature 1..8961: note = Description of Artificial Sequence: Synthetic coding sequence
  source 1..8961: mol_type = other DNA
atgacagaccgcttctgggaccagtggtacctgtggtacctgcggctgctgcggctgctggaccggggcagcttcagaaatgatggcctgaaggccagtgatgtgctgcccatcctgaaggagaaggtggcctttgtgtctgggggccgggacaagaggggcggccccatcctgaccttccctgcccggagcaaccacgaccgcatccggcaggaggacctgaggaagctggtgacctacctggcctctgtgcccagtgaagatgtgtgcaagaggggcttcaccgtcatcatcgacatgaggggcagcaagtgggacctgatcaagcccctgctgaagaccctgcaggaggccttccctgctgagatccacgtggccctgatcatcaagccagacaacttctggcagaagcagaagaccaactttggcagcagcaagttcatctttgagacctccatggtgtctgtggagggcctgaccaagctggtggaccccagccagctgacagaggagtttgatggcagcctggactacaaccacgaggagtggattgagctgcggctgagcctggaggagttcttcaacagcgctgtgcacctgctgagccggctggaggacctgcaggagatgctggccaggaaggagttccctgtggatgtggagggcagccggcggctgattgatgagcacacccagctgaagaagaaggtgctgaaggcccctgtggaggagctggaccgggagggccagaggctgctgcagtgcatccgctgcagtgatggcttctctggaagaaactgcatccctggcagcgctgacttccagagcctggtgcccaagatcaccagcctgctggacaagctgcacagcacccggcagcacctgcaccagatgtggcacgtgaggaagctgaagctggaccagtgcttccagctgcggctgtttgagcaggatgctgagaagatgtttgactggatcagccacaacaaggagctgttcctgcagagccacacagaaattggagtgtcctaccagtatgccctggacctgcagacccagcacaaccactttgccatgaacagcatgaatgcctacgtgaacatcaaccgcatcatgtctgtggccagccggctgtctgaggccggccactacgccagccagcagatcaagcagatcagcacccagctggaccaggagtggaagagctttgctgctgccctggatgagaggagcaccatcctggccatgtctgctgtgttccaccagaaggccgagcagttcctgtctggagtggatgcctggtgcaagatgtgcagcgagggcggcctgcccagcgagatgcaggacctggagctggccatccaccaccaccagaccctgtatgagcaggtgacccaggcctacacagaggtgtcccaggacggcaaggccctgctggatgtgctgcagaggcccctgagccctggcaacagcgagagcctgacagccacagccaactacagcaaggctgtgcaccaggtgctggatgtggtgcatgaggtgctgcaccaccagaggcggctggagagcatctggcagcacaggaaggtgcggctgcaccagaggctgcagctgtgtgtgttccagcaggatgtgcagcaggtgctggactggattgaaaatcatggagaggccttcctgagcaagcacactggagtgggcaagagcctgcaccgggcccgggccctgcagaagagacatgatgactttgaggaggtggcccagaacacctacaccaatgctgacaagctgctggaggccgctgagcagctggcccagacaggagaatgtgaccctgaggagatctacaaggccgcccggcacctggaggtgcgcatccaggactttgtgagaagagtggagcagaggaagctgctgctggacatgtctgtgtccttccacacccacaccaaggagctgtggacctggatggaggacctgcagaaggagatgctggaggatgtgtgtgccgacagcgtggatgctgtgcaggagctgatcaagcagttccagcagcagcagacagccaccctggatgccaccctgaatgtcatcaaggagggggaggacctgatccagcagctgcggagcgccccacccagcctgggggagcccagcgaggcccgggacagcgctgtgagcaacaacaagaccccccacagcagcagcatcagccacatcgagagcgtgctgcagcagctggatgatgcccaggtgcagatggaggagctgttccacgagaggaagatcaagctggacatcttcctgcagctgcgcatctttgagcagtacaccatcgaggtgacagctgagctggatgcctggaatgaagacctgctgcggcagatgaatgacttcaacacagaggacctgaccctggccgagcagaggctgcagaggcacacagagaggaagctggccatgaacaacatgacctttgaggtgatccagcagggccaggacctgcaccagtacatcacagaggtgcaggccagcggcatcgagctgatctgtgagaaggacatcgacctggccgcccaggtgcaggagctgctggagttcctgcacgagaagcagcacgagctggagctgaatgctgagcagacccacaagaggctggagcagtgcctgcagctgcggcacctgcaggccgaggtgaagcaggtgctgggctggatcagaaatggagagagcatgctgaatgccagcctggtgaatgccagcagcctgtctgaggccgagcagctgcagcgggagcacgagcagttccagctggccatcgagagcctcttccacgccaccagcctgcagaagacccaccagagcgccctgcaggtgcagcagaaggccgaggtgctgctgcaggccggccactatgatgctgatgccatcagagaatgtgccgagaaggtggccctgcactggcagcagctgatgctgaagatggaggaccggctgaagctggtgaatgcctctgtggccttctacaagaccagcgagcaggtgtgcagcgtgctggagagcctggagcaggagtacagaagagatgaggactggtgtggcggccgggacaagctgggccctgctgctgagattgaccacgtgatccccctcatcagcaagcacctggagcagaaggaggccttcctgaaggcctgcaccctggccaggagaaatgctgaggtgttcctgaagtacatccacaggaacaacgtgtccatgcccagcgtggccagccacacccggggccctgagcagcaggtgaaggccatcctgtctgagctgctgcagcgggagaacagagtgctgcacttctggaccctgaagaagaggcggctggaccagtgccagcagtatgtggtgtttgagaggtctgccaagcaggccctggactggatccaggagactggagagttctacctgagcacccacaccagcactggagagaccacagaggagacccaggagctgctgaaggagtatggagagttccgggtgcctgccaagcagaccaaggagaaggtgaagctgctgatccagctggccgacagctttgtggagaagggccacatccacgccacagagatcaggaagtgggtgaccaccgtggacaagcactacagagacttcagcctgaggatgggcaagtaccgctacagcctggagaaggccctgggcgtgaacacagaggacaacaaggacctggagctggacatcatcccagccagcctgagtgaccgggaggtgaagctgagagatgccaaccacgaggtgaatgaggagaagaggaagagcgccaggaagaaggagttcatcatggccgagctgctgcagacagagaaggcctacgtgcgggacctgcacgagtgcctggagacctacctgtgggagatgaccagcggcgtggaggagatccccccaggcatcctgaacaaggagcacatcatcttcggcaacatccaggagatctatgacttccacaacaacatcttcctgaaggagctggagaagtatgagcagctgcctgaagatgtgggccactgctttgtgacctgggccgacaagttccagatgtatgtgacctactgcaagaacaagccagacagcaaccagctgatcctggagcacgccggcaccttctttgatgagatccagcagagacatggcctggccaacagcatcagcagctacctgatcaagcctgtgcagaggatcaccaagtaccagctgctgctgaaggagctgctgacctgctgtgaggagggcaagggggagctgaaggatggcctggaggtgatgctgtctgtgcccaagaaggccaatgatgccatgcacgtgtccatgctggagggctttgatgagaacctggatgtgcagggcgagctgatcctgcaggatgccttccaggtgtgggaccccaagagcctcatcaggaagggccgggagcggcacctgttcctgtttgagatcagcctggtgttcagcaaggagatcaaggacagcagcggccacaccaagtatgtgtacaagaacaagctgctgaccagcgagctgggcgtgacagagcacgtggagggggacccctgcaagtttgccctgtggagcggccgcacccccagcagtgacaacaagacagtgctgaaggccagcaacatcgagaccaagcaggagtggatcaagaacatccgggaggtgatccaggagcgcatcatccacctgaagggggccctgaaggagcccctgcagctgcccaagaccccagccaagcagaggaacaacagcaagagagatggagtggaggacatcgacagccagggagatggcagcagccagcctgacaccatcagcatcgccagcaggaccagccagaacacagtggacagcgacaagctgagcggcggctgtgagctgactgtggtgctgcaggacttctctgctggccacagcagcgagctgaccatccaggtgggccagacagtggagctgctggagcggcccagcgagaggcctggctggtgcctggtgaggaccacagagaggagcccccccctggagggcctggtgcccagcagcgccctgtgcatcagccacagccgcagctctgtggagatggactgcttcttccccctggtgaaggatgcctacagccacagcagcagtgaaaatggaggcaagtctgagagcgtggccaacctgcaggcccagcccagcctgaacagcatccacagcagccctggccccaagaggagcaccaacaccctgaagaagtggctgaccagccctgtgcggcggctgaacagcggcaaggcagatggcaacatcaagaagcagaagaaggtgagagatggcaggaagagctttgacctgggcagccccaagccaggagatgagaccaccccccagggcgacagcgcagatgagaagagcaagaagggctggggagaagatgagccagatgaggagagccacacccccctgcccccacccatgaagatctttgacaatgaccccacccaggatgagatgagcagcagcctgctggccgcccggcaggccagcacagaggtgcccacagctgctgacctggtgaatgccatcgagaagctggtgaagaacaagctgagcctggagggcagcagctaccggggcagcctgaaggaccctgctggctgcctgaatgaaggcatggccccacccaccccacccaagaaccctgaggaggagcagaaggccaaggccctgcggggccgcatgtttgtgctgaatgagctggtgcagacagagaaggactatgtgaaggacctgggcatcgtggtggagggcttcatgaagagaattgaggagaagggcgtgcctgaggacatgaggggcaaggacaagatcgtgtttggaaacatccaccagatctatgactggcacaaggacttcttcctggccgagctggagaagtgcatccaggagcaggaccggctggcccagctgttcatcaagcatgagaggaagctgcacatctacgtgtggtactgccagaacaagcccaggtctgagtacatcgtggccgagtatgatgcctactttgaggaggtgaagcaggagatcaaccagaggctgaccctgagtgacttcctgatcaagcccatccagaggatcaccaagtaccagctgctgctgaaggacttcctgcgctacagcgagaaggccggcctggagtgcagcgacatcgagaaggctgtggagctgatgtgcctggtgcccaagcgctgcaatgacatgatgaacctgggccgcctgcagggctttgagggcaccctgacagcccagggcaagctgctgcagcaggacaccttctacgtgattgagctggatgctggcatgcagagcaggaccaaggagaggagggtcttcctgtttgagcagatcgtcatcttcagcgagctgctgaggaagggcagcctgaccccaggctacatgttcaagaggagcatcaagatgaactacctggtgctggaggagaatgtggacaatgacccctgcaagtttgccctgatgaaccgggagaccagcgagcgggtggtgctgcaggccgccaatgctgacatccagcaggcctgggtgcaggacatcaaccaggtgctggagacccagagggacttcctgaatgccctgcagagccccatcgagtaccagaggaaggagaggagcacagctgtgatgaggagccagcctgcccggctgccccaggccagcccccggccctacagctctgtgcctgctggcagcgagaagccacccaagggcagcagctacaacccccccctgccccccctgaagatcagcaccagcaatggcagccctggctttgagtaccaccagcccggggacaagtttgaggccagcaagcagaatgacctgggcggctgcaatggcaccagctccatggctgtgatcaaggactactatgccctgaaggaaaatgagatctgtgtgtcccagggcgaggtggtgcaggtgctggccgtgaaccagcagaacatgtgcctggtgtaccagcctgccagtgaccacagccctgctgctgagggctgggtgcccggcagcatcctggcccccctgaccaaggccacagctgctgagagcagtgatggcagcatcaagaagagctgctcctggcacaccctgaggatgaggaagagagctgaggtggagaacacaggcaagaatgaggccaccggccccaggaagcccaaggacatcctgggcaacaaggtgtctgtgaaggagaccaacagcagcgaggagagtgaatgtgatgacctggaccccaacacctccatggagatcctgaaccccaacttcatccaggaggtggcccctgagttcctggtgcccctggtggatgtgacctgcctgctgggggacaccgtcatcctgcagtgcaaggtgtgtggccggcccaagcccaccatcacctggaagggccctgaccagaacatcctggacacagacaacagcagcgccacctacacagtgagcagctgtgacagcggggagatcaccctgaagatctgcaacctgatgccccaggacagcggcatctacacctgcatcgccaccaatgaccacggcaccaccagcaccagcgccaccgtgaaggtgcagggcgtgcctgctgcccccaaccggcccatcgcccaggagaggagctgcaccagcgtcatcctgcgctggctgccccccagcagcactggaaactgcaccatcagcggctacacagtggagtaccgggaggagggcagccagatctggcagcagagcgtggccagcaccctggacacctacctggtgattgaggacctgagccctggctgcccctaccagttccgggtgtctgccagcaacccctggggcatcagcctgcccagcgagcccagcgagtttgtgcggctgcctgaatatgatgctgctgctgatggagccaccatctcctggaaggagaactttgacagcgcctacacagagctgaatgagatcggccggggccgcttcagcatcgtgaagaagtgcatccacaaggccaccaggaaggatgtggccgtgaagtttgtgtccaagaagatgaagaagaaggagcaggccgcccatgaagctgccctgctgcagcacctgcagcacccccagtacatcaccctgcatgacacctatgagagccccaccagctacatcctgatcctggagctgatggatgatggccgcctgctggactacctgatgaaccatgatgagctgatggaggagaaggtggccttctacatccgggacatcatggaggccctgcagtacctgcacaactgccgggtggcccacctggacatcaagccagagaacctgctgattgacctgcgcatccctgtgccccgggtgaagctgattgacctggaggatgctgtgcagatcagcggccacttccacatccaccacctgctgggcaaccctgagtttgctgcccctgaggtgatccagggcatccctgtgtccctgggcacagacatctggagcattggagtgctgacctacgtgatgctgtctggagtgagccccttcctggatgagagcaaggaggagacctgcatcaacgtgtgccgggtggacttctccttcccccatgagtacttctgtggggtgtccaatgctgcccgggacttcatcaacgtcatcctgcaggaggacttcagaagaagacccacagctgccacctgcctgcagcacccctggctgcagccccacaacggcagctacagcaagatccccctggacaccagccggctggcctgcttcattgaaagaaggaagcaccagaatgatgtgcggcccatccccaacgtgaagagctacatcgtgaacagagtgaaccagggcacctag

SEQ ID NO: 156722 - DNA, 3774 bp, synthetic construct
  misc_feature 1..3774: note = Description of Artificial Sequence: Synthetic coding sequence
  source 1..3774: mol_type = other DNA
atgaagggcggggaccgggcctacacccggggccccagcctgggctggctgtttgccaagtgctgctgctgcttcccctgcagagatgcctacagccacagcagcagtgaaaatggaggcaagtctgagagcgtggccaacctgcaggcccagcccagcctgaacagcatccacagcagccctggccccaagaggagcaccaacaccctgaagaagtggctgaccagccctgtgcggcggctgaacagcggcaaggcagatggcaacatcaagaagcagaagaaggtgagagatggcaggaagagctttgacctgggcagccccaagccaggagatgagaccaccccccagggcgacagcgcagatgagaagagcaagaagggctggggagaagatgagccagatgaggagagccacacccccctgcccccacccatgaagatctttgacaatgaccccacccaggatgagatgagcctggagggcagcagctaccggggcagcctgaaggaccctgctggctgcctgaatgaaggcatggccccacccaccccacccaagaaccctgaggaggagcagaaggccaaggccctgcggggccgcatgtttgtgctgaatgagctggtgcagacagagaaggactatgtgaaggacctgggcatcgtggtggagggcttcatgaagagaattgaggagaagggcgtgcctgaggacatgaggggcaaggacaagatcgtgtttggaaacatccaccagatctatgactggcacaaggacttcttcctggccgagctggagaagtgcatccaggagcaggaccggctggcccagctgttcatcaagcatgagaggaagctgcacatctacgtgtggtactgccagaacaagcccaggtctgagtacatcgtggccgagtatgatgcctactttgaggaggtgaagcaggagatcaaccagaggctgaccctgagtgacttcctgatcaagcccatccagaggatcaccaagtaccagctgctgctgaaggacttcctgcgctacagcgagaaggccggcctggagtgcagcgacatcgagaaggctgtggagctgatgtgcctggtgcccaagcgctgcaatgacatgatgaacctgggccgcctgcagggctttgagggcaccctgacagcccagggcaagctgctgcagcaggacaccttctacgtgattgagctggatgctggcatgcagagcaggaccaaggagcggcgggtcttcctgtttgagcagatcgtcatcttcagcgagctgctgaggaagggcagcctgaccccaggctacatgttcaagaggagcatcaagatgaactacctggtgctggaggagaatgtggacaatgacccctgcaagtttgccctgatgaaccgggagaccagcgagcgggtggtgctgcaggccgccaatgctgacatccagcaggcctgggtgcaggacatcaaccaggtgctggagacccagagggacttcctgaatgccctgcagagccccatcgagtaccagaggaaggagaggagcacagctgtgatgaggagccagcctgcccggctgccccaggccagcccccggccctacagctctgtgcctgctggcagcgagaagccacccaagggcagcagctacaacccccccctgccccccctgaagatcagcaccagcaatggcagccctggctttgagtaccaccagcccggggacaagtttgaggccagcaagcagaatgacctgggcggctgcaatggcaccagctccatggccgtcatcaaggactactatgccctgaaggaaaatgagatctgtgtgtcccagggcgaggtggtgcaggtgctggccgtgaaccagcagaacatgtgcctggtgtaccagcctgccagtgaccacagccctgctgctgagggctgggtgcccggcagcatcctggcccccctgaccaaggccacagctgctgagagcagtgatggcagcatcaagaagagctgctcctggcacaccctgaggatgaggaagagagctgaggtggagaacacaggcaagaatgaggccaccggccccaggaagcccaaggacatcctgggcaacaaggtgtctgtgaaggagaccaacagcagcgaggagagtgaatgtgatgacctggaccccaacacctccatggagatcctgaaccccaacttcatccaggaggtggcccctgagttcctggtgcccctggtggatgtgacctgcctgctgggggacaccgtcatcctgcagtgcaaggtgtgtggccggcccaagcccaccatcacctggaagggccctgaccagaacatcctggacacagacaacagcagcgccacctacacagtgagcagctgtgacagcggggagatcaccctgaagatctgcaacctgatgccccaggacagcggcatctacacctgcatcgccaccaatgaccacggcaccaccagcaccagcgccaccgtgaaggtgcagggcgtgcctgctgcccccaaccggcccatcgcccaggagaggagctgcaccagcgtcatcctgcgctggctgccccccagcagcacaggcaactgcaccatcagcggctacacagtggagtaccgggaggagggcagccagatctggcagcagagcgtggccagcaccctggacacctacctggtgattgaggacctgagccctggctgcccctaccagttccgggtgtctgccagcaacccctggggcatcagcctgcccagcgagcccagcgagtttgtgcggctgcctgaatatgatgctgctgctgatggagccaccatctcctggaaggaaaattttgattctgcctacacagagctgaatgaaattggccggggccgcttcagcatcgtgaagaagtgcatccacaaggccaccaggaaggatgtggccgtgaagtttgtgtccaagaagatgaagaagaaggagcaggccgcccacgaggccgccctgctgcagcacctgcagcacccccagtacatcaccctgcatgacacctatgagagccccaccagctacatcctgatcctggagctgatggatgatggccgcctgctggactacctgatgaaccatgatgagctgatggaggagaaggtggccttctacatccgggacatcatggaggccctgcagtacctgcacaactgccgggtggcccacctggacatcaagccagagaacctgctgattgacctgcgcatccctgtgccccgggtgaagctgattgacctggaggatgctgtgcagatcagcggccacttccacatccaccacctgctgggcaaccctgagtttgctgcccctgaggtgatccagggcatccctgtgtccctgggcacagacatctggagcattggagtgctgacctacgtgatgctgagcggcgtgagccccttcctggatgagagcaaggaggagacctgcatcaacgtgtgccgggtggacttctccttcccccatgagtacttctgtggggtgtccaatgctgcccgggacttcatcaacgtcatcctgcaggaggacttcagaagaagacccacagctgccacctgcctgcagcacccctggctgcagccccacaacggcagctacagcaagatccccctggacaccagccggctggcctgcttcatcgagaggaggaagcaccagaatgatgtgcggcccatccccaacgtgaagagctacatcgtgaacagagtgaaccagggcacctag

SEQ ID NO: 156723 - DNA, 4965 bp, synthetic construct
  misc_feature 1..4965: note = Description of Artificial Sequence: Synthetic coding sequence
  source 1..4965: mol_type = other DNA
atgacagaccgcttctgggaccagtggtacctgtggtacctgcggctgctgcggctgctggaccggggcagcttcagaaatgatggcctgaaggccagtgatgtgctgcccatcctgaaggagaaggtggcctttgtgtctgggggccgggacaagaggggcggccccatcctgaccttccctgcccggagcaaccacgaccgcatccggcaggaggacctgaggaagctggtgacctacctggcctctgtgcccagtgaagatgtgtgcaagaggggcttcaccgtcatcatcgacatgaggggcagcaagtgggacctgatcaagcccctgctgaagaccctgcaggaggccttccctgctgagatccacgtggccctgatcatcaagccagacaacttctggcagaagcagaagaccaactttggcagcagcaagttcatctttgagacctccatggtgtctgtggagggcctgaccaagctggtggaccccagccagctgacagaggagtttgatggcagcctggactacaaccacgaggagtggattgagctgcggctgagcctggaggagttcttcaacagcgctgtgcacctgctgagccggctggaggacctgcaggagatgctggccaggaaggagttccctgtggatgtggagggcagccggcggctgattgatgagcacacccagctgaagaagaaggtgctgaaggcccctgtggaggagctggaccgggagggccagaggctgctgcagtgcatccgctgcagtgatggcttctctggaagaaactgcatccctggcagcgctgacttccagagcctggtgcccaagatcaccagcctgctggacaagctgcacagcacccggcagcacctgcaccagatgtggcacgtgaggaagctgaagctggaccagtgcttccagctgcggctgtttgagcaggatgctgagaagatgtttgactggatcagccacaacaaggagctgttcctgcagagccacacagaaattggagtgtcctaccagtatgccctggacctgcagacccagcacaaccactttgccatgaacagcatgaatgcctacgtgaacatcaaccgcatcatgtctgtggccagccggctgtctgaggccggccactacgccagccagcagatcaagcagatcagcacccagctggaccaggagtggaagagctttgctgctgccctggatgagaggagcaccatcctggccatgtctgctgtgttccaccagaaggccgagcagttcctgtctggagtggatgcctggtgcaagatgtgcagcgagggcggcctgcccagcgagatgcaggacctggagctggccatccaccaccaccagaccctgtatgagcaggtgacccaggcctacacagaggtgtcccaggacggcaaggccctgctggatgtgctgcagaggcccctgagccctggcaacagcgagagcctgacagccacagccaactacagcaaggctgtgcaccaggtgctggatgtggtgcatgaggtgctgcaccaccagaggcggctggagagcatctggcagcacaggaaggtgcggctgcaccagaggctgcagctgtgtgtgttccagcaggatgtgcagcaggtgctggactggattgaaaatcatggagaggccttcctgagcaagcacactggagtgggcaagagcctgcaccgggcccgggccctgcagaagagacatgatgactttgaggaggtggcccagaacacctacaccaatgctgacaagctgctggaggccgctgagcagctggcccagacaggagaatgtgaccctgaggagatctacaaggccgcccggcacctggaggtgcgcatccaggactttgtgagaagagtggagcagaggaagctgctgctggacatgtctgtgtccttccacacccacaccaaggagctgtggacctggatggaggacctgcagaaggagatgctggaggatgtgtgtgccgacagcgtggatgctgtgcaggagctgatcaagcagttccagcagcagcagacagccaccctggatgccaccctgaatgtcatcaaggagggggaggacctgatccagcagctgcggagcgccccacccagcctgggggagcccagcgaggcccgggacagcgctgtgagcaacaacaagaccccccacagcagcagcatcagccacatcgagagcgtgctgcagcagctggatgatgcccaggtgcagatggaggagctgttccacgagaggaagatcaagctggacatcttcctgcagctgcgcatctttgagcagtacaccatcgaggtgacagctgagctggatgcctggaatgaagacctgctgcggcagatgaatgacttcaacacagaggacctgaccctggccgagcagaggctgcagaggcacacagagaggaagctggccatgaacaacatgacctttgaggtgatccagcagggccaggacctgcaccagtacatcacagaggtgcaggccagcggcatcgagctgatctgtgagaaggacatcgacctggccgcccaggtgcaggagctgctggagttcctgcacgagaagcagcacgagctggagctgaatgctgagcagacccacaagaggctggagcagtgcctgcagctgcggcacctgcaggccgaggtgaagcaggtgctgggctggatcagaaatggagagagcatgctgaatgccagcctggtgaatgccagcagcctgtctgaggccgagcagctgcagcgggagcacgagcagttccagctggccatcgagaagacccaccagagcgccctgcaggtgcagcagaaggccgaggtgctgctgcaggccggccactatgatgctgatgccatccgggagtgtgccgagaaggtggccctgcactggcagcagctgatgctgaagatggaggaccggctgaagctggtgaatgcctctgtggccttctacaagaccagcgagcaggtgtgcagcgtgctggagagcctggagcaggagtacagaagagatgaggactggtgtggcggccgggacaagctgggccctgctgctgagattgaccacgtgatccccctcatcagcaagcacctggagcagaaggaggccttcctgaaggcctgcaccctggccaggagaaatgctgaggtgttcctgaagtacatccacagaaataatgtgtccatgcccagcgtggccagccacacccggggccctgagcagcaggtgaaggccatcctgtctgagctgctgcagagagaaaatagagtgctgcacttctggaccctgaagaagaggcggctggaccagtgccagcagtatgtggtgtttgagaggtctgccaagcaggccctggactggatccaggagaccggggagttctacctgagcacccacaccagcactggagagaccacagaggagacccaggagctgctgaaggagtatggagagttccgggtgcctgccaagcagaccaaggagaaggtgaagctgctgatccagctggccgacagctttgtggagaagggccacatccacgccacagagatcaggaagtgggtgaccaccgtggacaagcactacagagacttcagcctgaggatgggcaagtaccgctacagcctggagaaggccctgggcgtgaacacagaggacaacaaggacctggagctggacatcatcccagccagcctgagtgaccgggaggtgaagctgagagatgccaaccacgaggtgaatgaggagaagaggaagagcgccaggaagaaggagttcatcatggccgagctgctgcagacagagaaggcctacgtgcgggacctgcatgaatgtctggagacctacctgtgggagatgaccagcggcgtggaggagatccccccaggcatcctgaacaaggagcacatcatctttggaaacatccaggagatctatgacttccacaacaacatcttcctgaaggagctggagaagtatgagcagctgcctgaagatgtgggccactgctttgtgacctgggccgacaagttccagatgtatgtgacctactgcaagaacaagccagacagcaaccagctgatcctggagcacgccggcaccttctttgatgagatccagcagagacatggcctggccaacagcatcagcagctacctgatcaagcctgtgcagaggatcaccaagtaccagctgctgctgaaggagctgctgacctgctgtgaggagggcaaaggagagctgaaggatggcctggaggtgatgctgtctgtgcccaagaaggccaatgatgccatgcacgtgtccatgctggagggctttgatgagaacctggatgtgcagggcgagctgatcctgcaggatgccttccaggtgtgggaccccaagagcctcatcaggaagggccgggagcggcacctgttcctgtttgagatcagcctggtgttcagcaaggagatcaaggacagcagcggccacaccaagtatgtgtacaagaacaagctgctgaccagcgagctgggcgtgacagaacatgtggagggggacccctgcaagtttgccctgtggagcggccgcacccccagcagtgacaacaagacagtgctgaaggccagcaacatcgagaccaagcaggagtggatcaagaacatccgggaggtgatccaggagcgcatcatccacctgaagggggccctgaaggagcccctgcagctgcccaagaccccagccaagcagaggaacaacagcaagagagatggagtggaggacatcgacagccagggagatggcagcagccagcctgacaccatcagcatcgccagcaggaccagccagaacacagtggacagcgacaaggatggcaacctggtgccccgctggcacctgggccctggggaccccttcagcacctacgtgtag

SEQ ID NO: 156724 - DNA, 789 bp, synthetic construct
  misc_feature 1..789: note = Description of Artificial Sequence: Synthetic coding sequence
  source 1..789: mol_type = other DNA
atgtggttcctggtgctgtgcctggccctgagcctgggcggcactggagctgccccacccatccagagcagaattgtgggcggctgggagtgtgagcagcacagccagccctggcaggccgccctgtaccacttcagcaccttccagtgtggcggcatcctggtgcaccggcagtgggtgctgacagctgcccactgcatcagtgacaactaccagctgtggctgggccgccacaacctgtttgatgatgagaacacagcccagtttgtgcacgtgtctgagagcttcccccaccctggcttcaacatgagcctgctggagaaccacacccggcaggctgatgaggactacagccatgacctgatgctgctgcggctgacagagcctgctgacaccatcacagatgctgtgaaggtggtggagctgcccacagaggagcctgaggtgggcagcacctgcctggccagcggctggggcagcattgagcctgagaacttctccttcccagatgacctgcagtgtgtggacctgaagatcctgcccaatgatgagtgcaagaaggcccacgtgcagaaggtgacagacttcatgctgtgtgtgggccacctggagggcggcaaggacacctgtgtgggggacagcggcggccccctgatgtgtgatggagtgctgcagggcgtgacctcctggggctacgtgccctgtggcacccccaacaagcccagcgtggccgtgcgggtgctgtcctatgtgaagtggattgaggacaccatcgccgagaacagctag

SEQ ID NO: 156725 - DNA, 483 bp, synthetic construct
  misc_feature 1..483: note = Description of Artificial Sequence: Synthetic coding sequence
  source 1..483: mol_type = other DNA
atgagcctgctggagaaccacacccggcaggctgatgaggactacagccatgacctgatgctgctgcggctgacagagcctgctgacaccatcacagatgctgtgaaggtggtggagctgcccacagaggagcctgaggtgggcagcacctgcctggccagcggctggggcagcattgagcctgagaacttctccttcccagatgacctgcagtgtgtggacctgaagatcctgcccaatgatgagtgcaagaaggcccacgtgcagaaggtgacagacttcatgctgtgtgtgggccacctggagggcggcaaggacacctgtgtgggggacagcggcggccccctgatgtgtgatggagtgctgcagggcgtgacctcctggggctacgtgccctgtggcacccccaacaagcccagcgtggccgtgcgggtgctgtcctatgtgaagtggattgaggacaccatcgccgagaacagctag

SEQ ID NO: 156726 - DNA, 1917 bp, synthetic construct
  misc_feature 1..1917: note = Description of Artificial Sequence: Synthetic coding sequence
  source 1..1917: mol_type = other DNA
atgatcctcttcaagcaggccacctacttcatcagcctgtttgccaccgtgtcctgtggctgcctgacccagctgtatgaaaatgccttcttcagaggaggagatgtggcctccatgtacaccccaaatgcccagtactgccagatgcgctgcaccttccacccccgctgcctgctcttctccttcctgcctgccagcagcatcaatgacatggagaagagatttggctgcttcctgaaggacagcgtgacaggcaccctgcccaaggtgcacaggactggagctgtgtctggccacagcctgaagcagtgtggccaccagatcagcgcctgccaccgggacatctacaagggcgtggacatgagaggagtgaacttcaacgtgtccaaggtgtcctctgtggaggagtgccagaagcgctgcaccagcaacatccgctgccagttcttctcctatgccacccagaccttccacaaggccgagtacagaaacaactgcctgctgaagtacagccctgggggcacccccacagccatcaaggtgctgagcaatgtggagagcggcttcagcctgaagccctgtgccctgtctgaaattggctgccacatgaacatcttccagcacctggccttcagtgatgtggatgtggcccgggtgctgaccccagatgcctttgtgtgcaggaccatctgcacctaccaccccaactgcctcttcttcaccttctacaccaacgtgtggaagattgagagccagagaaatgtgtgcctgctgaagaccagcgagagcggcacccccagcagcagcaccccccaggagaacaccatcagcggctacagcctgctgacctgcaagaggaccctgcctgagccctgccacagcaagatctacccaggagtggactttggaggagaggagctgaatgtgacctttgtgaagggcgtgaatgtgtgccaggagacctgcaccaagatgatccgctgccagttcttcacctacagcctgctgcctgaggactgcaaggaggagaagtgcaagtgcttcctgcggctgtccatggatggcagccccacccgcatcgcctacggcacccagggcagcagcggctacagcctgcggctgtgcaacacaggagacaacagcgtgtgcaccaccaagaccagcaccagaattgtgggcggcaccaacagctcctggggcgagtggccctggcaggtgtccctgcaggtgaagctgacagcccagaggcacctgtgtggcggcagcctcatcggccaccagtgggtgctgacagctgcccactgctttgatggcctgcccctgcaggatgtgtggaggatctacagcggcatcctgaacctgagtgacatcaccaaggacacccccttcagccagatcaaggagatcatcatccaccagaactacaaggtgtctgagggcaaccacgacatcgccctgatcaagctgcaggcccccctgaactacacagagttccagaagcccatctgcctgcccagcaaaggagacaccagcaccatctacaccaactgctgggtgacaggctggggcttcagcaaggagaagggggagatccagaacatcctgcagaaggtgaacatccccctggtgaccaatgaggagtgccagaagcgctaccaggactacaagatcacccagaggatggtgtgtgccggctacaaggagggcggcaaggatgcctgcaagggggacagcggcggccccctggtgtgcaagcacaacggcatgtggaggctggtgggcatcacctcctggggcgagggctgtgcccggcgggagcagcccggggtgtacaccaaggtggccgagtacatggactggatcctggagaagacccagagcagtgatggcaaggcccagatgcagagccctgcctag

SEQ ID NO: 156727 - DNA, 1545 bp, synthetic construct
  misc_feature 1..1545: note = Description of Artificial Sequence: Synthetic coding sequence
  source 1..1545: mol_type = other DNA
atgtacaccccaaatgcccagtactgccagatgcgctgcaccttccacccccgctgcctgctcttctccttcctgcctgccagcagcatcaatgacatggagaagagatttggctgcttcctgaaggacagcgtgacaggcaccctgcccaaggtgcacaggactggagctgtgtctggccacagcctgaagcagtgtggccaccagatcagcgcctgccaccgggacatctacaagggcgtggacatgagaggagtgaacttcaacgtgtccaaggtgtcctctgtggaggagtgccagaagcgctgcaccagcaacatccgctgccagttcttctcctatgccacccagaccttccacaaggccgagtacagaaacaactgcctgctgaagtacagccctgggggcacccccacagccatcaaggtgctgagcaatgtggagagcggcttcagcctgaagccctgtgccctgtctgaaattggctgccacatgaacatcttccagcacctggccttcagtgatgtggatgtggcccgggtgctgaccccagatgcctttgtgtgcaggaccatctgcacctaccaccccaactgcctcttcttcaccttctacaccaacgtgtggaagattgagagccagagaaatgtgtgcctgctgaagaccagcgagagcggcacccccagcagcagcaccccccaggagaacaccatcagcggctacagcctgctgacctgcaagaggaccctgcctgagccctgccacagcaagatctacccaggagtggactttggaggagaggagctgaatgtgacctttgtgaagggcgtgaatgtgtgccaggagacctgcaccaagatgatccgctgccagttcttcacctacagcctgctgcctgaggactgcaaggaggagaagtgcaagtgcttcctgcggctgtccatggatggcagccccacccgcatcgcctacggcacccagggcagcagcggctacagcctgcggctgtgcaacacaggagacaacagcgtgtgcaccaccaagaccagcaccagaattgtgggcggcaccaacagctcctggggcgagtggccctggcaggtgtccctgcaggtgaagctgacagcccagaggcacctgtgtggcggcagcctcatcggccaccagtgggtgctgacagctgcccactgctttgatggcctgcccctgcaggatgtgtggaggatctacagcggcatcctgaacctgagtgacatcaccaaggacacccccttcagccagatcaaggagatcatcatccaccagaactacaaggtgtctgagggcaaccacgacatcgccctgatcaagctgcaggcccccctgaactacacagagttccagaagcccatctgcctgcccagcaaaggagacaccagcaccatctacaccaactgctgggtgacaggctggggcttcagcaaggagaagggccgcttccgctggagcctgagcctgcagacccagtggaatgtggcctttggaggccaccaccagctgggctag

SEQ ID NO: 156728 - DNA, 447 bp, synthetic construct
  misc_feature 1..447: note = Description of Artificial Sequence: Synthetic coding sequence
  source 1..447: mol_type = other DNA
atgatcctcttcaagcaggccacctacttcatcagcctgtttgccaccgtgtcctgtggctgcctgacccagctgtatgaaaatgccttcttcagaggaggagatgtggcctccatgtacaccccaaatgcccagtactgccagatgcgctgcaccttccacccccgctgcctgctcttctccttcctgcctgccagcagcatcaatgacatggagaagagatttggctgcttcctgaaggacagcgtgacaggcaccctgcccaaggtgcacaggactggagctgtgtctggccacagcctgaagcagtgtggccaccagatcagcgcctgccaccgggacatctacaagggcgtggacatgagaggagtgaacttcaacgtgtccaaggtgtcctctgtggaggagtgccagaagcgctgcaccagcaacatccgctgccagtag

SEQ ID NO: 156729 - DNA, 753 bp, synthetic construct
  misc_feature 1..753: note = Description of Artificial Sequence: Synthetic coding sequence
  source 1..753: mol_type = other DNA
atgaggatcctgcagctgatcctgctggccctggccaccggcctggtgggcggggagacccgcatcatcaagggctttgagtgcaagccccacagccagccctggcaggccgccctgtttgagaagacccggctgctgtgtggggccaccctcatcgccccccgctggctgctgacagctgcccactgcctgaagccccgctacatcgtgcacctgggccagcacaacctgcagaaggaggagggctgtgagcagaccaggacagccacagagagcttcccccaccctggcttcaacaacagcctgcccaacaaggaccacagaaatgacatcatgctggtgaagatggccagccctgtgtccatcacctgggccgtgcggcccctgaccctgagcagccgctgtgtgacagctggcaccagctgcctgatcagcggctggggcagcaccagcagcccccagctgcggctgccccacaccctgcgctgtgccaacatcaccatcatcgagcaccagaagtgtgaaaatgcctacccaggcaacatcacagacaccatggtgtgtgcctctgtgcaggagggcggcaaggacagctgccagggcgacagcggcggccccctggtgtgcaaccagagcctgcagggcatcatctcctggggccaggacccctgtgccatcaccaggaagccaggagtgtacaccaaggtgtgcaagtatgtggactggatccaggagaccatgaagaacaactag

SEQ ID NO: 156730 - DNA, 849 bp, synthetic construct
  misc_feature 1..849: note = Description of Artificial Sequence: Synthetic coding sequence
  source 1..849: mol_type = other DNA
atgcagaggctgcgctggctgcgggactggaagagcagcggccggggcctgacagctgccaaggagcccggggcccggagcagccccctgcaggccatgaggatcctgcagctgatcctgctggccctggccaccggcctggtgggcggggagacccgcatcatcaagggctttgagtgcaagccccacagccagccctggcaggccgccctgtttgagaagacccggctgctgtgtggggccaccctcatcgccccccgctggctgctgacagctgcccactgcctgaagccccgctacatcgtgcacctgggccagcacaacctgcagaaggaggagggctgtgagcagaccaggacagccacagagagcttcccccaccctggcttcaacaacagcctgcccaacaaggaccacagaaatgacatcatgctggtgaagatggccagccctgtgtccatcacctgggccgtgcggcccctgaccctgagcagccgctgtgtgacagctggcaccagctgcctgatcagcggctggggcagcaccagcagcccccagctgcggctgccccacaccctgcgctgtgccaacatcaccatcatcgagcaccagaagtgtgaaaatgcctacccaggcaacatcacagacaccatggtgtgtgcctctgtgcaggagggcggcaaggacagctgccagggcgacagcggcggccccctggtgtgcaaccagagcctgcagggcatcatctcctggggccaggacccctgtgccatcaccaggaagccaggagtgtacaccaaggtgtgcaagtatgtggactggatccaggagaccatgaagaacaactag

SEQ ID NO: 156731 - DNA, 828 bp, synthetic construct
  misc_feature 1..828: note = Description of Artificial Sequence: Synthetic coding sequence
  source 1..828: mol_type = other DNA
atgaggatcctgcagctgatcctgctggccctggccaccggcctggtgggcggggagacccgcatcatcaagggctttgagtgcaagccccacagccagccctggcaggccgccctgtttgagaagacccggctgctgtgtggggccaccctcatcgccccccgctggctgctgacagctgcccactgcctgaagccctgggtgtccctgaccagccccacccacgtgtccccagacctgagcagcagcaactactgcctgagccacctgagccgctacatcgtgcacctgggccagcacaacctgcagaaggaggagggctgtgagcagaccaggacagccacagagagcttcccccaccctggcttcaacaacagcctgcccaacaaggaccacagaaatgacatcatgctggtgaagatggccagccctgtgtccatcacctgggccgtgcggcccctgaccctgagcagccgctgtgtgacagctggcaccagctgcctgatcagcggctggggcagcaccagcagcccccagctgcggctgccccacaccctgcgctgtgccaacatcaccatcatcgagcaccagaagtgtgaaaatgcctacccaggcaacatcacagacaccatggtgtgtgcctctgtgcaggagggcggcaaggacagctgccagggcgacagcggcggccccctggtgtgcaaccagagcctgcagggcatcatctcctggggccaggacccctgtgccatcaccaggaagccaggagtgtacaccaaggtgtgcaagtatgtggactggatccaggagaccatgaagaacaactag

SEQ ID NO: 156732 - DNA, 753 bp, synthetic construct; identical to SEQ ID NO: 156729
  misc_feature 1..753: note = Description of Artificial Sequence: Synthetic coding sequence
  source 1..753: mol_type = other DNA

SEQ ID NO: 156733 - DNA, 849 bp, synthetic construct; identical to SEQ ID NO: 156730
  misc_feature 1..849: note = Description of Artificial Sequence: Synthetic coding sequence
  source 1..849: mol_type = other DNA

SEQ ID NO: 156734 - DNA, 765 bp, synthetic construct
  misc_feature 1..765: note = Description of Artificial Sequence: Synthetic coding sequence
  source 1..765: mol_type = other DNA
atgggcctgagcatcttcctgctgctgtgtgtgctgggcctgagccaggccgccacccccaagatcttcaacggcacagaatgtggcaggaacagccagccctggcaggtgggcctgtttgagggcaccagcctgcgctgtggcggcgtgctgattgaccaccgctgggtgctgacagctgcccactgcagcggcagccgctactgggtgcggctgggggagcacagcctgagccagctggactggacagagcagatccgccacagcggcttctctgtgacccaccctggctacctgggcgccagcaccagccatgaacatgacctgcggctgctgcggctgcggctgcctgtgcgggtgaccagctctgtgcagcccctgcccctgcccaatgactgtgccacagctggaacagaatgtcatgtgtctggctggggcatcaccaaccaccccaggaaccccttcccagacctgctgcagtgcctgaacctgagcatcgtgtcccatgccacctgccacggcgtgtacccaggccgcatcaccagcaacatggtgtgtgccggcggcgtgcccggccaggatgcctgccagggcgacagcggcggccccctggtgtgtggcggcgtgctgcagggcctggtgtcctggggctctgtgggcccctgtggccaggacggcatccctggggtgtacacctacatctgcaacagcaccctggtgggcctgggcacctcctggaacttcaacagctgccagcccttctag

SEQ ID NO: 156735 - DNA, 435 bp, synthetic construct
  misc_feature 1..435: note = Description of Artificial Sequence: Synthetic coding sequence
  source 1..435: mol_type = other DNA
atggccctgtctgtgggcgtgacccacagccggggccgctggggctgcctgcgggccccagcctgtgccgccggcgtgtccctgctgaccactggaggcagcagccagaggctgacagctgctgctgaccccttcccagacctgctgcagtgcctgaacctgagcatcgtgtcccatgccacctgccacggcgtgtacccaggccgcatcaccagcaacatggtgtgtgccggcggcgtgcccggccaggatgcctgccagggcgacagcggcggccccctggtgtgtggcggcgtgctgcagggcctggtgtcctggggctctgtgggcccctgtggccaggacggcatccctggggtgtacacctacatctgcaacagcaccctggtgggcctgggcacctcctggaacttcaacagctgccagcccttctag

SEQ ID NO: 156736 - DNA, 747 bp, synthetic construct
  misc_feature 1..747: note = Description of Artificial Sequence: Synthetic coding sequence
  source 1..747: mol_type = other DNA
atgggcctgagcatcttcctgctgctgtgtgtgctgggcctgagccaggccgccacccccaagatcttcaacggcacagaatgtggcaggaacagccagccctggcaggtgggcctgtttgagggcaccagcctgcgctgtggcggcgtgctgattgaccaccgctgggtgctgacagctgcccactgcagcggcagccgctactgggtgcggctgggggagcacagcctgagccagctggactggacagagcagatccgccacagcggcttctctgtgacccaccctggctacctgggcgccagcaccagccatgaacatgacctgcggctgctgcggctgcggctgcctgtgcgggtgaccagctctgtgcagcccctgcccctgcccaatgactgtgccacagctggaacagaatgtcatgtgtctggctggggcatcaccaaccaccccaggaaccccttcccagacctgctgcagtgcctgaacctgagcatcgtgtcccatgccacctgccacggcgtgtacccaggccgcatcaccagcaacatggtgtgtgccggcggcgtgcccggccaggatgcctgccagggcgacagcggcggccccctggtgtgtggcggcgtgctgcagggcctggtgtcctggggctctgtgggcccctgtggccaggacggcatccctggggtgtacacctacatctgcaagtatgtggactggatccgcatgatcatgaggaacaactag

SEQ ID NO: 156737 - DNA, 747 bp, synthetic construct; identical to SEQ ID NO: 156736
  misc_feature 1..747: note = Description of Artificial Sequence: Synthetic coding sequence
  source 1..747: mol_type = other DNA

SEQ ID NO: 156738 - DNA, 336 bp, synthetic construct
  misc_feature 1..336: note = Description of Artificial Sequence: Synthetic coding sequence
  source 1..336: mol_type = other DNA
atgggcctgagcatcttcctgctgctgtgtgtgctgggcctgagccaggccgccacccccaagatcttcaacggcacagaatgtggcaggaacagccagccctggcaggtgggcctgtttgagggcaccagcctgcgctgtggcggcgtgctgattgaccaccgctgggtgctgacagctgcccactgcagcggccggcccatccctggcagcgcccctgtgccccagcccctgcaccggctgccctgccacctgccctggtgtgtgtcccgggagaaccacgagcagcacggcgtgtgcagaagaagacctggggccggctgcctgcccggctag

SEQ ID NO: 156739 - DNA, 834 bp, synthetic construct
  misc_feature 1..834: note = Description of Artificial Sequence: Synthetic coding sequence
  source 1..834: mol_type = other DNA
atgtggcccctggccctggtgattgccagcctgaccctggccctgagcggcggcgtgtcccaggagagcagcaaggtgctgaacaccaacggcaccagcggcttcctgcccggcggctacacctgcttcccccacagccagccctggcaggccgccctgctggtgcagggccgcctgctgtgtggcggcgtgctggtgcaccccaagtgggtgctgacagctgcccactgcctgaaggagggcctgaaggtgtacctgggcaagcacgccctgggccgggtggaggccggggagcaggtgcgggaggtggtgcacagcatcccccaccctgagtacagaagaagccccacccacctgaaccacgaccatgacatcatgctgctggagctgcagagccctgtgcagctgaccggctacatccagaccctgcccctgagccacaacaaccggctgaccccaggcaccacctgccgggtgtctggctggggcaccaccaccagcccccaggtgaactaccccaagaccctgcagtgtgccaacatccagctgcggagtgatgaggagtgccggcaggtgtacccaggcaagatcacagacaacatgctgtgtgccggcaccaaggagggcggcaaggacagctgtgagggggacagcggcggccccctggtgtgcaacagaaccctgtatggaattgtgtcctggggagacttcccctgtggccagcctgacaggcctggggtgtacaccagggtgagccgctacgtgctgtggatccgggagaccatcagaaaatatgagacccagcagcagaagtggctgaagggcccccagtag

SEQ ID NO: 156740 - DNA, 378 bp, synthetic construct
  misc_feature 1..378: note = Description of Artificial Sequence: Synthetic coding sequence
  source 1..378: mol_type = other DNA
atgtggcccctggccctggtgattgccagcctgaccctggccctgagcggcgtgaactaccccaagaccctgcagtgtgccaacatccagctgcggagtgatgaggagtgccggcaggtgtacccaggcaagatcacagacaacatgctgtgtgccggcaccaaggagggcggcaaggacagctgtgagggggacagcggcggccccctggtgtgcaacagaaccctgtatggaattgtgtcctggggagacttcccctgtggccagcctgacaggcctggggtgtacaccagggtgagccgctacgtgctgtggatccgggagaccatcagaaaatatgagacccagcagcagaagtggctgaagggcccccagtag

SEQ ID NO: 156741 - DNA, 297 bp, synthetic construct
  misc_feature 1..297: note = Description of Artificial Sequence: Synthetic coding sequence
  source 1..297: mol_type = other DNA
atgggcctcatctacaagtgcctgcctgagaaggtgacagtgaacatcgagacccgctgcctgcccggggtcttccagggcagccagcaccagtgggaccagtgggtgagcccccgctggctgcacctgctgccccccctgagcgccctggccggctgccccaccagcgcccgggccgccaccctgtggggcagccctggccccccccagatgggcccccactgcaggaccctgagcaagggcggggcccagagcctgccccggcaggcccggccccgggcctgtggctcctggtag

SEQ ID NO: 156742 - DNA, 282 bp, synthetic construct
  misc_feature 1..282: note = Description of Artificial Sequence: Synthetic coding sequence
  source 1..282: mol_type = other DNA
atgtggcccctggccctggtgattgccagcctgaccctggccctgtctggaggagaggacttcaaggagcccagccagggccccagagatgtgatggccgccagcaggcctgaggccttccccaagggcctgaccctggagcccaggcctgagaagggcggcatctgtggctgcctggcccctggcaccatcctgggcctgaaggtgggctggctgttcagcagcggggacaccccctggatccacgcccgggccaccccagagtgccacaccctgggctag

SEQ ID NO: 156743 - DNA, 834 bp, synthetic construct; identical to SEQ ID NO: 156739
  misc_feature 1..834: note = Description of Artificial Sequence: Synthetic coding sequence
  source 1..834: mol_type = other DNA

SEQ ID NO: 156744 - DNA, 804 bp, synthetic construct
  misc_feature 1..804: note = Description of Artificial Sequence: Synthetic coding sequence
  source 1..804: mol_type = other DNA
atgagcctgcgggtgctgggcagcggcacctggcccagcgcccccaagatgttcctgctgctgacagccctgcaggtgctggccatcgccatgacccagagccaggaggatgagaacaagatcatcggcggccacacctgcaccaggagcagccagccctggcaggccgccctgctggccggcccccggcggcgcttcctgtgtggcggggccctgctgagcggccagtgggtgatcacagctgcccactgcggccggcccatcctgcaggtggccctgggcaagcacaacctgcggcgctgggaggccacccagcaggtgctgcgggtggtgcggcaggtgacccaccccaactacaacagcaggacccatgacaatgacctgatgctgctgcagctgcagcagcctgccagaattggccgggctgtgcggcccatcgaggtgacccaggcctgtgccagccctggcaccagctgccgggtgtctggctggggcaccatcagcagccccatcgcccgctacccagccagcctgcagtgtgtgaacatcaacatcagcccagatgaggtgtgccagaaggcctaccccaggaccatcaccccaggcatggtgtgtgccggcgtgccccagggcggcaaggacagctgccagggcgacagcggcggccccctggtgtgccggggccagctgcagggcctggtgtcctggggcatggagcgctgtgccctgcccggctacccaggagtgtacaccaacctgtgcaagtaccgctcctggattgaggagaccatgagggacaagtag

SEQ ID NO: 156745 - DNA, 804 bp, synthetic construct; identical to SEQ ID NO: 156744
  misc_feature 1..804: note = Description of Artificial Sequence: Synthetic coding sequence
  source 1..804: mol_type = other DNA

SEQ ID NO: 156746 - DNA, 804 bp, synthetic construct; identical to SEQ ID NO: 156744
  misc_feature 1..804: note = Description of Artificial Sequence: Synthetic coding sequence
  source 1..804: mol_type = other DNA

SEQ ID NO: 156747 - DNA, 486 bp, synthetic construct
  misc_feature 1..486: note = Description of Artificial Sequence: Synthetic coding sequence
  source 1..486: mol_type = other DNA
atgtggctgctgctgaccctgtccttcctgctggccagcacagctgcccaggatggagacaagctgctggagggagatgaatgtgccccccacagccagccctggcaggtggccctgtatgaaagaggccgcttcaactgtggggccagcctcatcagcccccactgggtgctgtctgctgcccactgccagagccgcttcatgagggtgcggctgggggagcacaacctgaggaagagagatggccctgagcagctgcggaccaccagcagggtcatcccccaccccaggtatgaggcccggagccacagaaatgacatcatgctgctgcggctggtgcagcctgcccggctgaacccccaggtgcggcctgctgtgctgcccacccgctgcccccaccctggagaggcctgtgtggtgtctggctggggcctggtgagccacaatgaacctggaacagctggcagccccaggagccagggctag

SEQ ID NO: 156748 - DNA, 771 bp, synthetic construct
  misc_feature 1..771: note = Description of Artificial Sequence: Synthetic coding sequence
  source 1..771: mol_type = other DNA
atgtggctgctgctgaccctgtccttcctgctggccagcacagctgcccaggatggagacaagctgctggagggagatgaatgtgccccccacagccagccctggcaggtggccctgtatgaaagaggccgcttcaactgtggggccagcctcatcagcccccactgggtgctgtctgctgcccactgccagagccgcttcatgagggtgcggctgggggagcacaacctgaggaagagagatggccctgagcagctgcggaccaccagcagggtcatcccccaccccaggtatgaggcccggagccacagaaatgacatcatgctgctgcggctggtgcagcctgcccggctgaacccccaggtgcggcctgctgtgctgcccacccgctgcccccaccctggagaggcctgtgtggtgtctggctggggcctggtgagccacaatgaacctggaacagctggcagccccaggagccaggtgtccctgcctgacaccctgcactgtgccaacatcagcatcatcagtgacaccagctgtgacaagagctacccaggccgcctgaccaacaccatggtgtgtgccggggctgagggccgcggggctgagagctgtgagggggacagcggcggccccctggtgtgtggcggcatcctgcagggcatcgtgtcctggggagatgtgccctgtgacaacaccaccaagccaggagtgtacaccaaggtgtgccactacctggagtggatccgggagaccatgaagagaaattag

SEQ ID NO: 156749 - DNA, 516 bp, synthetic construct
  misc_feature 1..516: note = Description of Artificial Sequence: Synthetic coding sequence
  source 1..516: mol_type = other DNA
atgtggctgctgctgaccctgtccttcctgctggccagcacagctgcccaggatggagacaagctgctggagggagatgaatgtgccccccacagccagccctggcaggtggccctgtatgaaagaggccgcttcaactgtggggccagcctcatcagcccccactgggtgctgtctgctgcccactgccagagccgcttcatgagggtgcggctgggggagcacaacctgaggaagagagatggccctgagcagctgcggaccaccagcagggtcatcccccaccccaggtatgaggcccggagccacagaaatgacatcatgctgctgcggctggtgcagcctgcccggctgaacccccagggcgacagcggcggccccctggtgtgtggcggcatcctgcagggcatcgtgtcctggggagatgtgccctgtgacaacaccaccaagccaggagtgtacaccaaggtgtgccactacctggagtggatccgggagaccatgaagaggaactag

SEQ ID NO: 156750 - DNA, 489 bp, synthetic construct
  misc_feature 1..489: note = Description of Artificial Sequence: Synthetic coding sequence
  source 1..489: mol_type = other DNA
atgtggctgctgctgaccctgtccttcctgctggccagcacagctgcccaggatggagacaagctgctggagggagatgaatgtgccccccacagccagccctggcaggtggccctgtatgaaagaggccgcttcaactgtggggccagcctcatcagcccccactgggtgctgtctgctgcccactgccagagccgcttcatgagggtgcggctgggggagcacaacctgaggaagagagatggccctgagcagctgcggaccaccagcagggtcatcccccaccccaggtatgaggcccggagccacagaaatgacatcatgctgctgcggctggtgcagcctgcccggctgaacccccaggtgcggcctgctgtgctgcccacccgctgcccccaccctggagaggcctgtgtggtgtctggctggggcctggtgagccacaatgaacctggaacagctggcagccccaggagccagggcgcctag

SEQ ID NO: 156751 - DNA, 771 bp, synthetic construct; identical to SEQ ID NO: 156748
  misc_feature 1..771: note = Description of Artificial Sequence: Synthetic coding sequence
  source 1..771: mol_type = other DNA

SEQ ID NO: 156752 - DNA, 786 bp, synthetic construct
  misc_feature 1..786: note = Description of Artificial Sequence: Synthetic coding sequence
  source 1..786: mol_type = other DNA
atgtgggacctggtgctgagcatcgccctgtctgtgggctgcacaggagctgtgcccctcatccagagcagaattgtgggcggctgggagtgtgagaagcacagccagccctggcaggtggccgtgtacagccacggctgggcccactgcggcggcgtgctggtgcacccccagtgggtgctgacagctgcccactgcctgaagaagaacagccaggtgtggctgggccgccacaacctgtttgagcctgaggacaccggccagagggtgcctgtgagccacagcttcccccaccccctgtacaacatgagcctgctgaagcaccagagcctgcggccagatgaggacagcagccatgacctgatgctgctgcggctgtctgagcccgccaagatcacagatgtggtgaaggtgctgggcctgcccacccaggagcccgccctgggcaccacctgctacgccagcggctggggcagcattgagcctgaggagttcctgcggcccaggagcctgcagtgtgtgtccctgcacctgctgagcaatgacatgtgtgcccgggcctacagcgagaaggtgacagagttcatgctgtgtgccggcctgtggacaggaggcaaggacacctgtggcggggacagcggcggccccctggtgtgcaatggagtgctgcagggcatcacctcctggggccctgagccctgtgccctgcctgagaagccagctgtgtacaccaaggtggtgcactacaggaagtggatcaaggacaccatcgccgccaacccctag

SEQ ID NO: 156753 - DNA, 672 bp, synthetic construct
  misc_feature 1..672: note = Description of Artificial Sequence: Synthetic coding sequence
  source 1..672: mol_type = other DNA
atgtgggacctggtgctgagcatcgccctgtctgtgggctgcacaggagctgtgcccctcatccagagcagaattgtgggcggctgggagtgtgagaagcacagccagccctggcaggtggccgtgtacagccacggctgggcccactgcggcggcgtgctggtgcacccccagtgggtgctgacagctgcccactgcctgaagaagaacagccaggtgtggctgggccgccacaacctgtttgagcctgaggacaccggccagagggtgcctgtgagccacagcttcccccaccccctgtacaacatgagcctgctgaagcaccagagcctgcggccagatgaggacagcagccatgacctgatgctgctgcggctgtctgagcccgccaagatcacagatgtggtgaaggtgctgggcctgcccacccaggagcccgccctgggcaccacctgctacgccagcggctggggcagcattgagcctgaggagttcctgcggcccaggagcctgcagtgtgtgtccctgcacctgctgagcaatgacatgtgtgcccgggcctacagcgagaaggtgacagagttcatgctgtgtgccggcctgtggacaggaggcaaggacacctgtggggtgagccacccctacagccagcacctggagggcaagggctag

SEQ ID NO: 156754 - DNA, 480 bp, synthetic construct
  misc_feature 1..480: note = Description of Artificial Sequence: Synthetic coding sequence
  source 1..480: mol_type = other DNA
atgagcctgctgaagcaccagagcctgcggccagatgaggacagcagccatgacctgatgctgctgcggctgtctgagcccgccaagatcacagatgtggtgaaggtgctgggcctgcccacccaggagcccgccctgggcaccacctgctacgccagcggctggggcagcattgagcctgaggagttcctgcggcccaggagcctgcagtgtgtgtccctgcacctgctgagcaatgacatgtgtgcccgggcctacagcgagaaggtgacagagttcatgctgtgtgccggcctgtggacaggaggcaaggacacctgtggcggggacagcggcggccccctggtgtgcaatggagtgctgcagggcatcacctcctggggccctgagccctgtgccctgcctgagaagccagctgtgtacaccaaggtggtgcactacaggaagtggatcaaggacaccatcgccgccaacccctag

SEQ ID NO: 156755 - DNA, 786 bp, synthetic construct
  misc_feature 1..786: note = Description of Artificial Sequence: Synthetic coding sequence
  source 1..786: mol_type = other DNA
atgtgggtgcctgtggtgttcctgaccctgtctgtgacctggattggagctgcccccctcatcctgagcagaattgtgggcggctgggagtgtgagaagcacagccagccctggcaggtgctggtggccagccggggccgggctgtgtgtggcggcgtgctggtgcacccccagtgggtgctgacagctgcccactgcatccggaacaagagcgtcatcctgctgggccgccacagcctcttccaccctgaggacaccggccaggtgttccaggtgagccacagcttcccccaccccctgtatgacatgagcctgctgaagaaccgcttcctgcggcctggagatgacagcagccatgacctgatgctgctgcggctgtctgagcctgctgagctgacagatgctgtgaaggtgatggacctgcccacccaggagcccgccctgggcaccacctgctacgccagcggctggggcagcattgagcctgaggagttcctgacccccaagaagctgcagtgtgtggacctgcacgtgatcagcaatgatgtgtgtgcccaggtgcacccccagaaggtgaccaagttcatgctgtgtgccggccgctggacaggaggcaagagcacctgcagcggggacagcggcggccccctggtgtgcaatggagtgctgcagggcatcacctcctggggcagcgagccctgtgccctgcctgagcggcccagcctgtacaccaaggtggtgcactacaggaagtggatcaaggacaccatcgtggccaacccctag

SEQ ID NO: 156756 - DNA, 663 bp, synthetic construct
  misc_feature 1..663: note = Description of Artificial Sequence: Synthetic coding sequence
  source 1..663: mol_type = other DNA
atgtgggtgcctgtggtgttcctgaccctgtctgtgacctggattggagctgcccccctcatcctgagcagaattgtgggcggctgggagtgtgagaagcacagccagccctggcaggtgctggtggccagccggggccgggctgtgtgtggcggcgtgctggtgcacccccagtgggtgctgacagctgcccactgcatccggaacaagagcgtcatcctgctgggccgccacagcctcttccaccctgaggacaccggccaggtgttccaggtgagccacagcttcccccaccccctgtatgacatgagcctgctgaagaaccgcttcctgcggcctggagatgacagcagcattgagcctgaggagttcctgacccccaagaagctgcagtgtgtggacctgcacgtgatcagcaatgatgtgtgtgcccaggtgcacccccagaaggtgaccaagttcatgctgtgtgccggccgctggacaggaggcaagagcacctgcagcggggacagcggcggccccctggtgtgcaatggagtgctgcagggcatcacctcctggggcagcgagccctgtgccctgcctgagcggcccagcctgtacaccaaggtggtgcactacaggaagtggatcaaggacaccatcgtggccaacccctag

SEQ ID NO: 156757 - DNA, 717 bp, synthetic construct
  misc_feature 1..717: note = Description of Artificial Sequence: Synthetic coding sequence
  source 1..717: mol_type = other DNA
atgtgggtgcctgtggtgttcctgaccctgtctgtgacctggattggagctgcccccctcatcctgagcagaattgtgggcggctgggagtgtgagaagcacagccagccctggcaggtgctggtggccagccggggccgggctgtgtgtggcggcgtgctggtgcacccccagtgggtgctgacagctgcccactgcatccggaacaagagcgtcatcctgctgggccgccacagcctcttccaccctgaggacaccggccaggtgttccaggtgagccacagcttcccccaccccctgtatgacatgagcctgctgaagaaccgcttcctgcggcctggagatgacagcagccatgacctgatgctgctgcggctgtctgagcctgctgagctgacagatgctgtgaaggtgatggacctgcccacccaggagcccgccctgggcaccacctgctacgccagcggctggggcagcattgagcctgaggagttcctgacccccaagaagctgcagtgtgtggacctgcacgtgatcagcaatgatgtgtgtgcccaggtgcacccccagaaggtgaccaagttcatgctgtgtgccggccgctggacaggaggcaagagcacctgctcctgggtgatcctgatcacagagctgaccatgcctgccctgcccatggtgctgcacggcagcctggtgccctggagaggaggagtgtag

SEQ ID NO: 156758 - DNA, 657 bp, synthetic construct
  misc_feature 1..657: note = Description of Artificial Sequence: Synthetic coding sequence
  source 1..657: mol_type = other DNA
atgtgggtgcctgtggtgttcctgaccctgtctgtgacctggattggagctgcccccctcatcctgagcagaattgtgggcggctgggagtgtgagaagcacagccagccctggcaggtgctggtggccagccggggccgggctgtgtgtggcggcgtgctggtgcacccccagtgggtgctgacagctgcccactgcatcaggaagccaggagatgacagcagccatgacctgatgctgctgcggctgtctgagcctgctgagctgacagatgctgtgaaggtgatggacctgcccacccaggagcccgccctgggcaccacctgctacgccagcggctggggcagcattgagcctgaggagttcctgacccccaagaagctgcagtgtgtggacctgcacgtgatcagcaatgatgtgtgtgcccaggtgcacccccagaaggtgaccaagttcatgctgtgtgccggccgctggacaggaggcaagagcacctgcagcggggacagcggcggccccctggtgtgcaatggagtgctgcagggcatcacctcctggggcagcgagccctgtgccctgcctgagcggcccagcctgtacaccaaggtggtgcactacaggaagtggatcaaggacaccatcgtggccaacccctag

SEQ ID NO: 156759 - DNA, 210 bp, synthetic construct
  misc_feature 1..210: note = Description of Artificial Sequence: Synthetic coding sequence
  source 1..210: mol_type = other DNA
atgtgggtgcctgtggtgttcctgaccctgtctgtgacctggattggagctgcccccctcatcctgagcagaattgtgggcggctgggagtgtgagaagcacagccagccctggcaggtgctggtggccagccggggccgggctgtgtgtggcggcgtgctggtgcacccccagtgggtgctgacagctgcccactgcatcaggaagtag

SEQ ID NO: 156760 - DNA, 765 bp, synthetic construct
  misc_feature 1..765: note = Description of Artificial Sequence: Synthetic coding sequence
  source 1..765: mol_type = other DNA
atggccacagctggcaacccctggggctggttcctgggctacctgatcctgggcgtggccggcagcctggtgtctggcagctgcagccagatcatcaatggagaggactgcagcccccacagccagccctggcaggccgccctggtgatggagaatgagctgttctgcagcggcgtgctggtgcacccccagtgggtgctgtctgctgcccactgcttccagaacagctacaccatcggcctgggcctgcacagcctggaggccgaccaggagcccggcagccagatggtggaggccagcctgtctgtgcgccaccctgagtacaaccggcccctgctggccaatgacctgatgctgatcaagctggatgaatctgtgtctgagagtgacaccatccgcagcatcagcatcgccagccagtgccccacagctggcaacagctgcctggtgtctggctggggcctgctggccaacggccgcatgcccaccgtgctgcagtgtgtgaatgtgtctgtggtgtctgaggaggtgtgcagcaagctgtatgaccccctgtaccaccccagcatgttctgtgccggcggcggccatgaccagaaggacagctgcaatggagacagcggcggccccctcatctgcaatggctacctgcagggcctggtgtcctttgggaaggccccctgtggccaggtgggcgtgcctggggtgtacaccaacctgtgcaagttcacagagtggattgagaagacagtgcaggccagctag

SEQ ID NO: 156761 - DNA, 333 bp, synthetic construct
  misc_feature 1..333: note = Description of Artificial Sequence: Synthetic coding sequence
  source 1..333: mol_type = other DNA
atggagaatgaactcttctgcagcggcgtgctggtgcacccccagtgggtgctgtctgctgcccactgcttccagaacagctacaccatcggcctgggcctgcacagcctggaggccgaccaggagcccggcagccagatggtggaggccagcctgtctgtgcgccaccctgagtacaaccggcccctgctggccaatgacctgatgctgatcaagctggatgagagcgtgtctgagagtgacaccatccgcagcatcagcatcgccagccagtgccccacagctggcaacagctgcctggtgtctggctggggcctgctggccaatggatag

SEQ ID NO: 156762 - DNA, 735 bp, synthetic construct
  misc_feature 1..735: note = Description of Artificial Sequence: Synthetic coding sequence
  source 1..735: mol_type = other DNA
atgaagaagctgatggtggtgctgagcctgattgctgctgcctgggccgaggagcagaacaagctggtgcacggcggcccctgtgacaagaccagccacccctaccaggccgccctgtacaccagcggccacctgctgtgtggcggcgtgctgatccaccccctgtgggtgctgacagctgcccactgcaagaagcccaacctgcaggtgttcctgggcaagcacaacctgcggcagcgggagagcagccaggagcagagctctgtggtgcgggccgtcatccacccagactatgatgctgccagccatgaccaggacatcatgctgctgcggctggcccggcctgccaagctgtctgagctgatccagcccctgcccctggagcgggactgcagcgccaacaccaccagctgccacatcctgggctggggcaagacagcagatggagacttcccagacaccatccagtgtgcctacatccacctggtgtcccgggaggagtgtgagcacgcctacccaggccagatcacccagaacatgctgtgtgctggagatgagaagtatggcaaggacagctgccagggcgacagcggcggccccctggtgtgtggggaccacctgcggggcctggtgtcctggggcaacatcccctgtggcagcaaggagaagccaggagtgtacaccaacgtgtgccgctacaccaactggatccagaagaccatccaggccaagtag

SEQ ID NO: 156763 - DNA, 735 bp, synthetic construct; identical to SEQ ID NO: 156762
  misc_feature 1..735: note = Description of Artificial Sequence: Synthetic coding sequence
  source 1..735: mol_type = other DNA

SEQ ID NO: 156764 - DNA, 363 bp, synthetic construct
  misc_feature 1..363: note = Description of Artificial Sequence: Synthetic coding sequence
  source 1..363: mol_type = other DNA
atgaagaagctgatggtggtgctgagcctgattgctgctgcctgggccgaggagcagaacaagctggtgcacggcggcccctgtgacaagaccagccacccctaccaggccgccctgtacaccagcggccacctgctgtgtggcggcgtgctgatccaccccctgtgggtgctgacagctgcccactgcaagaagcctgtgatcctgggcgtgcgctggtacgtggagaccaccagcgaggccctgtgccacggcgtgaccagccctgtggaccagaggaggagccaggagagcacccccaccagcgctgacaccaggacaggcagcaagaagcccttccggcccagcgaccctgacatgtag

SEQ ID NO: 156765 - DNA, 414 bp, synthetic construct
  misc_feature 1..414: note = Description of Artificial Sequence: Synthetic coding sequence
  source 1..414: mol_type = other DNA
atgctgctgcggctggcccggcctgccaagctgtctgagctgatccagcccctgcccctggagcgggactgcagcgccaacaccaccagctgccacatcctgggctggggcaagacagcagatggagacttcccagacaccatccagtgtgcctacatccacctggtgtcccgggaggagtgtgaacatgcctacccaggccagatcacccagaacatgctgtgtgctggagatgagaagtatggcaaggacagctgccagggcgacagcggcggccccctggtgtgtggggaccacctgcggggcctggtgtcctggggcaacatcccctgtggcagcaaggagaagccaggagtgtacaccaacgtgtgccgctacaccaactggatccagaagaccatccaggccaagtag

SEQ ID NO: 156766 - DNA, 123 bp, synthetic construct
  misc_feature 1..123: note = Description of Artificial Sequence: Synthetic coding sequence
  source 1..123: mol_type = other DNA
atgaagaagctgatggtggtgctgagcctgattgctgctggcatcttccgcagctcctggggcagcatcaccttcggcaagggccgggtgcccaggagccgggtgctgctgagcggcctgtag

SEQ ID NO: 156767 - DNA, 414 bp, synthetic construct; identical to SEQ ID NO: 156765
  misc_feature 1..414: note = Description of Artificial Sequence: Synthetic coding sequence
  source 1..414: mol_type = other DNA

SEQ ID NO: 156768 - DNA, 783 bp, synthetic construct
  misc_feature 1..783: note = Description of Artificial Sequence: Synthetic coding sequence
  source 1..783: mol_type = other DNA
atgggccggccccggccccgggccgccaagacctggatgttcctgctgctgctgggcggggcctgggccggccacagccgggcccaggaggacaaggtgctgggcggccacgagtgccagccccacagccagccctggcaggccgccctcttccagggccagcagctgctgtgtggcggcgtgctggtgggcggcaactgggtgctgacagctgcccactgcaagaagcccaagtacacagtgcggctgggggaccacagcctgcagaacaaggatggccctgagcaggagatccctgtggtgcagagcatcccccacccctgctacaacagcagtgatgtggaggaccacaaccacgacctgatgctgctgcagctgcgggaccaggccagcctgggcagcaaggtgaagcccatcagcctggccgaccactgcacccagcccggccagaagtgcaccgtgtctggctggggcaccgtgaccagcccccgggagaacttcccagacaccctgaactgtgccgaggtgaagatcttcccccagaagaagtgtgaagatgcctacccaggccagatcacagatggcatggtgtgtgccggcagcagcaaaggagctgacacctgccagggcgacagcggcggccccctggtgtgtgatggagccctgcagggcatcacctcctggggcagtgacccctgtggccgcagtgacaagccaggagtgtacaccaacatctgccgctacctggactggatcaagaagatcatcggcagcaaaggatag

SEQ ID NO: 156769 - DNA, 99 bp, synthetic construct
  misc_feature 1..99: note = Description of Artificial Sequence: Synthetic coding sequence
  source 1..99: mol_type = other DNA
atgggccggccccggccccgggccgccaagacctggatgttcctgctgctgctgggcggggcctgggccggccgcttctggaggcctcctggggtgtag

SEQ ID NO: 156770 - DNA, 360 bp, synthetic construct
  misc_feature 1..360: note = Description of Artificial Sequence: Synthetic coding sequence
  source 1..360: mol_type = other DNA
atgggccggccccggccccgggccgccaagacctggatgttcctgctgctgctgggcggggcctgggccgagaacttcccagacaccctgaactgtgccgaggtgaagatcttcccccagaagaagtgtgaagatgcctacccaggccagatcacagatggcatggtgtgtgccggcagcagcaaaggagctgacacctgccagggcgacagcggcggccccctggtgtgtgatggagccctgcagggcatcacctcctggggcagtgacccctgtggccgcagtgacaagccaggagtgtacaccaacatctgccgctacctggactggatcaagaagatcatcggcagcaagggctag

SEQ ID NO: 156771 - DNA, 918 bp, synthetic construct
  misc_feature 1..918: note = Description of Artificial Sequence: Synthetic coding sequence
  source 1..918: mol_type = other DNA
atgggccggccccggccccgggccgccaagacctggatgttcctgctgctgctgggcggggcctgggccgcctgtggcagcctggacctgctgaccaagctgtatgcagagaacctgccctgtgtgcacctgaacccccagtggcccagccagcccagccactgcccccggggctggaggagcaaccccctgcccccagctgctggccacagccgggcccaggaggacaaggtgctgggcggccacgagtgccagccccacagccagccctggcaggccgccctcttccagggccagcagctgctgtgtggcggcgtgctggtgggcggcaactgggtgctgacagctgcccactgcaagaagcccaagtacacagtgcggctgggggaccacagcctgcagaacaaggatggccctgagcaggagatccctgtggtgcagagcatcccccacccctgctacaacagcagtgatgtggaggaccacaaccacgacctgatgctgctgcagctgcgggaccaggccagcctgggcagcaaggtgaagcccatcagcctggccgaccactgcacccagcccggccagaagtgcaccgtgtctggctggggcaccgtgaccagcccccgggagaacttcccagacaccctgaactgtgccgaggtgaagatcttcccccagaagaagtgtgaagatgcctacccaggccagatcacagatggcatggtgtgtgccggcagcagcaaaggagctgacacctgccagggcgacagcggcggccccctggtgtgtgatggagccctgcagggcatcacctcctggggcagtgacccctgtggccgcagtgacaagccaggagtgtacaccaacatctgccgctacctggactggatcaagaagatcatcggcagcaagggctag

SEQ ID NO: 156772 - DNA, 783 bp, synthetic construct; identical to SEQ ID NO: 156768
  misc_feature 1..783: note = Description of Artificial Sequence: Synthetic coding sequence
  source 1..783: mol_type = other DNA

SEQ ID NO: 156773 - DNA, 753 bp, synthetic construct
  misc_feature 1..753: note = Description of Artificial Sequence: Synthetic coding sequence
  source 1..753: mol_type = other DNA
atgaagctgggcctgctgtgtgccctgctgagcctgctggccggccacggctgggccgacacccgggccatcggggctgaggagtgccggcccaacagccagccctggcaggccggcctcttccacctgaccaggctcttctgtggggccaccctcatcagtgaccgctggctgctgacagctgcccactgcaggaagccctacctgtgggtgcggctgggggagcaccacctgtggaagtgggagggccctgagcagctgttccgggtgacagacttcttcccccaccctggcttcaacaaggacctgagcgccaatgaccacaatgatgacatcatgctgatccggctgccccggcaggcccggctgagccctgctgtgcagcccctgaacctgagccagacctgtgtgtccccaggcatgcagtgcctgatcagcggctggggcgctgtgagcagccccaaggccctcttccctgtgaccctgcagtgtgccaacatcagcatcctggagaacaagctgtgccactgggcctacccaggccacatcagtgacagcatgctgtgtgccggcctgtgggagggcggccggggcagctgccagggcgacagcggcggccccctggtgtgcaatggcaccctggccggcgtggtgtctggaggagctgagccctgcagccggcccaggaggcctgctgtgtacacctctgtgtgccactacctggactggatccaggagatcatggagaactag

SEQ ID NO: 156774 - DNA, 753 bp, synthetic construct; identical to SEQ ID NO: 156773
  misc_feature 1..753: note = Description of Artificial Sequence: Synthetic coding sequence
  source 1..753: mol_type = other DNA

SEQ ID NO: 156775 - DNA, 186 bp, synthetic construct
  misc_feature 1..186: note = Description of Artificial Sequence: Synthetic coding sequence
  source 1..186: mol_type = other DNA
atgaagctgggcctgctgtgtgccctgctgagcctgctggccggcatctgtggcagcgccctggagagcaccaccagcggaaatggccgggtgcgcagcagctgcagcggcctgcggaccagcagccccaccctggccagcaccaggaccagcgcccccatgaccaccatgatgaccagctgctag

SEQ ID NO: 156776 - DNA, 2043 bp, synthetic construct
  misc_feature 1..2043: note = Description of Artificial Sequence: Synthetic coding sequence
  source 1..2043: mol_type = other DNA
atggtgcctggggtgcctggagctgtgctgaccctgtgcctgtggctggccgccagcagcggctgcctggccgccggccctggagctgctgctgcccggcggctggatgagagcctgtctgctggctctgtgcagagggcccgctgtgccagccgctgcctgagcctgcagatcacccgcatcagcgccttcttccagcacttccagaacaacggcagcctggtgtggtgccagaaccacaagcagtgcagcaagtgcctggagccctgcaaggagagcggggacctgaggaagcaccagtgccagagcttctgtgagcccctcttccccaagaagagctatgaatgtctgaccagctgtgagttcctgaagtacatcctgctggtgaagcagggcgactgcccagcccctgagaaggccagcggctttgctgctgcctgtgtggagagctgtgaggtggacaatgaatgttctggagtgaagaagtgctgcagcaatggctgcggccacacctgccaggtgcccaagaccctgtacaagggcgtgcccctgaagcccaggaaggagctgcgcttcacagagctgcagagcggccagctggaggtgaagtggagcagcaagttcaacatcagcattgagcccgtcatctacgtggtgcagaggcgctggaactacggcatccaccccagtgaagatgatgccacccactggcagacagtggcccagaccacagatgagcgggtgcagctgacagacatccggcccagccgctggtaccagttccgggtggccgctgtgaatgtgcacggcacccggggcttcaccgcccccagcaagcacttccgcagcagcaaggaccccagcgcccccccagccccagccaacctgcggctggccaacagcacagtgaacagtgatggctctgtgacagtgaccatcgtgtgggacctgcctgaggagccagacatccctgtgcaccactacaaggtgttctggagctggatggtgagcagcaagagcctggtgcccaccaagaagaagaggaggaagaccacagatggcttccagaacagcgtcatcctggagaagctgcagcctgactgtgactatgtggtggagctgcaggccatcacctactggggccagacccggctgaagagcgccaaggtgtccctgcacttcaccagcacccacgccaccaacaacaaggagcagctggtgaagaccaggaaaggaggcatccagacccagctgcccttccagaggagaagacccacccggcccctggaggtgggcgcccccttctaccaggacggccagctgcaggtgaaggtgtactggaagaagacagaggaccccaccgtgaaccgctaccacgtgcgctggttccctgaggcctgtgcccacaacagaaccactggaagtgaggccagcagcggcatgacccatgagaactacatcatcctgcaggacctgtccttcagctgcaagtacaaggtgacagtgcagcccatccggcccaagagccacagcaaggccgaggccgtgttcttcaccaccccaccctgcagcgccctgaagggcaagagccacaagcctgtgggctgcctgggggaggccggccacgtgctgagcaaggtgctggccaagccagagaacctgagcgccagcttcatcgtgcaggatgtgaacatcaccggccacttctcctggaagatggccaaggccaacctgtaccagcccatgacaggcttccaggtgacctgggccgaggtgaccacagagagccggcagaacagcctgcccaacagcatcatcagccagagccagatcctgcccagcgaccactacgtgctgactgtgcccaacctgcggcccagcaccctgtaccgcctggaggtgcaggtgctgaccccaggaggagagggccctgccaccatcaagaccttccgcaccccagagctgccccccagcagcgcccacaggagccacctgaagcaccgccacccccaccactacaagcccagccctgagcgctactag

SEQ ID NO: 156777 - DNA, 2631 bp, synthetic construct
  misc_feature 1..2631: note = Description of Artificial Sequence: Synthetic coding sequence
  source 1..2631: mol_type = other DNA
atggagctgatcaccatcctggagaagacagtgtccccagaccggctggagctggaggccgcccagaagttcctggagagagctgctgtggagaacctgcccaccttcctggtggagctgagccgggtgctggccaaccctggcaacagccaggtggcccgggtggccgccggcctgcagatcaagaacagcctgaccagcaaggaccctgacatcaaggcccagtaccagcagcgctggctggccattgatgccaatgcccggcgggaggtgaagaactacgtgctgcagaccctgggcacagagacctaccggcccagcagcgccagccagtgtgtggccggcatcgcctgtgccgagatccctgtgaaccagtggccagagctgatcccccagctggtggccaacgtgaccaaccccaacagcacagagcacatgaaggagagcaccctggaggccatcggctacatctgccaggacattgatcctgagcagctgcaggacaagagcaatgagatcctgacagccatcatccagggcatgaggaaggaggagcccagcaacaacgtgaagctggccgccaccaatgccctgctgaacagcctggagttcaccaaggccaactttgacaaggagagcgagcggcacttcatcatgcaggtggtgtgtgaggccacccagtgcccagacaccagggtgcgggtggccgccctgcagaacctggtgaagatcatgagcctgtactaccagtacatggagacctacatgggccctgccctgtttgccatcaccatcgaggccatgaagagtgacattgatgaggtggccctgcagggcatcgagttctggagcaatgtgtgtgatgaggagatggacctggccatcgaggccagcgaggccgctgagcagggccggcccccagagcacaccagcaagttctacgccaagggggccctgcagtacctggtgcccatcctgacccagaccctgaccaagcaggatgaaaatgatgatgatgatgactggaacccctgcaaggccgccggcgtgtgcctgatgctgctggccacctgctgtgaagatgacatcgtgccccacgtgctgcccttcatcaaggagcacatcaagaacccagactggagatacagagatgctgctgtgatggccttcggctgcatcctggagggccctgagcccagccagctgaagcccctggtgatccaggccatgcccaccctcatcgagctgatgaaggaccccagcgtggtggtgcgggacacagctgcctggacagtgggccgcatctgtgagctgctgcctgaggccgccatcaatgatgtgtacctggcccccctgctgcagtgcctgattgagggcctgtctgctgagccccgggtggccagcaatgtgtgctgggccttcagcagcctggccgaggccgcctatgaggccgcagatgtggctgatgaccaggaggagcccgccacctactgcctgagcagcagctttgagctgattgtgcagaagctgctggagaccacagacagaccagatggccaccagaacaacctgcggagcagcgcctatgagagcctgatggagatcgtgaagaacagcgccaaggactgctacccagctgtgcagaagaccaccctggtgatcatggagcggctgcagcaggtgctgcagatggagagccacatccagagcaccagtgaccgcatccagttcaatgacctgcagagcctgctgtgtgccaccctgcagaatgtgctgaggaaggtgcagcaccaggatgccctgcagatcagtgatgtggtgatggccagcctgctgaggatgttccagagcacagctggcagcggaggagtgcaggaggatgccctgatggctgtgtccaccctggtggaggtgctgggcggggagttcctgaagtacatggaggccttcaagcccttcctgggcatcggcctgaagaactatgcagagtaccaggtgtgcctggccgctgtgggcctggtgggggacctgtgccgggccctgcagagcaacatcatccccttctgtgatgaggtgatgcagctgctgctggagaacctgggcaatgaaaatgtgcacaggtctgtgaagccccagatcctgtctgtgtttggagacatcgccctggccatcggcggggagttcaagaagtacctggaggtggtgctgaacaccctgcagcaggccagccaggcccaggtggacaagagtgactatgacatggtggactacctgaatgagctgcgggagagctgcctggaggcctacacaggcatcgtgcagggcctgaagggggaccaggagaatgtgcacccagatgtgatgctggtgcagccccgggtggagttcatcctgtccttcatcgaccacatcgctggagatgaggaccacacagatggagtggtggcctgtgccgccggcctcatcggggacctgtgcacagccttcggcaaggatgtgctgaagctggtggaggcccggcccatgatccacgagctgctgacagagggcagaagaagcaagaccaacaaggccaagaccctggccacctgggccaccaaggagctgaggaagctgaagaaccaggcctag

SEQ ID NO: 156778 - DNA, 2196 bp, synthetic construct
  misc_feature 1..2196: note = Description of Artificial Sequence: Synthetic coding sequence
  source 1..2196: mol_type = other DNA
atgaaggagagcaccctggaggccatcggctacatctgccaggacatcgaccctgagcagctgcaggacaagagcaatgagatcctgacagccatcatccagggcatgaggaaggaggagcccagcaacaacgtgaagctggccgccaccaatgccctgctgaacagcctggagttcaccaaggccaactttgacaaggagagcgagcggcacttcatcatgcaggtggtgtgtgaggccacccagtgcccagacaccagggtgcgggtggccgccctgcagaacctggtgaagatcatgagcctgtactaccagtacatggagacctacatgggccctgccctgtttgccatcaccatcgaggccatgaagagtgacattgatgaggtggccctgcagggcatcgagttctggagcaatgtgtgtgatgaggagatggacctggccatcgaggccagcgaggccgctgagcagggccggcccccagagcacaccagcaagttctacgccaagggggccctgcagtacctggtgcccatcctgacccagaccctgaccaagcaggatgaaaatgatgatgatgatgactggaacccctgcaaggctgctggggtgtgcctgatgctgctggccacctgctgtgaagatgacatcgtgccccacgtgctgcccttcatcaaggagcacatcaagaacccagactggagatacagagatgctgctgtgatggccttcggctgcatcctggagggccctgagcccagccagctgaagcccctggtgatccaggccatgcccaccctgattgagctgatgaaggaccccagcgtggtggtgcgggacacagctgcctggacagtgggccgcatctgtgagctgctgcctgaggccgccatcaatgatgtgtacctggcccccctgctgcagtgcctgattgagggcctgtctgctgagccccgggtggccagcaatgtgtgctgggccttcagcagcctggccgaggccgcctatgaagctgctgatgtggctgatgaccaggaggagcccgccacctactgcctgagcagcagctttgagctgattgtgcagaagctgctggagaccacagacagaccagatggccaccagaacaacctgcggagcagcgcctatgagagcctgatggagatcgtgaagaacagcgccaaggactgctacccagctgtgcagaagaccaccctggtgatcatggagcggctgcagcaggtgctgcagatggagagccacatccagagcaccagtgaccgcatccagttcaatgacctgcagagcctgctgtgtgccaccctgcagaatgtgctgaggaaggtgcagcaccaggatgccctgcagatcagtgatgtggtgatggccagcctgctgaggatgttccagagcacagctggcagcggcggcgtgcaggaggatgccctgatggctgtgtccaccctggtggaggtgctgggcggggagttcctgaagtacatggaggccttcaagcccttcctgggcatcggcctgaagaactatgcagagtaccaggtgtgcctggccgctgtgggcctggtgggggacctgtgccgggccctgcagagcaacatcatccccttctgtgatgaggtgatgcagctgctgctggagaacctgggcaatgaaaatgtgcacaggtctgtgaagccccagatcctgtctgtgtttggagacatcgccctggccatcggcggggagttcaagaagtacctggaggtggtgctgaacaccctgcagcaggccagccaggcccaggtggacaagagtgactatgacatggtggactacctgaatgagctgcgggagagctgcctggaggcctacacaggaattgtgcagggcctgaagggggaccaggagaatgtgcacccagatgtgatgctggtgcagccccgggtggagttcatcctgtccttcatcgaccacatcgctggagatgaggaccacacagatggagtggtggcctgtgccgccggcctgattggagacctgtgcacagccttcggcaaggatgtgctgaagctggtggaggcccggcccatgattcatgagctgctgacagagggccgccgcagcaagaccaacaaggccaagaccctggccacctgggccaccaaggagctgaggaagctgaagaaccaggcctag

SEQ ID NO: 156779 - DNA, 1983 bp, synthetic construct
  misc_feature 1..1983: note = Description of Artificial Sequence: Synthetic coding sequence
  source 1..1983: mol_type = other DNA
atgaaggagagcaccctggaggccatcggctacatctgccaggacatcgaccctgagcagctgcaggacaagagcaatgagatcctgacagccatcatccagggcatgaggaaggaggagcccagcaacaacgtgaagctggccgccaccaatgccctgctgaacagcctggagttcaccaaggccaactttgacaaggagagcgagcggcacttcatcatgcaggtggtgtgtgaggccacccagtgcccagacaccagggtgcgggtggccgccctgcagaacctggtgaagatcatgagcctgtactaccagtacatggagacctacatgggccctgccctgtttgctgatgaaaatgatgatgatgatgactggaacccctgcaaggccgccggcgtgtgcctgatgctgctggccacctgctgtgaagatgacatcgtgccccacgtgctgcccttcatcaaggagcacatcaagaacccagactggagatacagagatgctgctgtgatggccttcggctgcatcctggagggccctgagcccagccagctgaagcccctggtgatccaggccatgcccaccctcatcgagctgatgaaggaccccagcgtggtggtgcgggacacagctgcctggacagtgggccgcatctgtgagctgctgcctgaggccgccatcaatgatgtgtacctggcccccctgctgcagtgcctgattgagggcctgtctgctgagccccgggtggccagcaatgtgtgctgggccttcagcagcctggccgaggccgcctatgaggccgcagatgtggctgatgaccaggaggagcccgccacctactgcctgagcagcagctttgagctgattgtgcagaagctgctggagaccacagacagaccagatggccaccagaacaacctgcggagcagcgcctatgagagcctgatggagatcgtgaagaacagcgccaaggactgctacccagctgtgcagaagaccaccctggtgatcatggagcggctgcagcaggtgctgcagatggagagccacatccagagcaccagtgaccgcatccagttcaatgacctgcagagcctgctgtgtgccaccctgcagaatgtgctgaggaaggtgcagcaccaggatgccctgcagatcagtgatgtggtgatggccagcctgctgaggatgttccagagcacagctggcagcggaggagtgcaggaggatgccctgatggctgtgtccaccctggtggaggtgctgggcggggagttcctgaagtacatggaggccttcaagcccttcctgggcatcggcctgaagaactatgcagagtaccaggtgtgcctggccgctgtgggcctggtgggggacctgtgccgggccctgcagagcaacatcatccccttctgtgatgaggtgatgcagctgctgctggagaacctgggcaatgaaaatgtgcacaggtctgtgaagccccagatcctgtctgtgtttggagacatcgccctggccatcggcggggagttcaagaagtacctggaggtggtgctgaacaccctgcagcaggccagccaggcccaggtggacaagagtgactatgacatggtggactacctgaatgagctgcgggagagctgcctggaggcctacacaggcatcgtgcagggcctgaagggggaccaggagaatgtgcacccagatgtgatgctggtgcagccccgggtggagttcatcctgtccttcatcgaccacatcgctggagatgaggaccacacagatggagtggtggcctgtgccgccggcctcatcggggacctgtgcacagccttcggcaaggatgtgctgaagctggtggaggcccggcccatgatccacgagctgctgacagagggcagaagaagcaagaccaacaaggccaagaccctggccacctgggccaccaaggagctgaggaagctgaagaaccaggcctag

SEQ ID NO: 156780 - DNA, 2196 bp, synthetic construct; identical to SEQ ID NO: 156778
  misc_feature 1..2196: note = Description of Artificial Sequence: Synthetic coding sequence
  source 1..2196: mol_type = other DNA

SEQ ID NO: 156781 - DNA, 1617 bp, synthetic construct
  misc_feature 1..1617: note = Description of Artificial Sequence: Synthetic coding sequence
  source 1..1617: mol_type = other DNA
atgaccacccctgggaaggagaacttccggctgaagagctacaagaacaagagcctgaacccagatgagatgagaagaagaagagaggaggagggcctgcagctgaggaagcagaagcgggaggagcagctgttcaagagaagaaatgtggccacagctgaggaggagacagaggaggaggtgatgtctgatggcggcttccacgaggcccagatcagcaacatggagatggcccctggaggagtcatcaccagtgacatgattgagatgatcttcagcaagagccctgagcagcagctgagcgccacccagaagttcaggaagctgctgagcaaggagcccaacccccccattgatgaagtcatcagcaccccaggagtggtggccaggtttgtggagttcctgaagaggaaagaaaactgcaccctgcagtttgaaagtgcctgggtgctgaccaacatcgccagcggcaacagcctgcagacccgcatcgtcatccaggccggggctgtgcccatcttcatcgagctgctgagcagcgagtttgaagatgtgcaggagcaggccgtgtgggccctgggcaacattgctggggacagcaccatgtgccgggactatgtgctggactgcaacatcctgccccccctgctgcagctgttcagcaagcagaaccggctgaccatgaccagaaatgctgtgtgggccctgagcaacctgtgccggggcaagagccccccacctgagtttgccaaggtgagcccctgcctgaatgtgctgtcctggctgctgtttgtgtctgacacagatgtgctggctgatgcctgctgggccctgagctacctgagtgatggccccaatgacaagatccaggccgtgattgatgctggggtgtgccggcggctggtggagctgctgatgcacaatgactacaaggtggtgtccccagccctgcgggctgtgggcaacatcgtgactggagatgacatccagacccaggtgatcctgaactgcagcgccctgcagagcctgctgcacctgctgagcagccccaaggagagcatcaagaaggaggcctgctggaccatcagcaacatcacagctggcaacagagcccagatccagacagtgattgatgccaacatcttccctgccctgatcagcatcctgcagacagctgagttccgcaccaggaaggaggccgcctgggccatcaccaatgccaccagcggcggcagcgctgagcagatcaagtacctggtggagctgggctgcatcaagcccctgtgtgacctgctgactgtgatggacagcaagatcgtgcaggtggccctgaatggcctggagaacatcctgcggctgggggagcaggaggccaagagaaatggaacaggcatcaacccctactgtgccctgattgaggaggcctacggcctggacaagattgagttcctgcagagccatgagaaccaggagatctaccagaaggcctttgacctgattgagcactacttcggcacagaagatgaggacagcagcatcgccccccaggtggacctgaaccagcagcagtacatcttccagcagtgtgaggcccccatggagggcttccagctgtag

SEQ ID NO: 156782 - DNA, 987 bp, synthetic construct
  misc_feature 1..987: note = Description of Artificial Sequence: Synthetic coding sequence
  source 1..987: mol_type = other DNA
atgaccacccctgggaaggagaacttccggctgaagagctacaagaacaagagcctgaacccagatgagatgagaagaagaagagaggaggagggcctgcagctgaggaagcagaagcgggaggagcagctgttcaagagaagaaatgtggccacagctgaggaggagacagaggaggaggtgatgtctgatggcggcttccacgaggcccagatcagcaacatggagatggcccctggaggagtcatcaccagtgacatgattgagatgatcttcagcaagagccctgagcagcagctgagcgccacccagaagttcaggaagctgctgagcaaggagcccaacccccccattgatgaagtcatcagcaccccaggagtggtggccaggtttgtggagttcctgaagaggaaagaaaactgcaccctgcagtttgaaagtgcctgggtgctgaccaacatcgccagcggcaacagcctgcagacccgcatcgtcatccaggccggggctgtgcccatcttcatcgagctgctgagcagcgagtttgaagatgtgcaggagcaggccgtgtgggccctgggcaacattgctggggacagcaccatgtgccgggactatgtgctggactgcaacatcctgccccccctgctgcagctgttcagcaagcagaaccggctgaccatgaccagaaatgctgtgtgggccctgagcaacctgtgccggggcaagagccccccacctgagtttgccaaggtgagcccctgcctgaatgtgctgtcctggctgctgtttgtgtctgacacagatgtgctggctgatgcctgctgggccctgagctacctgagtgatggccccaatgacaagatccaggccgtgattgatgctggggtgtgccggcggctggtggagctgctgatgcacaatgactacaaggtggtgtccccagccctgcgggctgtgggcaacatcgtgactggagatgactag

SEQ ID NO: 156783 - DNA, 648 bp, synthetic construct
  misc_feature 1..648: note = Description of Artificial Sequence: Synthetic coding sequence
  source 1..648: mol_type = other DNA
atgaccacccctgggaaggagaacttccggctgaagagctacaagaacaagagcctgaacccagatgagatgagaagaagaagagaggaggagggcctgcagctgaggaagcagaagcgggaggagcagctgttcaagagaagaaatgtggccacagctgaggaggagacagaggaggaggtgatgtctgatggcggcttccacgaggcccagatcagcaacatggagatggcccctggaggagtcatcaccagtgacatgattgagatgatcttcagcaagagccctgagcagcagctgagcgccacccagaagttcaggaagctgctgagcaaggagcccaacccccccattgatgaagtcatcagcaccccaggagtggtggccaggtttgtggagttcctgaagaggaaagaaaactgcaccctgcagtttgaaagtgcctgggtgctgaccaacatcgccagcggcaacagcctgcagacccgcatcgtcatccaggccggggctgtgcccatcttcatcgagctgctgagcagcgagtttgaagatgtgcaggagcaggccgtgtgggccctgggcaacattgctggggacagcaccatgtgccgggactatgtgctggactgcaacatcctgcccccatag

SEQ ID NO: 156784 - DNA, 525 bp, synthetic construct
  misc_feature 1..525: note = Description of Artificial Sequence: Synthetic coding sequence
  source 1..525: mol_type = other DNA
atgaccacccctgggaaggagaacttccggctgaagagctacaagaacaagagcctgaacccagatgagatgagaagaagaagagaggaggagggcctgcagctgaggaagcagaagcgggaggagcagctgttcaagagaagaaatgtggccacagctgaggaggagacagaggaggaggtgatgtctgatggcggcttccacgaggcccagatcagcaacatggagatggcccctggaggagtcatcaccagtgacatgattgagatgatcttcagcaagagccctgagcagcagctgagcgccacccagaagttcaggaagctgctgagcaaggagcccaacccccccattgatgaagtcatcagcaccccaggagtggtggccaggtttgtggagttcctgaagaggaaagaaaactgcaccctgcagtttgaaagtgcctgggtgctgaccaacatcgccagcggcaacagcctgcagacccgcatcgtcatccaggccggggctgtgcccatcttctag

SEQ ID NO: 156785 - DNA, 1566 bp, synthetic construct
  misc_feature 1..1566: note = Description of Artificial Sequence: Synthetic coding sequence
  source 1..1566: mol_type = other DNA
atggccgagaaccccagcctggagaaccaccgcatcaagagcttcaagaacaagggcagagatgtggagaccatgaggaggcacagaaatgaggtgacagtggagctgaggaagaacaagagagatgagcacctgctgaagaagagaaatgtgccccaggaggagagcctggaggacagtgatgtggatgctgacttcaaggcccagaatgtgaccctggaggccatcctgcagaatgccaccagtgacaaccctgtggtgcagctgtctgctgtgcaggccgccaggaagctgctgagcagtgacagaaatccacccattgatgacctgatcaagagcggcatcctgcccatcctggtgaagtgcctggagagagatgacaaccccagcctgcagtttgaagctgcctgggccctgaccaacatcgccagcggcaccagcgcccagacccaggccgtggtgcagagcaatgctgtgcccctcttcctgcggctgctgcggagcccccaccagaatgtgtgtgagcaggccgtgtgggccctgggcaacatcattggagatggcccccagtgccgggactatgtgatcagcctgggcgtggtgaagcccctgctgtccttcatcagccccagcatccccatcaccttcctgagaaatgtgacctgggtgattgtgaacctgtgcaggaacaaggaccccccaccacccatggagaccgtgcaggagatcctgcctgccctgtgtgtgctgatctaccacacagacatcaacatcctggtggacacagtgtgggccctgagctacctgacagatggcggcaatgagcagatccagatggtgattgattctggagtggtgcccttcctggtgcccctgctgagccaccaggaggtgaaggtgcagacagctgccctgcgggctgtgggcaacatcgtgactggaacagatgagcagacccaggtggtgctgaactgtgatgtgctgagccacttccccaacctgctgagccaccccaaggagaagatcaacaaggaggccgtgtggttcctgagcaacatcacagctggcaaccagcagcaggtgcaggccgtgattgatgctggcctcatccccatgatcatccaccagctggccaagggggactttggcacccagaaggaggccgcctgggccatcagcaacctgaccatcagcggcaggaaggaccaggtggagtacctggtgcagcagaatgtcatcccccccttctgcaacctgctgtctgtgaaggacagccaggtggtgcaggtggtgctggatggcctgaagaacatcctgatcatggctggagatgaggccagcaccatcgccgagatcattgaagaatgtggcggcctggagaagattgaggtgctgcagcagcatgaaaatgaagacatctacaagctggcctttgagatcatcgaccagtacttctctggagatgacattgatgaggacccctgcctgatccctgaggccacccagggcggcacctacaactttgaccccacagccaacctgcagaccaaggagttcaacttctag

SEQ ID NO: 156786 - DNA, 1566 bp, synthetic construct
  misc_feature 1..1566: note = Description of Artificial Sequence: Synthetic coding sequence
  source 1..1566: mol_type = other DNA
atggctgacaatgagaagctggacaaccagaggctgaagaacttcaagaacaagggccgggacctggagaccatgaggcggcagagaaatgaggtggtggtggagctgaggaagaacaagagagatgagcacctgctgaagagaagaaatgtgccccatgaggacatctgtgaggacagcgacattgatggagactacagagtgcagaacaccagcctggaggccatcgtgcagaatgccagcagtgacaaccagggcatccagctgtctgctgtgcaggccgccaggaagctgctgagcagtgacagaaatccacccattgatgacctgatcaagagcggcatcctgcccatcctggtgcactgcctggagagagatgacaaccccagcctgcagtttgaagctgcctgggccctgaccaacatcgccagcggcaccagcgagcagacccaggccgtggtgcagagcaatgctgtgcccctcttcctgcggctgctgcacagcccccaccagaatgtgtgtgagcaggccgtgtgggccctgggcaacatcattggagatggcccccagtgccgggactatgtgatcagcctgggcgtggtgaagcccctgctgtccttcatcagccccagcatccccatcaccttcctgagaaatgtgacctgggtgatggtgaacctgtgccgccacaaggaccccccaccacccatggagaccatccaggagatcctgcctgccctgtgtgtgctgatccaccacacagatgtgaacatcctggtggacacagtgtgggccctgagctacctgacagatgctggaaatgagcagatccagatggtgattgattctggaattgtgccccacctggtgcccctgctgagccaccaggaggtgaaggtgcagacagctgccctgcgggctgtgggcaacatcgtgactggaacagatgagcagacccaggtggtgctgaactgtgatgccctgagccacttccctgccctgctgacccaccccaaggagaagatcaacaaggaggccgtgtggttcctgagcaacatcacagctggcaaccagcagcaggtgcaggccgtgattgatgccaacctggtgcccatgatcatccacctgctggacaagggggactttggcacccagaaggaggccgcctgggccatcagcaacctgaccatcagcggcaggaaggaccaggtggcctacctgatccagcagaatgtcatcccccccttctgcaacctgctgactgtgaaggatgcccaggtggtgcaggtggtgctggatggcctgagcaacatcctgaagatggctgaagatgaggccgagaccatcggcaacctgattgaagaatgtggcggcctggagaagattgagcagctgcagaaccatgaaaatgaagacatctacaagctggcctatgagatcatcgaccagttcttcagcagtgatgacattgatgaggaccccagcctggtgcctgaggccatccagggcggcaccttcggcttcaacagcagcgccaacgtgcccacagagggcttccagttctag

SEQ ID NO: 156787 - DNA, 1551 bp, synthetic construct
  misc_feature 1..1551: note = Description of Artificial Sequence: Synthetic coding sequence
  source 1..1551: mol_type = other DNA
atgcccaccctggatgcccctgaggagaggaggaggaagttcaagtaccggggcaaggatgtgtccctgcggcggcagcagaggatggctgtgtccctggagctgaggaaggccaagaaggatgagcagaccctgaagagaagaaacatcaccagcttctgcccagacaccccatctgagaagacagccaagggcgtggccgtgtccctgaccctgggggagatcatcaagggcgtgaacagcagtgaccctgtgctgtgcttccaggccacccagacagccaggaagatgctgagccaggagaagaacccccccctgaagctggtgattgaggccggcctcatccccaggatggtggagttcctgaagagcagcctgtacccctgcctgcagtttgaggccgcctgggccctgaccaacatcgccagcggcaccagcgagcagaccagggctgtggtggagggcggggccatccagcccctcatcgagctgctgagcagcagcaatgtggccgtgtgtgagcaggccgtgtgggccctgggcaacattgctggagatggccctgagttccgggacaacgtcatcaccagcaatgccatcccccacctgctggccctgatcagccccaccctgcccatcaccttcctgaggaacatcacctggaccctgagcaacctgtgcaggaacaagaacccctacccctgtgacacagctgtgaagcagatcctgcctgccctgctgcacctgctgcagcaccaggacagcgaggtgctgagtgatgcctgctgggccctgagctacctgacagatggcagcaacaagagaattggccaggtggtgaacacaggagtgctgccccggctggtggtgctgatgaccagcagcgagctgaatgtgctgacccccagcctgaggacagtgggcaacatcgtgactggaacagatgagcagacccagatggccattgatgctggcatgctgaatgtgctgccccagctgctgcagcacaacaagcccagcatccagaaggaggccgcctgggccctgagcaatgtggccgccggcccctgccaccacatccagcagctgctggcctatgatgtgctgccccccctggtggccctgctgaagaatggagagttcaaggtgcagaaggaggccgtgtggatggtggccaactttgccaccggggccaccatggaccagctgatccagctggtgcacagcggcgtgctggagcccctggtgaacctgctgacagccccagatgtgaagatcgtgctgatcatcctggatgtgatcagctgcatcctgcaggccgctgagaagaggtctgagaaggagaacctgtgcctgctgattgaggagctgggcggcatcgacagaattgaggccctgcagctgcacgagaaccggcagatcggccagagcgccctgaacatcatcgagaagcactttggagaggaggaggatgagagccagaccctgctgagccaggtgattgaccaggactatgagttcatcgactatgaatgtctggccaagaagtag

SEQ ID NO: 156788 - DNA, 3318 bp, synthetic construct
  misc_feature 1..3318: note = Description of Artificial Sequence: Synthetic coding sequence
  source 1..3318: mol_type = other DNA
atggccgccatggccccagccctgacagatgctgctgctgaggcccaccacatccgcttcaagctggccccacccagcagcaccctgagccctggcagcgcagaaaataatggaaatgccaacatcctgattgctgccaacggcaccaagaggaaggccatcgctgctgaggaccccagcctggacttcaggaacaaccccaccaaggaggacctgggcaagctgcagcccctggtggccagctacctgtgcagtgatgtgacctctgtgcccagcaaggagagcctgaagctgcagggcgtcttcagcaagcagacagtgctgaagagccaccccctgctgagccagagctatgagctgcgggcagagctgctgggccggcagcctgtgctggagttcagcctggagaacctgcggaccatgaacaccagcggccagacagccctgccccaggcccctgtgaatggcctggccaagaagctgaccaagagcagcacccacagcgaccatgacaacagcaccagcctgaatggaggcaagagggccctgaccagcagcgccctgcatggaggagagatgggcggcagcgagagcggggacctgaagggcggcatgaccaactgcaccctgccccacaggagcctggatgtggagcacaccaccctgtacagcaacaacagcacagccaacaagagctctgtgaacagcatggagcagcctgccctgcagggcagcagccggctgagccctggaacagacagcagcagcaacctgggcggcgtgaagctggagggcaagaagagccccctgagcagcatcctcttcagcgccctggacagcgacacccgcatcacagccctgctgcggcggcaggccgacatcgagagccgggcccggcggctgcagaagaggctgcaggtggtgcaggccaagcaggtggagcggcacatccagcaccagctgggcggcttcctggagaagaccctgagcaagctgcccaacctggagagcctgcggcccaggagccagctgatgctgaccaggaaggccgaggccgccctgaggaaggccgccagcgagaccaccaccagcgagggcctgagcaacttcctgaagagcaacagcatcagcgaggagctggagcgcttcaccgccagcggcatcgccaacctgcgctgcagcgagcaggcctttgacagtgatgtgacagacagcagcagtggaggagagagtgacatcgaggaggaggagctgaccagggctgaccctgagcagagacatgtgcccctgcggcggcgctctgagtggaagtgggccgctgacagagctgccatcgtgagccgctggaactggctgcaggcccacgtgtctgacctggagtaccgcatccggcagcagacagacatctacaagcagatccgggccaacaagggcctcatcgtgctgggggaggtgcccccacctgagcacaccacagacctcttcctgcccctgagcagcgaggtgaagacagaccacggcacagacaagctgattgagagcgtgtcccagcccctggagaaccacggggcccgcatcatcggccacatcagcgagagcctgagcaccaagagctgtggggccctgcggcctgtgaatggagtcatcaacaccctgcagcctgtgctggccgaccacatccctggggacagcagtgatgctgaggagcagctgcacaagaagcagaggctgaacctggtgagcagcagcagtgatggcacctgtgtggccgcccggaccaggcctgtgctgagctgcaagaagaggcggctggtgcggcccaacagcatcgtgcccctgagcaagaaggtgcacaggaacagcaccatccggcccggctgtgatgtgaaccccagctgtgccctgtgtggcagcggcagcatcaacaccatgcctcctgagatccactatgaggcccccctgctggagcggctgagccagctggacagctgtgtgcaccctgtgctggccttcccagatgatgtgcccaccagcctgcacttccagagcatgctgaagagccagtggcagaacaagccctttgacaagatcaagccacccaagaagctgagcctgaagcaccgggcccccatgcctggcagcctgcctgacagcgccaggaaggacagacacaagctggtgtcctccttcctgaccacagccaagctgagccaccaccagaccaggccagacaggacccaccggcagcacctggatgatgtgggcgctgtgcccatggtggagcgggtgacagcccccaaggccgagcggctgctgaaccccccacctcctgtgcatgaccccaaccacagcaagatgaggctgcgggaccacagcagcgagaggtctgaggtgctgaagcaccacacagacatgagcagcagcagctacctggccgccacccaccaccccccccacagccccctggtgcggcagctgagcaccagcagtgacagccctgccccagccagcagcagcagccaggtgacagccagcaccagccagcagcctgtgagaagaagaagaggagagagcagctttgacatcaacaacatcgtcatccccatgtctgtggccgccaccaccagggtggagaagctgcagtacaaggagatcctgacccccagctggagggaggtggacctgcagagcctgaagggcagcccagatgaagaaaatgaggagattgaggacctgagtgatgctgcctttgctgccctgcacgccaagtgtgaggagatggagcgggcccgctggctgtggaccacctctgtgcccccccagaggcggggcagccgcagctaccgcagcagtgatggccgcaccaccccccagctgggcagcgccaaccccagcaccccccagcctgccagcccagatgtgagcagcagccacagcctgtctgagtacagccacggccagagccccaggagccccatcagccctgagctgcacagcgcccccctgacccctgtggcccgggacacccccaggcacctggccagcgaggacacccgctgcagcaccccagagctgggcctggatgagcagagcgtgcagccctgggagaggaggaccttccccctggcccacagcccccaggctgaatgtgaggaccagctggatgcccaggagcgggccgcccgctgcaccaggaggaccagcggcagcaagacaggccgggagacagaggccgcccccaccagcccccccatcgtgcccctgaagagccgccacctggtggccgccgccacagcccagaggcccacccacaggtag

SEQ ID NO: 156789 - DNA, 1200 bp, synthetic construct
  misc_feature 1..1200: note = Description of Artificial Sequence: Synthetic coding sequence
  source 1..1200: mol_type = other DNA
atgcctcctgagatccactatgaggcccccctgctggagcggctgagccagctggacagctgtgtgcaccctgtgctggccttcccagatgatgtgcccaccagcctgcacttccagagcatgctgaagagccagtggcagaacaagccctttgacaagatcaagccacccaagaagctgagcctgaagcaccgggcccccatgcctggcagcctgcctgattctgccaggaaggacagacacaagctggtgagcagcttcctgaccacagccatgctgaagcaccacacagacatgagcagcagcagctacctggccgccacccaccaccccccccacagccccctggtgcggcagctgagcaccagcagtgacagccctgccccagccagcagcagcagccaggtgacagccagcaccagccagcagcctgtgagaagaagaagaggagagagcagctttgacatcaacaacatcgtcatccccatgtctgtggccgccaccaccagggtggagaagctgcagtacaaggagatcctgacccccagctggagggaggtggacctgcagagcctgaagggcagcccagatgaagaaaatgaggagattgaggacctgagtgatgctgcctttgctgccctgcacgccaagtgtgaggagatggagcgggcccgctggctgtggaccacctctgtgcccccccagaggcggggcagccgcagctaccgcagcagtgatggccgcaccaccccccagctgggcagcgccaaccccagcaccccccagcctgccagcccagatgtgagcagcagccacagcctgtctgagtacagccacggccagagccccaggagccccatcagccctgagctgcacagcgcccccctgacccctgtggcccgggacacccccaggcacctggccagcgaggacacccgctgcagcaccccagagctgggcctggatgagcagagcgtgcagccctgggagaggaggaccttccccctggcccacagcccccaggctgaatgtgaggaccagctggatgcccaggagcgggccgcccgctgcaccaggaggaccagcggcagcaagacaggccgggagacagaggccgcccccaccagcccccccatcgtgcccctgaagagccgccacctggtggccgccgccacagcccagaggcccacccacaggtag

SEQ ID NO: 156790 - DNA, 3318 bp, synthetic construct; identical to SEQ ID NO: 156788
  misc_feature 1..3318: note = Description of Artificial Sequence: Synthetic coding sequence
  source 1..3318: mol_type = other DNA

SEQ ID NO: 156791 - DNA, 3318 bp, synthetic construct; identical to SEQ ID NO: 156788
  misc_feature 1..3318: note = Description of Artificial Sequence: Synthetic coding sequence
  source 1..3318: mol_type = other DNA

SEQ ID NO: 156792 - DNA, 3318 bp, synthetic construct; identical to SEQ ID NO: 156788
  misc_feature 1..3318: note = Description of Artificial Sequence: Synthetic coding sequence
  source 1..3318: mol_type = other DNA

SEQ ID NO: 156793 - DNA, 936 bp, synthetic construct
  misc_feature 1..936: note = Description of Artificial Sequence: Synthetic coding sequence
  source 1..936: mol_type = other DNA
atgagcctgctgatgatcagtgaaaatgtgaagctggcccgggagtatgccctgctgggcaactatgacagcgccatggtgtactaccagggcgtgctggaccagatgaacaagtacctgtacagcgtgaaggacacctacctgcagcagaagtggcagcaggtgtggcaggagatcaacgtggaggccaagcacgtgaaggacatcatgaagaccctggagagcttcaagctggacagcacccccctgaaggccgcccagcacgacctgcctgccagcgagggggaggtgtggagcatgcctgtgcctgtggagcggcggcccagccctggccccaggaagaggcagagcagccagtacagcgaccccaagagccacggcaaccggcccagcaccaccgtgcgggtgcacaggagcagcgcccagaatgtgcacaatgaccggggcaaggctgtgcgctgccgggagaagaaggagcagaacaagggccgggaggagaagggcgtgctgatggtgggccccccaggcaccgggaagaccctgctggccaaggctgtggccacagagtgcaagaccaccttcttcaacgtgagcagcagcaccctgaccagcaagtacagaggagagagcgagaagctggtgcggctgctgtttgagatggcccgcttctacagccctgccaccatcttcattgatgaaattgacagcatctgcagccggcggggcaccagcgaggagcacgaggccagcagaagagtgaaggccgagctgctggtgcagatggatggagtgggcggcaccagtgaaaatgatgaccccagcaagatggtgatggtgctggccgccaccaacttcccctgggacattgatgaggccctgcggcggcggctggagaagaggatctacatccccctgcccagcggcatgaggccctag

SEQ ID NO: 156794 - DNA, 1476 bp, synthetic construct
  misc_feature 1..1476: note = Description of Artificial Sequence: Synthetic coding sequence
  source 1..1476: mol_type = other DNA
atgagcctgctgatgatcagtgaaaatgtgaagctggcccgggagtatgccctgctgggcaactatgacagcgccatggtgtactaccagggcgtgctggaccagatgaacaagtacctgtacagcgtgaaggacacctacctgcagcagaagtggcagcaggtgtggcaggagatcaacgtggaggccaagcacgtgaaggacatcatgaagaccctggagagcttcaagctggacagcacccccctgaaggccgcccagcacgacctgcctgccagcgagggggaggtgtggagcatgcctgtgcctgtggagcggcggcccagccctggccccaggaagaggcagagcagccagtacagcgaccccaagagccacggcaaccggcccagcaccaccgtgcgggtgcacaggagcagcgcccagaatgtgcacaatgaccggggcaaggctgtgcgctgccgggagaagaaggagcagaacaagggccgggaggagaagaacaagagccctgctgctgtgacagagcctgagaccaacaagtttgacagcacaggctatgacaaggacctggtggaggccctggagcgggacatcatcagccagaaccccaacgtgcgctgggatgacattgctgacctggtggaggccaagaagctgctgaaggaggccgtggtgctgcccatgtggatgcctgagttcttcaagggcatcagaagaccctggaagggcgtgctgatggtgggccccccaggcaccgggaagaccctgctggccaaggctgtggccacagagtgcaagaccaccttcttcaacgtgagcagcagcaccctgaccagcaagtacagaggagagagcgagaagctggtgcggctgctgtttgagatggcccgcttctacagccctgccaccatcttcattgatgaaattgacagcatctgcagccggcggggcaccagcgaggagcacgaggccagcagaagagtgaaggccgagctgctggtgcagatggatggagtgggcggcaccagtgaaaatgatgaccccagcaagatggtgatggtgctggccgccaccaacttcccctgggacattgatgaggccctgcggcggcggctggagaagaggatctacatccccctgcccagcgccaagggccgggaggagctgctgcgcatcagcctgcgggagctggagctggctgatgatgtggacctggccagcattgctgagaacatggagggctacagcggggctgacatcaccaacgtgtgcagagatgccagcctgatggccatgagaagaagaattgagggcctgaccccagaggagatccggaacctgagcaaggaggagatgcacatgcccaccaccatggaggactttgagatggccctgaagaaggtgtccaagtctgtgtctgctgctgacatcgagagatatgagaagtggatctttgaatttggcagctgctag

SEQ ID NO: 156795 - DNA, 1476 bp, synthetic construct; identical to SEQ ID NO: 156794
  misc_feature 1..1476: note = Description of Artificial Sequence: Synthetic coding sequence
  source 1..1476: mol_type = other DNA

SEQ ID NO: 156796 - DNA, 636 bp, synthetic construct
  misc_feature 1..636: note = Description of Artificial Sequence: Synthetic coding sequence
  source 1..636: mol_type = other DNA
atgagcctgctgatgatcagtgaaaatgtgaagctggcccgggagtatgccctgctgggcaactatgacagcgccatggtgtactaccagggcgtgctggaccagatgaacaagtacctgtacagcgtgaaggacacctacctgcagcagaagtggcagcaggtgtggcaggagatcaacgtggaggccaagcacgtgaaggacatcatgaagaccctggagagcttcaagctggacagcacccccctgaaggccgcccagcacgacctgcctgccagcgagggggaggtgtggagcatgcctgtgcctgtggagcggcggcccagccctggccccaggaagaggcagagcagccagtacagcgaccccaagagccacggcaaccggcccagcaccaccgtgcgggtgcacaggagcagcgcccagaatgtgcacaatgaccggggcaaggctgtgcgctgccgggagaagaaggagcagaacaagggccgggaggagaagaacaagagccctgctgctgtgacagagcctgagaccaacaagtttgacagcacaggctatgacaaggacctggtggaggccctggagcgggacatcatcagccagaaccccaacgtgcgctgggatgacatctag

SEQ ID NO: 156797 - DNA, 843 bp, synthetic construct
  misc_feature 1..843: note = Description of Artificial Sequence: Synthetic coding sequence
  source 1..843: mol_type = other DNA
atgagcctgctgatgatcagtgaaaatgtgaagctggcccgggagtatgccctgctgggcaactatgacagcgccatggtgtactaccagggcgtgctggaccagatgaacaagtacctgtacagcgtgaaggacacctacctgcagcagaagtggcagcaggtgtggcaggagatcaacgtggaggccaagcacgtgaaggacatcatgaagaccctggagagcttcaagctggacagcacccccctgaaggccgcccagcacgacctgcctgccagcgagggggaggtgtggagcatgcctgtgcctgtggagcggcggcccagccctggccccaggaagaggcagagcagccagtacagcgaccccaagagccacggcaaccggcccagcaccaccgtgcgggtgcacaggagcagcgcccagaatgtgcacaatgaccggggcaaggctgtgcgctgccgggagaagaaggagcagaacaagggccgggaggagaagaacaagagccctgctgctgtgacagagcctgagaccaacaagtttgacagcacaggctatgacaaggacctggtggaggccctggagcgggacatcatcagccagaaccccaacgtgcgctgggatgacattgctgacctggtggaggccaagaagctgctgaaggaggccgtggtgctgcccatgtggatgcctgagttcttcaagggcatcagaagaccctggaagggcgtgctgatggtgggccccccaggcaccgggaagaccctgctggccaaggctgtggccacagagtgcaagaccaccttcttcaacgtgagcagcagcaccctgaccagctag

SEQ ID NO: 156798 - DNA, 429 bp, synthetic construct
  misc_feature 1..429: note = Description of Artificial Sequence: Synthetic coding sequence
  source 1..429: mol_type = other DNA
atgaactgcagcgagagccagaggctgcggaccctgctgagccggctgctgctggagctgcaccacagaggaaatgccagcggcctgggcgccggcccccggcccagcatgggcatgggcgtggtgcctgacccctttgtgggccgggaggtgaccagcgccaagggagatgatgcctacctgtacatcctgctgatcatgatcttctacgcctgcctggccggcggcctcatcctggcctacaccaggagcaggaagctggtggaggccaaggatgagcccagccaggcctgtgccgagcacgagtgggcccctggaggagccctgacagcagatgctgaggccgctgctggcagccaggccgagggccggcggcagctggccagcgagggcctgcctgccctggcccagggcgctgagcgggtgtag

SEQ ID NO: 156799 - DNA, 1509 bp, synthetic construct
  misc_feature 1..1509: note = Description of Artificial Sequence: Synthetic coding sequence
  source 1..1509: mol_type = other DNA
atgtttggcaccctgctgctgtactgcttcttcctggccaccgtgcctgccctggccgagactggaggagagcggcagctgagccctgagaagtctgagatctggggccctggcctgaaggcagatgtggtgctgcctgcccgctacttctacatccaggccgtggacaccagcggcaacaagttcaccagcagccctggagagaaggtgttccaggtgaaggtgtctgcccctgaggagcagttcaccagggtgggcgtgcaggtgctggacaggaaggatggcagcttcatcgtgcgctacaggatgtatgccagctacaagaacctgaaggtggagatcaagttccagggccagcacgtggccaagagcccctacatcctgaagggccctgtgtaccacgagaactgtgactgccccctgcaggacagcgctgcctggctgcgggagatgaactgcccagagaccatcgcccagatccagagggacctggcccacttccctgctgtggaccctgagaagattgctgtggagatccccaagagatttggccagaggcagagcctgtgccactacaccctgaaggacaacaaggtgtacatcaagacccacggggagcacgtgggcttccgcatcttcatggatgccatcctgctgagcctgaccaggaaggtgaagatgccagatgtggagctgtttgtgaacctgggggactggcccctggagaagaagaagagcaacagcaacatccaccccatcttctcctggtgtggcagcacagacagcaaggacatcgtgatgcccacctatgacctgacagattctgtgctggagaccatgggccgggtgtccctggacatgatgtctgtgcaggccaacacaggccccccctgggagagcaagaacagcacagctgtgtggaggggccgggacagcaggaaggagcggctggagctggtgaagctgagcaggaagcaccctgagctgattgatgctgccttcaccaacttcttcttcttcaagcatgatgagaacctgtatggccccatcgtgaagcacatctccttctttgacttcttcaagcacaagtaccagatcaacattgatggcaccgtggccgcctaccgcctgccctacctgctggtgggggacagcgtggtgctgaagcaggacagcatctactatgagcacttctacaatgagctgcagccctggaagcactacatccctgtgaagagcaacctgagtgacctgctggagaagctgaagtgggccaaggaccatgatgaggaggccaagaagatcgccaaggccggccaggagtttgccaggaacaacctgatgggagatgacatcttctgctactacttcaagctgttccaggagtatgccaacctgcaggtgtctgagccccagatccgggagggcatgaagagggtggagccccagacagaagatgacctcttcccctgcacctgccacaggaagaagaccaaggatgagctgtag

SEQ ID NO: 156800 - DNA, 1065 bp, synthetic construct
  misc_feature 1..1065: note = Description of Artificial Sequence: Synthetic coding sequence
  source 1..1065: mol_type = other DNA
atgtctgctgggggcggccgggcctttgcctggcaggtgtttcctcccatgcccacctgccgggtgtatggaacagtggcccaccaggacggccacctgctggtgctgggcggctgcggccgggccggcctgcccctggacacagctgagaccctggacatggccagccacacctggctggccctggcccccctgcccacagcccgggccggggctgctgctgtggtgctgggcaagcaggtgctggtggtgggcggcgtggatgaggtgcagagccctgtggccgctgtggaggccttcctgatggatgagggccgctgggagcggcgggccaccctgccccaggccgccatgggcgtggccaccgtggagagagatggcatggtgtatgccctgggcggcatgggccctgacacagccccccaggcccaggtgcgggtgtatgagccccggcgggactgctggctgagcctgcccagcatgcccaccccctgctacggggccagcaccttcctgcacggcaacaagatctacgtgctgggcggccggcagggcaagctgcctgtgacagcctttgaggcctttgacctggaggcccggacctggaccaggcaccccagcctgcccagcagaagagcctttgctggctgtgccatggccgagggctctgtgttcagcctgggcggcctgcagcagcccggcccccacaacttctacagccggccccactttgtgaacacagtggagatgtttgacctggagcacggctcctggaccaagctgcccaggagcctgaggatgagggacaagagagctgactttgtggtgggcagcctgggcggccacatcgtggccatcggcggcctgggcaaccagccctgccccctgggctctgtggagagcttcagcctggcccggcggcgctgggaggccctgcctgccatgcccacagcccgctgcagctgcagcagcctgcaggccggccccaggctcttcgtcatcggcggcgtggcccagggccccagccaggccgtggaggccctgtgcctgagagatggagtgtag

SEQ ID NO: 156801 - DNA, 417 bp, synthetic construct
  misc_feature 1..417: note = Description of Artificial Sequence: Synthetic coding sequence
  source 1..417: mol_type = other DNA
atgtttgacctggagcacggctcctggaccaagctgcccaggagcctgaggatgagggacaagagagctgactttgtggtgggcagcctgggcggccacatcgtggccatcggcggcctgggcaaccagccctgccccctgggctctgtggagagcttcagcctggcccggcggcgctgggaggccctgcctgccatgcccacagcccgctgcagctgcagcagcctgcaggccggcccccggctgtttgtgattggaggagtggcccagggccccagccaggccgtggaggccctgtgcctgagagatggagagggcctggtgggcgctgtgcactggagcagcagcctgcctgaggccgccatctccatggccccctttgctgctgaggacacccactgcggctctgtgggctag

SEQ ID NO: 156802 - DNA, 1821 bp, synthetic construct
  misc_feature 1..1821: note = Description of Artificial Sequence: Synthetic coding sequence
  source 1..1821: mol_type = other DNA
atggacagccagcgggagctggccgaggagctgcggctgtaccagagcaccctgctgcaggacggcctgaaggacctgctggatgagaagaagttcatcgactgcaccctgaaggccggggacaagagcctgccctgccacaggctcatcctgagcgcctgcagcccctacttccgggagtacttcctgtctgaaattgatgaggccaagaagaaggaggtggtgctggacaacgtggaccctgccatcctggacctgatcatcaagtacctgtacagcgccagcattgacctgaatgatggaaatgtgcaggacatctttgccctggccagccgcttccagatccccagcgtcttcaccgtgtgtgtgtcctacctgcagaagaggctggcccctggcaactgcctggccatcctgcggctgggcctgctgctggactgcccccggctggccatcagcgcccgggagtttgtgtctgacagatttgtgcagatctgcaaggaggaggacttcatgcagctgagcccccaggagctgatcagcgtcatcagcaatgacagcctgaatgtggagaaggaggaggccgtgtttgaagctgtgatgaagtgggtgaggacagacaaggaaaatagagtgaagaacctgtctgaggtgtttgactgcatccgcttccggctgatgacagagaagtacttcaaggaccacgtggagaaggatgacatcatcaagagcaacccagacctgcagaagaagatcaaggtgctgaaggatgcctttgctgggaagctgcctgagcccagcaagaatgctgccaagacaggagctggggaggtgaatggagatgtgggagatgaggacctgctgcccggctacctgaatgacatccccaggcatggcatgtttgtgaaggacctgatcctgctggtgaatgacacagctgctgtggcctatgaccccacagaaaatgaatgctacctgacagccctggccgagcagatccccaggaaccacagcagcatcgtgacccagcagaaccagatctacgtggtgggcggcctgtatgtggatgaggagaacaaggaccagcccctgcagagctacttcttccagctggacagcatcgccagcgagtgggtgggcctgccccccctgcccagcgcccgctgcctgtttggcctgggggaggtggatgacaagatctacgtggtggccggcaaggacctgcagacagaggccagcctggacagcgtgctgtgctatgaccctgtggccgccaagtggaatgaggtgaagaagctgcccatcaaggtgtatggccacaacgtcatcagccacaagggcatgatctactgcctgggcggcaagacagatgacaagaagtgcaccaacagagtcttcatcttcaaccccaagaagggggactggaaggacctggcccccatgaagatccccaggtccatgtttggagtggccgtgcacaagggcaagatcgtgattgctgggggcgtgacagaagatggcctgagcgcctctgtggaggcctttgacctgaccaccaacaagtgggatgtgatgacagagttcccccaggagaggagcagcatcagcctggtgtccctggccggcagcctgtatgccatcggcggctttgccatgatccagctggagagcaaggagtttgcccccacagaggtgaatgacatctggaagtatgaagatgacaagaaggagtgggccggcatgctgaaggagatccgctatgccagcggggccagctgcctggccacccggctgaacctcttcaagctgagcaagctgtag

SEQ ID NO: 156803 - DNA, 1377 bp, synthetic construct
  misc_feature 1..1377: note = Description of Artificial Sequence: Synthetic coding sequence
  source 1..1377: mol_type = other DNA
atggcccggggcccccagaccctggtgcaggtgtgggtgggcggccagctgttccaggccgaccgggccctgctggtggagcactgcggcttcttccggggcctcttccgcagcggcatgagggagaccagggctgctgaggtgcggctgggcgtgctgtctgctgggggcttccgggccaccctgcaggtgctgcggggggacaggcctgccctggccgcagaagatgagctgctgcaggccgtggagtgtgccgccttcctgcaggccccagccctggcccgcttcctggagcacaacctgaccagtgacaactgtgccctgctgtgtgatgctgctgctgccttcggcctgagagatgtgttccacagcgctgccctcttcatctgtgatggagagcgggagctggccgctgagctggccctgcctgaggcccgggcctacgtggccgccctgcggcccagcagctatgctgctgtgtccacccacaccccagcccctggcttcctggaggatgccagcaggaccctgtgctacctggatgaggaggaggatgcctggaggaccctggccgccctgcccctggaggccagcaccctgctggccggcgtggccaccctgggcaacaagctgtacatcgtgggcggcgtgcggggggccagcaaggaggtggtggagctgggcttctgctatgaccctgatggcggcacctggcatgagttccccagcccccaccagcccaggtatgacacagccctggccggctttgatggccgcctgtatgccatcggcggggagttccagaggacccccatcagctctgtggagagatatgaccctgctgctggctgctggagctttgtggccgacctgccccagcctgctgctggggtgccctgtgcccaggcctgtggccgcctgtttgtgtgcctgtggaggcctgctgacaccacagctgtggtggagtatgctgtgaggacagatgcctggctgcctgtggccgagctgcggcggccccagagctatggccactgcatggtggcccaccgggacagcctgtatgtggtgagaaatggccccagtgatgacttcctgcactgtgccatcgactgcctgaacctggccaccggccagtggacagccctgcccggccagtttgtgaacagcaagggggccctcttcaccgctgtggtgcggggggacacagtgtacacagtgaacaggatgttcaccctgctgtatgccatcgagggcggcacctggaggctgctgcgggagaaggccggcttccccaggcctggcagcctgcagaccttcctgctgcggctgcccccaggggcccctggccctgtgaccagcaccacagctgagctgtag

SEQ ID NO: 156804 - DNA, 2247 bp, synthetic construct
  misc_feature 1..2247: note = Description of Artificial Sequence: Synthetic coding sequence
  source 1..2247: mol_type = other DNA
atgagcggcagcggcaggaaggactttgatgtgaagcacatcctgcggctgcgctggaagctgttcagccaccccagccccagcactggaggccctgctgggggcggctgcctgcagcaggacggcagcggcagctttgagcactggggccccagccagagccggctgctgaagagccaggagaggtctggagtgtccaccttctggaagaagcccagcagcagcagcagcagcagcagcagccccagcagcagcagcagcagcttcaaccccctgaatggcaccctgctgcctgtggccacccggctgcagcagggcgcccctggccagggcacccagcagcctgcccggaccctcttctacgtggagagcctggaggaggaggtggtgcccggcatggacttccctggcccccatgagaagggcctggtgctgcaggagctgaaggtggagccagacaacagcagccaggccactggagagggctgcggccaccggctgagcagcacaggccacagcatgaccccccagagcgacctggacagcagcagcagcgaggagttctaccaggccgtgcaccacgccgagcagaccttcaggaagatggagagctacctgaagcagcagcagctgtgtgatgtgatcctgattgtgggcaacaggaagatcccagcccaccggctggtgctgagctctgtgtctgactactttgctgccatgttcaccagtgatgtgtgtgaggccaagcaggaggagatcaagatggagggcatcgaccccaatgccctgtgggacctggtgcagtttgcctacacaggctgcctggagctgaaggaggacaccatcgagaacctgctggccgccgcctgcctgctgcagctgccccaggtggtggaggtgtgctgccacttcctgatgaagctgctgcaccccagcaactgcctgggcatccgggcctttgctgatgcccagggctgcatcgagctgatgaaggtggcccacagctacaccatggagaacatcatggaggtgatccggaaccaggagttcctgctgctgcctgctgaggagctgcacaagctgctggccagtgatgatgtgaatgtgcctgatgaggagaccatcttccacgccctgatgatgtgggtgaagtatgacatgcagagccgctgcaatgacctgtccatgctgctggccttcatccggctgcccctgctgcccccccagatcctggccgacctggagaaccacgccctcttcaagaatgacctggagtgccagaagctgatcctggaggccatgaagtaccacctgctgcctgagaggaggaccctgatgcagagccccaggaccaagcccaggaagagcacagtgggcaccctgtatgctgtgggcggcatggacaacaacaagggggccaccaccatcgagaagtatgacctgcggaccaacctgtggatccaggccggcatgatgaatggaagaaggctgcagtttggagtggccgtgattgatgacaagctgtttgtgattggaggaagagatggcctgaagaccctgaacacagtggagtgctacaaccccaagaccaagacctggacagtgctgccccccatgagcacccaccgccacggcctgggcgtgacagtgctggagggccccatctatgctgtgggcggccatgatggctggagctacctgaacacagtggagcgctgggacccccagagccagcagtggacctttgtggcctccatgagcatcgcccggagcacagtgggcgtggccgccctgaatggcaagctgtacagcgtgggcggcagagatggcagcagctgcctgagctccatggagtactatgacccccacaccaacaagtggaacatgtgtgcccccatgtgcaagaggcggggcggcgtgggcgtggccacctgtgatggcttcctgtatgctgtgggcggccatgatgccccagccagcaaccactgcagccggctgctggactatgtggagagatatgaccccaagacagacacctggaccatggtggcccccctgtccatgcccagagatgctgtgggcgtgtgcctgctgggggaccggctgtatgctgtgggcggctatgatggccagacctacctgaacaccatggagagctatgacccccagaccaatgagtggacccagatggccagcctgaacatcggccgggccggggcctgtgtggtggtgatcaagcagccctag

SEQ ID NO: 156805 - DNA, 1668 bp, synthetic construct
  misc_feature 1..1668: note = Description of Artificial Sequence: Synthetic coding sequence
  source 1..1668: mol_type = other DNA
atggacttccctggcccccatgagaagggcctggtgctgcaggagctgaaggtggagccagacaacagcagccaggccactggagagggctgcggccaccggctggtgctgagctctgtgtctgactactttgctgccatgttcaccagtgatgtgtgtgaggccaagcaggaggagatcaagatggagggcatcgaccccaatgccctgtgggacctggtgcagtttgcctacacaggctgcctggagctgaaggaggacaccatcgagaacctgctggccgccgcctgcctgctgcagctgccccaggtggtggaggtgtgctgccacttcctgatgaagctgctgcaccccagcaactgcctgggcatccgggcctttgctgatgcccagggctgcatcgagctgatgaaggtggcccacagctacaccatggagaacatcatggaggtgatccggaaccaggagttcctgctgctgcctgctgaggagctgcacaagctgctggccagtgatgatgtgaatgtgcctgatgaggagaccatcttccacgccctgatgatgtgggtgaagtatgacatgcagagccgctgcaatgacctgtccatgctgctggccttcatccggctgcccctgctgcccccccagatcctggccgacctggagaaccacgccctcttcaagaatgacctggagtgccagaagctgatcctggaggccatgaagtaccacctgctgcctgagaggaggaccctgatgcagagccccaggaccaagcccaggaagagcacagtgggcaccctgtatgctgtgggcggcatggacaacaacaagggggccaccaccatcgagaagtatgacctgcggaccaacctgtggatccaggccggcatgatgaatggccggcggctgcagtttggagtggccgtgattgatgacaagctgtttgtgattggaggaagagatggcctgaagaccctgaacacagtggagtgctacaaccccaagaccaagacctggacagtgctgccccccatgagcacccacagacatggcctgggcgtgacagtgctggagggccccatctatgctgtgggcggccatgatggctggagctacctgaacacagtggagcgctgggacccccagagccagcagtggacctttgtggcctccatgagcatcgcccggagcacagtgggcgtggccgccctgaatggcaagctgtacagcgtgggcggcagagatggcagcagctgcctgagctccatggagtactatgacccccacaccaacaagtggaacatgtgtgcccccatgtgcaagagaagaggaggagtgggcgtggccacctgtgatggcttcctgtatgctgtgggcggccatgatgccccagccagcaaccactgcagccggctgctggactatgtggagagatatgaccccaagacagacacctggaccatggtggcccccctgtccatgcccagagatgctgtgggcgtgtgcctgctgggggaccggctgtatgctgtgggcggctatgatggccagacctacctgaacaccatggagagctatgacccccagaccaatgagtggacccagatggccagcctgaacatcggccgggccggggcctgtgtggtggtgatcaagcagccctag

SEQ ID NO: 156806 - DNA, 1167 bp, synthetic construct
  misc_feature 1..1167: note = Description of Artificial Sequence: Synthetic coding sequence
  source 1..1167: mol_type = other DNA
atgagccgcagcggggacaggaccagcacctttgaccccagccacagcgacaacctgctgcacggcctgaacctgctgtggaggaagcagctgttctgtgatgtgaccctgacagcccagggccagcagttccactgccacaaggctgtgctggccagctgcagccagtacttccgcagcctcttcagcagccacccccccctgggcggcggcgtgggcggccaggacggcctgggcgcccccaaggaccagcagcagcccccccagcagcagcccagccagcagcagcagcccccaccccaggaggagcccggcacccccagcagcagcccagatgacaagctgctgaccagcccccgggccatcaacaacctggtgctgcagggctgcagcagcatcggcctgcggctggtgctggagtacctgtacacagccaacgtgaccctgagcctggacacagtggaggaggtgctgtctgtgtccaagatcctgcacatcccccaggtgaccaagctgtgtgtgcagttcctgaatgaccagatctctgtgcagaactacaagcaggtgtgcaagattgctgccctgcacggcctggaggagaccaagaagctggccaacaagtacctggtggaggatgtgctgctgctgaactttgaggagatgagggccctgctggacagcctgcccccacctgtggagagcgagctggccctcttccagatgtctgtgctgtggctggagcatgaccgggagaccaggatgcagtatgccccagacctgatgaagaggctgcgctttgccctgatcccagcccctgagctggtggagcgggtgcagagcgtggacttcatgaggacagatcctgtgtgccagaagctgctgctggatgccatgaactaccacctgatgcccttccggcagcactgccggcagagcctggccagccgcatccgcagcaacaagaagatgctgctgctggtgggcggcctgcccccaggccctgaccggctgcccagcaacctggtgcagtactatgatgatgagaagaagacctggaagatcctgaccatcaccggcccccaccccatcagcggcaagcaggagagcgccagcagccctgagttcagaagaaggaagacccgggagttcagcaacaacaccatgtag

SEQ ID NO: 156807 - DNA, 1887 bp, synthetic construct
  misc_feature 1..1887: note = Description of Artificial Sequence: Synthetic coding sequence
  source 1..1887: mol_type = other DNA
atgagccgcagcggggacaggaccagcacctttgaccccagccacagcgacaacctgctgcacggcctgaacctgctgtggaggaagcagctgttctgtgatgtgaccctgacagcccagggccagcagttccactgccacaaggctgtgctggccagctgcagccagtacttccgcagcctcttcagcagccacccccccctgggcggcggcgtgggcggccaggacggcctgggcgcccccaaggaccagcagcagcccccccagcagcagcccagccagcagcagcagcccccaccccaggaggagcccggcacccccagcagcagcccagatgacaagctgctgaccagcccccgggccatcaacaacctggtgctgcagggctgcagcagcatcggcctgcggctggtgctggagtacctgtacacagccaacgtgaccctgagcctggacacagtggaggaggtgctgtctgtgtccaagatcctgcacatcccccaggtgaccaagctgtgtgtgcagttcctgaatgaccagatctctgtgcagaactacaagcaggtgtgcaagattgctgccctgcacggcctggaggagaccaagaagctggccaacaagtacctggtggaggatgtgctgctgctgaactttgaggagatgagggccctgctggacagcctgcccccacctgtggagagcgagctggccctcttccagatgtctgtgctgtggctggagcatgaccgggagaccaggatgcagtatgccccagacctgatgaagaggctgcgctttgccctgatcccagcccctgagctggtggagcgggtgcagagcgtggacttcatgaggacagatcctgtgtgccagaagctgctgctggatgccatgaactaccacctgatgcccttccggcagcactgccggcagagcctggccagccgcatccgcagcaacaagaagatgctgctgctggtgggcggcctgcccccaggccctgaccggctgcccagcaacctggtgcagtactatgatgatgagaagaagacctggaagatcctgaccatcatgccctacaacagcgcccaccactgtgtggtggaggtggagaacttcctgtttgtgctgggcggggaggaccagtggaaccccaacgggaagcacagcaccaactttgtgagccgctatgacccccgcttcaacagctggatccagctgccccccatgcaggagcggcgggccagcttctacgcctgccgcctggacaagcacctgtatgtgattggaggaagaaatgaaacaggctacctgagctctgtggagtgctacaacctggagaccaatgagtggaggtatgtgagcagcctgccccagcccctggccgcccatgctggagctgtgcacaacgggaagatctacatcagcggcggcgtgcacaatggagaatatgtgccctggctgtactgctatgaccctgtgatggatgtgtgggccaggaagcaggacatgaacaccaagagggccatccacaccctggccgtgatgaatgaccggctgtatgccatcggcggcaaccacctgaagggcttcagccacctggatgtgatgctggtggagtgctatgaccccaagggggaccagtggaacatcctgcagacccccatcctggagggccgcagcggccctggctgtgctgtgctggatgacagcatctacctggtgggcggctacagctggagcatgggcgcctacaagagcagcaccatctgctactgcccagagaagggcacctggacagagctggagggagatgtggccgagcccctggccggccctgcctgtgtgaccgtcatcctgcccagctgtgtgccctacaacaagtag

SEQ ID NO: 156808 - DNA, 1794 bp, synthetic construct
  misc_feature 1..1794: note = Description of Artificial Sequence: Synthetic coding sequence
  source 1..1794: mol_type = other DNA
atggtgtggctggaggcccggccccagatcctgtttgtgtgcaccaagcagggccaccagaagcccctggacagcaaggatgacaacacagagaagcactgccctgtgacagtgaacccctggcacatgaagaaggccttcaaggtgatgaatgagctgcggagccagaacctgctgtgtgatgtgaccatcgtggccgaggacatggagatcagcgcccaccgggtggtgctggccgcctgcagcccctacttccacgccatgttcaccggggagatgtctgagagccgggccaagagggtgcgcatcaaggaggtggatggctggaccctgaggatgctgattgattatgtgtacacagctgagatccaggtgacagaggagaatgtgcaggtgctgctgcctgctgctggcctgctgcagctgcaggatgtgaagaagacctgctgtgagttcctggagagccagctgcaccctgtgaactgcctgggcatccgggcctttgctgacatgcacgcctgcacagacctgctgaacaaggccaacacctatgcagagcagcactttgctgatgtggtgctgtctgaggagttcctgaacctgggcatcgagcaggtgtgcagcctcatcagcagtgacaagctgaccatcagcagcgaggagaaggtgtttgaggccgtcatcgcctgggtgaaccacgacaaggatgtgcggcaggagttcatggcccggctgatggagcacgtgcggctgcccctgctgccccgggagtacctggtgcagagggtggaggaggaggccctggtgaagaacagcagcgcctgcaaggactacctgattgaggccatgaagtaccacctgctgcccacagagcagaggatcctgatgaagtctgtgaggacccggctgcggacccccatgaacctgcccaagctgatggtggtggtgggcggccaggcccccaaggccatccgctctgtggagtgctatgacttcaaggaggagcgctggcaccaggtggccgagctgcccagccgccgctgccgggccggcatggtgtacatggccggcctggtgtttgctgtgggcggcttcaacggcagcctgcgggtgaggacagtggacagctatgaccctgtgaaggaccagtggacctctgtggccaacatgagggacagaagaagcaccctgggcgctgctgtgctgaatggcctgctgtatgctgtgggcggctttgatggcagcacaggcctgagctctgtggaggcctacaacatcaagagcaatgagtggttccacgtggcccccatgaacacccggcgcagctctgtgggcgtgggcgtggtgggcggcctgctgtatgctgtgggcggctatgatggagccagccggcagtgcctgagcacagtggagtgctacaatgccaccaccaatgagtggacctacatcgccgagatgagcaccaggagaagtggagctggggtgggcgtgctgaacaacctgctgtatgctgtgggcggccatgatggccccctggtgaggaagtctgtggaggtgtatgaccccaccaccaatgcctggaggcaggtggccgacatgaacatgtgcagaagaaatgctggggtgtgtgctgtgaatggcctgctgtatgtggtgggcggagatgatggcagctgcaacctggcctctgtggagtactacaaccccaccacagacaagtggacagtggtgagcagctgcatgagcacaggccgctcctatgctggggtgacagtgattgacaagcccctgtag

SEQ ID NO: 156809 - DNA, 2640 bp, synthetic construct
  misc_feature 1..2640: note = Description of Artificial Sequence: Synthetic coding sequence
  source 1..2640: mol_type = other DNA
atgaggctgcacctgctgctgctgctggccctgtgtggggccggcaccacagctgctgagctgagctacagcctgcggggcaactggagcatctgcaatggaaatggcagcctggagctgcctggagctgtgcccggctgtgtgcacagcgccctcttccagcagggcctcatccaggacagctactaccgcttcaatgacctgaactaccgctgggtgtccctggacaactggacctacagcaaggagttcaagatcccctttgagatcagcaagtggcagaaggtgaacctgatcctggagggcgtggacacagtgtccaagatcctcttcaatgaggtgaccatcggggagacagacaacatgttcaaccgctacagctttgacatcaccaacgtggtgagagatgtgaacagcattgagctgcgcttccagagcgctgtgctgtatgctgcccagcagagcaaggcccacacccgctaccaggtgcccccagactgcccccccctggtgcagaagggagaatgtcatgtgaactttgtgaggaaggagcagtgcagcttctcctgggactggggccccagcttccccacccagggcatctggaaggatgtgagaattgaggcctacaacatctgccacctgaactacttcaccttcagccccatctatgacaagagcgcccaggagtggaacctggagattgagagcacctttgatgtggtgagcagcaagcctgtgggcggccaggtgattgtggccatccccaagctgcagacccagcagacctacagcattgagctgcagcccgggaagagaattgtggagctgtttgtgaacatcagcaagaacatcaccgtggagacctggtggccccacggccacggcaaccagacaggctacaacatgacagtgctgtttgagctggatggcggcctgaacatcgagaagagcgccaaggtgtacttcagaacagtggagctgattgaggagcccatcaagggcagccctggcctgtccttctacttcaagatcaatggcttccccatcttcctgaagggcagcaactggatcccagctgacagcttccaggacagagtgaccagcgagctgctgcggctgctgctgcagagcgtggtggatgccaacatgaacaccctgcgggtgtggggcggcggcatctatgagcaggatgagttctatgagctgtgtgatgagctgggcatcatggtgtggcaggacttcatgtttgcctgtgccctgtaccccacagaccagggcttcctggacagcgtgacagctgaggtggcctaccagatcaagaggctgaagagccaccccagcatcatcatctggagcggcaacaatgaaaatgaggaggccctgatgatgaactggtaccacatctccttcacagaccggcccatctacatcaaggactatgtgaccctgtatgtgaagaacatccgggagctggtgctggccggggacaagagccggcccttcatcaccagcagccccaccaatggagctgagaccgtggccgaggcctgggtgtcccagaaccccaacagcaactactttggagatgtgcacttctatgactacatcagtgactgctggaactggaaggtgttccccaaggccaggtttgcctctgaatatggctaccagagctggcccagcttcagcaccctggagaaggtgagcagcacagaggactggagcttcaacagcaagttcagcctgcaccggcagcaccacgagggcggcaacaagcagatgctgtaccaggccggcctgcacttcaagctgccccagagcacagaccccctgcggaccttcaaggacaccatctacctgacccaggtgatgcaggcccagtgtgtgaagacagaaacagagttctaccgccgcagccgctctgagatcgtggaccagcagggccacaccatgggcgccctgtactggcagctgaatgacatctggcaggcccccagctgggccagcctggagtatggaggcaagtggaagatgctgcactactttgcccagaacttctttgcccccctgctgcctgtgggctttgaaaatgaaaacaccttctacatctatggagtgtctgacctgcacagcgactacagcatgaccctgtctgtgcgggtgcacacctggagcagcctggagcctgtgtgcagccgggtgacagaaagatttgtgatgaagggcggggaggccgtgtgcctgtatgaggagcctgtgtctgagctgctgcggcgctgtggcaactgcacccgggagagctgtgtggtgtccttctacctgtctgctgaccacgagctgctgagccccaccaactaccacttcctgagcagccccaaggaggccgtgggcctgtgcaaggcccagatcacagccatcatcagccagcagggcgacatctttgtgtttgacctggagaccagcgctgtggccccctttgtgtggctggatgtgggcagcatccctggccgcttcagtgacaatggcttcctgatgacagagaagaccaggaccatcctcttctacccctgggagcccaccagcaagaatgagctggagcagagcttccacgtgaccagcctgacagacatctactag

SEQ ID NO: 156810 - DNA, 1518 bp, synthetic construct
  misc_feature 1..1518: note = Description of Artificial Sequence: Synthetic coding sequence
  source 1..1518: mol_type = other DNA
atgtctgagagccgggccaagagggtgcgcatcaaggaggtggatggctggaccctgaggatgctgattgattatgtgtacacagctgagatccaggtgacagaggagaatgtgcaggtgctgctgcctgctgctggcctgctgcagctgcaggatgtgaagaagacctgctgtgagttcctggagagccagctgcaccctgtgaactgcctgggcatccgggcctttgctgacatgcacgcctgcacagacctgctgaacaaggccaacacctatgcagagcagcactttgctgatgtggtgctgtctgaggagttcctgaacctgggcatcgagcaggtgtgcagcctcatcagcagtgacaagctgaccatcagcagcgaggagaaggtgtttgaggccgtcatcgcctgggtgaaccacgacaaggatgtgcggcaggagttcatggcccggctgatggagcacgtgcggctgcccctgctgccccgggagtacctggtgcagagggtggaggaggaggccctggtgaagaacagcagcgcctgcaaggactacctgattgaggccatgaagtaccacctgctgcccacagagcagaggatcctgatgaagtctgtgaggacccggctgcggacccccatgaacctgcccaagctgatggtggtggtgggcggccaggcccccaaggccatccgctctgtggagtgctatgacttcaaggaggagcgctggcaccaggtggccgagctgcccagccgccgctgccgggccggcatggtgtacatggccggcctggtgtttgctgtgggcggcttcaacggcagcctgcgggtgaggacagtggacagctatgaccctgtgaaggaccagtggacctctgtggccaacatgagggacagaagaagcaccctgggcgctgctgtgctgaatggcctgctgtatgctgtgggcggctttgatggcagcacaggcctgagctctgtggaggcctacaacatcaagagcaatgagtggttccacgtggcccccatgaacacccggcgcagctctgtgggcgtgggcgtggtgggcggcctgctgtatgctgtgggcggctatgatggagccagccggcagtgcctgagcacagtggagtgctacaatgccaccaccaatgagtggacctacatcgccgagatgagcaccaggagaagtggagctggggtgggcgtgctgaacaacctgctgtatgctgtgggcggccatgatggccccctggtgaggaagtctgtggaggtgtatgaccccaccaccaatgcctggaggcaggtggccgacatgaacatgtgcagaagaaatgctggggtgtgtgctgtgaatggcctgctgtatgtggtgggcggagatgatggcagctgcaacctggcctctgtggagtactacaaccccaccacagacaagtggacagtggtgagcagctgcatgagcacaggccgctcctatgctggggtgacagtgattgacaagcccctgtag

SEQ ID NO: 156811 - DNA, 1764 bp, synthetic construct
  misc_feature 1..1764: note = Description of Artificial Sequence: Synthetic coding sequence
  source 1..1764: mol_type = other DNA
atggagggggagagcgtgaagctgagcagccagaccctcatccaggccggagatgatgagaagaaccagaggaccatcaccgtgaacccagcccacatgggcaaggccttcaaggtgatgaatgagctgcggagcaagcagctgctgtgtgatgtgatgattgtggctgaagatgtggagattgaggcccaccgggtggtgctggccgcctgcagcccctacttctgtgccatgttcaccggggacatgtctgagagcaaggccaagaagattgagatcaaggatgtggatggccagaccctgagcaagctgattgactacatctacacagctgagattgaggtgacagaggagaatgtgcaggtgctgctgcctgctgccagcctgctgcagctgatggatgtgcggcagaactgctgtgacttcctgcagagccagctgcaccccaccaactgcctgggcatccgggcctttgctgatgtgcacacctgcacagacctgctgcagcaggccaatgcctatgcagagcagcacttccctgaggtgatgctgggggaggagttcctgagcctgagcctggaccaggtgtgcagcctcatcagcagtgacaagctgactgtgtcctctgaggagaaggtgtttgaggccgtcatctcctggatcaactatgagaaggagacccggctggagcacatggccaagctgatggagcacgtgcggctgcccctgctgccccgggactacctggtgcagacagtggaggaggaggccctgatcaagaacaacaacacctgcaaggacttcctgattgaggccatgaagtaccacctgctgcccctggaccagaggctgctgatcaagaaccccaggaccaagcccaggacccctgtgtccctgcccaaggtgatgattgtggtgggcggccaggcccccaaggccatccgctctgtggagtgctatgactttgaggaggaccgctgggaccagattgctgagctgcccagccgccgctgccgggccggcgtggtgttcatggccggccacgtgtatgctgtgggcggcttcaacggcagcctgcgggtgaggacagtggatgtgtatgatggagtgaaggaccagtggaccagcatcgcctccatgcaggagaggaggagcaccctgggcgctgctgtgctgaatgacctgctgtatgctgtgggcggctttgatggcagcacaggcctggcctctgtggaggcctacagctacaagaccaatgagtggttctttgtggcccccatgaacacccggcgcagctctgtgggcgtgggcgtggtggagggcaagctgtatgctgtgggcggctatgatggagccagccggcagtgcctgagcacagtggagcagtacaacccagccaccaatgagtggatctacgtggccgacatgagcaccaggagaagtggagctggggtgggcgtgctgagcggccagctgtatgccactggaggccatgatggccccctggtgaggaagtctgtggaggtgtatgaccccggcaccaacacctggaagcaggtggccgacatgaacatgtgcagaagaaatgctggggtgtgtgctgtgaatggcctgctgtatgtggtgggcggagatgatggcagctgcaacctggcctctgtggagtactacaaccctgtgacagacaagtggaccctgctgcccaccaacatgagcacaggccgctcctatgctggggtggccgtcatccacaagagcctgtag

SEQ ID NO: 156812 - DNA, 906 bp, synthetic construct
  misc_feature 1..906: note = Description of Artificial Sequence: Synthetic coding sequence
  source 1..906: mol_type = other DNA
atggagggggagagcgtgaagctgagcagccagaccctcatccaggccggagatgatgagaagaaccagaggaccatcaccgtgaacccagcccacatgggcaaggccttcaaggtgatgaatgagctgcggagcaagcagctgctgtgtgatgtgatgattgtggctgaagatgtggagattgaggcccaccgggtggtgctggccgcctgcagcccctacttctgtgccatgttcaccggggacatgtctgagagcaaggccaagaagattgagatcaaggatgtggatggccagaccctgagcaagctgattgactacatctacacagctgagattgaggtgacagaggagaatgtgcaggtgctgctgcctgctgccagcctgctgcagctgatggatgtgcggcagaactgctgtgacttcctgcagagccagctgcaccccaccaactgcctgggcatccgggcctttgctgatgtgcacacctgcacagacctgctgcagcaggccaatgcctatgcagagcagcacttccctgaggtgatgctgggggaggagttcctgagcctgagcctggaccaggtgtgcagcctcatcagcagtgacaagctgactgtgtcctctgaggagaaggtgtttgaggccgtcatctcctggatcaactatgagaaggagacccggctggagcacatggccaagctgatggagcacgtgcggctgcccctgctgccccgggactacctggtgcagacagtggaggaggaggccctgatcaagaacaacaacacctgcaaggacttcctgattgaggccatgaagtaccacctgctgcccctggaccagaggctgctgatcaagaaccccaggaccaagcccaggacccctgtgtccctgcccaagtag

SEQ ID NO: 156813 - DNA, 1518 bp, synthetic construct
  misc_feature 1..1518: note = Description of Artificial Sequence: Synthetic coding sequence
  source 1..1518: mol_type = other DNA
atgtctgagagcaaggccaagaagattgagatcaaggatgtggatggccagaccctgagcaagctgattgactacatctacacagctgagattgaggtgacagaggagaatgtgcaggtgctgctgcctgctgccagcctgctgcagctgatggatgtgcggcagaactgctgtgacttcctgcagagccagctgcaccccaccaactgcctgggcatccgggcctttgctgatgtgcacacctgcacagacctgctgcagcaggccaatgcctatgcagagcagcacttccctgaggtgatgctgggggaggagttcctgagcctgagcctggaccaggtgtgcagcctcatcagcagtgacaagctgactgtgtcctctgaggagaaggtgtttgaggccgtcatctcctggatcaactatgagaaggagacccggctggagcacatggccaagctgatggagcacgtgcggctgcccctgctgccccgggactacctggtgcagacagtggaggaggaggccctgatcaagaacaacaacacctgcaaggacttcctgattgaggccatgaagtaccacctgctgcccctggaccagaggctgctgatcaagaaccccaggaccaagcccaggacccctgtgtccctgcccaaggtgatgattgtggtgggcggccaggcccccaaggccatccgctctgtggagtgctatgactttgaggaggaccgctgggaccagattgctgagctgcccagccgccgctgccgggccggcgtggtgttcatggccggccacgtgtatgctgtgggcggcttcaacggcagcctgcgggtgaggacagtggatgtgtatgatggagtgaaggaccagtggaccagcatcgcctccatgcaggagaggaggagcaccctgggcgctgctgtgctgaatgacctgctgtatgctgtgggcggctttgatggcagcacaggcctggcctctgtggaggcctacagctacaagaccaatgagtggttctttgtggcccccatgaacacccggcgcagctctgtgggcgtgggcgtggtggagggcaagctgtatgctgtgggcggctatgatggagccagccggcagtgcctgagcacagtggagcagtacaacccagccaccaatgagtggatctacgtggccgacatgagcaccaggagaagtggagctggggtgggcgtgctgagcggccagctgtatgccactggaggccatgatggccccctggtgaggaagtctgtggaggtgtatgaccccggcaccaacacctggaagcaggtggccgacatgaacatgtgcagaagaaatgctggggtgtgtgctgtgaatggcctgctgtatgtggtgggcggagatgatggcagctgcaacctggcctctgtggagtactacaaccctgtgacagacaagtggaccctgctgcccaccaacatgagcacaggccgctcctatgctggggtggccgtcatccacaagagcctgtag

SEQ ID NO: 156814 - DNA, 603 bp, synthetic construct
  misc_feature 1..603: note = Description of Artificial Sequence: Synthetic coding sequence
  source 1..603: mol_type = other DNA
atgagccgctgctgcagccggcagcctgcctgctgcagctcctggatgtttggaagaacagctgtgaccagctgcagcctgagctgcatcccccccatcgcctgggcctctgtgcacctgcagatgtacaccccagccctgaccttctgcagccggcccatgcccacccagcacttccctgaggtgatgctgggggaggagttcctgagcctgagcctggaccaggtgtgcagcctcatcagcagtgacaagctgactgtgtcctctgaggagaaggtgtttgaggccgtcatctcctggatcaactatgagaaggagacccggctggagcacatggccaagctgatggagcacgtgcggctgcccctgctgccccgggactacctggtgcagacagtggaggaggaggccctgatcaagaacaacaacacctgcaaggacttcctgattgaggccatgaagtaccacctgctgcccctggaccagaggctgctgatcaagaaccccaggaccaagcccaggacccctgtgtccctgcccaagggcctggagtgcctggccgacagctgcaccccccaggtgggcatgatgggcctgtggtag

SEQ ID NO: 156815 - DNA, 1668 bp, synthetic construct
  misc_feature 1..1668: note = Description of Artificial Sequence: Synthetic coding sequence
  source 1..1668: mol_type = other DNA
atgggcaaggccttcaaggtgatgaatgagctgcggagcaagcagctgctgtgtgatgtgatgattgtggctgaagatgtggagattgaggcccaccgggtggtgctggccgcctgcagcccctacttctgtgccatgttcaccggggacatgtctgagagcaaggccaagaagattgagatcaaggatgtggatggccagaccctgagcaagctgattgactacatctacacagctgagattgaggtgacagaggagaatgtgcaggtgctgctgcctgctgccagcctgctgcagctgatggatgtgcggcagaactgctgtgacttcctgcagagccagctgcaccccaccaactgcctgggcatccgggcctttgctgatgtgcacacctgcacagacctgctgcagcaggccaatgcctatgcagagcagcacttccctgaggtgatgctgggggaggagttcctgagcctgagcctggaccaggtgtgcagcctcatcagcagtgacaagctgactgtgtcctctgaggagaaggtgtttgaggccgtcatctcctggatcaactatgagaaggagacccggctggagcacatggccaagctgatggagcacgtgcggctgcccctgctgccccgggactacctggtgcagacagtggaggaggaggccctgatcaagaacaacaacacctgcaaggacttcctgattgaggccatgaagtaccacctgctgcccctggaccagaggctgctgatcaagaaccccaggaccaagcccaggacccctgtgtccctgcccaaggtgatgattgtggtgggcggccaggcccccaaggccatccgctctgtggagtgctatgactttgaggaggaccgctgggaccagattgctgagctgcccagccgccgctgccgggccggcgtggtgttcatggccggccacgtgtatgctgtgggcggcttcaacggcagcctgcgggtgaggacagtggatgtgtatgatggagtgaaggaccagtggaccagcatcgcctccatgcaggagaggaggagcaccctgggcgctgctgtgctgaatgacctgctgtatgctgtgggcggctttgatggcagcacaggcctggcctctgtggaggcctacagctacaagaccaatgagtggttctttgtggcccccatgaacacccggcgcagctctgtgggcgtgggcgtggtggagggcaagctgtatgctgtgggcggctatgatggagccagccggcagtgcctgagcacagtggagcagtacaacccagccaccaatgagtggatctacgtggccgacatgagcaccaggagaagtggagctggggtgggcgtgctgagcggccagctgtatgccactggaggccatgatggccccctggtgaggaagtctgtggaggtgtatgaccccggcaccaacacctggaagcaggtggccgacatgaacatgtgcagaagaaatgctggggtgtgtgctgtgaatggcctgctgtatgtggtgggcggagatgatggcagctgcaacctggcctctgtggagtactacaaccctgtgacagacaagtggaccctgctgcccaccaacatgagcacaggccgctcctatgctggggtggccgtcatccacaagagcctgtag

SEQ ID NO: 156816 - DNA, 1905 bp, synthetic construct
  misc_feature 1..1905: note = Description of Artificial Sequence: Synthetic coding sequence
  source 1..1905: mol_type = other DNA
atggcccccaagaagaagatcgtgaagaagaacaagggggacatcaatgagatgaccatcatcgtggaggacagccccctgaacaagctgaatgccctgaatggcctgctggagggcggcaatggcctgagctgcatcagcagcgagctgacagatgccagctatggccccaacctgctggagggcctgagcaagatgaggcaggagaacttcctgtgtgacctggtgattggcaccaagaccaagagctttgatgtgcacaagtctgtgatggccagctgcagcgagtacttctacaacatcctgaagaaggaccccagcatccagagggtggacctgaatgacatcagccccctgggcctggccaccgtgattgcctatgcctacaccgggaagctgaccctgagcctgtacaccatcggcagcatcatctctgctgctgtgtacctgcagatccacaccctggtgaagatgtgcagcgacttcctgatccgggagatgtctgtggagaactgcatgtatgtggtgaacattgctgagacctacagcctgaagaatgccaaggccgccgcccagaagttcatccgggacaacttcctggagtttgctgagagtgaccagttcatgaagctgacctttgagcagatcaatgagctgctgattgatgatgacctgcagctgcccagcgagatcgtggccttccagatcgccatgaagtggctggagtttgaccagaagagggtgaagtatgctgctgacctgctgagcaacatccgcttcggcaccatcagcgcccaggacctggtgaactacgtgcagagcgtgcccaggatgatgcaggatgctgactgccaccggctgctggtggatgccatgaactaccacctgctgccctaccaccagaacaccctgcagagcaggaggacccgcatccggggcggctgccgggtgctggtgacagtgggcggccggcccggcctgacagagaagagcctgagccgggacatcctgtacagagatcctgaaaatggctggagcaagctgacagagatgcctgccaagagcttcaaccagtgtgtggccgtgatggatggcttcctgtatgtggccggaggagaggaccagaatgatgccaggaaccaggccaagcatgctgtgagcaacttctgccgctatgacccccgcttcaacacctggatccacctggcctccatgaaccagaagaggacccacttcagcctgtctgtgttcaacggcctggtgtatgctgctgggggcagaaatgctgagggcagcctggccagcctggagtgctacgtgcccagcaccaaccagtggcagcccaagacccccctggaggtggcccgctgctgccacgccagcgctgtggctgatggccgggtgctggtgactggaggctacatcgccaatgcctacagccgctctgtgtgtgcctatgaccctgccagtgacagctggcaggagctgcccaacctgagcaccccccggggctggcactgtgctgtgaccctgagtgacagagtgtatgtgatgggcggcagccagctgggccccagaggagagcgggtggatgtgctgactgtggagtgctacagccctgccaccggccagtggagctatgctgcccccctgcaggtgggcgtgtccacagctggggtgtctgccctgcacggccgggcctacctggtgggcggctggaatgaaggagagaagaagtacaagaagtgcatccagtgcttcagccctgagctgaatgagtggacagaagatgatgagctgcctgaggccaccgtgggcgtgtcctgctgcaccctgtccatgcccaacaacgtgacccgggagagccgggccagctctgtgtcctctgtgcctgtgtccatctag

SEQ ID NO: 156817 - DNA, 1905 bp, synthetic construct; identical to SEQ ID NO: 156816
  misc_feature 1..1905: note = Description of Artificial Sequence: Synthetic coding sequence
  source 1..1905: mol_type = other DNA

SEQ ID NO: 156818 - DNA, 2313 bp, synthetic construct
  misc_feature 1..2313: note = Description of Artificial Sequence: Synthetic coding sequence
  source 1..2313: mol_type = other DNA
atgaatgtcatctacttccccctgcacatctttgtggtgtacagccgggcctacaccagcctggtgctggtgggctgcaccaacctgtgtgctgtgctgtttgcccgctgcctggatgaccacctggtgtccctgaggatgagcggcagcaggaaggagtttgatgtgaagcagatcctgaagatccgctggcgctggtttggccaccaggccagcagccccaacagcacagtggacagccagcagggcgagttctggaacagaggccagacaggagccaacggcggcaggaagttcctggacccctgcagcctgcagctgcccctggccagcatcggctacagaagaagcagccagctggacttccagaacagccccagctggcccatggccagcaccagcgaggtgcctgcctttgagttcaccgctgaggactgtggcggggcccactggctggacaggcctgaggtggatgatggcaccagcgaggaggagaatgaaagtgacagcagcagctgcaggaccagcaacagcagccagaccctgagcagctgccacaccatggagccctgcaccagtgatgagttcttccaggccctgaaccacgccgagcagaccttcaagaagatggagaactacctgcggcacaagcagctgtgtgatgtgatcctggtggccggggaccggcgcatcccagcccaccggctggtgctgagctctgtgtctgactactttgctgccatgttcaccaatgatgtgcgggaggcccggcaggaggagatcaagatggagggcgtggagcccaacagcctgtggagcctcatccagtatgcctacacaggccgcctggagctgaaggaggacaacattgaatgtctgctgagcacagcctgcctgctgcagctgagccaggtggtggaggcctgctgcaagttcctgatgaagcagctgcaccccagcaactgcctgggcatccgcagctttgctgatgcccagggctgcacagacctgcacaaggtggcccacaactacaccatggagcacttcatggaggtgatccggaaccaggagtttgtgctgctgcctgccagcgagatcgccaagctgctggccagtgatgacatgaacatccccaatgaggagaccatcctgaatgccctgctgacctgggtgagacatgacctggagcagaggaggaaggacctgagcaagctgctggcctacatccggctgcccctgctggccccccagttcctggccgacatggagaacaacgtgctcttcagagatgacatcgagtgccagaagctgatcatggaggccatgaagtaccacctgctgcctgagcggcggcccatgctgcagagccccaggaccaagcccaggaagagcacagtgggcaccctgtttgctgtgggcggcatggacagcaccaagggggccaccagcattgagaagtatgacctgcggaccaacatgtggacccctgtggccaacatgaatggaagaaggctgcagtttggagtggccgtgctggatgacaagctgtatgtggtgggcggcagagatggcctgaagaccctgaacacagtggagtgctacaaccccaagaccaagacctggagcgtgatgccacccatgagcacccaccgccacggcctgggcgtggccgtgctggagggccccatgtatgctgtgggcggccatgatggctggagctacctgaacacagtggagcgctgggacccccaggcccggcagtggaactttgtggccaccatgagcacccccaggagcacagtgggcgtggccgtgctgagcggcaagctgtatgctgtgggcggcagagatggcagcagctgcctgaagtctgtggagtgctttgacccccacaccaacaagtggaccctgtgtgcccagatgagcaagaggcggggcggcgtgggcgtgaccacctggaatggcctgctgtatgccatcggcggccatgatgccccagccagcaacctgaccagccggctgagtgactgtgtggagagatatgaccccaagacagacatgtggacagctgtggcctccatgagcatcagcagagatgctgtgggcgtgtgcctgctgggggacaagctgtatgctgtgggcggctatgatggccaggcctacctgaacacagtggaggcctatgacccccagaccaatgagtggacccaggtgttcagccacacctttgaggacagcaaggaccacctggtggccatcaagcagaccatctggaggcagaacagcctgtctgaggagttccgcagccactag

SEQ ID NO: 156819 - DNA, 2274 bp, synthetic construct
  misc_feature 1..2274: note = Description of Artificial Sequence: Synthetic coding sequence
  source 1..2274: mol_type = other DNA
atgaatgtcatctacttccccctgcacatctttgtggtgtacagccgggcctacaccagcctggtgctggtgggctgcaccaacctgtgtgctgtgctgtttgcccgctgcctggatgaccacctggtgtccctgaggatgagcggcagcaggaaggagtttgatgtgaagcagatcctgaagatccgctggcgctggtttggccaccaggccagcagccccaacagcacagtggacagccagcagggcgagttctggaacagaggccagacaggagccaacggcggcaggaagttcctggacccctgcagcctgcagctgcccctggccagcatcggctacagaagaagcagccagctggacttccagaacagccccagctggcccatggccagcaccagcgaggtgcctgcctttgagttcaccgctgaggactgtggcggggcccactggctggacaggcctgaggtggatgatggcaccagcgaggaggagaatgaaagtgacagcagcagctgcaggaccagcaacagcagccagaccctgagcagctgccacaccatggagccctgcaccagtgatgagttcttccaggccctgaaccacgccgagcagaccttcaagaagatggagaactacctgcggcacaagcagctgtgtgatgtgatcctggtggccggggaccggcgcatcccagcccaccggctggtgctgagctctgtgtctgactactttgctgccatgttcaccaatgatgtgcgggaggcccggcaggaggagatcaagatggagggcgtggagcccaacagcctgtggagcctcatccagtatgcctacacaggccgcctggagctgaaggaggacaacattgaatgtctgctgagcacagcctgcctgctgcagctgagccaggtggtggaggcctgctgcaagttcctgatgaagcagctgcaccccagcaactgcctgggcatccgcagctttgctgatgcccagggctgcacagacctgcacaaggtggcccacaactacaccatggagcacttcatggaggtgatccggaaccaggagtttgtgctgctgcctgccagcgagatcgccaagctgctggccagtgatgacatgaacatccccaatgaggagaccatcctgaatgccctgctgacctgggtgagacatgacctggagcagaggaggaaggacctgagcaagctgctggcctacatccggctgcccctgctggccccccagttcctggccgacatggagaacaacgtgctcttcagagatgacatcgagtgccagaagctgatcatggaggccatgaagtaccacctgctgcctgagcggcggcccatgctgcagagccccaggaccaagcccaggaagagcacagtgggcaccctgtttgctgtgggcggcatggacagcaccaagggggccaccagcattgagaagtatgacctgcggaccaacatgtggacccctgtggccaacatgaatggaagaaggctgcagtttggagtggccgtgctggatgacaagctgtatgtggtgggcggcagagatggcctgaagaccctgaacacagtggagtgctacaaccccaagaccaagacctggagcgtgatgccacccatgagcacccaccgccacggcctgggcgtggccgtgctggagggccccatgtatgctgtgggcggccatgatggctggagctacctgaacacagtggagcgctgggacccccaggcccggcagtggaactttgtggccaccatgagcacccccaggagcacagtgggcgtggccgtgctgagcggcaagctgtatgctgtgggcggcagagatggcagcagctgcctgaagtctgtggagtgctttgacccccacaccaacaagtggaccctgtgtgcccagatgagcaagaggcggggcggcgtgggcgtgaccacctggaatggcctgctgtatgccatcggcggccatgatgccccagccagcaacctgaccagccggctgagtgactgtgtggagagatatgaccccaagacagacatgtggacagctgtggcctccatgagcatcagcagagatgctgtgggcgtgtgcctgctgggggacaagctgtatgctgtgggcggctatgatggccaggcctacctgaacacagtggaggcctatgacccccagaccaatgagtggacccaggtgtggcacagctgcttcatcatcaccctgaccctcttcctgctgaagcagttcctgtggtag

SEQ ID NO: 156820 - DNA, 2268 bp, synthetic construct
  misc_feature 1..2268: note = Description of Artificial Sequence: Synthetic coding sequence
  source 1..2268: mol_type = other DNA
atgaatgtcatctacttccccctgcacatctttgtggtgtacagccgggcctacaccagcctggtgctggtgggctgcaccaacctgtgtgctgtgctgtttgcccgctgcctggatgaccacctggtgtccctgaggatgagcggcagcaggaaggagtttgatgtgaagcagatcctgaagatccgctggcgctggtttggccaccaggccagcagccccaacagcacagtggacagccagcagggcgagttctggaacagaggccagacaggagccaacggcggcaggaagttcctggacccctgcagcctgcagctgcccctggccagcatcggctacagaagaagcagccagctggacttccagaacagccccagctggcccatggccagcaccagcgaggtgcctgcctttgagttcaccgctgaggactgtggcggggcccactggctggacaggcctgaggtggatgatggcaccagcgaggaggagaatgaaagtgacagcagcagctgcaggaccagcaacagcagccagaccctgagcagctgccacaccatggagccctgcaccagtgatgagttcttccaggccctgaaccacgccgagcagaccttcaagaagatggagaactacctgcggcacaagcagctgtgtgatgtgatcctggtggccggggaccggcgcatcccagcccaccggctggtgctgagctctgtgtctgactactttgctgccatgttcaccaatgatgtgcgggaggcccggcaggaggagatcaagatggagggcgtggagcccaacagcctgtggagcctcatccagtatgcctacacaggccgcctggagctgaaggaggacaacattgaatgtctgctgagcacagcctgcctgctgcagctgagccaggtggtggaggcctgctgcaagttcctgatgaagcagctgcaccccagcaactgcctgggcatccgcagctttgctgatgcccagggctgcacagacctgcacaaggtggcccacaactacaccatggagcacttcatggaggtgatccggaaccaggagtttgtgctgctgcctgccagcgagatcgccaagctgctggccagtgatgacatgaacatccccaatgaggagaccatcctgaatgccctgctgacctgggtgagacatgacctggagcagaggaggaaggacctgagcaagctgctggcctacatccggctgcccctgctggccccccagttcctggccgacatggagaacaacgtgctcttcagagatgacatcgagtgccagaagctgatcatggaggccatgaagtaccacctgctgcctgagcggcggcccatgctgcagagccccaggaccaagcccaggaagagcacagtgggcaccctgtttgctgtgggcggcatggacagcaccaagggggccaccagcattgagaagtatgacctgcggaccaacatgtggacccctgtggccaacatgaatggaagaaggctgcagtttggagtggccgtgctggatgacaagctgtatgtggtgggcggcagagatggcctgaagaccctgaacacagtggagtgctacaaccccaagaccaagacctggagcgtgatgccacccatgagcacccaccgccacggcctgggcgtggccgtgctggagggccccatgtatgctgtgggcggccatgatggctggagctacctgaacacagtggagcgctgggacccccaggcccggcagtggaactttgtggccaccatgagcacccccaggagcacagtgggcgtggccgtgctgagcggcaagctgtatgctgtgggcggcagagatggcagcagctgcctgaagtctgtggagtgctttgacccccacaccaacaagtggaccctgtgtgcccagatgagcaagaggcggggcggcgtgggcgtgaccacctggaatggcctgctgtatgccatcggcggccatgatgccccagccagcaacctgaccagccggctgagtgactgtgtggagagatatgaccccaagacagacatgtggacagctgtggcctccatgagcatcagcagagatgctgtgggcgtgtgcctgctgggggacaagctgtatgctgtgggcggctatgatggccaggcctacctgaacacagtggaggcctatgacccccagaccaatgagtggacccaggtggcccccctgtgcctgggccgggccggggcctgtgtggtgacagtgaagctgtag

SEQ ID NO: 156821 - DNA, 849 bp, synthetic construct
  misc_feature 1..849: note = Description of Artificial Sequence: Synthetic coding sequence
  source 1..849: mol_type = other DNA
tgaagaaccaacatgtggacccctgtggccaacatgaatggaagaaggctgcagtttggagtggccgtgctggatgacaagctgtatgtggtgggcggcagagatggcctgaagaccctgaacacagtggagtgctacaaccccaagaccaagacctggagcgtgatgccacccatgagcacccaccgccacggcctgggcgtggccgtgctggagggccccatgtatgctgtgggcggccatgatggctggagctacctgaacacagtggagcgctgggacccccaggcccggcagtggaactttgtggccaccatgagcacccccaggagcacagtgggcgtggccgtgctgagcggcaagctgtatgctgtgggcggcagagatggcagcagctgcctgaagtctgtggagtgctttgacccccacaccaacaagtggaccctgtgtgcccagatgagcaagaggcggggcggcgtgggcgtgaccacctggaatggcctgctgtatgccatcggcggccatgatgccccagccagcaacctgaccagccggctgagtgactgtgtggagagatatgaccccaagacagacatgtggacagctgtggcctccatgagcatcagcagagatgctgtgggcgtgtgcctgctgggggacaagctgtatgctgtgggcggctatgatggccaggcctacctgaacacagtggaggcctatgacccccagaccaatgagtggacccaggtgttcagccacacctttgaggacagcaaggaccacctggtggccatcaagcagaccatctggaggcagaacagcctgtctgaggagttccgcagccactag

SEQ ID NO: 156822 - DNA, 2370 bp, synthetic construct
  misc_feature 1..2370: note = Description of Artificial Sequence: Synthetic coding sequence
  source 1..2370: mol_type = other DNA
atgaggctgcccggccagggcctgggcgcccgggagggccccagcatccccctgagcagccctgccccagccccagccagccctgcccccccagcctggccacccaggcctgctgtgacccacggccgcctgcggagccccacccggcgggcctacaccagcctggtgctggtgggctgcaccaacctgtgtgctgtgctgtttgcccgctgcctggatgaccacctggtgtccctgaggatgagcggcagcaggaaggagtttgatgtgaagcagatcctgaagatccgctggcgctggtttggccaccaggccagcagccccaacagcacagtggacagccagcagggcgagttctggaacagaggccagacaggagccaacggcggcaggaagttcctggacccctgcagcctgcagctgcccctggccagcatcggctacagaagaagcagccagctggacttccagaacagccccagctggcccatggccagcaccagcgaggtgcctgcctttgagttcaccgctgaggactgtggcggggcccactggctggacaggcctgaggtggatgatggcaccagcgaggaggagaatgaaagtgacagcagcagctgcaggaccagcaacagcagccagaccctgagcagctgccacaccatggagccctgcaccagtgatgagttcttccaggccctgaaccacgccgagcagaccttcaagaagatggagaactacctgcggcacaagcagctgtgtgatgtgatcctggtggccggggaccggcgcatcccagcccaccggctggtgctgagctctgtgtctgactactttgctgccatgttcaccaatgatgtgcgggaggcccggcaggaggagatcaagatggagggcgtggagcccaacagcctgtggagcctcatccagtatgcctacacaggccgcctggagctgaaggaggacaacattgaatgtctgctgagcacagcctgcctgctgcagctgagccaggtggtggaggcctgctgcaagttcctgatgaagcagctgcaccccagcaactgcctgggcatccgcagctttgctgatgcccagggctgcacagacctgcacaaggtggcccacaactacaccatggagcacttcatggaggtgatccggaaccaggagtttgtgctgctgcctgccagcgagatcgccaagctgctggccagtgatgacatgaacatccccaatgaggagaccatcctgaatgccctgctgacctgggtgagacatgacctggagcagaggaggaaggacctgagcaagctgctggcctacatccggctgcccctgctggccccccagttcctggccgacatggagaacaacgtgctcttcagagatgacatcgagtgccagaagctgatcatggaggccatgaagtaccacctgctgcctgagcggcggcccatgctgcagagccccaggaccaagcccaggaagagcacagtgggcaccctgtttgctgtgggcggcatggacagcaccaagggggccaccagcattgagaagtatgacctgcggaccaacatgtggacccctgtggccaacatgaatggaagaaggctgcagtttggagtggccgtgctggatgacaagctgtatgtggtgggcggcagagatggcctgaagaccctgaacacagtggagtgctacaaccccaagaccaagacctggagcgtgatgccacccatgagcacccaccgccacggcctgggcgtggccgtgctggagggccccatgtatgctgtgggcggccatgatggctggagctacctgaacacagtggagcgctgggacccccaggcccggcagtggaactttgtggccaccatgagcacccccaggagcacagtgggcgtggccgtgctgagcggcaagctgtatgctgtgggcggcagagatggcagcagctgcctgaagtctgtggagtgctttgacccccacaccaacaagtggaccctgtgtgcccagatgagcaagaggcggggcggcgtgggcgtgaccacctggaatggcctgctgtatgccatcggcggccatgatgccccagccagcaacctgaccagccggctgagtgactgtgtggagagatatgaccccaagacagacatgtggacagctgtggcctccatgagcatcagcagagatgctgtgggcgtgtgcctgctgggggacaagctgtatgctgtgggcggctatgatggccaggcctacctgaacacagtggaggcctatgacccccagaccaatgagtggacccaggtggcccccctgtgcctgggccgggccggggcctgtgtggtgacagtgaagctgtag

SEQ ID NO: 156823 - DNA, 1050 bp, synthetic construct
  misc_feature 1..1050: note = Description of Artificial Sequence: Synthetic coding sequence
  source 1..1050: mol_type = other DNA
aagaagcaccccagcacagtgatggtgccccagttcctggccgacatggagaacaacgtgctcttcagagatgacatcgagtgccagaagctgatcatggaggccatgaagtaccacctgctgcctgagcggcggcccatgctgcagagccccaggaccaagcccaggaagagcacagtgggcaccctgtttgctgtgggcggcatggacagcaccaagggggccaccagcattgagaagtatgacctgcggaccaacatgtggacccctgtggccaacatgaatggaagaaggctgcagtttggagtggccgtgctggatgacaagctgtatgtggtgggcggcagagatggcctgaagaccctgaacacagtggagtgctacaaccccaagaccaagacctggagcgtgatgccacccatgagcacccaccgccacggcctgggcgtggccgtgctggagggccccatgtatgctgtgggcggccatgatggctggagctacctgaacacagtggagcgctgggacccccaggcccggcagtggaactttgtggccaccatgagcacccccaggagcacagtgggcgtggccgtgctgagcggcaagctgtatgctgtgggcggcagagatggcagcagctgcctgaagtctgtggagtgctttgacccccacaccaacaagtggaccctgtgtgcccagatgagcaagaggcggggcggcgtgggcgtgaccacctggaatggcctgctgtatgccatcggcggccatgatgccccagccagcaacctgaccagccggctgagtgactgtgtggagagatatgaccccaagacagacatgtggacagctgtggcctccatgagcatcagcagagatgctgtgggcgtgtgcctgctgggggacaagctgtatgctgtgggcggctatgatggccaggcctacctgaacacagtggaggcctatgacccccagaccaatgagtggacccaggtggcccccctgtgcctgggccgggccggggcctgtgtggtgacagtgaagctgtag

SEQ ID NO: 156824 - DNA, 2130 bp, synthetic construct
  misc_feature 1..2130: note = Description of Artificial Sequence: Synthetic coding sequence
  source 1..2130: mol_type = other DNA
atgagcggcagcaggaaggagtttgatgtgaagcagatcctgaagatccgctggcgctggtttggccaccaggccagcagccccaacagcacagtggacagccagcagggcgagttctggaacagaggccagacaggagccaacggcggcaggaagttcctggacccctgcagcctgcagctgcccctggccagcatcggctacagaagaagcagccagctggacttccagaacagccccagctggcccatggccagcaccagcgaggtgcctgcctttgagttcaccgctgaggactgtggcggggcccactggctggacaggcctgaggtggatgatggcaccagcgaggaggagaatgaaagtgacagcagcagctgcaggaccagcaacagcagccagaccctgagcagctgccacaccatggagccctgcaccagtgatgagttcttccaggccctgaaccacgccgagcagaccttcaagaagatggagaactacctgcggcacaagcagctgtgtgatgtgatcctggtggccggggaccggcgcatcccagcccaccggctggtgctgagctctgtgtctgactactttgctgccatgttcaccaatgatgtgcgggaggcccggcaggaggagatcaagatggagggcgtggagcccaacagcctgtggagcctcatccagtatgcctacacaggccgcctggagctgaaggaggacaacattgaatgtctgctgagcacagcctgcctgctgcagctgagccaggtggtggaggcctgctgcaagttcctgatgaagcagctgcaccccagcaactgcctgggcatccgcagctttgctgatgcccagggctgcacagacctgcacaaggtggcccacaactacaccatggagcacttcatggaggtgatccggaaccaggagtttgtgctgctgcctgccagcgagatcgccaagctgctggccagtgatgacatgaacatccccaatgaggagaccatcctgaatgccctgctgacctgggtgagacatgacctggagcagaggaggaaggacctgagcaagctgctggcctacatccggctgcccctgctggccccccagttcctggccgacatggagaacaacgtgctcttcagagatgacatcgagtgccagaagctgatcatggaggccatgaagtaccacctgctgcctgagcggcggcccatgctgcagagccccaggaccaagcccaggaagagcacagtgggcaccctgtttgctgtgggcggcatggacagcaccaagggggccaccagcattgagaagtatgacctgcggaccaacatgtggacccctgtggccaacatgaatggaagaaggctgcagtttggagtggccgtgctggatgacaagctgtatgtggtgggcggcagagatggcctgaagaccctgaacacagtggagtgctacaaccccaagaccaagacctggagcgtgatgccacccatgagcacccaccgccacggcctgggcgtggccgtgctggagggccccatgtatgctgtgggcggccatgatggctggagctacctgaacacagtggagcgctgggacccccaggcccggcagtggaactttgtggccaccatgagcacccccaggagcacagtgggcgtggccgtgctgagcggcaagctgtatgctgtgggcggcagagatggcagcagctgcctgaagtctgtggagtgctttgacccccacaccaacaagtggaccctgtgtgcccagatgagcaagaggcggggcggcgtgggcgtgaccacctggaatggcctgctgtatgccatcggcggccatgatgccccagccagcaacctgaccagccggctgagtgactgtgtggagagatatgaccccaagacagacatgtggacagctgtggcctccatgagcatcagcagagatgctgtgggcgtgtgcctgctgggggacaagctgtatgctgtgggcggctatgatggccaggcctacctgaacacagtggaggcctatgacccccagaccaatgagtggacccaggtggcccccctgtgcctgggccgggccggggcctgtgtggtgacagtgaagctgtag

SEQ ID NO: 156825 - DNA, 2085 bp, synthetic construct
  misc_feature 1..2085: note = Description of Artificial Sequence: Synthetic coding sequence
  source 1..2085: mol_type = other DNA
atgaatgtcatctacttccccctgcacatctttgtggtgtacagccgggcctacaccagcctggtgctggtgggctgcaccaacctgtgtgctgtgctgtttgcccgctgcctggatgaccacctggtgtccctgaggatgagcggcagcaggaaggagtttgatgtgaagcagatcctgaagatccgctggcgctggtttggccaccaggccagcagccccaacagcacagtggacagccagcagggcgagttctggaacagaggccagacaggagccaacggcggcaggaagttcctggacccctgcagcctgcagctgcccctggccagcatcggctacagaagaagcagccagctggacttccagaacagccccagctggcccatggccagcaccagcgaggtgcctgcctttgagttcaccgctgaggactgtggcggggcccactggctggacaggcctgaggtggatgatggcaccagcgaggaggagaatgaaagtgacagcagcagctgccgcctggtgctgagctctgtgtctgactactttgctgccatgttcaccaatgatgtgcgggaggcccggcaggaggagatcaagatggagggcgtggagcccaacagcctgtggagcctcatccagtatgcctacacaggccgcctggagctgaaggaggacaacatcgagtgcctgctgagcacagcctgcctgctgcagctgagccaggtggtggaggcctgctgcaagttcctgatgaagcagctgcaccccagcaactgcctgggcatccgcagctttgctgatgcccagggctgcacagacctgcacaaggtggcccacaactacaccatggagcacttcatggaggtgatccggaaccaggagtttgtgctgctgcctgccagcgagatcgccaagctgctggccagtgatgacatgaacatccccaatgaggagaccatcctgaatgccctgctgacctgggtgagacatgacctggagcagaggaggaaggacctgagcaagctgctggcctacatccggctgcccctgctggccccccagttcctggccgacatggagaacaacgtgctcttcagagatgacatcgagtgccagaagctgatcatggaggccatgaagtaccacctgctgcctgagcggcggcccatgctgcagagccccaggaccaagcccaggaagagcacagtgggcaccctgtttgctgtgggcggcatggacagcaccaagggggccaccagcattgagaagtatgacctgcggaccaacatgtggacccctgtggccaacatgaatggccggcggctgcagtttggagtggccgtgctggatgacaagctgtatgtggtgggcggcagagatggcctgaagaccctgaacacagtggagtgctacaaccccaagaccaagacctggagcgtgatgccacccatgagcacccacagacatggcctgggcgtggccgtgctggagggccccatgtatgctgtgggcggccatgatggctggagctacctgaacacagtggagcgctgggacccccaggcccggcagtggaactttgtggccaccatgagcacccccaggagcacagtgggcgtggccgtgctgagcggcaagctgtatgctgtgggcggcagagatggcagcagctgcctgaagtctgtggagtgctttgacccccacaccaacaagtggaccctgtgtgcccagatgagcaagagaagaggaggagtgggcgtgaccacctggaatggcctgctgtatgccatcggcggccatgatgccccagccagcaacctgaccagccggctgagtgactgtgtggagagatatgaccccaagacagacatgtggacagctgtggcctccatgagcatcagcagagatgctgtgggcgtgtgcctgctgggggacaagctgtatgctgtgggcggctatgatggccaggcctacctgaacacagtggaggcctatgacccccagaccaatgagtggacccaggtggcccccctgtgcctgggccgggccggggcctgtgtggtgacagtgaagctgtag

SEQ ID NO: 156826 - DNA, 1707 bp, synthetic construct
  misc_feature 1..1707: note = Description of Artificial Sequence: Synthetic coding sequence
  source 1..1707: mol_type = other DNA
atggagccctgcaccagtgatgagttcttccaggccctgaaccacgccgagcagaccttcaagaagatggagaactacctgcggcacaagcagctgtgtgatgtgatcctggtggccggggaccggcgcatcccagcccaccggctggtgctgagctctgtgtctgactactttgctgccatgttcaccaatgatgtgcgggaggcccggcaggaggagatcaagatggagggcgtggagcccaacagcctgtggagcctcatccagtatgcctacacaggccgcctggagctgaaggaggacaacatcgagtgcctgctgagcacagcctgcctgctgcagctgagccaggtggtggaggcctgctgcaagttcctgatgaagcagctgcaccccagcaactgcctgggcatccgcagctttgctgatgcccagggctgcacagacctgcacaaggtggcccacaactacaccatggagcacttcatggaggtgatccggaaccaggagtttgtgctgctgcctgccagcgagatcgccaagctgctggccagtgatgacatgaacatccccaatgaggagaccatcctgaatgccctgctgacctgggtgagacatgacctggagcagaggaggaaggacctgagcaagctgctggcctacatccggctgcccctgctggccccccagttcctggccgacatggagaacaacgtgctcttcagagatgacatcgagtgccagaagctgatcatggaggccatgaagtaccacctgctgcctgagcggcggcccatgctgcagagccccaggaccaagcccaggaagagcacagtgggcaccctgtttgctgtgggcggcatggacagcaccaagggggccaccagcattgagaagtatgacctgcggaccaacatgtggacccctgtggccaacatgaatggccggcggctgcagtttggagtggccgtgctggatgacaagctgtatgtggtgggcggcagagatggcctgaagaccctgaacacagtggagtgctacaaccccaagaccaagacctggagcgtgatgccacccatgagcacccacagacatggcctgggcgtggccgtgctggagggccccatgtatgctgtgggcggccatgatggctggagctacctgaacacagtggagcgctgggacccccaggcccggcagtggaactttgtggccaccatgagcacccccaggagcacagtgggcgtggccgtgctgagcggcaagctgtatgctgtgggcggcagagatggcagcagctgcctgaagtctgtggagtgctttgacccccacaccaacaagtggaccctgtgtgcccagatgagcaagagaagaggaggagtgggcgtgaccacctggaatggcctgctgtatgccatcggcggccatgatgccccagccagcaacctgaccagccggctgagtgactgtgtggagagatatgaccccaagacagacatgtggacagctgtggcctccatgagcatcagcagagatgctgtgggcgtgtgcctgctgggggacaagctgtatgctgtgggcggctatgatggccaggcctacctgaacacagtggaggcctatgacccccagaccaatgagtggacccaggtggcccccctgtgcctgggccgggccggggcctgtgtggtgacagtgaagctgtag

SEQ ID NO: 156827 - DNA, 1866 bp, synthetic construct
  misc_feature 1..1866: note = Description of Artificial Sequence: Synthetic coding sequence
  source 1..1866: mol_type = other DNA
atgctgatggccggccagagaggagcctggaccatgggagatgtggtggagaagagcctggagggccccctggcccccagcacagatgagcccagccagaagacaggagacctggtggagatcctgaatggagagaaggtgaagtttgatgatgctggcctgagcctcatcctgcagaatggcctggagaccctgaggatggagaatgccctgacagatgtgatcctgtgtgtggacatccaggagttcagctgccaccgggtggtgctggccgccgccagcaactacttccgggccatgttctgcaatgacctgaaggagaagtatgagaagaggatcatcatcaagggcgtggatgctgagaccatgcacaccctgctggactacacctacaccagcaaggccctgatcaccaagcagaatgtgcagagggtgctggaggccgccaacctcttccagttcctgaggatggtggatgcctgtgccagcttcctgacagaggccctgaaccctgagaactgtgtgggcatcctgcggctggccgacacccacagcctggacagcctgaagaagcaggtgcagagctacatcatccagaactttgtgcagatcctgaacagcgaggagttcctggacctgcctgtggacaccctgcaccacatcctgaagagtgatgacctgtatgtgacagaggaggcccaggtgtttgagaccgtgatgtcctgggtgcgccacaagcccagcgagcggctgtgcctgctgccctacgtgctggagaatgtgcggctgcccctgctggacccctggtactttgtggagaccgtggaggccgaccccctcatccggcagtgcccagaggtgttccccctgctgcaggaggccaggatgtaccacctgtctggaaatgagatcatcagcgagaggaccaagcccaggatgcatgagttccagagcgaggtgttcatgatcatcggcggctgcaccaaggatgaaagatttgtggccgaggtgacctgcctggaccccctgcggcgcagccggctggaggtggccaagctgcccctgacagagcacgagctggagagcgagaacaagaagtgggtggagtttgcctgtgtgaccctgaagaatgaggtgtacatcagcggcggcaaggagacccagcatgatgtgtggaagtacaacagcagcatcaacaagtggatccagatcgagtacctgaacatcggccgctggaggcacaagatggtggtgctgggcggcaaggtgtatgtgattggaggctttgatggcctgcagaggatcaacaacgtggagacctatgaccccttccacaactgctggagcgaggccgcccccctgctggtgcacgtgagcagctttgctgccaccagccacaagaagaagctgtatgtgattggaggcggccccaacgggaagctggccacagacaagacccagtgctatgaccccagcaccaacaagtggagcctgaaggccgccatgcctgtggaggccaagtgcatcaatgctgtgtccttccgggaccgcatctacgtggtgggcggggccatgagggccctgtatgcctacagccccctggaggacagctggtgcctggtgacccagctgagccatgagcgggccagctgtggcatcgccccctgcaacaaccggctgtacatcactggaggaagagatgagaagaatgaggtgattgccaccgtgctgtgctgggaccctgaggcccagaagctgacagaagaatgtgtgctgccccggggcgtgagccaccacggctctgtgaccatcaggaagagctacacccacatccgccgcatcgtgcctggagctgtgtctgtgtag

SEQ ID NO: 156828 - DNA, 1695 bp, synthetic construct
  misc_feature 1..1695: note = Description of Artificial Sequence: Synthetic coding sequence
  source 1..1695: mol_type = other DNA
atgctgggcggcacagactgcaggaccttcctgaccagccacatcaacctgaagaagaccctgtgtgatgtgatcctgatggtgcaggagaggaagatcccagcccaccgggtggtgctggccgccgccagccacttcttcaacctgatgttcaccaccaacatgctggagagcaagagctttgaggtggagctgaaggatgctgagccagacatcatcgagcagctggtggagtttgcctacacagcccgcatctctgtgaacagcaacaacgtgcagagcctgctggatgctgccaaccagtaccagatcgagcctgtgaagaagatgtgtgtggacttcctgaaggagcaggtggatgccagcaactgcctgggcatctctgtgctggccgagtgcctggactgcccagagctgaaggccacagcagatgacttcatccaccagcacttcacagaggtgtacaagacagatgagttcctgcagctggatgtgaagagggtgacccacctgctgaaccaggacaccctgactgtgcgggcagaggaccaggtgtatgatgctgctgtgcgctggctgaagtatgatgagcccaaccggcagcccttcatggtggacatcctggccaaggtgcgcttccccctcatcagcaagaacttcctgagcaagacagtgcaggccgagcccctcatccaggacaaccctgagtgcctgaagatggtgatcagcggcatgagataccacctgctgagcccagaagatcgggaggagctggtggatggcacccggcccaggaggaagaagcatgactacagaattgccctgtttggaggcagccagccccagagctgccgctacttcaaccccaaggactacagctggacagacatccgctgcccctttgagaagagaagagatgctgcctgtgtgttctgggacaacgtggtgtacatcctgggcggcagccagctgttccccatcaagaggatggactgctacaacgtggtgaaggacagctggtacagcaagctgggcccccccaccccccgggacagcctggccgcctgtgccgctgagggcaagatctacaccagcggcggcagcgaggtgggcaacagcgccctgtacctgtttgaatgttatgacaccaggacagagagctggcacaccaagcccagcatgctgacccagcgctgcagccacggcatggtggaggccaacggcctcatctacgtgtgtggcggcagcctgggcaacaacgtgtctggccgggtgctgaacagctgtgaggtgtatgaccctgccacagagacctggacagagctgtgccccatgattgaggccaggaagaaccacggcctggtgtttgtgaaggacaagatctttgctgtgggcggccagaatggcctgggcggcctggacaacgtggagtactatgacatcaagctgaatgagtggaagatggtgagccccatgccctggaagggcgtgacagtgaagtgtgccgctgtgggcagcatcgtgtatgtgctggccggcttccagggcgtgggccgcctgggccacatcctggagtacaacacagaaacagacaagtgggtggccaacagcaaggtgcgggccttccctgtgaccagctgcctgatctgtgtggtggacacctgtggggccaatgaggagaccctggagacctag

SEQ ID NO: 156829 - DNA, 1761 bp, synthetic construct
  misc_feature 1..1761: note = Description of Artificial Sequence: Synthetic coding sequence
  source 1..1761: mol_type = other DNA
atggccgccagcggcgtggagaagagcagcaagaagaagacagagaagaagctggccgcccgggaggaggccaagctgctggccggcttcatgggcgtgatgaacaacatgaggaagcagaagaccctgtgtgatgtgatcctgatggtgcaggagaggaagatcccagcccaccgggtggtgctggccgccgccagccacttcttcaacctgatgttcaccaccaacatgctggagagcaagagctttgaggtggagctgaaggatgctgagccagacatcatcgagcagctggtggagtttgcctacacagcccgcatctctgtgaacagcaacaacgtgcagagcctgctggatgctgccaaccagtaccagatcgagcctgtgaagaagatgtgtgtggacttcctgaaggagcaggtggatgccagcaactgcctgggcatctctgtgctggccgagtgcctggactgcccagagctgaaggccacagcagatgacttcatccaccagcacttcacagaggtgtacaagacagatgagttcctgcagctggatgtgaagagggtgacccacctgctgaaccaggacaccctgactgtgcgggcagaggaccaggtgtatgatgctgctgtgcgctggctgaagtatgatgagcccaaccggcagcccttcatggtggacatcctggccaaggtgcgcttccccctcatcagcaagaacttcctgagcaagacagtgcaggccgagcccctcatccaggacaaccctgagtgcctgaagatggtgatcagcggcatgagataccacctgctgagcccagaagatcgggaggagctggtggatggcacccggcccaggaggaagaagcatgactacagaattgccctgtttggaggcagccagccccagagctgccgctacttcaaccccaaggactacagctggacagacatccgctgcccctttgagaagagaagagatgctgcctgtgtgttctgggacaacgtggtgtacatcctgggcggcagccagctgttccccatcaagaggatggactgctacaacgtggtgaaggacagctggtacagcaagctgggcccccccaccccccgggacagcctggccgcctgtgccgctgagggcaagatctacaccagcggcggcagcgaggtgggcaacagcgccctgtacctgtttgaatgttatgacaccaggacagagagctggcacaccaagcccagcatgctgacccagcgctgcagccacggcatggtggaggccaacggcctcatctacgtgtgtggcggcagcctgggcaacaacgtgtctggccgggtgctgaacagctgtgaggtgtatgaccctgccacagagacctggacagagctgtgccccatgattgaggccaggaagaaccacggcctggtgtttgtgaaggacaagatctttgctgtgggcggccagaatggcctgggcggcctggacaacgtggagtactatgacatcaagctgaatgagtggaagatggtgagccccatgccctggaagggcgtgacagtgaagtgtgccgctgtgggcagcatcgtgtatgtgctggccggcttccagggcgtgggccgcctgggccacatcctggagtacaacacagaaacagacaagtgggtggccaacagcaaggtgcgggccttccctgtgaccagctgcctgatctgtgtggtggacacctgtggggccaatgaggagaccctggagacctag

SEQ ID NO: 156830 - DNA, 1617 bp, synthetic construct
  misc_feature 1..1617: note = Description of Artificial Sequence: Synthetic coding sequence
  source 1..1617: mol_type = other DNA
atggtgcaggagaggaagatcccagcccaccgggtggtgctggccgccgccagccacttcttcaacctgatgttcaccaccaacatgctggagagcaagagctttgaggtggagctgaaggatgctgagccagacatcatcgagcagctggtggagtttgcctacacagcccgcatctctgtgaacagcaacaacgtgcagagcctgctggatgctgccaaccagtaccagatcgagcctgtgaagaagatgtgtgtggacttcctgaaggagcaggtggatgccagcaactgcctgggcatctctgtgctggccgagtgcctggactgcccagagctgaaggccacagcagatgacttcatccaccagcacttcacagaggtgtacaagacagatgagttcctgcagctggatgtgaagagggtgacccacctgctgaaccaggacaccctgactgtgcgggcagaggaccaggtgtatgatgctgctgtgcgctggctgaagtatgatgagcccaaccggcagcccttcatggtggacatcctggccaaggtgcgcttccccctcatcagcaagaacttcctgagcaagacagtgcaggccgagcccctcatccaggacaaccctgagtgcctgaagatggtgatcagcggcatgagataccacctgctgagcccagaagatcgggaggagctggtggatggcacccggcccaggaggaagaagcatgactacagaattgccctgtttggaggcagccagccccagagctgccgctacttcaaccccaaggactacagctggacagacatccgctgcccctttgagaagagaagagatgctgcctgtgtgttctgggacaacgtggtgtacatcctgggcggcagccagctgttccccatcaagaggatggactgctacaacgtggtgaaggacagctggtacagcaagctgggcccccccaccccccgggacagcctggccgcctgtgccgctgagggcaagatctacaccagcggcggcagcgaggtgggcaacagcgccctgtacctgtttgaatgttatgacaccaggacagagagctggcacaccaagcccagcatgctgacccagcgctgcagccacggcatggtggaggccaacggcctcatctacgtgtgtggcggcagcctgggcaacaacgtgtctggccgggtgctgaacagctgtgaggtgtatgaccctgccacagagacctggacagagctgtgccccatgattgaggccaggaagaaccacggcctggtgtttgtgaaggacaagatctttgctgtgggcggccagaatggcctgggcggcctggacaacgtggagtactatgacatcaagctgaatgagtggaagatggtgagccccatgccctggaagggcgtgacagtgaagtgtgccgctgtgggcagcatcgtgtatgtgctggccggcttccagggcgtgggccgcctgggccacatcctggagtacaacacagaaacagacaagtgggtggccaacagcaaggtgcgggccttccctgtgaccagctgcctgatctgtgtggtggacacctgtggggccaatgaggagaccctggagacctag

SEQ ID NO: 156831 - DNA, 1161 bp, synthetic construct
  misc_feature 1..1161: note = Description of Artificial Sequence: Synthetic coding sequence
  source 1..1161: mol_type = other DNA
atggccgccagcggcgtggagaagagcagcaagaagaagacagagaagaagctggccgcccgggaggaggccaagctgctggccggcttcatgggcgtgatgaacaacatgaggaagcagaagaccctgtgtgatgtgatcctgatggtgcaggagaggaagatcccagcccaccgggtggtgctggccgccgccagccacttcttcaacctgatgttcaccaccaacatgctggagagcaagagctttgaggtggagctgaaggatgctgagccagacatcatcgagcagctgctgcactacaagttcttcaagatgaagaacaggaaggatggccgggtgtctgtgtcctatgccatcctgatccagggcctgaagatctatgagatctacagcaccaacttccctgagcacttcacagaggtgtacaagacagatgagttcctgcagctggatgtgaagagggtgacccacctgctgaaccaggacaccctgactgtgcgggcagaggaccaggtgtatgatgctgctgtgcgctggctgaagtatgatgagcccaaccggcagcccttcatggtggacatcctggccaaggtgcgcttccccctcatcagcaagaacttcctgagcaagacagtgcaggccgagcccctcatccaggacaaccctgagtgcctgaagatggtgatcagcggcatgagataccacctgctgagcccagaagatcgggaggagctggtggatggcacccggcccaggaggaagaagcatgactacagaattgccctgtttggaggcagccagccccagagctgccgctacttcaaccccaaggactacagctggacagacatccgctgcccctttgagaagagaagagatgctgcctgtgtgttctgggacaacgtggtgtacatcctgggcggcagccagctgttccccatcaagaggatggactgctacaacgtggtgaaggacagctggtacagcaagctgggcccccccaccccccgggacagcctggccgcctgtgccgctgagggcaagatctacaccagcggcggcagcgaggtgggcaacagcgccctgtacctgttctgcctgatccctgtgaagttcatgatcctgccccagaagcacggcctgagctgtgtgcagtag

SEQ ID NO: 156832 - DNA, 1284 bp, synthetic construct
  misc_feature 1..1284: note = Description of Artificial Sequence: Synthetic coding sequence
  source 1..1284: mol_type = other DNA
atggccgccagcggcgtggagaagagcagcaagaagaagacagagaagaagctggccgcccgggaggaggccaagctgctggccggcttcatgggcgtgatgaacaacatgaggaagcagaagaccctgtgtgatgtgatcctgatggtgcaggagaggaagatcccagcccaccgggtggtgctggccgccgccagccacttcttcaacctgatgttcaccaccaacatgctggagagcaagaacttcctgagcaagacagtgcaggccgagcccctcatccaggacaacccagaatgtctgaagatggtgatcagcggcatgagataccacctgctgagccctgaggaccgggaggagctggtggatggcacccggcccaggaggaagaagcatgactaccgcatcgccctgtttggaggcagccagccccagagctgccgctacttcaaccccaaggactacagctggacagacatccgctgcccctttgagaagagaagagatgctgcctgtgtgttctgggacaacgtggtgtacatcctgggcggcagccagctgttccccatcaagaggatggactgctacaacgtggtgaaggacagctggtacagcaagctgggcccccccaccccccgggacagcctggccgcctgtgccgctgagggcaagatctacaccagcggcggcagcgaggtgggcaacagcgccctgtacctgtttgagtgctatgacaccaggacagagagctggcacaccaagcccagcatgctgacccagcgctgcagccacggcatggtggaggccaacggcctcatctacgtgtgtggcggcagcctgggcaacaacgtgtctggccgggtgctgaacagctgtgaggtgtatgaccctgccacagagacctggacagagctgtgccccatgattgaggccaggaagaaccacggcctggtgtttgtgaaggacaagatctttgctgtgggcggccagaatggcctgggcggcctggacaacgtggagtactatgacatcaagctgaatgagtggaagatggtgagccccatgccctggaagggcgtgacagtgaagtgtgccgctgtgggcagcatcgtgtatgtgctggccggcttccagggcgtgggccgcctgggccacatcctggagtacaacacagaaacagacaagtgggtggccaacagcaaggtgcgggccttccctgtgaccagctgcctgatctgtgtggtggacacctgtggggccaatgaggagaccctggagacctag

SEQ ID NO: 156833 - DNA, 1533 bp, synthetic construct
  misc_feature 1..1533: note = Description of Artificial Sequence: Synthetic coding sequence
  source 1..1533: mol_type = other DNA
atgctggagagcaagagctttgaggtggagctgaaggatgctgagccagacatcatcgagcagctggtggagtttgcctacacagcccgcatctctgtgaacagcaacaacgtgcagagcctgctggatgctgccaaccagtaccagatcgagcctgtgaagaagatgtgtgtggacttcctgaaggagcaggtggatgccagcaactgcctgggcatctctgtgctggccgagtgcctggactgcccagagctgaaggccacagcagatgacttcatccaccagcacttcacagaggtgtacaagacagatgagttcctgcagctggatgtgaagagggtgacccacctgctgaaccaggacaccctgactgtgcgggcagaggaccaggtgtatgatgctgctgtgcgctggctgaagtatgatgagcccaaccggcagcccttcatggtggacatcctggccaaggtgcgcttccccctcatcagcaagaacttcctgagcaagacagtgcaggccgagcccctcatccaggacaaccctgagtgcctgaagatggtgatcagcggcatgagataccacctgctgagcccagaagatcgggaggagctggtggatggcacccggcccaggaggaagaagcatgactacagaattgccctgtttggaggcagccagccccagagctgccgctacttcaaccccaaggactacagctggacagacatccgctgcccctttgagaagagaagagatgctgcctgtgtgttctgggacaacgtggtgtacatcctgggcggcagccagctgttccccatcaagaggatggactgctacaacgtggtgaaggacagctggtacagcaagctgggcccccccaccccccgggacagcctggccgcctgtgccgctgagggcaagatctacaccagcggcggcagcgaggtgggcaacagcgccctgtacctgtttgaatgttatgacaccaggacagagagctggcacaccaagcccagcatgctgacccagcgctgcagccacggcatggtggaggccaacggcctcatctacgtgtgtggcggcagcctgggcaacaacgtgtctggccgggtgctgaacagctgtgaggtgtatgaccctgccacagagacctggacagagctgtgccccatgattgaggccaggaagaaccacggcctggtgtttgtgaaggacaagatctttgctgtgggcggccagaatggcctgggcggcctggacaacgtggagtactatgacatcaagctgaatgagtggaagatggtgagccccatgccctggaagggcgtgacagtgaagtgtgccgctgtgggcagcatcgtgtatgtgctggccggcttccagggcgtgggccgcctgggccacatcctggagtacaacacagaaacagacaagtgggtggccaacagcaaggtgcgggccttccctgtgaccagctgcctgatctgtgtggtggacacctgtggggccaatgaggagaccctggagacctag

SEQ ID NO: 156834 - DNA, 1086 bp, synthetic construct
  misc_feature 1..1086: note = Description of Artificial Sequence: Synthetic coding sequence
  source 1..1086: mol_type = other DNA
atggtggacatcctggccaaggtgcgcttccccctcatcagcaagaacttcctgagcaagacagtgcaggccgagcccctcatccaggacaacccagaatgtctgaagatggtgatcagcggcatgagataccacctgctgagccctgaggaccgggaggagctggtggatggcacccggcccaggaggaagaagcatgactaccgcatcgccctgtttggaggcagccagccccagagctgccgctacttcaaccccaaggactacagctggacagacatccgctgcccctttgagaagagaagagatgctgcctgtgtgttctgggacaacgtggtgtacatcctgggcggcagccagctgttccccatcaagaggatggactgctacaacgtggtgaaggacagctggtacagcaagctgggcccccccaccccccgggacagcctggccgcctgtgccgctgagggcaagatctacaccagcggcggcagcgaggtgggcaacagcgccctgtacctgtttgagtgctatgacaccaggacagagagctggcacaccaagcccagcatgctgacccagcgctgcagccacggcatggtggaggccaacggcctcatctacgtgtgtggcggcagcctgggcaacaacgtgtctggccgggtgctgaacagctgtgaggtgtatgaccctgccacagagacctggacagagctgtgccccatgattgaggccaggaagaaccacggcctggtgtttgtgaaggacaagatctttgctgtgggcggccagaatggcctgggcggcctggacaacgtggagtactatgacatcaagctgaatgagtggaagatggtgagccccatgccctggaagggcgtgacagtgaagtgtgccgctgtgggcagcatcgtgtatgtgctggccggcttccagggcgtgggccgcctgggccacatcctggagtacaacacagaaacagacaagtgggtggccaacagcaaggtgcgggccttccctgtgaccagctgcctgatctgtgtggtggacacctgtggggccaatgaggagaccctggagacctag

SEQ ID NO: 156835 - DNA, 1695 bp, synthetic construct; identical to SEQ ID NO: 156828
  misc_feature 1..1695: note = Description of Artificial Sequence: Synthetic coding sequence
  source 1..1695: mol_type = other DNA

SEQ ID NO: 156836 - DNA, 432 bp, synthetic construct
  misc_feature 1..432: note = Description of Artificial Sequence: Synthetic coding sequence
  source 1..432: mol_type = other DNA
atgctgggcggcacagactgcaggaccttcctgaccagccacatcaacctgaagaagaccctgtgtgatgtgatcctgatggtgcaggagaggaagatcccagcccaccgggtggtgctggccgccgccagccacttcttcaacctgatgttcaccaccaacatgctggagagcaagagctttgaggtggagctgaaggatgctgagccagacatcatcgagcagctggtggagtttgcctacacagcccgcatctctgtgaacagcaacaacgtgcagagcctgctggatgctgccaaccagtaccagatcgagcctgtgaagaagatgtgtgtggacttcctgaaggagcaggtggatgccagcaactgcctgggcaagaagtaccagatccctgtggtgtgcctcttctgcttcatcctgtacttctag

SEQ ID NO: 156837 - DNA, 501 bp, synthetic construct
  misc_feature 1..501: note = Description of Artificial Sequence: Synthetic coding sequence
  source 1..501: mol_type = other DNA
atggccgccagcggcgtggagaagagcagcaagaagaagacagagaagaagctggccgcccgggaggaggccaagctgctggccggcttcatgggcgtgatgaacaacatgaggaagcagaagaccctgtgtgatgtgatcctgatggtgcaggagaggaagatcccagcccaccgggtggtgctggccgccgccagccacttcttcaacctgatgttcaccaccaacatgctggagagcaagagctttgaggtggagctgaaggatgctgagccagacatcatcgagcagctggtggagtttgcctacacagcccgcatctctgtgaacagcaacaacgtgcagagcctgctggatgctgccaaccagtaccagatcgagcctgtgaagaagatgtgtgtggacttcctgaaggagcaggtggatgccagcaactgcctgggggaggccgagaaggtggaccagagcctgcctgaatgtggcatgctgttcaccgtgtag

SEQ ID NO: 156838 - DNA, 1863 bp, synthetic construct
  misc_feature 1..1863: note = Description of Artificial Sequence: Synthetic coding sequence
  source 1..1863: mol_type = other DNA
atggccagtgacagcatgagcagcaagcaggccaggaaccacatcaccaagggcaagaggcagcagcagcaccagcagatcaagaacagaagcagcatcagtgatggagatggagaagattccttcatctttgaggccaatgaggcctggaaggacttccacggcagcctgctgcgcttctatgaaaatggagagctgtgtgatgtgaccctgaaggtgggcagcaagctgatcagctgccacaagctggtgctggcctgtgtgatcccctacttccgggccatgttcctgtctgagatggccgaggccaagcagaccctcatcgagatccgggactttgatggagatgccatcgaggacctggtgaagtttgtgtacagcagccggctgaccctgactgtggacaacgtgcagcccctgctgtatgctgcctgcatcctgcaggtggagctggtggcccgggcctgctgtgagtacatgaagctgcacttccaccccagcaactgcctggccgtgcgggcctttgctgagagccacaacagaattgacctgatggacatggctgaccagtatgcctgtgaccacttcacagaggtggtggagtgtgaagattttgtgtctgtgagcccccagcacctgcacaagctgctgagcagcagtgacctgaacattgaaaatgagaagcaggtgtacaatgctgccatcaagtggctgctggccaacccccagcaccacagcaagtggctggatgagaccctggcccaggtgcggctgcccctgctgcctgtggacttcctgatgggcgtggtggccaaggagcagatcgtgaagcagaacctgaagtgccgggacctgctggatgaggccaggaactaccacctgcacctgagcagcagagctgtgcctgactttgagtacagcatccgcaccacccccaggaagcacacagctggggtgctcttctgtgtgggcggccggggcggcagcggggaccccttccgcagcattgagtgctacagcatcaacaagaacagctggttcttcggccctgagatgaacagcagaagaagacatgtgggcgtcatctctgtggagggcaaggtgtatgctgtgggcggccatgatggaaatgagcacctgggctccatggagatgtttgaccccctgaccaacaagtggatgatgaaggcctccatgaacaccaagagaagaggcatcgccctggccagcctgggcggccccatctatgccatcggcggcctggatgacaacacctgcttcaatgatgtggagagatatgacattgaaagtgaccagtggagcacagtggcccccatgaacaccccccggggcggcgtgggctctgtggccctggtgaaccacgtgtatgctgtgggcggcaatgatggcatggccagcctgagctctgtggagagatatgacccccacctggacaagtggattgaggtgaaggagatgggccagaggagagctggaaatggagtgtccaagctgcacggctgcctgtatgtggtgggcggctttgatgacaacagccccctgagctctgtggagagatatgaccccaggagcaacaagtgggactatgtggccgccctgaccaccccccggggcggcgtgggcatcgccaccgtgatgggcaagatctttgctgtgggcggccacaatggaaatgcctacctgaacacagtggaggcctttgatcctgtgctgaaccgctgggagctggtgggctctgtgagccactgccgggccggggccggcgtggccgtgtgcagctgcctgaccagccagatcagagatgtgggccacggcagcaacaacgtggtggactgcatgtag

SEQ ID NO: 156839 - DNA, 1863 bp, synthetic construct; identical to SEQ ID NO: 156838
  misc_feature 1..1863: note = Description of Artificial Sequence: Synthetic coding sequence
  source 1..1863: mol_type = other DNA

SEQ ID NO: 156840 - DNA, 810 bp, synthetic construct
  misc_feature 1..810: note = Description of Artificial Sequence: Synthetic coding sequence
  source 1..810: mol_type = other DNA
atgaacagcagaagaagacatgtgggcgtcatctctgtggagggcaaggtgtatgctgtgggcggccatgatggaaatgagcacctgggctccatggagatgtttgaccccctgaccaacaagtggatgatgaaggcctccatgaacaccaagaggcggggcatcgccctggccagcctgggcggccccatctatgccatcggcggcctggatgacaacacctgcttcaatgatgtggagagatatgacatcgagagtgaccagtggagcacagtggcccccatgaacaccccccggggcggcgtgggctctgtggccctggtgaaccacgtgtatgctgtgggcggcaatgatggcatggccagcctgagctctgtggagagatatgacccccacctggacaagtggattgaggtgaaggagatgggccagaggagagctggaaatggagtgtccaagctgcacggctgcctgtatgtggtgggcggctttgatgacaacagccccctgagctctgtggagagatatgaccccaggagcaacaagtgggactatgtggccgccctgaccaccccccggggcggcgtgggcatcgccaccgtgatgggcaagatctttgctgtgggcggccacaatggaaatgcctacctgaacacagtggaggcctttgatcctgtgctgaaccgctgggagctggtgggctctgtgagccactgcagagctggagctggggtggccgtgtgcagctgcctgaccagccagatcagagatgtgggccacggcagcaacaacgtggtggactgcatgtag

SEQ ID NO: 156841 - DNA, 1875 bp, synthetic construct
  misc_feature 1..1875: note = Description of Artificial Sequence: Synthetic coding sequence
  source 1..1875: mol_type = other DNA
atgcagcctgacccccggcccagcggggccggggcctgctgccgcttcctgcccctgcagagccagtgcccagagggcgctggagatgctgtgatgtatgccagcacagagtgcaaggccgaggtgacccccagccagcacggcaacagaaccttctcctacaccctggaggaccacaccaagcaggccttcggcatcatgaatgagctgcggctgagccagcagctgtgtgatgtgaccctgcaggtgaagtaccaggatgccccagctgcccagttcatggcccacaaggtggtgctggccagcagcagccctgtgttcaaggccatgttcaccaacggcctgcgggagcagggcatggaggtggtgtccattgagggcatccaccccaaggtgatggagcggctgattgaatttgcctacacagccagcatctccatgggagagaagtgtgtgctgcacgtgatgaatggagctgtgatgtaccagattgacagcgtggtgcgggcctgcagcgacttcctggtgcagcagctggaccccagcaatgccatcggcatcgccaactttgctgagcagatcggctgtgtggagctgcaccagagggcccgggagtacatctacatgcactttggagaggtggccaagcaggaggagttcttcaacctgagccactgccagctggtgaccctcatcagcagagatgacctgaatgtgcgctgtgagagcgaggtgttccacgcctgcatcaactgggtgaagtatgactgtgagcagaggcgcttctacgtgcaggccctgctgcgggctgtgcgctgccacagcctgacccccaacttcctgcagatgcagctgcagaagtgtgagatcctgcagagcgacagccgctgcaaggactacctggtgaagatctttgaggagctgaccctgcacaagcccacccaggtgatgccctgccgggcccccaaggtgggccgcctcatctacacagctgggggctacttccggcagagcctgagctacctggaggcctacaaccccagtgatggcacctggctgcggctggccgacctgcaggtgcccaggagcggcctggccggctgtgtggtgggcggcctgctgtatgctgtgggcggcaggaacaacagcccagatggcaacacagacagcagcgccctggactgctacaaccccatgaccaaccagtggagcccctgtgcccccatgtctgtgcccaggaaccgcatcggcgtgggcgtgattgatggccacatctatgctgtgggcggcagccacggctgcatccaccacaacagcgtggagagatatgagcctgagagagatgagtggcacctggtggcccccatgctgaccaggagaattggagtgggcgtggccgtgctgaaccggctgctgtatgctgtgggcggctttgatggcaccaaccggctgaacagcgctgagtgctactacccagagagaaatgagtggaggatgatcacagccatgaacaccatccgcagcggggccggcgtgtgtgtgctgcacaactgcatctatgctgctgggggctatgatggccaggaccagctgaacagcgtggagagatatgatgtggagacagagacctggacctttgtggcccccatgaagcacagaagaagtgccctgggcatcaccgtgcaccagggccgcatctacgtgctgggcggctatgatggccacaccttcctggacagcgtggagtgctatgaccctgacacagacacctggagcgaggtgaccaggatgaccagcggccgcagcggcgtgggcgtggccgtgaccatggagccctgcaggaagcagattgaccagcagaactgcacctgctag

SEQ ID NO: 156842 - DNA, 1875 bp, synthetic construct; identical to SEQ ID NO: 156841
  misc_feature 1..1875: note = Description of Artificial Sequence: Synthetic coding sequence
  source 1..1875: mol_type = other DNA

SEQ ID NO: 156843 - DNA, 2199 bp, synthetic construct
  misc_feature 1..2199: note = Description of Artificial Sequence: Synthetic coding sequence
  source 1..2199: mol_type = other DNA
atggagggcggggaccagagcgaggaggagccccgggagaggagccaggccggcggcatgggcaccctgtggagccaggagagcaccccagaggagcggctgcctgtggagggcagccggccctgggccgtggcccggcgggtgctgacagccatcctgatcctgggcctgctgctgtgcttctctgtgctgctcttctacaacttccagaactgtggcccccggccctgtgagacctctgtgtgcctggacctgcgggaccactacctggccagcggcaacacctctgtggccccctgcacagacttcttctcctttgcctgtggccgggccaaggagaccaacaacagcttccaggagctggccaccaagaacaagaaccggctgcggcgcatcctggaggtgcagaacagctggcaccctggcagcggggaggagaaggccttccagttctacaacagctgcatggacaccctggccattgaagctgctggcaccggccccctgcggcaggtgattgaggagctgggcggctggaggatcagcggcaagtggaccagcctgaacttcaacagaaccctgcggctgctgatgagccagtatggccacttccccttcttccgggcctacctgggcccccacccagccagcccccacacccctgtgatccagattgaccagcctgagtttgatgtgcccctgaagcaggaccaggagcagaagatctatgcccagatcttccgggagtacctgacctacctgaaccagctgggcaccctgctgggcggggaccccagcaaggtgcaggagcacagcagcctgagcatcagcatcaccagccgcctcttccagttcctgcggcccctggagcagaggcgggcccagggcaagctgttccagatggtgaccatcgaccagctgaaggagatggccccagccatcgactggctgagctgcctgcaggccaccttcacccccatgagcctgagccccagccagagcctggtggtgcatgatgtggagtacctgaagaacatgagccagctggtggaggagatgctgctgaagcagagggacttcctgcagagccacatgatcctgggcctggtggtgaccctgagccctgccctggacagccagttccaggaggcccggaggaagctgagccagaagctgcgggagctgacagagcagccccccatgcctgcccggccccgctggatgaagtgtgtggaggagaccggcaccttctttgagcccaccctggccgccctgtttgtgcgggaggccttcggccccagcaccaggtctgctgccatgaagctgttcaccgccatcagagatgccctgatcacccggctgaggaacctgccctggatgaatgaggagacccagaacatggcccaggacaaggtggcccagctgcaggtggagatgggcgccagcgagtgggccctgaagccagagctggcccggcaggagtacaatgacatccagctgggcagcagcttcctgcagagcgtgctgagctgtgtgcgcagcctgcgggccagaattgtgcagagcttcctgcagccccacccccagcaccgctggaaggtgagcccctgggatgtgaatgcctactacagcgtgtctgaccacgtggtggtgtttcctgctggcctgctgcagccccccttcttccaccctggctaccccagggctgtgaactttggagctgctggcagcatcatggcccacgagctgctgcacatcttctaccagctgctgctgcccggcggctgcctggcctgtgacaaccacgccctgcaggaggcccacctgtgcctgaagaggcactacgccgccttccccctgcccagcaggaccagcttcaatgacagcctgaccttcctggagaatgctgctgatgtgggcggcctggccatcgccctgcaggcctacagcaagaggctgctgcggcaccacggggagaccgtgctgcccagcctggacctgagcccccagcagatcttcttccgctcctatgcccaggtgatgtgcaggaagcccagcccccaggacagccatgacacccacagccccccccacctgcgggtgcacggccccctgagcagcaccccagcctttgcccgctacttccgctgtgcccggggggccctgctgaaccccagcagccgctgccagctgtggtag

SEQ ID NO: 156844 - DNA, 1935 bp, synthetic construct
  misc_feature 1..1935: note = Description of Artificial Sequence: Synthetic coding sequence
  source 1..1935: mol_type = other DNA
atgagccggcagttcagcagccgcagcggctacagaagtggcggcggcttcagcagcggcagcgctggcatcatcaactaccagaggaggaccaccagcagcagcaccaggagaagtggcggcggcggcggccgcttcagcagctgtggcggcggcggcggcagctttggagctgggggcggcttcggcagccgcagcctggtgaacctgggcggcagcaagagcatcagcatctctgtggcccggggcggcggccggggcagcggctttggaggcggctacggcggcggcggctttggaggcggcggctttggaggcggcggctttggaggcggcggcatcggcggcggcggctttggaggcttcggcagcggcggcggcggctttggaggcggcggctttggaggcggcggctatggaggcggctacggccctgtgtgccccccaggcggcatccaggaggtgaccatcaaccagagcctgctgcagcccctgaatgtggagattgatcctgagatccagaaggtgaagagccgggagcgggagcagatcaagagcctgaacaaccagtttgccagcttcatcgacaaggtgcgcttcctggagcagcagaaccaggtgctgcagaccaagtgggagctgctgcagcaggtggacaccagcaccaggacccacaacctggagccctactttgagagcttcatcaacaacctgcggcggcgggtggaccagctgaagagtgaccagagccggctggacagcgagctgaagaacatgcaggacatggtggaggactacagaaacaagtatgaagatgagatcaacaagaggaccaatgcagaaaatgaatttgtgaccatcaagaaggatgtggatggagcctacatgaccaaggtggacctgcaggccaagctggacaacctgcagcaggagattgacttcctgacagccctgtaccaggccgagctgagccagatgcagacccagatcagcgagaccaacgtcatcctgtccatggacaacaacagaagcctggacctggacagcatcatcgccgaggtgaaggcccagtatgaagatattgcccagaagagcaaggccgaggccgagagcctgtaccagagcaaatatgaggagctgcagatcacagctggaagacatggagacagcgtgaggaacagcaagattgagatcagcgagctgaacagagtcatccagaggctgcggagtgaaattgacaacgtgaagaagcagatcagcaacctgcagcagagcatcagtgatgctgagcagagaggagaaaatgccctgaaggatgccaagaacaagctgaatgacctggaggatgccctgcagcaggccaaggaggacctggcccggctgctgcgggactaccaggagctgatgaacaccaagctggccctggacctggagatcgccacctaccgcaccctgctggagggggaggagagcaggatgtctggagaatgtgcccccaacgtgtctgtgtctgtgtccaccagccacaccaccatcagcggcggcggcagcagaggaggcggcggcggcggctacggcagcggcggcagcagctatggcagcggcggcggcagctatggcagcggcggcggcggcggcggcggccggggcagctatggcagcggcggcagcagctatggcagcggcggcggcagctatggcagcggcggcggcggcggcggccacggcagctatggcagcggcagcagcagcggcggctacagaggaggcagcggcggcggcggcggcggcagcagcggcggccggggcagcggcggcggcagcagcggcggcagcattggaggccggggcagcagcagcggcggcgtgaagagcagcggcggcagcagctctgtgaagtttgtgtccaccacctacagcggcgtgaccaggtag

SEQ ID NO: 156845 - DNA, 1755 bp, synthetic construct
  misc_feature 1..1755: note = Description of Artificial Sequence: Synthetic coding sequence
  source 1..1755: mol_type = other DNA
atgtctgtgcgctacagcagcagcaagcactacagcagcagccgcagcggcggcggcggcggcggcggcggctgcggcggcggcggcggcgtgagcagcctgcgcatcagcagcagcaagggcagcctgggcggcggcttcagcagcggcggcttcagcggcggcagcttcagccggggcagcagcggcggcggctgctttggaggcagcagcggcggctacggcggcctgggcggctttggaggcggcagcttccggggcagctatggcagcagcagctttggaggcagctatggaggcatctttggaggcggcagctttggaggcggcagctttggaggcggcagctttggaggcggcggctttggaggcggcggctttggaggcggctttggaggcggctttggaggagatggcggcctgctgtctggaaatgagaaggtgaccatgcagaacctgaatgaccggctggccagctacctggacaaggtgcgggccctggaggagagcaactatgagctggagggcaagatcaaggagtggtatgagaagcacggcaacagccaccagggcgagccccgggactacagcaagtactacaagaccattgatgacctgaagaaccagatcctgaacctgaccacagacaatgccaacatcctgctgcagattgacaatgcccggctggccgcagatgacttccggctgaagtatgaaaatgaggtggccctgcggcagagcgtggaggccgacatcaatggcctgcggcgggtgctggatgagctgaccctgaccaaggctgacctggagatgcagatcgagagcctgacagaggagctggcctacctgaagaagaaccacgaggaggagatgaaggacctgagaaatgtgtccactggagatgtgaatgtggagatgaatgctgcccctggggtggacctgacccagctgctgaacaacatgaggagccagtatgagcagctggccgagcagaacaggaaggatgctgaggcctggttcaatgagaagagcaaggagctgaccacagaaattgacaacaacatcgagcagatcagcagctacaagtctgagatcacagagctgcggagaaatgtgcaggccctggagattgagctgcagagccagctggccctgaagcagagcctggaggccagcctggccgagacagagggccgctactgtgtgcagctgagccagatccaggcccagatcagcgccctggaggagcagctgcagcagatccgggcagagacagagtgccagaacacagagtaccagcagctgctggacatcaagatccggctggagaatgagatccagacctaccgcagcctgctggagggggagggcagcagcggcggcggcggccggggcggcggcagctttggaggcggctatggaggcggcagcagcggcggcggcagcagcggcggcggccatggaggcggccatggaggcagcagcggcggcggctatggaggcggcagcagcggcggcggcagcagcggcggcggctatggaggcggcagcagcagcggcggccacggcggcagcagcagcggcggctacggcggcggcagcagcggcggcggcggcggcggctacggcggcggcagcagcggcggcggcagcagcagcggcggcggctatggaggcggcagcagcagcggcggccacaagagcagcagcagcggctctgtgggggagagcagcagcaagggcccccgctactag

SEQ ID NO: 156846 - DNA, 1485 bp, synthetic construct
  misc_feature 1..1485: note = Description of Artificial Sequence: Synthetic coding sequence
  source 1..1485: mol_type = other DNA
atggacctgagcaacaacaccatgagcctgtctgtgaggaccccaggcctgagccggcggctgagcagccagagcgtgattggccggccccggggcatgtctgccagctctgtgggcagcggctacggcggcagcgcctttggatttggagccagctgtggcggcggcttctctgctgcctccatgtttggcagcagcagcggctttggaggcggcagcggcagctccatggccggcggcctgggcgccggctacggccgggccctgggcggcggcagctttggaggcctgggcatgggctttggaggcagccctgggggcggcagcctgggcatcctgtctggaaatgatggcggcctgctgagcggcagcgagaaggagaccatgcagaacctgaatgaccggctggccagctacctggacaaggtgcgggccctggaggaggccaacacagagctggagaacaagatccgggagtggtatgagacccggggcaccggcacagcagatgccagccagagcgactacagcaagtactaccccctgattgaggacctgaggaacaagatcatcagcgccagcattggaaatgcccagctgctgctgcagattgacaatgcccggctggccgctgaggacttcaggatgaagtatgaaaatgagctggccctgcggcagggcgtggaggccgacatcaatggcctgcggcgggtgctggatgagctgaccctgaccaggacagacctggagatgcagatcgagagcctgaatgaggagctggcctacatgaagaagaaccatgaagatgagctgcagagcttccgggtgggcggccctggagaggtgtctgtggagatggatgctgcccctggggtggacctgacccggctgctgaatgacatgagggcccagtatgagaccatcgccgagcagaacaggaaggatgctgaggcctggttcatcgagaagagcggggagctgaggaaggagatcagcaccaacacagagcagctgcagagcagcaagtctgaggtgacagacctgcggcgggccttccagaacctggagattgagctgcagagccagctggccatgaagaagagcctggaggacagcctggccgaggccgagggggactactgtgcccagctgagccaggtgcagcagctgatcagcaacctggaggcccagctgctgcaggtgcgggcagatgctgagcggcagaatgtggaccaccagaggctgctgaatgtgaaggcccggctggagctggagattgagacctaccgccgcctgctggatggagaggcccagggagatggcctggaggagagcctgtttgtgacagacagcaagagccaggcccagagcacagacagcagcaaggaccccaccaagaccaggaagatcaagacagtggtgcaggagatggtgaatggagaggtggtgagcagccaggtgcaggagattgaggagctgatgtag

SEQ ID NO: 156847 - DNA, 1068 bp, synthetic construct
  misc_feature 1..1068: note = Description of Artificial Sequence: Synthetic coding sequence
  source 1..1068: mol_type = other DNA
atgagcctgcggctgcagagcagcagcgccagctatggaggcggctttggaggcggcagctgccagctgggcggcggccggggcgtgtccacctgcagcaccaggtttgtgtctgggggcagcgctgggggctatggaggcggcgtgtcctgtggctttggaggaggagctggcagcggctttggaggcggcctgggcggcggctttggaggcggctttgctgggggctttgtggactttggagcctgtgatggcggcctgctgactggaaatgagaagatcaccatgcagaacctgaatgaccggctggccagctacctggagaaggtgcgggccctggaggaggccaatgctgacctggaggtgaagatccgggactggcacctgaagcagagccctgccagccctgagcgggactacagcccctactacaagaccatcgaggagctgcgggacaagatcctgacagccaccatcgagaacaacagagtcatcctggagattgacaatgcccggctggccgcagatgacttccggctgaagtatgaaaatgagctggccctgcggcagagcgtggaggccgacatcaatggcctgcggcgggtgctggatgagctgaccctgagcaagacagacctggagatgcagatcgagagcctgaatgaggagctggcctacatgaagaagaaccacgaggaggagatgaaggagttcagcaaccaggtggtgggccaggtgaatgtggagatggatgccaccccaggcatcgacctgaccagggtgctggccgagatgagggagcagtatgaggccatggccgagaggaacagaagagatgctgaggagtggttccacaccaagtctgctgagctgaacaaggaggtgtccaccaacacagccatgatccagaccagcaagacagagatcacagagctgcggaggaccctgcagggcctggagattgagctgcagagccagctgtccatgaaggccggcctggagaacacagctgctgaccccggcacccaccagcagcaccggggccctgctgagcgggccccccagtag

SEQ ID NO: 156848 - DNA, 1377 bp, synthetic construct
  misc_feature 1..1377: note = Description of Artificial Sequence: Synthetic coding sequence
  source 1..1377: mol_type = other DNA
atgagcctgcggctgcagagcagcagcgccagctatggaggcggctttggaggcggcagctgccagctgggcggcggccggggcgtgtccacctgcagcaccaggtttgtgtctgggggcagcgctgggggctatggaggcggcgtgtcctgtggctttggaggaggagctggcagcggctttggaggcggctatggaggcggcctgggcggcggctatggaggcggcctgggcggcggctttggaggcggctttgctgggggctttgtggactttggagcctgtgatggcggcctgctgactggaaatgagaagatcaccatgcagaacctgaatgaccggctggccagctacctggagaaggtgcgggccctggaggaggccaatgctgacctggaggtgaagatccgggactggcacctgaagcagagccctgccagccctgagcgggactacagcccctactacaagaccatcgaggagctgcgggacaagatcctgacagccaccatcgagaacaacagagtcatcctggagattgacaatgcccggctggccgcagatgacttccggctgaagtatgaaaatgagctggccctgcggcagagcgtggaggccgacatcaatggcctgcggcgggtgctggatgagctgaccctgagcaagacagacctggagatgcagatcgagagcctgaatgaggagctggcctacatgaagaagaaccacgaggaggagatgaaggagttcagcaaccaggtggtgggccaggtgaatgtggagatggatgccaccccaggcatcgacctgaccagggtgctggccgagatgagggagcagtatgaggccatggccgagaggaacagaagagatgctgaggagtggttccacaccaagtctgctgagctgaacaaggaggtgtccaccaacacagccatgatccagaccagcaagacagagatcacagagctgcggaggaccctgcagggcctggagattgagctgcagagccagctgtccatgaaggccggcctggagaacacagtggccgagacagaatgtagatatgccctgcagctgcagcagatccagggcctcatcagcagcattgaggcccagctgtctgagctgcggtctgagatggagtgccagaaccaggagtacaagatgctgctggacatcaagacccggctggagcaggagatcgccacctaccgcagcctgctggagggccaggatgccaagatgattggcttccccagcagcgctggctctgtgagccccaggagcacctctgtgaccaccaccagcagcgcctctgtgaccaccaccagcaatgccagcggccgccgcaccagtgatgtgcggcggccctag

SEQ ID NO: 156849 - DNA, 1263 bp, synthetic construct
  misc_feature 1..1263: note = Description of Artificial Sequence: Synthetic coding sequence
  source 1..1263: mol_type = other DNA
atgagcctgcggctgcagagcagcagcgccagctatggaggcggctttggaggcggcagctgccagctgggcggcggccggggcgtgtccacctgcagcaccaggtttgtgtctgggggcagcgctgggggctatggaggcggcgtgtcctgtggctttggaggaggagctggcagcggctttggaggcggctatggaggcggcctgggcggcggctatggaggcggcctgggcggcggctttggaggcggctttgctgggggctttgtggactttggagcctgtgatggcggcctgctgactggaaatgagaagatcaccatgcagaacctgaatgaccggctggccagctacctggagaaggtgcgggccctggaggaggccaatgctgacctggaggtgaagatccgggactggcacctgaagcagagccctgccagccctgagcgggactacagcccctactacaagaccatcgaggagctgcgggacaagatcctgacagccaccatcgagaacaacagagtcatcctggagattgacaatgcccggctggccgcagatgacttccggctgaagtatgaaaatgagctggccctgcggcagagcgtggaggccgacatcaatggcctgcggcgggtgctggatgagctgaccctgagcaagacagacctggagatgcagatcgagagcctgaatgaggagctggcctacatgaagaagaaccacgaggaggagatgaaggagttcagcaaccaggtggtgggccaggtgaatgtggagatggatgccaccccaggcatcgacctgaccagggtgctggccgagatgagggagcagtatgaggccatggccgagaggaacagaagagatgctgaggagtggttccacaccaagtctgctgagctgaacaaggaggtgtccaccaacacagccatgatccagaccagcaagacagagatcacagagctgcggaggaccctgcagggcctggagattgagctgcagagccagctgtccatgaaggccggcctggagaacacagtggccgagacagaatgtagatatgccctgcagctgcagcagatccagggcctcatcagcagcattgaggcccagctgtctgagctgcggtctgagatggagtgccagaaccaggagtacaagatgctgctggacatcaagacccggctggagcaggagatcgccacctaccgcagcctgctggagggccaggatgccaagaagaggcagcccccatag

SEQ ID NO: 156850 - DNA, 1371 bp, synthetic construct
  misc_feature 1..1371: note = Description of Artificial Sequence: Synthetic coding sequence
  source 1..1371: mol_type = other DNA
atgaccaccaccttcctgcagaccagcagcagcacctttggaggcggcagcacccggggcggcagcctgctggccggcggcggcggctttggaggcggcagcctgagcggcggcggcggcagccgcagcatcagcgccagcagcgccaggtttgtgagcagcggcagcggcggcggctacggcggcggcatgagggtgtgtggctttggaggaggagctggctctgtgtttggaggcggctttggaggcggcgtgggcggcggctttggaggcggctttggaggaggagatggcggcctgctgtctggaaatgagaagatcaccatgcagaacctgaatgaccggctggccagctacctggacaaggtgcgggccctggaggaggccaatgctgacctggaggtgaagatccatgactggtaccagaagcagacccccaccagcccagaatgtgactacagccagtacttcaagaccatcgaggagctgcgggacaagatcatggccaccaccatcgacaacagcagggtcatcctggagattgacaatgcccggctggccgcagatgacttccggctgaagtatgaaaatgagctggccctgcggcagggcgtggaggccgacatcaatggcctgcggcgggtgctggatgagctgaccctggccaggacagacctggagatgcagatcgagggcctgaatgaggagctggcctacctgaagaagaaccacgaggaggagatgaaggagttcagcagccagctggccggccaggtgaatgtggagatggatgctgcccctggggtggacctgaccagggtgctggccgagatgagggagcagtatgaggccatggccgagaagaacagaagagatgtggaggcctggttcttcagcaagacagaggagctgaacaaggaggtggccagcaacacagagatgatccagaccagcaagacagagatcacagacctgcggaggaccatgcaggagctggagattgagctgcagagccagctgtccatgaaggccggcctggagaacagcctggccgagacagagtgccgctatgccacccagctgcagcagatccagggcctcatcggcggcctggaggcccagctgtctgagctgcgctgtgagatggaggcccagaaccaggagtacaagatgctgctggacatcaagacccggctggagcaggagatcgccacctaccgcagcctgctggagggccaggatgccaagatggccggcatcgccatccgggaggccagcagcggcggcggcggcagcagcagcaacttccacatcaacgtggaggagagcgtggatggccaggtggtgagcagccacaagcgggagatctag

SEQ ID NO: 156851 - DNA, 876 bp, synthetic construct
  misc_feature 1..876: note = Description of Artificial Sequence: Synthetic coding sequence
  source 1..876: mol_type = other DNA
atgacaggcaccaggagccggccccagcctgcccagaatgccaccacagccaacaccagccggcccctgaagagcagcggcaccaggtatgaaaatgagctggccctgcggcagggcgtggaggccgacatcaatggcctgcggcgggtgctggatgagctgaccctggccaggacagacctggagatgcagatcgagggcctgaatgaggagctggcctacctgaagaagaaccacgaggaggagatgaaggagttcagcagccagctggccggccaggtgaatgtggagatggatgctgcccctggggtggacctgaccagggtgctggccgagatgagggagcagtatgaggccatggccgagaagaacagaagagatgtggaggcctggttcttcagcaagacagaggagctgaacaaggaggtggccagcaacacagagatgatccagaccagcaagacagagatcacagacctgcggaggaccatgcaggagctggagattgagctgcagagccagctgtccatgaaggccggcctggagaacagcctggccgagacagaatgtagatatgccacccagctgcagcagatccagggcctgattggaggcctggaggcccagctgtctgagctgcgctgtgagatggaggcccagaaccaggagtacaagatgctgctggacatcaagacccggctggagcaggagatcgccacctaccgcagcctgctggagggccaggatgccaagatggccggcatcgccatccgggaggccagcagcggcggcggcggcagcagcagcaacttccacatcaacgtggaggagagcgtggatggccaggtggtgagcagccacaagcgggagatctag

SEQ ID NO: 156852 - DNA, 1371 bp, synthetic construct; identical to SEQ ID NO: 156850
  misc_feature 1..1371: note = Description of Artificial Sequence: Synthetic coding sequence
  source 1..1371: mol_type = other DNA

SEQ ID NO: 156853 - DNA, 756 bp, synthetic construct
  misc_feature 1..756: note = Description of Artificial Sequence: Synthetic coding sequence
  source 1..756: mol_type = other DNA
atgacaggcaccaggagccggccccagcctgcccagaatgccaccacagccaacaccagccggcccctgaagagcagcggcaccaggtatgaaaatgagctggccctgcggcagggcgtggaggccgacatcaatggcctgcggcgggtgctggatgagctgaccctggccaggacagacctggagatgcagatcgagggcctgaatgaggagctggcctacctgaagaagaaccacgaggaggagatgaaggagttcagcagccagctggccggccaggtgaatgtggagatggatgctgcccctggggtggacctgaccagggtgctggccgagatgagggagcagtatgaggccatggccgagaagaacagaagagatgtggaggcctggttcttcagcaagacagaggagctgaacaaggaggtggccagcaacacagagatgatccagaccagcaagacagagatcacagacctgcggaggaccatgcaggagctggagattgagctgcagagccagctgtccatgaaggccggcctggagaacagcctggccgagacagaatgtagatatgccacccagctgcagcagatccagggcctgattggaggcctggaggcccagctgtctgagctgcgctgtgagatggaggcccagaaccaggagtacaagatgctgctggacatcaagacccggctggagcaggagatcgccacctaccgcagcctgctggagggccaggatgccaagtag

SEQ ID NO: 156854 - DNA, 663 bp, synthetic construct
  misc_feature 1..663: note = Description of Artificial Sequence: Synthetic coding sequence
  source 1..663: mol_type = other DNA
atgacaggcaccaggagccggccccagcctgcccagaatgccaccacagccaacaccagccggcccctgaagagcagcggcaccaggtatgaaaatgagctggccctgcggcagggcgtggaggccgacatcaatggcctgcggcgggtgctggatgagctgaccctggccaggacagacctggagatgcagatcgagggcctgaatgaggagctggcctacctgaagaagaaccacgaggaggagatgaaggagttcagcagccagctggccggccaggtgaatgtggagatggatgctgcccctggggtggacctgaccagggtgctggccgagatgagggagcagtatgaggccatggccgagaagaacagaagagatgtggaggcctggttcttcagcaagacagaggagctgaacaaggaggtggccagcaacacagagatgatccagaccagcaagacagagatcacagacctgcggaggaccatgcaggagctggagattgagctgcagagccagctgtccatgaaggccggcctggagaacagcctggccgagacagaatgtagatatgccacccagctgcagcagatccagggcctgattggaggcctggaggcccagctgtctgagctgcgctgtgagatggaggcccagtag

SEQ ID NO: 156855 - DNA, 1422 bp, synthetic construct
  misc_feature 1..1422: note = Description of Artificial Sequence: Synthetic coding sequence
  source 1..1422: mol_type = other DNA
atgaccacctgcagccggcagttcaccagcagcagctccatgaagggcagctgtggcatcggcggcggcatcggcggcggcagcagccgcatcagctctgtgctggccggcggcagctgccgggcccccagcacctacggcggcggcctgtctgtgagcagccgcttcagcagcggcggggcctgtggcctgggcggcggctacggcggcggcttcagcagcagcagcagctttggcagcggctttggaggcggctacggcggcggcctgggcgccggctttggaggcggcctgggcgccggctttggaggcggctttgctggaggagatggcctgctggtgggcagcgagaaggtgaccatgcagaacctgaatgaccggctggccagctacctggacaaggtgcgggccctggaggaggccaatgctgacctggaggtgaagatccgggactggtaccagaggcagaggccttctgagatcaaggactacagcccctacttcaagaccatcgaggacctgaggaacaagatcatcgccgccaccattgaaaatgcccagcccatcctgcagattgacaatgcccggctggccgcagatgacttccgcaccaagtatgagcacgagctggccctgcggcagacagtggaggctgatgtgaatggcctgcggcgggtgctggatgagctgaccctggccaggacagacctggagatgcagatcgagggcctgaaggaggagctggcctacctgaggaagaaccacgaggaggagatgctggccctgcggggccagacaggaggagatgtgaatgtggagatggatgctgcccctggggtggacctgagccgcatcctgaatgagatgagggaccagtatgagcagatggccgagaagaacagaagagatgctgagacctggttcctgagcaagacagaggagctgaacaaggaggtggccagcaacagcgagctggtgcagagcagccgctctgaggtgacagagctgcggcgggtgctgcagggcctggagattgagctgcagagccagctgtccatgaaggccagcctggagaacagcctggaggagaccaagggccgctactgcatgcagctgagccagatccagggcctgattggctctgtggaggagcagctggcccagctgcgctgtgagatggagcagcagagccaggagtaccagatcctgctggatgtgaagacccggctggagcaggagatcgccacctaccgccgcctgctggagggggaggatgcccacctgagcagccagcaggccagcggccagagctacagcagccgggaggtgttcaccagcagcagcagcagcagcagccggcagacccggcccatcctgaaggagcagagcagcagcagcttcagccagggccagagcagctag

SEQ ID NO: 156856 - DNA, 1299 bp, synthetic construct
  misc_feature 1..1299: note = Description of Artificial Sequence: Synthetic coding sequence
  source 1..1299: mol_type = other DNA
atgaccaccagcatccggcagttcaccagcagcagcagcatcaagggcagcagcggcctgggcggcggcagcagcaggaccagctgccgcctgagcggcggcctgggcgccggcagctgccgcctgggcagcgctgggggcctgggcagcaccctgggcggcagcagctacagcagctgctacagctttggaagtggcggcggctacggcagcagctttggaggagtggatggcctgctggccggcggggagaaggccaccatgcagaacctgaatgaccggctggccagctacctggacaaggtgcgggccctggaggaggccaacacagagctggaggtgaagatccgggactggtaccagaggcaggcccctggccctgcccgggactacagccagtactaccgcaccatcgaggagctgcagaacaagatcctgacagccaccgtggacaatgccaacatcctgctgcagattgacaatgcccggctggccgcagatgacttccgcaccaagtttgaaacagagcaggccctgcggctgtctgtggaggccgacatcaatggcctgcggcgggtgctggatgagctgaccctggcccgggctgacctggagatgcagatcgagaacctgaaggaggagctggcctacctgaagaagaaccacgaggaggagatgaatgccctgcggggccaggtgggcggggagatcaacgtggagatggatgctgcccctggggtggacctgagccgcatcctgaatgagatgagggaccagtatgagaagatggccgagaagaacaggaaggatgctgaggactggttcttcagcaagacagaggagctgaaccgggaggtggccaccaacagcgagctggtgcagagcggcaagtctgagatcagcgagctgcggaggaccatgcaggccctggagattgagctgcagagccagctgtccatgaaggccagcctggagggcaacctggccgagacagagaaccgctactgtgtgcagctgagccagatccagggcctcatcggctctgtggaggagcagctggcccagctgcgctgtgagatggagcagcagaaccaggagtacaagatcctgctggatgtgaagacccggctggagcaggagatcgccacctacagaaggctgctggagggagaagatgcccacctgacccagtacaagaaggagcctgtgaccacccggcaggtgaggaccatcgtggaggaggtgcaggacggcaaggtgatcagcagccgggagcaggtgcaccagaccaccaggtag

SEQ ID NO: 156857 - DNA, 1920 bp, synthetic construct
  misc_feature 1..1920: note = Description of Artificial Sequence: Synthetic coding sequence
  source 1..1920: mol_type = other DNA
atgagctgccagatcagctgcaagagccggggccggggcggcggcggcggcggcttccggggcttcagcagcggcagcgctgtggtgtctgggggcagccgccgcagcaccagcagcttcagctgcctgagccgccacggcggcggcggcggcggctttggaggcggcggcttcggcagccgcagcctggtgggcctgggcggcaccaagagcatcagcatctctgtggccggcggcggcggcggctttggagctgctgggggctttggaggccggggcggcggctttggaggcggcagcagctttggaggcggcagcggcttcagcggcggcggctttggaggcggcggctttggaggcggccgctttggaggctttggaggccctggaggagtgggcggcctgggcggccctgggggctttggacctgggggctacccaggcggcatccacgaggtgtctgtgaaccagagcctgctgcagcccctgaatgtgaaggtggaccctgagatccagaatgtgaaggcccaggagcgggagcagatcaagaccctgaacaacaagtttgccagcttcatcgacaaggtgcgcttcctggagcagcagaaccaggtgctgcagaccaagtgggagctgctgcagcagatgaatgtgggcacccggcccatcaacctggagcccatcttccagggctacatcgacagcctgaagcgctacctggatggcctgacagctgagaggaccagccagaacagcgagctgaacaacatgcaggacctggtggaggactacaagaagaagtatgaagatgagatcaacaagaggacagctgctgaaaatgactttgtgaccctgaagaaggatgtggacaatgcctacatgatcaaggtggagctgcagagcaaggtggacctgctgaaccaggagattgagttcctgaaggtgctgtatgatgctgagatcagccagatccaccagagcgtgacagacaccaacgtcatcctgtccatggacaacagcaggaacctggacctggacagcatcatcgccgaggtgaaggcccagtatgaggagatcgcccagaggagcaaggaggaggccgaggccctgtaccacagcaaatatgaggagctgcaggtgacagtgggcagacatggagacagcctgaaggagatcaagattgagatcagcgagctgaacagagtcatccagaggctgcagggcgagatcgcccacgtgaagaagcagtgcaagaatgtgcaggatgccatcgcagatgctgagcagagaggagaacatgccctgaaggatgccaggaacaagctgaatgacctggaggaggccctgcagcaggccaaggaggacctggcccggctgctgcgggactaccaggagctgatgaatgtgaagctggccctggatgtggagatcgccacctacaggaagctgctggagggggaggagtgcaggatgtctggggacctgagcagcaatgtgacagtgtctgtgaccagcagcaccatcagcagcaatgtggccagcaaggccgccttcggcggcagcggcggccggggcagcagcagcggcggcggctacagcagcggcagcagcagctatggcagcggcggccggcagagcggcagccggggcggcagcggcggcggcggcagcatcagcggcggcggctacggcagcggcggcggcagcggcggccgctatggcagcggcggcggcagcaagggcggcagcatcagcggcggcggctacggcagcggcggcggcaagcacagcagcggcggcggcagccggggcggcagcagcagcggcggcggctacggcagcggcggcggcggcagcagctctgtgaagggcagcagcggggaggccttcggcagctctgtgaccttctccttcagatag

SEQ ID NO: 156858 - DNA, 1275 bp, synthetic construct
  misc_feature 1..1275: note = Description of Artificial Sequence: Synthetic coding sequence
  source 1..1275: mol_type = other DNA
atggacttcagcagaagaagcttccacaggagcctgagcagcagcctgcaggcccctgtggtgtccacagtgggcatgcagaggctgggcaccacccccagcgtgtatggaggagctgggggccggggcatccgcatcagcaacagccgccacacagtgaactacggcagtgacctgaccggcggcggggacctgtttgtgggcaatgagaagatggccatgcagaacctgaatgaccggctggccagctacctggagaaggtgaggaccctggagcagagcaacagcaagctggaggtgcagatcaagcagtggtatgagaccaatgcccccagggctggccgggactacagcgcctactaccggcagatcgaggagctgcggagccagatcaaggatgcccagctgcagaatgcccgctgtgtgctgcagattgacaatgccaagctggccgctgaggacttccggctgaagtatgaaacagagcggggcatccggctgactgtggaggccgacctgcagggcctgaacaaggtgtttgatgacctgaccctgcacaagacagacctggagatccagatcgaggagctgaacaaggacctggccctgctgaagaaggagcaccaggaggaggtggatggcctgcacaagcacctgggcaacacagtgaatgtggaggtggatgctgcccctggcctgaacctgggcgtcatcatgaatgagatgaggcagaagtatgaggtgatggcccagaagaacctgcaggaggccaaggagcagtttgagcggcagacagctgtgctgcagcagcaggtgacagtgaacacagaggagctgaagggcacagaggtgcagctgacagagctgcggaggaccagccagagcctggagattgagctgcagagccacctgtccatgaaggagagcctggagcacaccctggaggagaccaaggcccgctacagcagccagctggccaacctgcagagcctgctgagcagcctggaggcccagctgatgcagatccgcagcaacatggagcggcagaacaatgagtaccacatcctgctggacatcaagacccggctggagcaggagatcgccacctacagaaggctgctggagggagaagatgtgaagaccacagagtaccagctgagcaccctggaggagcgggacatcaagaagaccaggaagatcaagacagtggtgcaggaggtggtggatggcaaggtggtgtcctctgaggtgaaggaggtggaggagaacatctag

SEQ ID NO: 156859 - DNA, 1578 bp, synthetic construct
  misc_feature 1..1578: note = Description of Artificial Sequence: Synthetic coding sequence
  source 1..1578: mol_type = other DNA
atgagctgcagcagccgggccagcagcagccgggccggcggcagcagcagcgcccgggtgtctgctgggggcagcagcttcagcagcggcagccgctgtggcctgggcggcagcagcgcccagggcttccggggcggggccagcagctgcagcctgagcggcggcagcagcggggccttcggcggcagctttggaggcggcttcggcagctgcagcgtgggcggcggctttggaggagccagcggcagcggcactggatttggaggcggcagcagctttggaggagtgtctggcttcggccggggcagcggcttctgtggcagcagccgcttcagcagcggggccaccggcggcttctacagctatggaggcggcatgggcggcggcgtgggagatggcggcctcttctctggaggagagaagcagaccatgcagaacctgaatgaccggctggccaactacctggacaaggtgcgggccctggaggaggccaacacagacctggagaacaagatcaaggagtggtatgacaagtatggccctggcagcggagatggcggcagcggccgggactacagcaagtactacagcatcatcgaggacctgaggaaccagatcatcgccgccaccgtggagaatgccggcatcatcctgcacatcgacaatgcccggctggccgcagatgacttccggctgaagtatgaaaatgagctgtgcctgcggcagagcgtggaggccgacatcaatggcctgaggaaggtgctggatgacctgaccatgaccaggagtgacctggagatgcagatcgagagcttcacagaggagctggcctacctgaggaagaaccacgaggaggagatgaagaacatgcagggcagcagcggcggggaggtgacagtggagatgaatgctgcccctggaacagacctgaccaagctgctgaatgacatgagggcccagtatgaggagctggccgagcagaacagaagagaggccgaggagcgcttcaacaagcagagcgccagcctgcaggcccagatcagcacagatgctggagctgccaccagcgccaagaatgagatcacagagctgaagaggaccctgcaggccctggagattgagctgcagagccagctggccatgaagagcagcctggagggcaccctggccgacacagaggccggctacgtggcccagctgtctgagatccagacccagatcagcgccctggaggaggagatctgccagatctggggcgagaccaagtgccagaatgctgagtacaagcagctgctggacatcaagacccggctggaggtggagattgagacctaccgccgcctgctggatggagagggcggcggcagcagctttgctgagtttggaggcaggaacagcggctctgtgaacatgggcagccgggacctggtgtctggggacagccgcagcggcagctgcagcggccagggccgggacagcagcaagaccagggtgaccaagaccatcgtggaggagctggtggatggcaaggtggtgagcagccaggtgagcagcatcagcgaggtgaaggtgaagtag

SEQ ID NO: 156860 - DNA, 1890 bp, synthetic construct
  misc_feature 1..1890: note = Description of Artificial Sequence: Synthetic coding sequence
  source 1..1890: mol_type = other DNA
atgagccggcaggccagcaagaccagcggcggcggcagccagggcttcagcggccgctctgctgtggtgtctggcagcagcaggatgagctgtgtggcccacagcggcggggccggcggcggggcctacggcttccgctctggagctgggggcttcggcagccgcagcctgtacaacctgggcggcaacaagagcatcagcatctctgtggccgccggcggcagcagagctgggggctttggaggcggccgcagcagctgtgcctttgctgggggctatggaggcggctttggaagtggctatggaggcggctttggaggcggctttggaggcggccggggcatgggcggcggctttggaggagctgggggctttggaggagctgggggctttggaggagctgggggctttggaggccctgggggctttggaggcagcggcggctttggaggccctggcagcctgggcagccctgggggctttggacctgggggcttccctgggggcatccaggaggtgaccatcaaccagagcctgctgcagcccctgaatgtggagattgacccccagatcggccaggtgaaggcccaggagcgggagcagatcaagaccctgaacaacaagtttgccagcttcatcgacaaggtgcgcttcctggagcagcagaacaaggtgctggagaccaagtggaacctgctgcagcagcagggcaccagcagcatcagcggcaccaacaacctggagcccctgtttgagaaccacatcaactacctgcggagctacctggacaacatcctgggggagcggggccgcctggacagcgagctgaagaacatggaggacctggtggaggacttcaagaagaagtatgaagatgagatcaacaagaggacagctgctgaaaatgaatttgtgaccctgaagaaggatgtggacagcgcctacatgaacaaggtggagctgcaggccaaggtggatgccctgattgatgaaattgacttcctgcggaccctgtatgatgctgagctgagccagatgcagagccacatcagtgacacctctgtggtgctgtccatggacaacaacagaagcctggacctggacagcatcatcgccgaggtgcgggcccagtatgaagatattgcccagaggagcaaggccgaggccgaggccctgtaccagaccaagctgggggagctgcagaccacagctggaagacatggagatgacctgaggaacaccaagtctgagatcatcgagctgaacaggatgatccagaggctgcgggcagaaattgagggcgtgaagaagcagaatgccaacctgcagacagccatcgccgaggccgagcagcacggggagatggccctgaaggatgccaatgccaagctgcaggagctgcaggccgccctgcagcaggccaaggatgacctggcccggctgctgcgggactaccaggagctgatgaatgtgaagctggccctggatgtggagatcgccacctacaggaagctgctggagggggaggagtacagcaggatgtctggagaatgtcccagcgctgtgtccatctctgtggtgagcagcagcaccaccagcgccagcgctgggggctatggaggcggctatggaggcggcatgggcggcggcctgggcggcggcttctctgctgggggcggcagcggcagcggcttcggccggggcggcggcggcggcattggaggcggctttggaggcggcagcagcggcttcagcggcggcagcggcttcggcagcatcagcggggcccgctatggagtgtctgggggcggcttcagcagcgccagcaacagaggaggcagcatcaagttcagccagagcagccagagcagccagcgctacagcaggtag

SEQ ID NO: 156861 - DNA, 1887 bp, synthetic construct
  misc_feature 1..1887: note = Description of Artificial Sequence: Synthetic coding sequence
  source 1..1887: mol_type = other DNA
atgagccggcaggccagcaagaccagcggcggcggcagccagggcttcagcggccgctctgctgtggtgtctggcagcagcaggatgagctgtgtggcccacagcggcggggccggcggcggggcctacggcttccgctctggagctgggggcttcggcagccgcagcctgtacaacctgggcggcaacaagagcatcagcatctctgtggccgccggcggcagcagagctgggggctttggaggcggccgcagcagctgtgcctttgctgggggctatggaggcggctttggaagtggctatggaggcggctttggaggcggctttggaggcggccggggcatgggcggcggctttggaggagctgggggctttggaggagctgggggctttggaggagctgggggctttggaggccctgggggctttggaggcagcggcggctttggaggccctggcagcctgggcagccctgggggctttggacctgggggcttccctgggggcatccaggaggtgaccatcaaccagagcctgctgcagcccctgaatgtggagattgacccccagatcggccaggtgaaggcccaggagcgggagcagatcaagaccctgaacaacaagtttgccagcttcatcgacaaggtgcgcttcctggagcagcagaacaaggtgctggagaccaagtggaacctgctgcagcagcagggcaccagcagcatcagcggcaccaacaacctggagcccctgtttgagaaccacatcaactacctgcggagctacctggacaacatcctgggggagcggggccgcctggacagcgagctgaagaacatggaggacctggtggaggacttcaagaagaagtatgaagatgagatcaacaagaggacagctgctgaaaatgaatttgtgaccctgaagaaggatgtggacagcgcctacatgaacaaggtggagctgcaggccaaggtggatgccctgattgatgaaattgacttcctgcggaccctgtatgatgctgagctgagccagatgcagagccacatcagtgacacctctgtggtgctgtccatggacaacaacagaagcctggacctggacagcatcatcgccgaggtgcgggcccagtatgaagatattgcccagaggagcaaggccgaggccgaggccctgtaccagaccaagctgggggagctgcagaccacagctggaagacatggagatgacctgaggaacaccaagtctgagatcatcgagctgaacaggatgatccagaggctgcgggcagaaattgagggcgtgaagaagcagaatgccaacctgcagacagccatcgccgaggccgagcagcacggggagatggccctgaaggatgccaatgccaagctgcaggagctgcaggccgccctgcagcaggccaaggatgacctggcccggctgctgcgggactaccaggagctgatgaatgtgaagctggccctggatgtggagatcgccacctacaggaagctgctggagggggaggagtacaggatgtctggagagtgccccagcgctgtgtccatctctgtggtgagcagcagcaccaccagcgccagcgctgggggctacggcggcggctacggcggcggcatgggcggcggcctgggcggcggcttctctgctgggggcggcagcggcagcggcttcggccggggcggcggcggcggcatcggcggcggctttggaggcggcagcagcggcttcagcggcggcagcggcttcggcagcatcagcggggcccgctatggagtgtctgggggcggcttcagcagcgccagcaacagaggaggcagcatcaagttcagccagagcagccagagcagccagcgctacagcaggtag

SEQ ID NO: 156862 - DNA, 1251 bp, synthetic construct
  misc_feature 1..1251: note = Description of Artificial Sequence: Synthetic coding sequence
  source 1..1251: mol_type = other DNA
atgccctacaacttctgcctgcccagcctgagctgcaggaccagctgcagcagccggccctgtgtgccccccagctgccacagctgcaccctgcccggggcctgcaacatcccagccaacgtgagcaactgcaactggttctgtgagggcagcttcaatggaagtgagaaggagaccatgcagttcctgaatgaccggctggccagctacctggagaaggtgcggcagctggagcgggacaatgctgagctggagaacctgatccgggagaggagccagcagcaggagcccctgctgtgccccagctaccagagctacttcaagaccatcgaggagctgcagcagaagatcctgtgcaccaagtcagaaaatgcccggctggtggtgcagattgacaatgccaagctggccgcagatgacttccgcaccaagtaccagacagagctgagcctgcggcagctggtggagagtgacatcaatggcctgcggcgcatcctggatgagctgaccctgtgcaagagtgacctggaggcccaggtggagagcctgaaggaggagctgctgtgcctgaagagcaaccacgagcaggaggtgaacaccctgcgctgccagctgggggaccggctgaatgtggaggtggatgctgcccccaccgtggacctgaacagagtgctgaatgagaccaggagccagtatgaggccctggtggagaccaacagaagagaggtggagcagtggttcaccacccagacagaggagctgaacaagcaggtggtgagcagcagcgagcagctgcagagctaccaggccgagatcatcgagctgcggaggacagtgaatgccctggagattgagctgcaggcccagcacaacctgcgggacagcctggagaacaccctgacagaaagtgaggcccgctacagcagccagctgagccaggtgcagagcctcatcaccaacgtggagagccagctggccgagatccgcagtgacctggagcggcagaaccaggagtaccaggtgctgctggatgtgcgggcccggctggagtgtgagatcaacacctaccgcagcctgctggagagcgaggactgcaacctgcccagcaacccctgtgccaccaccaatgcctgcagcaagcccatcggcccctgcctgagcaacccctgcaccagctgtgtgcccccagccccctgcaccccctgtgccccccggccccgctgtggcccctgcaacagctttgtgaggtag

SEQ ID NO: 156863 - DNA, 1674 bp, synthetic construct
  misc_feature 1..1674: note = Description of Artificial Sequence: Synthetic coding sequence
  source 1..1674: mol_type = other DNA
atggtgtccaagctgaccagcctgcagcaggagctgctgagcgccctgctgagcagtggagtgaccaaggaggtgctggtgcaggccctggaggagctgctgcccagccccaactttggagtgaagctggagaccctgcccctgagccctggcagcggggctgagccagacaccaagcctgtgttccacaccctgaccaatggacatgccaagggccgcctgtctggagatgagggctctgaagatggagatgattatgacaccccacccatcctgaaggagctgcaggccctgaacacagaggaggccgctgagcagagagctgaggtggacaggatgctgtctgaggacccctggagggctgccaagatgatcaagggctacatgcagcagcacaacatcccccagcgggaggtggtggatgtgacaggcctgaaccagagccacctgagccagcacctgaacaagggcacccccatgaagacccagaagagagctgccctgtacacctggtacgtgaggaagcagcgggagatcctgcggcagttcaaccagacagtgcagagcagcggcaacatgacagacaagagcagccaggaccagctgctcttcctgtttcctgagttcagccagcagagccacggccctggccagagtgatgatgcctgcagcgagcccaccaacaagaagatgagaagaaaccgcttcaagtggggccctgccagccagcagatcctgtaccaggcctatgaccggcagaagaaccccagcaaggaggagcgggaggccctggtggaggagtgcaacagagctgagtgcctgcagaggggcgtgagccccagcaaggcccacggcctgggcagcaacctggtgacagaggtgcgggtgtacaactggtttgccaacagaaggaaggaggaggccttccggcagaagctggccatggatgcctacagcagcaaccagacccacagcctgaaccccctgctgagccacggcagcccccaccaccagcccagcagcagcccccccaacaagctgagcggcgtgcgctacagccagcagggcaacaatgagatcaccagcagcagcaccatcagccaccacggcaacagcgccatggtgaccagccagagcgtgctgcagcaggtgtccccagccagcctggaccccggccacaacctgctgagcccagatggcaagatgatctctgtgtctgggggcggcctgccccctgtgtccaccctgaccaacatccacagcctgagccaccacaacccccagcagagccagaacctgatcatgacccccctgtctggagtgatggccatcgcccagagcctgaacaccagccaggcccagagcgtgcctgtgatcaacagcgtggccggcagcctggccgccctgcagcctgtgcagttcagccagcagctgcacagcccccaccagcagcccctgatgcagcagagccctggcagccacatggcccagcagcccttcatggctgctgtgacccagctgcagaacagccacatgtatgcccacaagcaggagcccccccagtacagccacaccagccgcttccccagcgccatggtggtgacagacaccagcagcatcagcaccctgaccaacatgagcagcagcaagcagtgccccctgcaggcctggtag

SEQ ID NO: 156864 - DNA, 1215 bp, synthetic construct
  misc_feature 1..1215: note = Description of Artificial Sequence: Synthetic coding sequence
  source 1..1215: mol_type = other DNA
atgagctacagctgtggcctgcccagcctgagctgcaggaccagctgcagcagccggccctgtgtgccccccagctgccacggctgcaccctgcccggggcctgcaacatcccagccaacgtgagcaactgcaactggttctgtgagggcagcttcaatggaagtgagaaggagaccatgcagttcctgaatgaccggctggccagctacctggagaaggtgcggcagctggagcgggacaatgctgagctggagaacctgatccgggagaggagccagcagcaggagcccctggtgtgtgccagctaccagagctacttcaagaccatcgaggagctgcagcagaagatcctgtgcagcaagtcagaaaatgcccggctggtggtgcagattgacaatgccaagctggccagtgatgacttccgcaccaagtatgaaacagagctgagcctgcggcagctggtggagagtgacatcaatggcctgcggcgcatcctggatgagctgaccctgtgccgcagtgacctggaggcccaggtggagagcctgaaggaggagctgctgtgcctgaagcagaaccacgagcaggaggtgaacaccctgcgctgccagctgggggaccggctgaatgtggaggtggatgctgcccccaccgtggacctgaaccaggtgctgaatgagaccaggagccagtatgaggccctggtggagaccaacagaagagaggtggagcagtggtttgccacccagacagaggagctgaacaagcaggtggtgagcagcagcgagcagctgcagagctaccaggccgagatcatcgagctgcggaggacagtgaatgccctggagattgagctgcaggcccagcacaacctgcgggacagcctggagaacaccctgacagaaagtgaggcccgctacagcagccagctgagccaggtgcagaggctcatcaccaacgtggagagccagctggccgagatccgcagtgacctggagcggcagaaccaggagtaccaggtgctgctggatgtgcgggcccggctggagtgtgagatcaacacctaccgcagcctgctggagagcgaggactgcaagctgcccagcaacccctgtgccaccaccaatgcctgtgacaagagcacaggcccctgcatcagcaacccctgtggcctgcgggcccgctgtggcccctgcaacaccttcggctactag

SEQ ID NO: 156865 - DNA, 1215 bp, synthetic construct
  misc_feature 1..1215: note = Description of Artificial Sequence: Synthetic coding sequence
  source 1..1215: mol_type = other DNA
atgccctacaacttctgcctgcccagcctgagctgcaggaccagctgcagcagccggccctgtgtgccccccagctgccacggctacaccctgcccggggcctgcaacatcccagccaacgtgagcaactgcaactggttctgtgagggcagcttcaatggaagtgagaaggagaccatgcagttcctgaatgaccggctggccagctacctggagaaggtgcggcagctggagcgggacaatgctgagctggagaacctgatccgggagaggagccagcagcaggagcccctgctgtgccccagctaccagagctacttcaagaccatcgaggagctgcagcagaagatcctgtgcagcaagtcagaaaatgcccggctggtggtgcagattgacaatgccaagctggccgcagatgacttccgcaccaagtaccagacagagcagagcctgcggcagctggtggagagtgacatcaacagcctgcggcgcatcctggatgagctgaccctgtgccgcagtgacctggaggcccagatggagagcctgaaggaggagctgctgagcctgaagcagaaccacgagcaggaggtgaacaccctgcgctgccagctgggggaccggctgaatgtggaggtggatgctgccccagctgtggacctgaaccaggtgctgaatgagaccaggaaccagtatgaggccctggtggagaccaacagaagagaggtggagcagtggtttgccacccagacagaggagctgaacaagcaggtggtgagcagcagcgagcagctgcagagctaccaggccgagatcatcgagctgcggaggacagtgaatgccctggagattgagctgcaggcccagcacaacctgcgctacagcctggagaacaccctgacagaaagtgaggcccgctacagcagccagctgagccaggtgcagagcctcatcaccaacgtggagagccagctggccgagatccgcagtgacctggagcggcagaaccaggagtaccaggtgctgctggatgtgcgggcccggctggagtgtgagatcaacacctaccgcagcctgctggagagcgaggactgcaagctgcccagcaacccctgtgccaccaccaatgcctgtgagaagcccatcggcagctgtgtgaccaacccctgtggccccaggagccgctgtggcccctgcaacaccttcggctactag

SEQ ID NO: 156866 - DNA, 1311 bp, synthetic construct
  misc_feature 1..1311: note = Description of Artificial Sequence: Synthetic coding sequence
  source 1..1311: mol_type = other DNA
atgctgtatgccaagcccccacccaccatcaatggcatcaagggcctgcagaggaaggagcggctgaagccagcccacatccacctgcagcagctgacctgcttcagcatcacctgcagcagcaccatgagctacagctgctgcctgcccagcctgggctgcaggaccagctgcagcagccggccctgtgtgccccccagctgccacggctacaccctgcccggggcctgcaacatcccagccaacgtgagcaactgcaactggttctgtgagggcagcttcaatggaagtgagaaggagaccatgcagttcctgaatgaccggctggccagctacctggagaaggtgcggcagctggagcgggacaatgctgagctggagaagctgatccaggagaggagccagcagcaggagcccctgctgtgccccagctaccagagctacttcaagaccatcgaggagctgcagcagaagatcctgtgtgccaaggcagaaaatgcccggctggtggtgaacatcgacaatgccaagctggccagtgatgacttccgcagcaagtaccagacagagcagagcctgcggctgctggtggagagtgacatcaacagcatccgccgcatcctggatgagctgaccctgtgcaagagtgacctggagagccaggtggagagcctgcgggaggagctgatctgcctgaagaagaaccacgaggaggaggtgaacaccctgcggagccagctgggggaccggctgaatgtggaggtggacacagcccccaccgtggacctgaaccaggtgctgaatgagaccaggagccagtatgaggccctggtggagatcaacagaagagaggtggagcagtggtttgccacccagacagaggagctgaacaagcaggtggtgagcagcagcgagcagctgcagagctgccaggccgagatcatcgagctgcggaggacagtgaatgccctggagattgagctgcaggcccagcacaacctgcgggacagcctggagaacaccctgacagaaagtgaggcccactacagcagccagctgagccaggtgcagagcctcatcaccaacgtggagagccagctggccgagatccgctgtgacctggagcggcagaaccaggagtaccaggtgctgctggatgtgcgggcccggctggagtgtgagatcaacacctaccgcagcctgctggagagcgaggactgcaagctgccctgcaacccctgtgccaccaccaatgccagcggcaacagctgtggcccctgtggcaccagccagaagggctgctgcaactag

SEQ ID NO: 156867 - DNA, 1185 bp, synthetic construct
  misc_feature 1..1185: note = Description of Artificial Sequence: Synthetic coding sequence
  source 1..1185: mol_type = other DNA
atgagctacagctgctgcctgcccagcctgggctgcaggaccagctgcagcagccggccctgtgtgccccccagctgccacggctacaccctgcccggggcctgcaacatcccagccaacgtgagcaactgcaactggttctgtgagggcagcttcaatggaagtgagaaggagaccatgcagttcctgaatgaccggctggccagctacctggagaaggtgcggcagctggagcgggacaatgctgagctggagaagctgatccaggagaggagccagcagcaggagcccctgctgtgccccagctaccagagctacttcaagaccatcgaggagctgcagcagaagatcctgtgtgccaaggcagaaaatgcccggctggtggtgaacatcgacaatgccaagctggccagtgatgacttccgcagcaagtaccagacagagcagagcctgcggctgctggtggagagtgacatcaacagcatccgccgcatcctggatgagctgaccctgtgcaagagtgacctggagagccaggtggagagcctgcgggaggagctgatctgcctgaagaagaaccacgaggaggaggtgaacaccctgcggagccagctgggggaccggctgaatgtggaggtggacacagcccccaccgtggacctgaaccaggtgctgaatgagaccaggagccagtatgaggccctggtggagatcaacagaagagaggtggagcagtggtttgccacccagacagaggagctgaacaagcaggtggtgagcagcagcgagcagctgcagagctgccaggccgagatcatcgagctgcggaggacagtgaatgccctggagattgagctgcaggcccagcacaacctgcgggacagcctggagaacaccctgacagaaagtgaggcccactacagcagccagctgagccaggtgcagagcctcatcaccaacgtggagagccagctggccgagatccgctgtgacctggagcggcagaaccaggagtaccaggtgctgctggatgtgcgggcccggctggagtgtgagatcaacacctaccgcagcctgctggagagcgaggactgcaagctgccctgcaacccctgtgccaccaccaatgccagcggcaacagctgtggcccctgtggcaccagccagaagggctgctgcaactag

SEQ ID NO: 156868 - DNA, 1278 bp, synthetic construct
  misc_feature 1..1278: note = Description of Artificial Sequence: Synthetic coding sequence
  source 1..1278: mol_type = other DNA
atgtacagcagcagcagctgcaagctgcccagcctgagccctgtggcccggagcttcagcgcctgcagcgtgggcctgggccgcagcagctaccgggccaccagctgcctgcctgccctgtgcctgcctgctgggggctttgccaccagctacagcggcggcggcggctggtttggagagggcatcctgactggaaatgagaaggagaccatgcagagcctgaatgaccggctggccggctacctggagaaggtgcggcagctggagcaggagaatgccagcctggagagccgcatccgggagtggtgtgagcagcaggtgccctacatgtgcccagactaccagagctacttccgcaccatcgaggagctgcagaagaagaccctgtgcagcaaggccgagaatgcccggctggtggtggagattgacaatgccaagctggccgcagatgacttccgcaccaagtatgaaacagaggtgtccctgcggcagctggtggagagtgacatcaatggcctgcggcgcatcctggatgacctgaccctgtgcaagagtgacctggaggcccaggtggagagcctgaaggaggagctgctgtgcctgaagaagaaccacgaggaggaggtgaacagcctgcgctgccagctgggggaccggctgaatgtggaggtggatgctgcccctcctgtggacctgaacagagtgctggaggagatgcgctgccagtatgagaccctggtggagaacaacagaagagatgctgaggactggctggacacccagagcgaggagctgaaccagcaggtggtgagcagcagcgagcagctgcagagctgccaggccgagatcatcgagctgcggaggacagtgaatgccctggagattgagctgcaggcccagcacagcatgagagatgccctggagagcaccctggccgagacagaggcccgctacagcagccagctggcccagatgcagtgcatgatcaccaacgtggaggcccagctggccgagatccgggctgacctggagcggcagaaccaggagtaccaggtgctgctggatgtgcgggcccggctggagtgtgagatcaacacctaccggggcctgctggagagcgaggacagcaagctgccctgcaacccctgtgccccagactacagccccagcaagagctgcctgccctgcctgcctgctgccagctgtggccccagcgctgcccggaccaactgcagcccccggcccatctgtgtgccctgccctgggggccgcttctag

SEQ ID NO: 156869 - DNA, 1368 bp, synthetic construct
  misc_feature 1..1368: note = Description of Artificial Sequence: Synthetic coding sequence
  source 1..1368: mol_type = other DNA
atggccagcaagtgcctgaaggccggcttcagcagcggcagcctgaagagccctgggggcgccagcggcggcagcaccagggtgtctgccatgtacagcagcagcagctgcaagctgcccagcctgagccctgtggcccggagcttcagcgcctgcagcgtgggcctgggccgcagcagctaccgggccaccagctgcctgcctgccctgtgcctgcctgctgggggctttgccaccagctacagcggcggcggcggctggtttggagagggcatcctgactggaaatgagaaggagaccatgcagagcctgaatgaccggctggccggctacctggagaaggtgcggcagctggagcaggagaatgccagcctggagagccgcatccgggagtggtgtgagcagcaggtgccctacatgtgcccagactaccagagctacttccgcaccatcgaggagctgcagaagaagaccctgtgcagcaaggccgagaatgcccggctggtggtggagattgacaatgccaagctggccgcagatgacttccgcaccaagtatgaaacagaggtgtccctgcggcagctggtggagagtgacatcaatggcctgcggcgcatcctggatgacctgaccctgtgcaagagtgacctggaggcccaggtggagagcctgaaggaggagctgctgtgcctgaagaagaaccacgaggaggaggtgaacagcctgcgctgccagctgggggaccggctgaatgtggaggtggatgctgcccctcctgtggacctgaacagagtgctggaggagatgcgctgccagtatgagaccctggtggagaacaacagaagagatgctgaggactggctggacacccagagcgaggagctgaaccagcaggtggtgagcagcagcgagcagctgcagagctgccaggccgagatcatcgagctgcggaggacagtgaatgccctggagattgagctgcaggcccagcacagcatgagagatgccctggagagcaccctggccgagacagaggcccgctacagcagccagctggcccagatgcagtgcatgatcaccaacgtggaggcccagctggccgagatccgggctgacctggagcggcagaaccaggagtaccaggtgctgctggatgtgcgggcccggctggagtgtgagatcaacacctaccggggcctgctggagagcgaggacagcaagctgccctgcaacccctgtgccccagactacagccccagcaagagctgcctgccctgcctgcctgctgccagctgtggccccagcgctgcccggaccaactgcagcccccggcccatctgtgtgccctgccctgggggccgcttctag

SEQ ID NO: 156870 - DNA, 1404 bp, synthetic construct
  misc_feature 1..1404: note = Description of Artificial Sequence: Synthetic coding sequence
  source 1..1404: mol_type = other DNA
atggccacccagacctgcacccccaccttcagcacaggcagcatcaagggcctgtgtggcacagctgggggcatcagccgggtgagcagcatccgctctgtgggcagctgccgggtgcccagcctggccggggccgccggctacatcagcagcgcccggagcggcctgagcggcctgggcagctgcctgcccggcagctacctgagcagcgagtgccacaccagcggctttgtgggcagcggcggctggttctgtgagggcagcttcaacggcagcgagaaggagaccatgcagttcctgaatgaccggctggccaactacctggagaaggtgcggcagctggagagagaaaatgctgagctggagagccgcatccaggagtggtatgagttccagatcccctacatctgcccagactaccagagctacttcaagaccatcgaggacttccagcagaagatcctgctgaccaagtcagaaaatgcccggctggtgctgcagattgacaatgccaagctggccgcagatgacttccgcaccaagtatgaaacagagctgagcctgcggcagctggtggaggccgacatcaatggcctgcggcgcatcctggatgagctgaccctgtgcaaggctgacctggaggcccaggtggagagcctgaaggaggagctgatgtgcctgaagaagaaccacgaggaggaggtgtctgtgctgcgctgccagctgggggaccggctgaatgtggaggtggatgctgcccctcctgtggacctgaacaagatcctggaggacatgcgctgccagtatgaggccctggtggagaacaacagaagagatgtggaggcctggttcaacacccagacagaggagctgaaccagcaggtggtgagcagcagcgagcagctgcagtgctgccagacagagatcatcgagctgcggaggacagtgaatgccctggagattgagctgcaggcccagcacagcatgaggaacagcctggagagcaccctggccgagacagaggcccgctacagcagccagctggcccagatgcagtgcctgatcagcaatgtggaggcccagctgtctgagatccgctgtgacctggagcggcagaaccaggagtaccaggtgctgctggatgtgaaggcccggctggagggggagatcgccacctaccgccacctgctggagggggaggactgcaagctgcccccccagccctgtgccacagcctgcaagcctgtgatccgggtgcccagcgtgccccctgtgccctgtgtgcccagcgtgccctgcaccccagccccccaggtgggcacccagatccgcaccatcacagaggagatcagagatggcaaggtgatcagcagccgggagcacgtgcagagccggcccctgtag

SEQ ID NO: 156871 - DNA, 1254 bp, synthetic construct
  misc_feature 1..1254: note = Description of Artificial Sequence: Synthetic coding sequence
  source 1..1254: mol_type = other DNA
atgctgcggagcggcctgagcggcctgggcagctgcctgcccggcagctacctgagcagcgagtgccacaccagcggctttgtgggcagcggcggctggttctgtgagggcagcttcaacggcagcgagaaggagaccatgcagttcctgaatgaccggctggccaactacctggagaaggtgcggcagctggagagagaaaatgctgagctggagagccgcatccaggagtggtatgagttccagatcccctacatctgcccagactaccagagctacttcaagaccatcgaggacttccagcagaagatcctgctgaccaagtcagaaaatgcccggctggtgctgcagattgacaatgccaagctggccgcagatgacttccgcaccaagtatgaaacagagctgagcctgcggcagctggtggaggccgacatcaatggcctgcggcgcatcctggatgagctgaccctgtgcaaggctgacctggaggcccaggtggagagcctgaaggaggagctgatgtgcctgaagaagaaccacgaggaggaggtgtctgtgctgcgctgccagctgggggaccggctgaatgtggaggtggatgctgcccctcctgtggacctgaacaagatcctggaggacatgcgctgccagtatgaggccctggtggagaacaacagaagagatgtggaggcctggttcaacacccagacagaggagctgaaccagcaggtggtgagcagcagcgagcagctgcagtgctgccagacagagatcatcgagctgcggaggacagtgaatgccctggagattgagctgcaggcccagcacagcatgaggaacagcctggagagcaccctggccgagacagaggcccgctacagcagccagctggcccagatgcagtgcctgatcagcaatgtggaggcccagctgtctgagatccgctgtgacctggagcggcagaaccaggagtaccaggtgctgctggatgtgaaggcccggctggagggggagatcgccacctaccgccacctgctggagggggaggactgcaagctgcccccccagccctgtgccacagcctgcaagcctgtgatccgggtgcccagcgtgccccctgtgccctgtgtgcccagcgtgccctgcaccccagccccccaggtgggcacccagatccgcaccatcacagaggagatcagagatggcaaggtgatcagcagccgggagcacgtgcagagccggcccctgtag

SEQ ID NO: 156872 - DNA, 1200 bp, synthetic construct
  misc_feature 1..1200: note = Description of Artificial Sequence: Synthetic coding sequence
  source 1..1200: mol_type = other DNA
atggcccggcgcttccaggaggagctggccgccttcctgtttgaatatgacacccccaggatggtgctggtgaggaacaagaaggtgggcgtcatcttccgcctcatccagctggtggtgctggtgtatgtgattggctgggtgttcctgtatgagaagggctaccagaccagcagcggcctcatcagctctgtgtctgtgaagctgaagggcctggccgtgacccagctgcccggcctgggcccccaggtgtgggatgtggccgactatgtgtttcctgcccagggcgacaacagctttgtggtgatgaccaacttcatcgtgacccccaagcagacccagggctactgtgccgagcaccctgagggcggcatctgcaaggaggacagcggctgcacccctgggaaggccaagaggaaggcccagggcatcagaactggaaaatgtgtggccttcaatgacacagtgaagacctgtgagatcttcggctggtgccctgtggaggtggatgatgacatccccaggcctgccctgctgcgggaggccgagaacttcaccctcttcatcaagaacagcatctccttcccccgcttcaaggtgaacagaagaaacctggtggaggaggtgaatgctgcccacatgaagacctgcctcttccacaagaccctgcaccccctgtgccctgtgttccagctgggctacgtggtgcaggagagcggccagaacttcagcaccctggccgagaagggcggcgtggtgggcatcaccatcgactggcactgtgacctggactggcacgtgcgccactgccggcccatctatgagttccacggcctgtatgaggagaagaacctgagccctggcttcaacttccgctttgcccggcactttgtggagaatggcaccaactaccgccacctgttcaaggtgtttggcatccgctttgacatcctggtggatggcaaggccggcaagtttgacatcatccccaccatgaccaccatcggcagcggcatcggcatcttcggcgtggccaccgtgctgtgtgacctgctgctgctgcacatcctgcccaagaggcactactacaagcagaagaagttcaagtatgcagaggacatgggccctggagctgctgagcgggacctggccgccaccagcagcaccctgggcctgcaggagaacatgaggaccagctag

SEQ ID NO: 156873 - DNA, 1371 bp, synthetic construct
  misc_feature 1..1371: note = Description of Artificial Sequence: Synthetic coding sequence
  source 1..1371: mol_type = other DNA
atgaccagcagctacagcagcagcagctgccccctgggctgcaccatggcccctggggccagaaatgtgtctgtgagccccatcgacatcggctgccagcccggggctgaggccaacatcgcccccatgtgcctgctggccaacgtggcccacgccaacagagtgcgggtgggcagcacccccctgggccggcccagcctgtgcctgccccccacctgccacacagcctgccccctgcccggcacctgccacatccctggcaacatcggcatctgtggggcctatggagagaacaccctgaatggacatgagaaggagaccatgcagttcctgaatgaccggctggccaactacctggagaaggtgcggcagctggagcaggagaatgctgagctggaggccaccctgctggagaggagcaaatgtcatgagagcacagtgtgcccagactaccagagctacttccacaccatcgaggagctgcagcagaagatcctgtgcagcaaggcagaaaatgcccggctcatcgtgcagattgacaatgccaagctggccgcagatgacttccgcatcaagctggagagcgagaggagcctgcggcagctggtggaggccgacaagtgtggcacccagaagctgctggatgatgccaccctggccaaggctgacctggaggcccagcaggagagcctgaaggaggagcagctgagcctgaagagcaaccacgagcaggaggtgaagatcctgcggagccagctgggggagaagctgagaattgagctggacatcgagcccaccatcgacctgaacagagtgctgggggagatgagggcccagtatgaggccatgctggagaccaaccggcaggatgtggagcagtggttccaggcccagagcgagggcatcagcctgcaggacatgagctgcagcgaggagctgcagtgctgccagagcgagatcctggagctgcgctgcaccgtgaatgccctggaggtggagcggcaggcccagcacaccctgaaggactgcctgcagaacagcctgtgtgaggccgaggacagatttggaacagagctggcccagatgcagagcctcatcagcaatgtggaggagcagctgtctgagatccgggctgacctggagcggcagaaccaggagtaccaggtgctgctggatgtgaagacccggctggagaatgaaattgccacctacagaaacctgctggagagcgaggactgcaagctgccctgcaacccctgcagcaccagccccagctgtgtgacagccccctgtgccccccggcccagctgtggcccctgcaccacctgtggccccacctgtggggccagcaccaccggcagccgcttctag

SEQ ID NO: 156874 - DNA, 1785 bp, synthetic construct
  misc_feature 1..1785: note = Description of Artificial Sequence: Synthetic coding sequence
  source 1..1785: mol_type = other DNA
atgacctctgtgggcgtcttcagtgacatgctgaatggctgtgggaaggatggcctggtgccccgggccaagcccagagatgtgtctgacttcagcctgtatgccccagccaccaagccctgctgcagcaggacctacaagagaagaaggctgcgggccccagccctgaccggcctgggccctgtgaccagcctcatcgcccccagcagcctgtctgctgccatgattgcccggcagcagtgtgtgcggggcggcccccggggcttcagctgtggcagcgccatcgtgggcggcggcaagagaggagccttcagctctgtgtccatgtctgggggcgccggccgctgcagcagcggcggcttcggcagccgcagcctgtacaacctgcggggcaacaagagcatctccatgtctgtggccggcagccggcagggcgcctgcttcggcggggccggcggcttcggcaccggcggctttggaggcggctttggaggcagcttcagcggcaagggcggccctggcttccctgtgtgcccagctgggggcatccaggaggtgaccatcaaccagagcctgctgacccccctgcacgtggagattgatcctgagatccagaaggtgaggacagaggagcgggagcagatcaagctgctgaacaacaagtttgccagcttcatcgacaaggtgcagttcctggagcagcagaacaaggtgctggagaccaagtggaacctgctgcagcagcagaccaccaccaccagcagcaagaacctggagcccctgtttgagacctacctgtctgtgctgaggaagcagctggacaccctgggcaatgacaagggccgcctgcagagcgagctgaagaccatgcaggacagcgtggaggacttcaagaccaagtatgaggaggagatcaacaagaggacagctgctgaaaatgactttgtggtgctgaagaaggatgtggatgctgcctacctgaacaaggtggagctggaggccaaggtggacagcctgaatgatgagatcaacttcctgaaggtgctgtatgatgctgagctgagccagatgcagacccacgtgtctgacacctctgtggtgctgtccatggacaacaacagaaacctggacctggacagcatcatcgccgaggtgcgggcccagtatgaggagatcgcccagaggagcaaggccgaggccgaggccctgtaccagaccaaggtgcagcagctgcagatctctgtggaccagcacggggacaacctgaagaacaccaagtcagaaattgctgagctgaacaggatgatccagaggctgcgggcagaaattgagaacatcaagaagcagtgccagaccctgcaggtgtctgtggctgatgctgagcagagaggagaaaatgccctgaaggatgcccacagcaagagggtggagctggaggccgccctgcagcaggccaaggaggagctggccaggatgctgcgggagtaccaggagctgatgtctgtgaagctggccctggacatcgagatcgccacctacaggaagctgctggagggggaggagtacaggatgtctggagagtgccagagcgctgtgtccatctctgtggtgtctggcagcaccagcactggaggcatcagcggcggcctgggcagcggcagcggcttcggcctgagcagcggcttcggcagcggcagcggcagcggcttcggctttggaggctctgtgtctggcagcagcagcagcaagatcatcagcaccaccaccctgaacaagagaagatag

SEQ ID NO: 156875 - DNA, 1503 bp, synthetic construct
  misc_feature 1..1503: note = Description of Artificial Sequence: Synthetic coding sequence
  source 1..1503: mol_type = other DNA
atgattgcccggcagcagtgtgtgcggggcggcccccggggcttcagctgtggcagcgccatcgtgggcggcggcaagagaggagccttcagctctgtgtccatgtctgggggcgccggccgctgcagcagcggcggcttcggcagcaagggggcctgcttcggcggggccggcggcttcggcaccggcggctttggaggcggctttggaggcagcttcagcggcaagggcggccctggcttccctgtgtgcccagctgggggcatccaggaggtgaccatcaaccagagcctgctgacccccctgcacgtggagattgatcctgagatccagaaggtgaggacagaggagcgggagcagatcaagctgctgaacaacaagtttgccagcttcatcgacaaggtgcagttcctggagcagcagaacaaggtgctggagaccaagtggaacctgctgcagcagcagaccaccaccaccagcagcaagaacctggagcccctgtttgagacctacctgtctgtgctgaggaagcagctggacaccctgggcaatgacaagggccgcctgcagagcgagctgaagaccatgcaggacagcgtggaggacttcaagaccaagtatgaggaggagatcaacaagaggacagctgctgaaaatgactttgtggtgctgaagaaggatgtggatgctgcctacctgaacaaggtggagctggaggccaaggtggacagcctgaatgatgagatcaacttcctgaaggtgctgtatgatgctgagctgagccagatgcagacccacgtgtctgacacctctgtggtgctgtccatggacaacaacagaaacctggacctggacagcatcatcgccgaggtgcgggcccagtatgaggagatcgcccagaggagcaaggccgaggccgaggccctgtaccagaccaaggtgcagcagctgcagatctctgtggaccagcacggggacaacctgaagaacaccaagtcagaaattgctgagctgaacaggatgatccagaggctgcgggcagaaattgagaacatcaagaagcagtgccagaccctgcaggtgtctgtggctgatgctgagcagagaggagaaaatgccctgaaggatgcccacagcaagagggtggagctggaggccgccctgcagcaggccaaggaggagctggccaggatgctgcgggagtaccaggagctgatgtctgtgaagctggccctggacatcgagatcgccacctacaggaagctgctggagggggaggagtacaggatgtctggagagtgccagagcgctgtgtccatctctgtggtgtctggcagcaccagcactggaggcatcagcggcggcctgggcagcggcagcggcttcggcctgagcagcggcttcggcagcggcagcggcagcggcttcggctttggaggctctgtgtctggcagcagcagcagcaagatcatcagcaccaccaccctgaacaagagaagatag

SEQ ID NO: 156876 - DNA, 1563 bp, synthetic construct
  misc_feature 1..1563: note = Description of Artificial Sequence: Synthetic coding sequence
  source 1..1563: mol_type = other DNA
atgattgcccggcagcagtgtgtgcggggcggcccccggggcttcagctgtggcagcgccatcgtgggcggcggcaagagaggagccttcagctctgtgtccatgtctgggggcgccggccgctgcagcagcggcggcttcggcagccgcagcctgtacaacctgcggggcaacaagagcatctccatgtctgtggccggcagccggcagggcgcctgcttcggcggggccggcggcttcggcaccggcggctttggaggcggctttggaggcagcttcagcggcaagggcggccctggcttccctgtgtgcccagctgggggcatccaggaggtgaccatcaaccagagcctgctgacccccctgcacgtggagattgatcctgagatccagaaggtgaggacagaggagcgggagcagatcaagctgctgaacaacaagtttgccagcttcatcgacaaggtgcagttcctggagcagcagaacaaggtgctggagaccaagtggaacctgctgcagcagcagaccaccaccaccagcagcaagaacctggagcccctgtttgagacctacctgtctgtgctgaggaagcagctggacaccctgggcaatgacaagggccgcctgcagagcgagctgaagaccatgcaggacagcgtggaggacttcaagaccaagtatgaggaggagatcaacaagaggacagctgctgaaaatgactttgtggtgctgaagaaggatgtggatgctgcctacctgaacaaggtggagctggaggccaaggtggacagcctgaatgatgagatcaacttcctgaaggtgctgtatgatgctgagctgagccagatgcagacccacgtgtctgacacctctgtggtgctgtccatggacaacaacagaaacctggacctggacagcatcatcgccgaggtgcgggcccagtatgaggagatcgcccagaggagcaaggccgaggccgaggccctgtaccagaccaaggtgcagcagctgcagatctctgtggaccagcacggggacaacctgaagaacaccaagtcagaaattgctgagctgaacaggatgatccagaggctgcgggcagaaattgagaacatcaagaagcagtgccagaccctgcaggtgtctgtggctgatgctgagcagagaggagaaaatgccctgaaggatgcccacagcaagagggtggagctggaggccgccctgcagcaggccaaggaggagctggccaggatgctgcgggagtaccaggagctgatgtctgtgaagctggccctggacatcgagatcgccacctacaggaagctgctggagggggaggagtacaggatgtctggagagtgccagagcgctgtgtccatctctgtggtgtctggcagcaccagcactggaggcatcagcggcggcctgggcagcggcagcggcttcggcctgagcagcggcttcggcagcggcagcggcagcggcttcggctttggaggctctgtgtctggcagcagcagcagcaagatcatcagcaccaccaccctgaacaagagaagatag

SEQ ID NO: 156877 - DNA, 1695 bp, synthetic construct
  misc_feature 1..1695: note = Description of Artificial Sequence: Synthetic coding sequence
  source 1..1695: mol_type = other DNA
atggccagcaccagcaccaccatccgcagccacagcagcagcagaagaggcttcagcgccaacagcgcccggctgcccggggtgagccgcagcggcttcagctctgtgtctgtgagccgcagccggggcagcggcggcctgggcggggcctgtggcggggccggcttcggcagccgcagcctgtatggcctgggcggcagcaagaggatcagcatcggcggcggcagctgtgccatcagcggcggctacggcagcagagctgggggcagctatggctttggaggagctggcagcggcttcggctttggaggaggagctggcatcggcttcggcctgggcggcggggccggcctggccggcggctttggaggccctggcttccctgtgtgccccccaggcggcatccaggaggtgacagtgaaccagagcctgctgacccccctgaacctgcagattgaccccaccatccagagggtgcgggcagaggagcgggagcagatcaagaccctgaacaacaagtttgccagcttcatcgacaaggtgcgcttcctggagcagcagaacaaggtgctggagaccaagtggaccctgctgcaggagcagggcaccaagacagtgcggcagaacctggagcccctgtttgagcagtacatcaacaacctgcggcggcagctggacagcatcgtgggggagcggggccgcctggacagcgagctgcggggcatgcaggacctggtggaggacttcaagaacaagtatgaagatgagatcaacaagaggacagctgctgaaaatgaatttgtgaccctgaagaaggatgtggatgctgcctacatgaacaaggtggagctgcaggccaaggctgacaccctgacagatgagatcaacttcctgcgggccctgtatgatgctgagctgagccagatgcagacccacatcagtgacacctctgtggtgctgtccatggacaacaacagaaacctggacctggacagcatcatcgccgaggtgaaggcccagtatgaggagatcgcccagaggagcagagctgaggccgagagctggtaccagaccaagtatgaggagctgcaggtgacagctggaagacatggagatgacctgaggaacaccaagcaggagattgctgagatcaacaggatgatccagaggctgcggagtgaaattgaccacgtgaagaagcagtgtgccaacctgcaggccgccatcgcagatgctgagcagagaggagagatggccctgaaggatgccaagaacaagctggagggcctggaggatgccctgcagaaggccaagcaggacctggcccggctgctgaaggagtaccaggagctgatgaatgtgaagctggccctggatgtggagatcgccacctacaggaagctgctggagggggaggagtgccgcctgaatggagagggcgtgggccaggtgaacatctctgtggtgcagagcacagtgagcagcggctatggaggagccagcggcgtgggcagcggcctgggcctgggcggcggcagcagctacagctatggcagcggcctgggcgtgggcggcggcttcagcagcagcagcggccgggccatcggcggcggcctgagctctgtgggcggcggcagcagcaccatcaagtacaccaccaccagcagcagcagcaggaagagctacaagcactag

SEQ ID NO: 156878 - DNA, 1563 bp, synthetic construct
  misc_feature 1..1563: note = Description of Artificial Sequence: Synthetic coding sequence
  source 1..1563: mol_type = other DNA
atggccagcaccagcaccaccatccgcagccacagcggcagccgcagcctgtatggcctgggcggcagcaagaggatcagcatcggcggcggcagctgtgccatcagcggcggctacggcagcagagctgggggcagctatggctttggaggagctggcagcggcttcggctttggaggaggagctggcatcggcttcggcctgggcggcggggccggcctggccggcggctttggaggccctggcttccctgtgtgccccccaggcggcatccaggaggtgacagtgaaccagagcctgctgacccccctgaacctgcagattgaccccaccatccagagggtgcgggcagaggagcgggagcagatcaagaccctgaacaacaagtttgccagcttcatcgacaaggtgcgcttcctggagcagcagaacaaggtgctggagaccaagtggaccctgctgcaggagcagggcaccaagacagtgcggcagaacctggagcccctgtttgagcagtacatcaacaacctgcggcggcagctggacagcatcgtgggggagcggggccgcctggacagcgagctgcggggcatgcaggacctggtggaggacttcaagaacaagtatgaagatgagatcaacaagaggacagctgctgaaaatgaatttgtgaccctgaagaaggatgtggatgctgcctacatgaacaaggtggagctgcaggccaaggctgacaccctgacagatgagatcaacttcctgcgggccctgtatgatgctgagctgagccagatgcagacccacatcagtgacacctctgtggtgctgtccatggacaacaacagaaacctggacctggacagcatcatcgccgaggtgaaggcccagtatgaggagatcgcccagaggagcagagctgaggccgagagctggtaccagaccaagtatgaggagctgcaggtgacagctggaagacatggagatgacctgaggaacaccaagcaggagattgctgagatcaacaggatgatccagaggctgcggagtgaaattgaccacgtgaagaagcagtgtgccaacctgcaggccgccatcgcagatgctgagcagagaggagagatggccctgaaggatgccaagaacaagctggagggcctggaggatgccctgcagaaggccaagcaggacctggcccggctgctgaaggagtaccaggagctgatgaatgtgaagctggccctggatgtggagatcgccacctacaggaagctgctggagggggaggagtgccgcctgaatggagagggcgtgggccaggtgaacatctctgtggtgcagagcacagtgagcagcggctatggaggagccagcggcgtgggcagcggcctgggcctgggcggcggcagcagctacagctatggcagcggcctgggcgtgggcggcggcttcagcagcagcagcggccgggccatcggcggcggcctgagctctgtgggcggcggcagcagcaccatcaagtacaccaccaccagcagcagcagcaggaagagctacaagcactag

SEQ ID NO: 156879 - DNA, 1695 bp, synthetic construct
  misc_feature 1..1695: note = Description of Artificial Sequence: Synthetic coding sequence
  source 1..1695: mol_type = other DNA
atggccagcaccagcaccaccatccgcagccacagcagcagcagaagaggcttcagcgccaacagcgcccggctgcccggggtgagccgcagcggcttcagcagcatctctgtgagccgcagccggggcagcggcggcctgggcggggcctgtggcggggccggcttcggcagccgcagcctgtatggcctgggcggcagcaagaggatcagcatcggcggcggcagctgtgccatcagcggcggctacggcagcagagctgggggcagctatggctttggaggagctggcagcggcttcggctttggaggaggagctggcatcggcttcggcctgggcggcggggccggcctggccggcggctttggaggccctggcttccctgtgtgccccccaggcggcatccaggaggtgacagtgaaccagagcctgctgacccccctgaacctgcagattgatcctgccatccagagggtgcgggcagaggagcgggagcagatcaagaccctgaacaacaagtttgccagcttcatcgacaaggtgcgcttcctggagcagcagaacaaggtgctggacaccaagtggaccctgctgcaggagcagggcaccaagacagtgcggcagaacctggagcccctgtttgagcagtacatcaacaacctgcggcggcagctggacaacatcgtgggggagcggggccgcctggacagcgagctgaggaacatgcaggacctggtggaggacctgaagaacaagtatgaagatgagatcaacaagaggacagctgctgaaaatgaatttgtgaccctgaagaaggatgtggatgctgcctacatgaacaaggtggagctgcaggccaaggctgacaccctgacagatgagatcaacttcctgcgggccctgtatgatgctgagctgagccagatgcagacccacatcagtgacacctctgtggtgctgtccatggacaacaacagaaacctggacctggacagcatcatcgccgaggtgaaggcccagtatgaggagatcgcccagaggagcagagctgaggccgagagctggtaccagaccaagtatgaggagctgcagatcacagctggaagacatggagatgacctgaggaacaccaagcaggagattgctgagatcaacaggatgatccagaggctgcggagtgaaattgaccacgtgaagaagcagtgtgccaacctgcaggccgccatcgcagatgctgagcagagaggagagatggccctgaaggatgccaagaacaagctggagggcctggaggatgccctgcagaaggccaagcaggacctggcccggctgctgaaggagtaccaggagctgatgaatgtgaagctggccctggatgtggagatcgccacctacaggaagctgctggagggggaggagtgccgcctgaatggagagggcgtgggccaggtgaacatctctgtggtgcagagcacagtgagcagcggctatggaggagccagcggcgtgggcagcggcctgggcctgggcggcggcagcagctacagctatggcagcggcctgggcgtgggcggcggcttcagcagcagcagcggccgggccactggaggcggcctgagctctgtgggcggcggcagcagcaccatcaagtacaccaccaccagcagcagcagcaggaagagctacaagcactag

SEQ ID NO: 156880 - DNA, 1575 bp, synthetic construct
  misc_feature 1..1575: note = Description of Artificial Sequence: Synthetic coding sequence
  source 1..1575: mol_type = other DNA
atggccagcaccagcaccaccatccgcagccacagcagcagcagaagaggcttcagcgccaacagcgcccggctgcccggggtgagccgcagcggcttcagcagcatctctgtgagccgcagccggggcagcggcggcctgggcggggcctgtggcggggccggcttcggcagccgcagcctgtatggcctgggcggcagcaagaggatcagcatcggcggcggcagctgtgccatcagcggcggctacggcagcagagctgggggcagctatggctttggaggagctggcagcggcttcggctttggaggaggagctggcatcggcttcggcctgggcggcggggccggcctggccggcggctttggaggccctggcttccctgtgtgccccccaggcggcatccaggaggtgacagtgaaccagagcctgctgacccccctgaacctgcagattgatcctgccatccagagggtgcgggcagaggagcgggagcagatcaagaccctgaacaacaagtttgccagcttcatcgacaaggtgcgcttcctggagcagcagaacaaggtgctggacaccaagtggaccctgctgcaggagcagggcaccaagacagtgcggcagaacctggagcccctgtttgagcagtacatcaacaacctgcggcggcagctggacaacatcgtgggggagcggggccgcctggacagcgagctgaggaacatgcaggacctggtggaggacctgaagaacaaggatgagatcaacttcctgcgggccctgtatgatgctgagctgagccagatgcagacccacatcagtgacacctctgtggtgctgtccatggacaacaacagaaacctggacctggacagcatcatcgccgaggtgaaggcccagtatgaggagatcgcccagaggagcagagctgaggccgagagctggtaccagaccaagtatgaggagctgcagatcacagctggaagacatggagatgacctgaggaacaccaagcaggagattgctgagatcaacaggatgatccagaggctgcggagtgaaattgaccacgtgaagaagcagtgtgccaacctgcaggccgccatcgcagatgctgagcagagaggagagatggccctgaaggatgccaagaacaagctggagggcctggaggatgccctgcagaaggccaagcaggacctggcccggctgctgaaggagtaccaggagctgatgaatgtgaagctggccctggatgtggagatcgccacctacaggaagctgctggagggggaggagtgccgcctgaatggagagggcgtgggccaggtgaacatctctgtggtgcagagcacagtgagcagcggctatggaggagccagcggcgtgggcagcggcctgggcctgggcggcggcagcagctacagctatggcagcggcctgggcgtgggcggcggcttcagcagcagcagcggccgggccactggaggcggcctgagctctgtgggcggcggcagcagcaccatcaagtacaccaccaccagcagcagcagcaggaagagctacaagcactag

SEQ ID NO: 156881 - DNA, 1695 bp, synthetic construct
  misc_feature 1..1695: note = Description of Artificial Sequence: Synthetic coding sequence
  source 1..1695: mol_type = other DNA
atggccagcaccagcaccaccatccgcagccacagcagcagcagaagaggcttcagcgccaacagcgcccggctgcccggggtgagccgcagcggcttcagcagcatctctgtgagccgcagccggggcagcggcggcctgggcggggcctgtggcggggccggcttcggcagccgcagcctgtatggcctgggcggcagcaagaggatcagcatcggcggcggcagctgtgccatcagcggcggctacggcagcagagctgggggcagctatggctttggaggagctggcagcggcttcggctttggaggaggagctggcatcggcttcggcctgggcggcggggccggcctggccggcggctttggaggccctggcttccctgtgtgccccccaggcggcatccaggaggtgacagtgaaccagagcctgctgacccccctgaacctgcagattgatcctgccatccagagggtgcgggcagaggagcgggagcagatcaagaccctgaacaacaagtttgccagcttcatcgacaaggtgcgcttcctggagcagcagaacaaggtgctggacaccaagtggaccctgctgcaggagcagggcaccaagacagtgcggcagaacctggagcccctgtttgagcagtacatcaacaacctgcggcggcagctggacagcatcgtgggggagcggggccgcctggacagcgagctgaggaacatgcaggacctggtggaggacctgaagaacaagtatgaagatgagatcaacaagaggacagctgctgaaaatgaatttgtgaccctgaagaaggatgtggatgctgcctacatgaacaaggtggagctgcaggccaaggctgacaccctgacagatgagatcaacttcctgcgggccctgtatgatgctgagctgagccagatgcagacccacatcagtgacacctctgtggtgctgtccatggacaacaacagaaacctggacctggacagcatcatcgccgaggtgaaggcccagtatgaggagatcgcccagaggagcagagctgaggccgagagctggtaccagaccaagtatgaggagctgcaggtgacagctggaagacatggagatgacctgaggaacaccaagcaggagattgctgagatcaacaggatgatccagaggctgcggagtgaaattgaccacgtgaagaagcagtgtgccagcctgcaggccgccatcgcagatgctgagcagagaggagagatggccctgaaggatgccaagaacaagctggagggcctggaggatgccctgcagaaggccaagcaggacctggcccggctgctgaaggagtaccaggagctgatgaatgtgaagctggccctggatgtggagatcgccacctacaggaagctgctggagggggaggagtgccgcctgaatggagagggcgtgggccaggtgaatgtgtctgtggtgcagagcaccatcagcagcggctatggaggagccagcggcgtgggcagcggcctgggcctgggcggcggcagcagctacagctatggcagcggcctgggcattggaggcggcttcagcagcagcagcggccgggccatcggcggcggcctgagctctgtgggcggcggcagcagcaccatcaagtacaccaccaccagcagcagcagcaggaagagctacaagcactag

SEQ ID NO: 156882 - DNA, 1650 bp, synthetic construct
  misc_feature 1..1650: note = Description of Artificial Sequence: Synthetic coding sequence
  source 1..1650: mol_type = other DNA
atggccagcaccagcaccaccatccgcagccacagcagcagccgcagcggcttcagcagcatctctgtgagccgcagccggggcagcggcggcctgggcggggcctgtggcggggccggcttcggcagccgcagcctgtatggcctgggcggcagcaagaggatcagcattggaggcggcagctgtgccatcagcggcggctacggcagccgggccggcggcagctatggctttggaggagctggcagcggctttggatttggaggaggagctggcattggatttggcctgggcggcggggccggcctggccggcggctttggaggccctggcttccctgtgtgccccccaggcggcatccaggaggtgacagtgaaccagagcctgctgacccccctgaacctgcagattgatcctgccatccagagggtgcgggcagaggagcgggagcagatcaagaccctgaacaacaagtttgccagcttcatcgacaaggtgcgcttcctggagcagcagaacaaggtgctggacaccaagtggaccctgctgcaggagcagggcaccaagacagtgcggcagaacctggagcccctgtttgagcagtacatcaacaacctgcggcggcagctggacagcatcgtgggggagcggggccgcctggacagcgagctgaggaacatgcaggacctggtggaggacctgaagaacaagtatgaagatgagatcaacaagaggacagctgctgaaaatgaatttgtgaccctgaagaaggatgtggatgctgcctacatgaacaaggtggagctgcaggccaaggctgacaccctgacagatgagatcaacttcctgcgggccctgtatgatgctgagctgagccagatgcagacccacatcagtgacacctctgtggtgctgtccatggacaacaacagaaacctggacctggacagcatcatcgccgaggtgaaggcccagtatgaggagatcgcccagaggagcagagctgaggccgagagctggtaccagaccaagtatgaggagctgcaggtgacagctggaagacatggagatgacctgaggaacaccaagcaggagattgctgagatcaacaggatgatccagaggctgcggagtgaaattgaccacgtgaagaagcagtgtgccagcctgcaggccgccatcgcagatgctgagcagagaggagagatggccctgaaggatgccaagaacaagctggagggcctggaggatgccctgcagaaggccaagcaggacctggcccggctgctgaaggagtaccaggagctgatgaatgtgaagctggccctggatgtggagatcgccacctacaggaagctgctggagggggaggagtgccgcctgaatggagaaggagtgggccaggtgaatgtgtctgtggtgcagagcaccatcagcagcggctacggcggggccagcggcgtgggcagcggcctgggcctgggcggcggcagcagctacagctatggcagcggcctgggcatcggcggcggcttcagcagcagcagcggccgggccatcggcggcggcctgagctctgtgggcggcggcagcagcaccatcaagtacaccaccaccagcagcagcagcaggaagagctacaagcactag

SEQ ID NO: 156883 - DNA, 1572 bp, synthetic construct
  misc_feature 1..1572: note = Description of Artificial Sequence: Synthetic coding sequence
  source 1..1572: mol_type = other DNA
atgagccggcagttcacctgcaagtctggagctgctgccaagggcggcttcagcggctgcagcgctgtgctgagcggcggcagcagcagcagcttccgggccggcagcaagggcctgagcggcggcttcggcagccgcagcctgtacagcctgggcggcgtgcgcagcctgaatgtggccagcggcagcggcaagagcggcggctacggcttcggccggggccgggccagcggctttgctggctccatgtttggatctgtggccctgggccctgtgtgccccaccgtgtgccccccaggcggcatccaccaggtgacagtgaatgaaagcctgctggcccccctgaatgtggagctggaccctgagatccagaaggtgcgggcccaggagcgggagcagatcaaggccctgaacaacaagtttgccagcttcatcgacaaggtgcgcttcctggagcagcagaaccaggtgctggagaccaagtgggagctgctgcagcagctggacctgaacaactgcaagaacaacctggagcccatcctggagggctacatcagcaacctgaggaagcagctggagaccctgagcggggacagagtgcggctggacagcgagctgagaaatgtgagagatgtggtggaggactacaagaagagatatgaggaggagatcaacaagaggacagctgctgaaaatgaatttgtgctgctgaagaaggatgtggatgctgcctatgccaacaaggtggagctgcaggccaaggtggagagcatggaccaggagatcaagttcttccgctgcctgtttgaagctgagatcacccagatccagagccacatcagtgacatgtctgtcatcctgtccatggacaacaacagaaacctggacctggacagcatcattgatgaggtgaggacccagtatgaggagatcgccctgaagagcaaggccgaggccgaggccctgtaccagaccaagttccaggagctgcagctggccgccggcagacatggagatgacctgaagaacaccaagaatgagatcagcgagctgaccaggctcatccagaggatccgctcagaaattgaaaatgtgaagaagcaggccagcaacctggagacagccatcgcagatgctgagcagagaggagacaatgccctgaaggatgcccgggccaagctggatgagctggagggcgccctgcaccaggccaaggaggagctggccaggatgctgcgggagtaccaggagctgatgagcctgaagctggccctggacatggagatcgccacctacaggaagctgctggagagcgaggagtgcaggatgtctggagagttccccagccctgtgtccatcagcatcatcagcagcaccagcggcggctctgtgtatggcttccggcccagcatggtgtctgggggctacgtggccaacagcagcaactgcatctctggagtgtgcagcgtgcggggcggggagggccgcagccggggcagcgccaatgactacaaggacaccctgggcaagggcagcagcctgagcgcccccagcaagaagaccagcaggtag

SEQ ID NO: 156884 - DNA, 1536 bp, synthetic construct
  misc_feature 1..1536: note = Description of Artificial Sequence: Synthetic coding sequence
  source 1..1536: mol_type = other DNA
atgagccggcagctgacccacttccccagaggagagcggctgggcttcagcggctgcagcgctgtgctgagcggcggcatcggcagcagcagcgccagcttccgggcccgggtgaagggcagcgccagctttggcagcaagagcctgagctgcctgggcggcagccgcagcctggccctgtctgctgctgccaggagaggaggcggccgcctgggcggctttgtgggcacagcctttggatctgctggcctgggccccaagtgccccagcgtgtgccccccaggcggcatcccccaggtgacagtgaacaagagcctgctggcccccctgaatgtggagatggaccctgagatccagagggtgcgggcccaggagcgggagcagatcaaggccctgaacaacaagtttgccagcttcatcgacaaggtgcgcttcctggagcagcagaaccaggtgctggagaccaagtggaacctgctgcagcagctggacctgaacaactgcaggaagaacctggagcccatctatgagggctacatcagcaacctgcagaagcagctggagatgctgtctggagatggagtgcggctggacagcgagctgaggaacatgcaggacctggtggaggactacaagaagagatatgaggtggagatcaacagaagaacagctgctgaaaatgaatttgtggtgctgaagaaggatgtggatgctgcctacatgaacaaggtggagctgcaggccaaggtggacagcctgacagatgagatcaagttcttcaagtgcctgtatgaaggagagatcacccagatccagagccacatcagtgacaccagcatcgtgctgtccatggacaacaacagagacctggacctggacagcatcatcgccgaggtgcgggcccagtatgaggagatcgccctgaagagcaaggccgaggccgagaccctgtaccagaccaagatccaggagctgcaggtgacagctggccagcacggagatgacctgaagctgaccaaggccgagatcagcgagctgaacagactcatccagaggatccgctcagaaattggaaatgtgaagaagcagtgtgccgacctggagacagccatcgcagatgctgagcagagaggagactgtgccctgaaggatgcccgggccaagctggatgagctggagggcgccctgcaccaggccaaggaggagctggccaggatgctgcgggagtaccaggagctggtgtccctgaagctggccctggacatggagatcgccacctacaggaagctgctggagagtgaagaatgtaggatgtctggagagtaccccaacagcgtgtccatcagcgtcatcagcagcaccaatgctggggccggcggggccggcttctccatgggctttggagccagcagcagctacagctacaagacagctgctgctgatgtgaagaccaagggcagctgtggcagcgagctgaaggaccccctggccaagaccagcggcagcagctgtgccaccaagaaggccagcaggtag

SEQ ID NO: 156885 - DNA, 1410 bp, synthetic construct
  misc_feature 1..1410: note = Description of Artificial Sequence: Synthetic coding sequence
  source 1..1410: mol_type = other DNA
atgagccggcagctgacccacttccccagaggagagcggctgggcttcagcggctgcagcgctgtgctgagcggcggcatcggcagcagcagcgccagcttccgggcccgggtgaagggcagcgccagctttggcagcaagagcctgagctgcctgggcggcagccgcagcctggccctgtctgctgctgccaggagaggaggcggccgcctgggcggctttgtgggcacagcctttggatctgctggcctgggccccaagtgccccagcgtgtgccccccaggcggcatcccccaggtgacagtgaacaagagcctgctggcccccctgaatgtggagatggaccctgagatccagagggtgcgggcccaggagcgggagcagatcaaggccctgaacaacaagtttgccagcttcatcgacaaggtgcgcttcctggagcagcagaaccaggtgctggagaccaagtggaacctgctgcagcagctggacctgaacaactgcaggaagaacctggagcccatctatgagggctacatcagcaacctgcagaagcagctggagatgctgtctggagatggagtgcggctggacagcgagctgaggaacatgcaggacctggtggaggactacaagaagagatatgaggtggagatcaacagaagaacagctgctgaaaatgaatttgtggtgctgaagaaggatgtggatgctgcctacatgaacaaggtggagctgcaggccaaggtggacagcctgacagatgagatcaagttcttcaagtgcctgtatgaaggagagatcacccagatccagagccacatcagtgacaccagcatcgtgctgtccatggacaacaacagagacctggacctggacagcatcatcgccgaggtgcgggcccagtatgaggagatcgccctgaagagcaaggccgaggccgagaccctgtaccagaccaagtgtgccgacctggagacagccatcgcagatgctgagcagagaggagactgtgccctgaaggatgcccgggccaagctggatgagctggagggcgccctgcaccaggccaaggaggagctggccaggatgctgcgggagtaccaggagctggtgtccctgaagctggccctggacatggagatcgccacctacaggaagctgctggagagtgaagaatgtaggatgtctggagagtaccccaacagcgtgtccatcagcgtcatcagcagcaccaatgctggggccggcggggccggcttctccatgggctttggagccagcagcagctacagctacaagacagctgctgctgatgtgaagaccaagggcagctgtggcagcgagctgaaggaccccctggccaagaccagcggcagcagctgtgccaccaagaaggccagcaggtag

SEQ ID NO: 156886 - DNA, 972 bp, synthetic construct
  misc_feature 1..972: note = Description of Artificial Sequence: Synthetic coding sequence
  source 1..972: mol_type = other DNA
atgctgtctggagatggagtgcggctggacagcgagctgaggaacatgcaggacctggtggaggactacaagaagagatatgaggtggagatcaacagaagaacagctgctgaaaatgaatttgtggtgctgaagaaggatgtggatgctgcctacatgaacaaggtggagctgcaggccaaggtggacagcctgacagatgagatcaagttcttcaagtgcctgtatgaaggagagatcacccagatccagagccacatcagtgacaccagcatcgtgctgtccatggacaacaacagagacctggacctggacagcatcatcgccgaggtgcgggcccagtatgaggagatcgccctgaagagcaaggccgaggccgagaccctgtaccagaccaagatccaggagctgcaggtgacagctggccagcacggagatgacctgaagctgaccaaggccgagatcagcgagctgaacagactcatccagaggatccgctcagaaattggaaatgtgaagaagcagtgtgccgacctggagacagccatcgcagatgctgagcagagaggagactgtgccctgaaggatgcccgggccaagctggatgagctggagggcgccctgcaccaggccaaggaggagctggccaggatgctgcgggagtaccaggagctggtgtccctgaagctggccctggacatggagatcgccacctacaggaagctgctggagagtgaagaatgtaggatgtctggagagtaccccaacagcgtgtccatcagcgtcatcagcagcaccaatgctggggccggcggggccggcttctccatgggctttggagccagcagcagctacagctacaagacagctgctgctgatgtgaagaccaagggcagctgtggcagcgagctgaaggaccccctggccaagaccagcggcagcagctgtgccaccaagaaggccagcaggtag

SEQ ID NO: 156887 - DNA, 1536 bp, synthetic construct; identical to SEQ ID NO: 156884
  misc_feature 1..1536: note = Description of Artificial Sequence: Synthetic coding sequence
  source 1..1536: mol_type = other DNA

SEQ ID NO: 156888 - DNA, 1623 bp, synthetic construct
  misc_feature 1..1623: note = Description of Artificial Sequence: Synthetic coding sequence
  source 1..1623: mol_type = other DNA
atgagccggcagttcacctacaagtctggagctgctgccaagggcggcttcagcggctgcagcgctgtgctgagcggcggcagcagcagcagctaccgggccggcggcaagggcctgagcggcggcttcagcagccgcagcctgtacagcctgggcggggcccggagcatctccttcaacgtggccagcggcagcggctgggccggcggctacggcttcggccggggccgggccagcggctttgctggctccatgtttggatctgtggccctgggctctgtgtgccccagcctgtgccccccaggcggcatccaccaggtgaccatcaacaagagcctgctggcccccctgaatgtggagctggaccctgagatccagaaggtgcgggcccaggagcgggagcagatcaaggtgctgaacaacaagtttgccagcttcatcgacaaggtgcgcttcctggagcagcagaaccaggtgctggagaccaagtgggagctgctgcagcagctggacctgaacaactgcaagaacaacctggagcccatcctggagggctacatcagcaacctgaggaagcagctggagaccctgagcggggacagagtgcggctggacagcgagctgcggtctgtgcgggaggtggtggaggactacaagaagagatatgaggaggagatcaacaagaggaccacagcagaaaatgaatttgtggtgctgaagaaggatgtggatgctgcctacaccagcaaggtggagctgcaggccaaggtggatgccctggatggagagatcaagttcttcaagtgcctgtatgaaggagaaacagcccagatccagagccacatcagtgacaccagcatcatcctgtccatggacaacaacagaaacctggacctggacagcatcatcgccgaggtgcgggcccagtatgaggagatcgccaggaagagcaaggccgaggccgaggccctgtaccagaccaagttccaggagctgcagctggccgccggcagacatggagatgacctgaagcacaccaagaatgagatcagcgagctgaccaggctcatccagaggctgcggagtgaaattgagagcgtgaagaagcagtgtgccaacctggagacagccatcgcagatgctgagcagagaggagactgtgccctgaaggatgcccgggccaagctggatgagctggagggcgccctgcagcaggccaaggaggagctggccaggatgctgcgggagtaccaggagctgctgtctgtgaagctgagcctggacattgaaattgccacctacaggaagctgctggagggggaggagtgcaggatgtctggagagtacaccaacagcgtgtccatcagcgtcatcaacagctccatggccggcatggccggcaccggggccggcttcggcttcagcaatgccggcacctacggctactggcccagctctgtgtctgggggctacagcatgctgcccggcggctgtgtgacaggcagcggcaactgcagccccagaggagaggcccggacccggctgggcagcgccagcgagttccgggacagccagggcaagaccctggccctgagcagccccaccaagaagaccatgaggtag

SEQ ID NO: 156889 - DNA, 1590 bp, synthetic construct
  misc_feature 1..1590: note = Description of Artificial Sequence: Synthetic coding sequence
  source 1..1590: mol_type = other DNA
atgagccggcagctgaacatcaagagcagcggggacaagggcaacttctctgtgcacagcgctgtggtgcccaggaaggctgtgggcagcctggccagctactgtgccgccggcagaggagctggagctggcttcggcagccgcagcctgtacagcctgggcggcaacagacgcatctccttcaacgtggccggcggcggcgtgcgggccggcggctacggcttccggcccggcagcggctatggaggcggccgggccagcggctttgctggctccatgtttggatctgtggccctgggccctgcctgcctgtctgtgtgccccccaggcggcatccaccaggtgacagtgaacaagagcctgctggcccccctgaatgtggagctggaccctgagatccagaaggtgcgggcccaggagcgggagcagatcaaggtgctgaatgacaagtttgccagcttcatcgacaaggtgcgcttcctggagcagcagaaccaggtgctggagaccaagtgggagctgctgcagcagctggacctgaacaactgcaagaagaacctggagcccatcctggagggctacatcagcaacctgaggaagcagctggagaccctgagcggggacagagtgcggctggacagcgagctgcgctccatgagggacctggtggaggactacaagaagagatatgaggtggagatcaacagaaggaccacagcagaaaatgaatttgtggtgctgaagaaggatgctgatgctgcctatgctgtgaaggtggagctgcaggccaaggtggacagcctggacaaggagatcaagttcctgaagtgcctgtatgatgctgagatcgcccagatccagacccacgccagcgagaccagcgtcatcctgtccatggacaacaacagagacctggacctggacagcatcatcgccgaggtgaggatgcactatgaggagatcgccctgaagagcaaggccgaggccgaggccctgtaccagaccaagatccaggagctgcagctggccgccagcagacatggagatgacctgaagcacaccaggtctgagatggtggagctgaacagactcatccagaggatccgctgtgaaattggaaatgtgaagaagcagagggccagcctggagacagccatcgcagatgctgagcagagaggagacaatgccctgaaggatgcccaggccaagctggatgagctggagggcgccctgcaccaggccaaggaggagctggccaggatgctgcgggagtaccaggagctgatgagcctgaagctggccctggacatggagatcgccacctacaggaagctgctggagggggaggagtgcaggatgtctggagagaaccccagctctgtgtccatcagcgtcatcagcagcagcagctacagctaccaccaccccagcagcgctggggtggacctgggcgccagcgctgtggccggcagcagcggcagcacccagagcggccagaccaagaccacagaggcccggggcggggacctgaaggacacccagggcaagagcaccccagccagcatcccagccaggaaggccaccaggtag

SEQ ID NO: 156890 - DNA, 1656 bp, synthetic construct
  misc_feature 1..1656: note = Description of Artificial Sequence: Synthetic coding sequence
  source 1..1656: mol_type = other DNA
atgagccggcagagcagcatcaccttccagagcggcagccggcggggcttcagcaccaccagcgccatcaccccagctgctggccgcagccgcttcagctctgtgtctgtggcccggtctgctgctggcagcggcggcctgggccgcatcagcagcgctggggccagctttggcagccgcagcctgtacaacctgggcggggccaagagggtgtccatcaatggctgcggcagcagctgccgcagcggctttggaggccgggccagcaaccgcttcggcgtgaacagcggcttcggctacggcggcggcgtgggcggcggcttcagcggccccagcttccctgtgtgccccccaggcggcatccaggaggtgacagtgaaccagagcctgctgacccccctgcacctgcagattgaccccaccatccagagggtgcgggcagaggagcgggagcagatcaagaccctgaacaacaagtttgccagcttcatcgacaaggtgcgcttcctggagcagcagaacaaggtgctggagaccaagtgggccctgctgcaggagcagggcagcaggacagtgcggcagaacctggagcccctgtttgacagctacaccagcgagctgcggcggcagctggagagcatcaccacagagcggggccgcctggaggccgagctgaggaacatgcaggatgtggtggaggacttcaaggtgcgctatgaagatgagatcaacaagaggacagctgctgaaaatgaatttgtggccctgaagaaggatgtggatgctgcctacatgaacaaggtggagctggaggccaaggtgaagagcctgcctgaggagatcaacttcatccacagcgtgtttgatgctgagctgagccagctgcagacccaggtgggggacacctctgtggtgctgtccatggacaacaacagaaacctggacctggacagcatcatcgccgaggtgaaggcccagtatgaggacatcgccaacagaagcagagctgaggccgagagctggtaccagaccaagtatgaggagctgcaggtgacagctggaagacatggagatgacctgaggaacaccaagcaggagatcagcgagatgaacaggatgatccagaggctgcgggcagaaattgattctgtgaagaagcagtgcagcagcctgcagacagccatcgcagatgctgagcagagaggagagctggccctgaaggatgcccgggccaagctggtggacctggaggaggccctgcagaaggccaagcaggacatggcccggctgctgcgggagtaccaggagctgatgaacatcaagctggccctggatgtggagatcgccacctacaggaagctgctggagggggaggagtgccgcctgtctggagagggcgtgtcccctgtgaacatctctgtggtgaccagcaccctgagcagcggctacggcagcggcagcagcattggaggcggcaacctgggcctgggcggcggcagcggctacagcttcaccaccagcggcggccacagcctgggcgccggcctgggcggcagcggcttcagcgccaccagcaacagaggcctgggcggcagcggcagctctgtgaagtttgtgtccaccaccagcagcagccagaagagctacacccactag

SEQ ID NO: 156891 - DNA, 1737 bp, synthetic construct
  misc_feature 1..1737: note = Description of Artificial Sequence: Synthetic coding sequence
  source 1..1737: mol_type = other DNA
atgagccaccagttcagcagccagagcgccttcagctccatgagccggcgggtgtacagcaccagcagcagcgctggcagcggcggcggcagccctgctgtgggctctgtgtgctacgcccggggccgctgtggcggcggcggctacggcatccacggccggggcttcggcagccgcagcctgtacaacctgggcggcagccgcagcatcagcatcaacctgatgggccgcagcaccagcggcttctgccagggcggcggcgtgggcggctttggaggcggccggggctttggagtgggcagcactggagctgggggctttggaggcggcggctttggaggagctggcttcggcaccagcaactttggcctgggcggcttcggcccctactgccccccaggcggcatccaggaggtgaccatcaaccagagcctgctggagcccctgcacctggaggtggaccctgagatccagaggatcaagacccaggagcgggagcagatcatggtgctgaacaacaagtttgccagcttcatcgacaaggtgcgcttcctggagcagcagaaccaggtgctgcagaccaagtgggagctgctgcagcaggtgaacaccagcacaggcaccaacaacctggagcccctgctggagaactacatcggggacctgcggcggcaggtggacctgctgtctgctgagcagatgaggcagaatgctgaggtgcgctccatgcaggatgtggtggaggactacaagagcaaatatgaagatgagatcaacaagaggacaggctctgaaaatgactttgtggtgctgaagaaggatgtggatgctgcctacgtgtccaaggtggacctggagagccgggtggacaccctgactggagaggtgaacttcctgaagtacctgttcctgacagagctgagccaggtgcagacccacatcagtgacaccaacgtcatcctgtccatggacaacaacagaagcctggacctggacagcatcattgatgctgtgaggacccagtatgagctgattgcccagaggagcaaggatgaagctgaggccctgtaccagaccaagtaccaggagctgcagatcacagctggaagacatggagatgacctgaagaacagcaagatggagattgctgagctgaacagaacagtgcagaggctgcaggccgagatcagcaatgtgaagaagcagatcgagcagatgcagagcctcatcagtgatgctgaggagcggggggagcaggccctgcaggatgcctggcagaagctgcaggacctggaggaggccctgcagcagagcaaggaggagctggcccggctgctgcgggactaccaggccatgctgggcgtgaagctgagcctggatgtggagatcgccacctaccggcagctgctggagggggaggagagcaggatgtctggagagctgcagagccacgtgtccatctctgtgcagaacagccaggtgtctgtgaatggaggagctgggggcggcggcagctatggcagcggcggctatggaggcggcagcggcggcggctatggaggcggccgcagctacagaggaggaggagcccggggccgcagcggcggcggctacggcagcggctgcggcggcggcggcggcagctatggaggcagcggccgcagcggccggggcagcagccgggtgcagatcatccagaccagcaccaacaccagccaccggcgcatcctggagtag

SEQ ID NO: 156892 - DNA, 1038 bp, synthetic construct
  misc_feature 1..1038: note = Description of Artificial Sequence: Synthetic coding sequence
  source 1..1038: mol_type = other DNA
atgaggcagaatgctgaggtgcgctccatgcaggatgtggtggaggactacaagagcaaatatgaagatgagatcaacaagaggactggaagtgaaaatgactttgtggtgctgaagaaggatgtggatgctgcctacgtgtccaaggtggacctggagagccgggtggacaccctgaccggggaggtgaacttcctgaagtacctgttcctgacagagctgagccaggtgcagacccacatcagtgacaccaacgtcatcctgtccatggacaacaacagaagcctggacctggacagcatcattgatgctgtgaggacccagtatgagctgattgcccagaggagcaaggatgaggccgaggccctgtaccagaccaagtaccaggagctgcagatcacagctggaagacatggagatgacctgaagaacagcaagatggagattgctgagctgaacagaacagtgcagaggctgcaggccgagatcagcaatgtgaagaagcagatcgagcagatgcagagcctcatcagtgatgctgaggagcggggggagcaggccctgcaggatgcctggcagaagctgcaggacctggaggaggccctgcagcagagcaaggaggagctggcccggctgctgcgggactaccaggccatgctgggcgtgaagctgagcctggatgtggagatcgccacctaccggcagctgctggagggggaggagagcaggatgtctggagagctgcagagccacgtgtccatctctgtgcagaacagccaggtgtctgtgaatggaggagctgggggcggcggcagctatggcagcggcggctacggcggcggcagcggcggcggctacggcggcggccgcagctaccggggcggcggggcccggggccgcagcggcggcggctacggcagcggctgcggcggcggcggcggcagctatggaggcagcggccgcagcggccggggcagcagccgggtgcagatcatccagaccagcaccaacaccagccaccggcgcatcctggagtag

SEQ ID NO: 156893 - DNA, 1563 bp, synthetic construct
  misc_feature 1..1563: note = Description of Artificial Sequence: Synthetic coding sequence
  source 1..1563: mol_type = other DNA
atgagcctgagcccctgccgggcccagaggggcttcagcgcccggagcgcctgcagcgcccggagccggggccgcagccggggcggcttcagcagccggggcggcttcagcagccgcagcctgaacagctttggaggctgcctggagggcagccggggcagcacctggggcagcggcggccgcctgggcgtgcgctttggagagtggagcggcggccctggcctgagcctgtgccccccaggcggcatccaggaggtgaccatcaaccagaacctgctgacccccctgaagattgaaattgacccccagttccaggtggtgaggacccaggagacccaggagatccgcaccctgaacaaccagtttgccagcttcatcgacaaggtgcgcttcctggagcagcagaacaaggtgctggagaccaagtggcacctgctgcagcagcagggcctgagcggcagccagcagggcctggagcctgtgtttgaggcctgcctggaccagctgaggaagcagctggagcagctgcagggcgagcggggggccctggatgctgagctgaaggcctgccgggaccaggaggaggagtacaagagcaaatatgaggaggaggcccacagaagagccaccctggagaatgactttgtggtgctgaagaaggatgtggatggagtcttcctgagcaagatggagctggagggcaagctggaggccctgcgggagtacctgtacttcctgaagcacctgaatgaggaggagctgggccagctgcagacccaggccagtgacacctctgtggtgctgtccatggacaacaaccgctacctggacttcagcagcatcatcacagaggtgcgggcccgctatgaggagatcgcccggagcagcaaggccgaggccgaggccctgtaccagaccaagtaccaggagctgcaggtgtctgcccagctgcacggggacaggatgcaggagaccaaggtgcagatcagccagctgcaccaggagatccagaggctgcagagccagacagagaacctgaagaagcagaatgccagcctgcaggccgccatcacagatgctgagcagagaggagagctggccctgaaggatgcccaggccaaggtggatgagctggaggccgccctgaggatggccaagcagaacctggcccggctgctgtgtgagtaccaggagctgaccagcaccaagctgagcctggatgtggagatcgccacctaccgccgcctgctggagggggaggagtgcaggatgtctggagaatgtaccagccaggtgaccatcagctctgtgggcggcagcgctgtgatgtctgggggcgtgggcggcggcctgggcagcacctgtggcctgggcagcggcaagggcagccctggcagctgctgcaccagcatcgtgactggaggcagcaacatcatcctgggcagcggcaaggaccctgtgctggacagctgcagcgtgtctggcagcagcgctggcagcagctgccacaccatcctgaagaagacagtggagagcagcctgaagaccagcatcacctactag

SEQ ID NO: 156894 - DNA, 1233 bp, synthetic construct
  misc_feature 1..1233: note = Description of Artificial Sequence: Synthetic coding sequence
  source 1..1233: mol_type = other DNA
atggagggccacgaggccagccctgcccaggtgggccagggcgaccggggcaaggtgcgcttcctggagcagcagaacaaggtgctggagaccaagtggcacctgctgcagcagcagggcctgagcggcagccagcagggcctggagcctgtgtttgaggcctgcctggaccagctgaggaagcagctggagcagctgcagggcgagcggggggccctggatgctgagctgaaggcctgccgggaccaggaggaggagtacaagagcaaatatgaggaggaggcccacagaagagccaccctggagaatgactttgtggtgctgaagaaggatgtggatggagtcttcctgagcaagatggagctggagggcaagctggaggccctgcgggagtacctgtacttcctgaagcacctgaatgaggaggagctgggccagctgcagacccaggccagtgacacctctgtggtgctgtccatggacaacaaccgctacctggacttcagcagcatcatcacagaggtgcgggcccgctatgaggagatcgcccggagcagcaaggccgaggccgaggccctgtaccagaccaagtaccaggagctgcaggtgtctgcccagctgcacggggacaggatgcaggagaccaaggtgcagatcagccagctgcaccaggagatccagaggctgcagagccagacagagaacctgaagaagcagaatgccagcctgcaggccgccatcacagatgctgagcagagaggagagctggccctgaaggatgcccaggccaaggtggatgagctggaggccgccctgaggatggccaagcagaacctggcccggctgctgtgtgagtaccaggagctgaccagcaccaagctgagcctggatgtggagatcgccacctaccgccgcctgctggagggggaggagtgcaggatgtctggagaatgtaccagccaggtgaccatcagctctgtgggcggcagcgctgtgatgtctgggggcgtgggcggcggcctgggcagcacctgtggcctgggcagcggcaagggcagccctggcagctgctgcaccagcatcgtgactggaggcagcaacatcatcctgggcagcggcaaggaccctgtgctggacagctgcagcgtgtctggcagcagcgctggcagcagctgccacaccatcctgaagaagacagtggagagcagcctgaagaccagcatcacctactag

SEQ ID NO: 156895 - DNA, 876 bp, synthetic construct
  misc_feature 1..876: note = Description of Artificial Sequence: Synthetic coding sequence
  source 1..876: mol_type = other DNA
atggagctggagggcaagctggaggccctgcgggagtacctgtacttcctgaagcacctgaatgaggaggagctgggccagctgcagacccaggccagtgacacctctgtggtgctgtccatggacaacaaccgctacctggacttcagcagcatcatcacagaggtgcgggcccgctatgaggagatcgcccggagcagcaaggccgaggccgaggccctgtaccagaccaagtaccaggagctgcaggtgtctgcccagctgcatggagacaggatgcaggagaccaaggtgcagatcagccagctgcaccaggagatccagaggctgcagagccagacagagaacctgaagaagcagaatgccagcctgcaggccgccatcacagatgctgagcagagaggagagctggccctgaaggatgcccaggccaaggtggatgagctggaggccgccctgaggatggccaagcagaacctggcccggctgctgtgtgagtaccaggagctgaccagcaccaagctgagcctggatgtggagatcgccacctacagaaggctgctggagggggaggagtgcaggatgtctggagagtgcaccagccaggtgaccatcagctctgtgggcggcagcgctgtgatgtctggaggagtgggcggcggcctgggcagcacctgtggcctgggcagcggcaagggcagccctggcagctgctgcaccagcatcgtgactggaggcagcaacatcatcctgggcagcggcaaggaccctgtgctggacagctgcagcgtgtctggcagcagcgctggcagcagctgccacaccatcctgaagaagacagtggagagcagcctgaagaccagcatcacctactag

SEQ ID NO: 156896 - DNA, 1608 bp, synthetic construct
  misc_feature 1..1608: note = Description of Artificial Sequence: Synthetic coding sequence
  source 1..1608: mol_type = other DNA
atgaggagctctgtgtcccggcagacctacagcaccaagggcggcttcagcagcaacagcgccagcggcggcagcggcagccaggcccggaccagcttcagctctgtgacagtgagccgcagcagcggcagcggcggcggggcccactgcggccctggcaccggcggcttcggcagccgcagcctgtacaacctgggcggccacaagagcatctctgtgtctgtggccggcggggccctgctgggccgggccctgggcggcttcggcttcggcagccgggccttcatgggccagggcgccggccggcagacctttggacctgcctgccccccaggcggcatccaggaggtgacagtgaaccagagcctgctgacccccctgcacgtggagattgatcctgagatccagagggtgaggacccaggagcgggagcagatcaagaccctgaacaacaagtttgccagcttcatcgacaaggtgcgcttcctggagcagcagaacaaggtgctggagaccaagtgggccctgctgcaggagcagggccagaacctgggcgtgaccaggaacaacctggagcccctgtttgaggcctacctgggctccatgaggagcaccctggaccggctgcagagcgagcggggccgcctggacagcgagctgagaaatgtgcaggacctggtggaggacttcaagaacaagtatgaagatgagatcaacaagcacacagctgctgaaaatgaatttgtggtgctgaagaaggatgtggatgctgcctacatgggccgcatggacctgcacggcaaggtgggcaccctgacccaggagattgacttcctgcagcagctgtatgagatggagctgagccaggtgcagacccacgtgagcaacaccaacgtggtgctgtccatggacaacaacagaaacctggacctggacagcatcatcgccgaggtgaaggcccagtatgagctgattgcccagaggagcagagctgaggccgaggcctggtaccagaccaagtatgaggagctgcaggtgacagctgggaagcatggagacaacctgcgggacaccaagaatgaaattgctgagctgaccaggaccatccagaggctgcagggcgaggctgatgctgccaagaagcagtgccagcagctgcagacagccatcgccgaggccgagcagagaggagagctggccctgaaggatgcccagaagaagctgggggacctggatgtggccctgcaccaggccaaggaggacctgacccggctgctgcgggactaccaggagctgatgaatgtgaagctggccctggatgtggagatcgccacctacaggaagctgctggagagcgaggagagcaggatgtctggagagtgccccagcgctgtgtccatctctgtgacaggcaacagcaccaccgtgtgtggcggcggggccgccagctttggaggcggcatcagcctgggcggcagcggcggggccaccaagggcggcttcagcaccaacgtgggctacagcacagtgaagggcggccctgtgtctgctggcaccagcatcctgaggaagaccaccaccgtgaagaccagcagccagcgctactag

SEQ ID NO: 156897 - DNA, 1269 bp, synthetic construct
  misc_feature 1..1269: note = Description of Artificial Sequence: Synthetic coding sequence
  source 1..1269: mol_type = other DNA
atggcctgccgcagctgtgtggtgggcttcagcagcctgagcagctgtgaggtgacccctgtgggcagcccccggcccggcaccagcggctgggacagctgccgggcccctggccctggcttcagcagccgcagcctgaccggctgctggagcgctggcaccatcagcaaggtgacagtgaaccctggcctgctggtgcccctggatgtgaagctggaccctgctgtgcagcagctgaagaaccaggagaaggaggagatgaaggccctgaatgacaagtttgccagcctcatcggcaaggtgcaggccctggagcagaggaaccagctgctggagacccgctggagcttcctgcagggccaggacagcgccatctttgacctgggccacctgtatgaggagtaccagggccgcctgcaggaggagctgaggaaggtgtcccaggagcggggccagctggaggccaacctgctgcaggtgctggagaaggtggaggagttccgcatccgctatgaagatgagatcagcaagaggacagacatggagttcacctttgtgcagctgaagaaggacctggatgctgaatgtctgcacaggacagagctggagaccaagctgaagagcctggagagctttgtggagctgatgaagaccatctatgagcaggagctgaaggacctggccgcccaggtgaaggatgtgtctgtgacagtgggcatggacagccgctgccacatcgacctgtctggaattgtggaggaggtgaaggcccagtatgatgctgtggccgcccggagcctggaggaggccgaggcctacagccgcagccagctggaggagcaggccgcccggtctgcagaatatggcagcagcctgcagagcagccgctcagaaattgctgacctgaatgtgcgcatccagaagctgcggagccagatcctgtctgtgaagagccactgcctgaagctggaggagaacatcaagacagctgaggagcagggcgagctggccttccaggatgccaagaccaagctggcccagctggaggccgccctgcagcaggccaagcaggacatggcccggcagctgaggaagtaccaggagctgatgaatgtgaagctggccctggacatcgagatcgccacctacaggaagctggtggagggggaggagggccgcatggacagccccagcgccaccgtggtgtctgctgtgcagagccgctgcaagacagcccccagcctgccctaccccctgtgcagcctgtag

SEQ ID NO: 156898 - DNA, 1359 bp, synthetic construct
  misc_feature 1..1359: note = Description of Artificial Sequence: Synthetic coding sequence
  source 1..1359: mol_type = other DNA
atggcctgccgcagctgtgtggtgggcttcagcagcctgagcagctgtgaggtgacccctgtgggcagcccccggcccggcaccagcggctgggacagctgccgggcccctggccctggcttcagcagccgcagcctgaccggctgctggagcgctggcaccatcagcaaggtgacagtgaaccctggcctgctggtgcccctggatgtgaagctggaccctgctgtgcagcagctgaagaaccaggagaaggaggagatgaaggccctgaatgacaagtttgccagcctcatcggcaaggtgcaggccctggagcagaggaaccagctgctggagacccgctggagcttcctgcagggccaggacagcgccatctttgacctgggccacctgtatgaggagtaccagggccgcctgcaggaggagctgaggaaggtgtcccaggagcggggccagctggaggccaacctgctgcaggtgctggagaaggtggaggagttccgcatccgctatgaagatgagatcagcaagaggacagacatggagttcacctttgtgcagctgaagaaggacctggatgctgaatgtctgcacaggacagagctggagaccaagctgaagagcctggagagctttgtggagctgatgaagaccatctatgagcaggagctgaaggacctggccgcccaggtgaaggatgtgtctgtgacagtgggcatggacagccgctgccacatcgacctgtctggaattgtggaggaggtgaaggcccagtatgatgctgtggccgcccggagcctggaggaggccgaggcctacagccgcagccagctggaggagcaggccgcccggtctgcagaatatggcagcagcctgcagagcagccgctcagaaattgctgacctgaatgtgcgcatccagaagctgcggagccagatcctgtctgtgaagagccactgcctgaagctggaggagaacatcaagacagctgaggagcagggcgagctggccttccaggatgccaagaccaagctggcccagctggaggccgccctgcagcaggccaagcaggacatggcccggcagctgaggaagtaccaggagctgatgaatgtgaagctggccctggacatcgagatcgccacctacaggaagctggtggagggggaggagggccgcatggacagccccagcgccaccgtggtgtctgctgtgcagagccgctgcaagacagctgccagccgcagcggcctgagcaaggcccccagcaggaagaagaagggcagcaagggccctgtgatcaagatcacagagatgtctgagaagtacttcagccaggagagcgaggtgtctgagtag

SEQ ID NO: 156899 - DNA, 1518 bp, synthetic construct
  misc_feature 1..1518: note = Description of Artificial Sequence: Synthetic coding sequence
  source 1..1518: mol_type = other DNA
atgacctgtggcagcggctttggaggccgggccttcagctgcatcagcgcctgtggcccccggcccggccgctgctgcatcacagctgccccctaccggggcatcagctgctaccggggcctgaccggcggcttcggcagccacagcgtgtgtggcggcttccgggccggcagctgtggccgcagctttggctacagaagtggaggagtgtgtggccccagccccccctgcatcaccaccgtgtctgtgaatgaaagcctgctgacccccctgaacctggagattgaccccaatgcccagtgtgtgaagcaggaggagaaggagcagatcaagagcctgaacagcagatttgctgccttcatcgacaaggtgcgcttcctggagcagcagaacaagctgctggagaccaagctgcagttctaccagaaccgggagtgctgccagagcaacctggagcccctgtttgagggctacatcgagaccctgcggcgggaggctgaatgtgtggaggccgacagcggccgcctggccagcgagctgaaccacgtgcaggaggtgctggagggctacaagaagaagtatgaggaggaggtgtccctgcgggccacagcagaaaatgaatttgtggccctgaagaaggatgtggactgtgcctacctgaggaagagtgacctggaggccaacgtggaggccctgatccaggagattgacttcctgcggcggctgtatgaggaggagatcctgatcctgcagagccacatcagtgacacctctgtggtggtgaagctggacaacagccgggacctgaacatggactgcatcatcgccgagatcaaggcccagtatgatgacatcgtgaccaggagcagagctgaggccgagagctggtaccgcagcaaatgtgaggagatgaaggccaccgtcatcagacatggagagaccctgcggaggaccaaggaggagatcaatgagctgaacaggatgatccagaggctgacagctgaggtggagaatgccaagtgccagaacagcaagctggaggccgctgtggcccagagcgagcagcagggcgaggccgccctgagtgatgcccgctgcaagctggccgagctggagggcgccctgcagaaggccaagcaggacatggcctgcctgatccgggagtaccaggaggtgatgaacagcaagctgggcctggacattgaaattgccacctacagaaggctgctggagggggaggagcagaggctgtgtgagggcattggagctgtgaatgtgtgtgtgagcagcagcagaggaggagtggtgtgtggggacctgtgtgtgtctggcagcaggcctgtgactggatctgtgtgcagcgccccctgcaatggaaatgtggccgtgtccacaggcctgtgtgccccctgtggccagctgaacaccacctgtggcggcggcagctgtggggtgggcagctgtggcatcagcagcctgggcgtgggcagctgtggcagcagctgcaggaagtgctag

SEQ ID NO: 156900 - DNA, 1455 bp, synthetic construct
  misc_feature 1..1455: note = Description of Artificial Sequence: Synthetic coding sequence
  source 1..1455: mol_type = other DNA
atgacctgtggcagcggctttggaggccgggccttcagctgcatcagcgcctgtggcccccggcccggccgctgctgcatcacagctgccccctaccggggcatcagctgctaccggggcctgaccggcggcttcggcagccacagcgtgtgtggcggcttccgggccggcagctgtggccgcagctttggctacagaagtggaggagtgtgtggccccagccccccctgcatcaccaccgtgtctgtgaatgaaagcctgctgacccccctgaacctggagattgaccccaatgcccagtgtgtgaagcaggaggagaaggagcagatcaagagcctgaacagcagatttgctgccttcatcgacaaggtgcgcttcctggagcagcagaacaagctgctggagaccaagctgcagttctaccagaaccgggagtgctgccagagcaacctggagcccctgtttgagggctacatcgagaccctgcggcgggaggctgaatgtgtggaggccgacagcggccgcctggccagcgagctgaaccacgtgcaggaggtgctggagggctacaagaagaagtatgaggaggaggtgtccctgcgggccacagcagaaaatgaatttgtggccctgaagaaggatgtggactgtgcctacctgaggaagagtgacctggaggccaacgtggaggccctgatccaggagattgacttcctgcggcggctgtatgaggaggagatcctgatcctgcagagccacatcagtgacacctctgtggtggtgaagctggacaacagccgggacctgaacatggactgcatcatcgccgagatcaaggcccagtatgatgacatcgtgaccaggagcagagctgaggccgagagctggtaccgcagcaaatgtgaggagatgaaggccaccgtcatcagacatggagagaccctgcggaggaccaaggaggagatcaatgagctgaacaggatgatccagaggctgacagctgaggtggagaatgccaagtgccagaacagcaagctggaggccgctgtggcccagagcgagcagcagggcgaggccgccctgagtgatgcccgctgcaagctggccgagctggagggcgccctgcagaaggccaagcaggacatggcctgcctgatccgggagtaccaggaggtgatgaacagcaagctgggcctggacattgaaattgccacctacagaaggctgctggagggggaggagcagaggctgtgtgagggcattggagctgtgaatgtgtgtgtgagcagcagcagaggaggagtggtgtgtggggacctgtgtgtgtctggcagcaggcctgtgactggatctgtgtgcagcgccccctgcaatggaaatgtggccgtgtccacaggcctgtgtgccccctgtggccaggtgggcagctgtggcagcagctgcaggaaatgttag

SEQ ID NO: 156901 - DNA, 1482 bp, synthetic construct
  misc_feature 1..1482: note = Description of Artificial Sequence: Synthetic coding sequence
  source 1..1482: mol_type = other DNA
atgacctgtggcttcaacagcatcggctgcggcttccggcccggcaacttcagctgtgtgtctgcctgtggcccccggcccagccgctgctgcatcacagctgccccctaccggggcatcagctgctaccggggcctgactggaggcttcggcagccacagcgtgtgtggcggcttccgggccggcagctgtggccgcagctttggctaccgcagcggcggcgtgtgtggccccagccccccctgcatcaccaccgtgtctgtgaatgaaagcctgctgacccccctgaacctggagattgaccccaatgcccagtgtgtgaagcaggaggagaaggagcagatcaagagcctgaacagcagatttgctgccttcatcgacaaggtgcgcttcctggagcagcagaacaagctgctggagaccaagctgcagttctaccagaaccgggagtgctgccagagcaacctggagcccctgtttgctggctacatcgagaccctgcggcgggaggccgagtgtgtggaggccgacagcggccgcctggccagcgagctgaaccacgtgcaggaggtgctggagggctacaagaagaagtatgaggaggaggtggccctgcgggccacagcagaaaatgaatttgtggccctgaagaaggatgtggactgtgcctacctgaggaagagtgacctggaggccaacgtggaggccctgatccaggagattgacttcctgcggcggctgtatgaggaggagatccgcatcctgcagagccacatcagtgacacctctgtggtggtgaagctggacaacagccgggacctgaacatggactgcatcgtggccgagatcaaggcccagtatgatgacatcgccaccaggagcagagctgaggccgagagctggtaccgcagcaaatgtgaggagatgaaggccaccgtcatccgccacggggagaccctgcggaggaccaaggaggagatcaatgagctgaacaggatgatccagaggctgacagctgaggtggagaatgccaagtgccagaacagcaagctggaggccgctgtggcccagagcgagcagcagggcgaggccgccctgagtgatgcccgctgcaagctggccgagctggagggcgccctgcagaaggccaagcaggacatggcctgcctgatccgggagtaccaggaggtgatgaacagcaagctgggcctggacatcgagatcgccacctaccgccgcctgctggagggggaggagcagaggctgtgtgaaggagtggaggccgtgaatgtgtgtgtgagcagcagccggggcggcgtggtgtgtggggacctgtgtgtgtctggcagcaggcctgtgacaggctctgtgtgcagcgccccctgcaatggaaacctggtggtgtccacaggcctgtgcaagccctgtggccagctgaacaccacctgtggcggcggcagctgtggccagggccgccactag

SEQ ID NO: 156902 - DNA, 1524 bp, synthetic construct
  misc_feature 1..1524: note = Description of Artificial Sequence: Synthetic coding sequence
  source 1..1524: mol_type = other DNA
atgagctgccgcagctaccgcatcagcagcggctgcggcgtgaccaggaacttcagcagctgcagcgctgtggcccccaagacaggcaaccgctgctgcatctctgctgccccctacagaggagtgtcctgctaccggggcctgactggatttggcagccgcagcctgtgcaacctgggcagctgtggccccagaattgctgtgggcggcttccgggccggcagctgtggccgcagctttggctaccgcagcggcggcgtgtgtggccccagccccccctgcatcaccaccgtgtctgtgaatgaaagcctgctgacccccctgaacctggagattgaccccaatgcccagtgtgtgaagcaggaggagaaggagcagatcaagagcctgaacagcagatttgctgccttcatcgacaaggtgcgcttcctggagcagcagaacaagctgctggagaccaagtggcagttctaccagaaccagcgctgctgtgagagcaacctggagcccctcttcagcggctacatcgagaccctgcggcgggaggccgagtgtgtggaggccgacagcggccgcctggccagcgagctgaaccacgtgcaggaggtgctggagggctacaagaagaagtatgaggaggaggtggccctgcgggccacagcagaaaatgaatttgtggtgctgaagaaggatgtggactgtgcctacctgaggaagagtgacctggaggccaacgtggaggccctggtggaggagagcagcttcctgcggcggctgtatgaggaggagatccgggtgctgcaggcccacatcagtgacacctctgtgattgtgaagatggacaacagccgggacctgaacatggactgcatcatcgccgagatcaaggcccagtatgatgatgtggccagccgcagcagagctgaggccgagagctggtaccgcagcaaatgtgaggagatgaaggccaccgtcatccgccacggggagaccctgcggaggaccaaggaggagatcaatgagctgaacaggatgatccagaggctgacagctgagattgaaaatgccaagtgccagagggccaagctggaggccgctgtggccgaggccgagcagcagggcgaggccgccctgagtgatgcccgctgcaagctggccgagctggagggcgccctgcagaaggccaagcaggacatggcctgcctgctgaaggagtaccaggaggtgatgaacagcaagctgggcctggacatcgagatcgccacctaccgccgcctgctggagggggaggagcaccggctgtgtgaaggagtgggctctgtgaatgtgtgtgtgagcagcagccggggcggcgtgtcctgtggcggcctgagctacagcaccaccccaggccggcagatcaccagcggccccagcgccatcggcggcagcatcaccgtggtggccccagacagctgtgccccctgccagcccaggagcagcagcttcagctgtggcagcagccgctctgtgcgctttgcctag

SEQ ID NO: 156903 - DNA, 888 bp, synthetic construct
  misc_feature 1..888: note = Description of Artificial Sequence: Synthetic coding sequence
  source 1..888: mol_type = other DNA
atggtgttcaaggtgcagttcctgagcagccggcccagcctgagccacacccaggatgtggactgtgcctacctgaggaagagtgacctggaggccaacgtggaggccctggtggaggagagcagcttcctgcggcggctgtatgaggaggagatccgggtgctgcaggcccacatcagtgacacctctgtgattgtgaagatggacaacagccgggacctgaacatggactgcatcatcgccgagatcaaggcccagtatgatgatgtggccagccgcagcagagctgaggccgagagctggtaccgcagcaaatgtgaggagatgaaggccaccgtcatccgccacggggagaccctgcggaggaccaaggaggagatcaatgagctgaacaggatgatccagaggctgacagctgagattgaaaatgccaagtgccagagggccaagctggaggccgctgtggccgaggccgagcagcagggcgaggccgccctgagtgatgcccgctgcaagctggccgagctggagggcgccctgcagaaggccaagcaggacatggcctgcctgctgaaggagtaccaggaggtgatgaacagcaagctgggcctggacatcgagatcgccacctaccgccgcctgctggagggggaggagcaccggctgtgtgaaggagtgggctctgtgaatgtgtgtgtgagcagcagccggggcggcgtgtcctgtggcggcctgagctacagcaccaccccaggccggcagatcaccagcggccccagcgccatcggcggcagcatcaccgtggtggccccagacagctgtgccccctgccagcccaggagcagcagcttcagctgtggcagcagccgctctgtgcgctttgcctag

SEQ ID NO: 156904 - DNA, 1461 bp, synthetic construct
  misc_feature 1..1461: note = Description of Artificial Sequence: Synthetic coding sequence
  source 1..1461: mol_type = other DNA
atgacctgtggcagctactgcggcggccgggccttcagctgcatcagcgcctgtggcccccggcccggccgctgctgcatcacagctgccccctaccggggcatcagctgctaccggggcctgaccggcggcttcggcagccacagcgtgtgtggcggcttccgggccggcagctgtggccgcagctttggctacagaagtggaggagtgtgtggccccagccccccctgcatcaccaccgtgtctgtgaatgaaagcctgctgacccccctgaacctggagattgaccccaatgcccagtgtgtgaagcaggaggagaaggagcagatcaagagcctgaacagcagatttgctgccttcatcgacaaggtgcgcttcctggagcagcagaacaagctgctggagaccaagctgcagttctaccagaaccgggagtgctgccagagcaacctggagcccctgtttgagggctacatcgagaccctgcggcgggaggctgaatgtgtggaggccgacagcggccgcctggccagcgagctgaaccacgtgcaggaggtgctggagggctacaagaagaagtatgaggaggaggtgtccctgcgggccacagcagaaaatgaatttgtggccctgaagaaggatgtggactgtgcctacctgaggaagagtgacctggaggccaacgtggaggccctgatccaggagattgacttcctgcggcggctgtatgaggaggagatccgggtgctgcagagccacatcagtgacacctctgtggtggtgaagctggacaacagccgggacctgaacatggactgcatcatcgccgagatcaaggcccagtatgatgacatcgtgaccaggagcagagctgaggccgagagctggtaccgcagcaaatgtgaggagatgaaggccaccgtcatcagacatggagagaccctgcggaggaccaaggaggagatcaatgagctgaacaggatgatccagaggctgacagctgaggtggagaatgccaagtgccagaacagcaagctggaggccgctgtggcccagagcgagcagcagggcgaggccgccctgagtgatgcccgctgcaagctggccgagctggagggcgccctgcagaaggccaagcaggacatggcctgcctgatccgggagtaccaggaggtgatgaacagcaagctgggcctggacattgaaattgccacctacagaaggctgctggagggggaggagcagaggctgtgtgagggcgtgggctctgtgaatgtgtgtgtgagcagcagcagaggaggagtggtgtgtggggacctgtgtgccagcaccacagcccctgtggtgtccaccagggtgtcctctgtgcccagcaacagcaatgtggtggtgggcaccaccaatgcctgtgcccccagcgcccgggtgggcgtgtgtggcggcagctgcaagcgctgctag

SEQ ID NO: 156905 - DNA, 1872 bp, synthetic construct
  misc_feature 1..1872: note = Description of Artificial Sequence: Synthetic coding sequence
  source 1..1872: mol_type = other DNA
atgagctgccggcagttcagcagcagctacctgagccgcagcggcggcggcggcggcggcggcctgggcagcggcggcagcatccgcagcagctacagccgcttcagcagcagcggcggcggcggcggcggcggccgcttcagcagcagcagcggctatggaggcggcagcagccgggtgtgtggccggggcggcggcggcagctttggctacagctatggaggcggcagcggcggcggcttcagcgccagcagcctgggcggcggctttggaggcggcagccggggctttggaggagccagcggcggcggctacagcagcagcggcggctttggaggcggctttggaggcggcagcggcggcggctttggaggcggctacggcagcggctttggaggctttggaggctttggaggaggagctggaggaggagatggcggcatcctgacagccaatgagaagagcaccatgcaggagctgaacagccggctggccagctacctggacaaggtgcaggccctggaggaggccaacaatgacctggagaacaagatccaggactggtatgacaagaagggccctgctgccatccagaagaactacagcccctactacaacaccattgatgacctgaaggaccagatcgtggacctgactgtgggcaacaacaagaccctgctggacatcgacaacaccaggatgaccctggatgacttccgcatcaagtttgagatggagcagaacctgcggcagggcgtggatgctgacatcaatggcctgcggcaggtgctggacaacctgaccatggagaagagtgacctggagatgcagtatgagaccctgcaggaggagctgatggccctgaagaagaaccacaaggaggagatgagccagctgaccggccagaacagcggagatgtgaatgtggagatcaacgtggcccctgggaaggacctgaccaagaccctgaatgacatgaggcaggagtatgagcagctgattgccaagaacaggaaggacatcgagaaccagtatgagacccagatcacccagatcgagcacgaggtgagcagcagcggccaggaggtgcagagcagcgccaaggaggtgacccagctgcggcatggagtgcaggagctggagattgagctgcagagccagctgagcaagaaggccgccctggagaagagcctggaggacaccaagaaccgctactgcggccagctgcagatgatccaggagcagatcagcaacctggaggcccagatcacagatgtgcggcaggagattgagtgccagaaccaggagtacagcctgctgctgagcatcaagatgaggctggagaaggagattgagacctaccacaacctgctggagggcggccaggaggactttgagagcagcggggccggcaagattggcctgggcggccggggcggcagcggcggcagctatggccggggcagcagaggaggcagcggcggcagctatggaggcggcggcagcggcggcggctacggcggcggcagcggcagccggggcggcagcggcggcagctatggaggcggcagcggcagcggcggcggcagcggcggcggctacggcggcggcagcggcggcggccacagcggcggcagcggcggcggccacagcggcggcagcggcggcaactacggcggcggcagcggcagcggcggcggcagcggcggcggctacggcggcggcagcggcagccggggcggcagcggcggcagccacggcggcggcagcggctttggaggagagagcggcggcagctatggaggaggagaggaggccagcggcagcggcggcggctatggaggcggcagcggcaagagcagccacagctag

SEQ ID NO: 156906 - DNA, 534 bp, synthetic construct
  misc_feature 1..534: note = Description of Artificial Sequence: Synthetic coding sequence
  source 1..534: mol_type = other DNA
atggcctgctgccagaccagcttctgtggcttccccagctgcagcaccagcggcacctgtggcagcagctgctgccagcccagctgctgtgagaccagcagctgccagccccgctgctgtgagaccagctgctgccagcccagctgctgccagaccagcttctgtggcttccccagcttcagcactggaggcacctgtgacagcagctgctgccagcccagctgctgtgagaccagctgctgccagcccagctgctaccagaccagcagctgtggcaccggctgcggcattggaggcggcatcggctacggccaggagggcagcagtggagctgtgtccacccgcatccgctggtgcaggccagactgccgggtggagggcacctgcctgcccccctgctgcgtggtgtcctgcaccccacccagctgctgccagctgcaccacgccgaggccagctgctgccggcccagctactgcggccagagctgctgcaggcctgtgtgctgctgctactgcagcgagcccacctgctag

SEQ ID NO: 156907 - DNA, 504 bp, synthetic construct
  misc_feature 1..504: note = Description of Artificial Sequence: Synthetic coding sequence
  source 1..504: mol_type = other DNA
atggcctgctgccagaccagcttctgtggcttccccagctgcagcaccagcggcacctgtggcagcagctgctgccagccccgctgctgtgagaccagctgctgccagcccagctgctgccagaccagcttctgtggcttccccagcttcagcactggaggcacctgtgacagcagctgctgccagcccagctgctgtgagaccagctgctgccagcccagctgctaccagaccagcagctgtggcaccggctgcggcattggaggcggcatcggctacggccaggagggcagcagtggagctgtgtccacccgcatccgctggtgcaggccagactgccgggtggagggcacctgcctgcccccctgctgcgtggtgtcctgcaccccacccagctgctgccagctgcaccacgccgaggccagctgctgccggcccagctactgcggccagagctgctgcaggcctgtgtgctgctgctactgcagcgagcccacctgctag

SEQ ID NO: 156908 - DNA, 492 bp, synthetic construct
  misc_feature 1..492: note = Description of Artificial Sequence: Synthetic coding sequence
  source 1..492: mol_type = other DNA
atgtccttcaactgcagcaccaggaactgcagcagccggcccatcggcggccgctgcatcgtgcctgtggcccaggtgaccaccaccagcaccacagatgctgactgcctgggcggcatctgcctgcccagcagcttccagacaggctcctggctgctggaccactgccaggagacctgctgtgagcccacagcctgccagcccacctgctacagaaggaccagctgtgtgagcaacccctgccaggtgacctgcagccggcagaccacctgcatcagcaacccctgcagcaccacctacagccggcccctgacctttgtgagcagcggctgccagcccctgggcggcatcagctctgtgtgccagcctgtgggcggcatcagcacagtgtgccagcctgtgggcggcgtgtccacagtgtgccagcctgcctgtggggtgtccaggacctaccagcagagctgtgtgagcagctgcaggaggacctgctag

SEQ ID NO: 156909 - DNA, 504 bp, synthetic construct
  misc_feature 1..504: note = Description of Artificial Sequence: Synthetic coding sequence
  source 1..504: mol_type = other DNA
atgacctgctgccagaccagcttctgtggctaccccagctgcagcaccagcggcacctgtggcagcagctgctgccagcccagctgctgtgagaccagctgctgccagcccagctgctgccagaccagcttctgtggcttccccagcttcagcaccagcggcacctgcagcagcagctgctgccagcccagctgctgtgagaccagctgctgccagcccagctgctgccagaccagcagctgtggcaccggctgcggcattggaggcggcatcggctacggccaggagggcagcagtggagctgtgtccacccgcatccgctggtgcaggccagactgccgggtggagggcacctgcctgcccccctgctgcgtggtgtcctgcaccccacccacctgctgccagctgcaccacgccgaggccagctgctgccggcccagctactgcggccagagctgctgcaggcctgtgtgctgctgctacagctgtgagcccacctgctag

SEQ ID NO: 156910 - DNA, 366 bp, synthetic construct
  misc_feature 1..366: note = Description of Artificial Sequence: Synthetic coding sequence
  source 1..366: mol_type = other DNA
atggccagctgcagcaccagcggcacctgtggcagcagctgctgccagcccagctgctgtgagaccagctgctgccagcccagctgctgccagaccagcagctgtggcaccggctgcggcattggaggcggcatcggctacggccaggagggcagcggcggctctgtgtccacccgcatccgctggtgccacccagactgccacgtggagggcacctgcctgcccccctgctacctggtgtcctgcaccccacccagctgctgccagctgcaccacgccgaggccagctgctgccggcccagctactgcggccagagctgctgcaggcctgcctgctgctgccactgctgtgagcccacctgctag

SEQ ID NO: 156911 - DNA, 837 bp, synthetic construct
  misc_feature 1..837: note = Description of Artificial Sequence: Synthetic coding sequence
  source 1..837: mol_type = other DNA
atgggctgctgcggctgcagcggcggctgcggcagcagctgtggcggctgcggcagcggctgcggcggctgcggcagcggctgcggcggctgcggcagcggctgcggcggcagcggcagcagctgctgcgtgcctgtgtgctgctgcaagcctgtgtgctgccgggtgcccacctgcagctgcagcagctgtgggaagggcggctgcggcagcagcggcggcagcaagggcggctgcggcagctgtggcggctgcaagggcggctgcggcagctgtggcggcagcaagggcggctgcggcagctgtggcggcagcaagggcggctgcggcagctgtggcggcagcaagggcggctgcggcagcggctgcggcggctgcggcagcagctgctgcgtgcctgtgtgctgctgcaagcccatgtgctgctgcgtgcctgcctgcagctgcagcagctgtgggaagggcggctgcggcagctgtggctgcagcaagggggcctgtggcagctgtggcggcagcaagggcggctgcggcagctgtggcggctgcaagggcggctgcggcagctgtggcggcagcaagggcggctgcggcagcggctgcggcggctgcggcagcggctgcggcgtgcctgtgtgctgctgcagctgcagcagctgtggcagctgtgccggcagcaaaggaggctgcggcagcagctgcagccagtgcagctgctgcaagccctgctgctgcagcagcggctgcggcagcagctgctgccagagcagctgctgcaagccctgctgcagccagagcagctgctgcgtgcctgtgtgctgccagtgcaagatctag

SEQ ID NO: 156912 - DNA, 510 bp, synthetic construct
  misc_feature 1..510: note = Description of Artificial Sequence: Synthetic coding sequence
  source 1..510: mol_type = other DNA
atgggctgctgcggctgcagcggcggctgcggcagcagctgtggcggctgtgacagcagctgtggcagctgtggcagcggctgccggggctgcggccccagctgctgtgcccctgtgtactgctgcaagcctgtgtgctgctgcgtgcctgcctgcagctgcagcagctgtgggaagaggggctgcggcagctgtggcggcagcaaaggaggctgcggcagctgtggctgcagccagtgcagctgctgcaagccctgctgctgcagcagcggctgcggcagcagctgctgccagtgcagctgctgcaagccctactgcagccagtgcagctgctgcaagccctgctgcagcagcagcggccggggcagcagctgctgccagagcagctgctgcaagccctgctgcagcagcagcggctgcggcagcagctgctgccagagcagctgctgcaagccctgctgcagccagagccgctgctgcgtgcctgtgtgctaccagtgcaagatctag

SEQ ID NO: 156913 - DNA, 1740 bp, synthetic construct
  misc_feature 1..1740: note = Description of Artificial Sequence: Synthetic coding sequence
  source 1..1740: mol_type = other DNA
atgtgtgaccagcagcagatccagtgccgcctgcccctgcagcagtgctgcgtgaagggccccagcttctgcagcagccagagcccctttgcccagagccaggtggtggtgcaggccccctgtgagatgcagatcgtggactgcccagccagctgccctgtgcaggtgtgccaggtgtctgaccaggccccctgccagagccagaccacccaggtgaagtgccagagcaagaccaagcaggtgaagggccaggcccagtgccagagcaagaccacccaggtgaagggccaggccgccagccagagccagaccagctctgtgcagagccaggccccctgccagagcgaggtgtcctatgtgcagtgtgaggccagccagcctgtgcagacctgctttgtggagtgtgcccctgtgtgctacacagagacctgctacgtggagtgccctgtgcagaactacgtgccctgcccagccccccagcctgtgcagatgtaccggggccggcctgctgtgtgccagccccagggccgcttcagcacccagtgccagtaccagggcagctacagcagctgtggcccccagttccagagccgggccacctgcaacaactacaccccccagttccagctgcggcccagctacagcagctgcttcccccagtaccgcagcaggaccagcttcagcccctgtgtgccccagtgccagacccagggcagctatggcagcttcacagagcagcacaggagccgcagcaccagccgctgcctgcccccaccccggcggctgcagctgttccccaggagctgcagccccccaagaagatttgagccctgcagcagcagctacctgcccctgcggcccagcgagggcttccccaactactgcaccccaccaagaagaagtgagcccatctacaacagccgctgcccccggcggcccatcagcagctgcagccagaggcggggccccaagtgcagaattgagatcagcagcccctgctgcccccggcaggtgcccccccagcgctgccctgtggagatcccccccatcagaagaagaagccagagctgtggcccccagcccagctggggcgccagctgcccagagctgcggccccacgtggagccccggcccctgcccagcttctgccccccccggcggctggaccagtgcccagagagccccctgcagcgctgccccccaccagccccccggccccggctgcggcctgagccctgcatcagcctggagccccggccccggcccctgccccggcagctgtctgagccctgcctgtacccagagcccctgcctgccctgcggcccacccccaggcctgtgcccctgccccggcccggccagtgtgagatccctgagccccggccctgcctgcagccctgtgagcaccctgagccctgccccaggcctgagcccatccccctgcctgccccctgccccagccctgagccctgccgggagacctggaggagccccagcccctgctggggccccaaccctgtgccctacccaggggacctgggctgccacgagagcagcccccaccggctggacacagaggccccctactgcggccccagcagctacaaccagggccaggagagcggggccggctgcggccctggagatgtgtttcctgagcggcggggccaggacggccacggggaccagggcaatgcctttgctggggtgaagggggaggccaagagcgcctacttctag

SEQ ID NO: 156914 - DNA, 1059 bp, synthetic construct
  misc_feature 1..1059: note = Description of Artificial Sequence: Synthetic coding sequence
  source 1..1059: mol_type = other DNA
atggccggcaccatctgcttcatcatgtgggtgctcttcatcacagacacagtgtggagccgctctgtgcggcaggtgtatgaggtgcatgacagtgatgactggaccatccatgactttgaatgtcccatggagtgcttctgccccccatccttccccacagccctgtactgtgaaaatagaggcctgaaggagatcccagccatccccagccgcatctggtacctgtacctgcagaacaacctgattgagaccatccctgagaagccctttgaaaatgccacccagctgcgctggatcaacctgaacaagaacaagatcaccaactacggcatcgagaagggggccctgagccagctgaagaagctgctcttcctgttcctggaggacaatgagctggaggaggtgcccagccccctgcccaggagcctggagcagctgcagctggccaggaacaaggtgagccgcatcccccagggcaccttcagcaacctggagaacctgaccctgctggacctgcagaacaacaagctggtggacaatgccttccagagggacaccttcaagggcctgaagaacctgatgcagctgaacatggccaagaatgccctgaggaacatgccaccccggctgcctgccaacaccatgcagctgttcctggacaacaacagcattgagggcatccctgagaactacttcaacgtcatccccaaggtggccttcctgcggctgaaccacaacaagctgagtgatgagggcctgcccagccggggctttgatgtgagcagcatcctggacctgcagctgagccacaaccagctgaccaaggtgccccgcatcagcgcccacctgcagcacctgcacctggaccacaacaagatcaagtctgtgaatgtgtctgtcatctgccccagccccagcatgctgcctgctgagcgggacagcttctcctatggcccccacctgcgctacctgcggctggatggaaatgagatcaagccacccatccccatggccctgatgacctgcttccggctgctgcaggccgtcatcatctag

SEQ ID NO: 156915 - DNA, 897 bp, synthetic construct
  misc_feature 1..897: note = Description of Artificial Sequence: Synthetic coding sequence
  source 1..897: mol_type = other DNA
atggaggagaagcagatcctgtgtgtgggcctggtggtgctggatgtgatcagcctggtggacaagtaccccaaggaggacagcgagatccgctgcctgagccagcgctggcagaggggcggcaatgccagcaacagctgcaccgtgctgagcctgctgggcgccccctgtgccttcatgggctccatggcccctggccacgtggccgacttcctggtggccgacttcagaagaagaggagtggatgtgtcccaggtggcctggcagagcaaaggagacacccccagcagctgctgcatcatcaacaacagcaatggaaacagaaccatcgtgctgcatgacaccagcctgcctgatgtgtctgccacagactttgagaaggtggacctgacccagttcaagtggatccacatcgagggcagaaatgccagcgagcaggtgaagatgctgcagagaattgatgcccacaacacccggcagcccccagagcagaagatccgggtgtctgtggaggtggagaagccccgggaggagctgttccagctgtttggctatggagatgtggtgtttgtgtccaaggatgtggccaagcacctgggcttccagagcgctgaggaggccctgcggggcctgtatggccgggtgaggaaaggagctgtgctggtgtgtgcctgggccgaggagggcgcagatgccctgggcccagatggcaagctgctgcacagtgatgccttccccccaccccgggtggtggacaccctgggcgctggggacaccttcaatgccagcgtcatcttcagcctgagccagggccgctctgtgcaggaggccctgcgcttcggctgccaggtggccggcaagaagtgtggcctgcagggctttgatggcatcgtgtag

SEQ ID NO: 156916 - DNA, 897 bp, synthetic construct
  misc_feature 1..897: note = Description of Artificial Sequence: Synthetic coding sequence
  source 1..897: mol_type = other DNA
atggaggagaagcagatcctgtgtgtgggcctggtggtgctggatgtgatcagcctggtggacaagtaccccaaggaggacagcgagatccgctgcctgagccagcgctggcagaggggcggcaatgccagcaacagctgcaccgtgctgagcctgctgggcgccccctgtgccttcatgggctccatggcccctggccacgtggccgactttgtgctggatgacctgcggcgctacagcgtggacctgcgctacaccgtcttccagaccactggatctgtgcccatcgccaccgtcatcatcaatgaggccagcggcagcaggaccatcctgtactatgacaggagcctgcctgatgtgtctgccacagactttgagaaggtggacctgacccagttcaagtggatccacatcgagggcagaaatgccagcgagcaggtgaagatgctgcagagaattgatgcccacaacacccggcagcccccagagcagaagatccgggtgtctgtggaggtggagaagccccgggaggagctgttccagctgtttggctatggagatgtggtgtttgtgtccaaggatgtggccaagcacctgggcttccagagcgctgaggaggccctgcggggcctgtatggccgggtgaggaaaggagctgtgctggtgtgtgcctgggccgaggagggcgcagatgccctgggcccagatggcaagctgctgcacagtgatgccttccccccaccccgggtggtggacaccctgggcgctggggacaccttcaatgccagcgtcatcttcagcctgagccagggccgctctgtgcaggaggccctgcgcttcggctgccaggtggccggcaagaagtgtggcctgcagggctttgatggcatcgtgtag

SEQ ID NO: 156917 - DNA, 1041 bp, synthetic construct
  misc_feature 1..1041: note = Description of Artificial Sequence: Synthetic coding sequence
  source 1..1041: mol_type = other DNA
atggaggagaagtacctgcctgagctgatggccgagaaggacagcctggaccccagcttcacccacgccctgcggctggtgaaccaggagattgagaagttccagaagggggagggcaaggatgaggagaagtacattgatgtggtgatcaacaagaacatgaagctgggccagaaggtgctgatccctgtgaagcagttccccaagttcaactttgtgggcaagctgctgggcccccggggcaacagcctgaagaggctgcaggaggagaccctgaccaagatgagcatcctgggcaagggctccatgagggacaaggccaaggaggaggagctgaggaagtctggagaggccaagtacttccacctgaatgatgacctgcacgtgctgattgaggtgtttgcccccccagctgaggcctatgccaggatgggccacgccctggaggagatcaagaagttcctgatcccagactacaatgatgagatccggcaggcccagctgcaggagctgacctacctgaatggaggctctgaaaatgctgatgtgcctgtggtgcggggcaagcccaccctgcggacccggggcgtgcctgccccagccatcacccggggccggggcggcgtgacagcccggcctgtgggcgtggtggtgccccggggcacccccaccccccggggcgtgctgagcacccggggccctgtgtcccggggccggggcctgctgaccccccgggcccggggcgtgccccccaccggctaccggcccccacctcctccacccacccaggagacctacggggagtatgactatgatgatggctatggaacagcctatgatgagcagagctatgacagctatgacaacagctacagcaccccagcccagagcggggctgactactatgactatggccacggcctgtctgaggagacctatgacagctatggccaggaggagtggaccaacagccgccacaaggcccccagcgccaggacagccaagggcgtgtacagagaccagccctacggccgctactag

SEQ ID NO: 156918 - DNA, 495 bp, synthetic construct
  misc_feature 1..495: note = Description of Artificial Sequence: Synthetic coding sequence
  source 1..495: mol_type = other DNA
atggacatgggcaccagcgccctgagcaagaagccctggtggaccctgccccagaacttccacgcccccatggtgttccacatggaggaggaccaggaggagctgatctttggacatggagacacctacctgcgctgcatcgaggtgcacagccacaccctcatccagctggagagctggttcaccgccaccggccagaccagggtgacagtggtgggcccccaccgggcccggcagtggctgctgcacatgttctgctgcgtgggcagccaggacagctaccaccacgcccggggcctggagatgctggagcgggtgcgcagccagcccctgaccaatgatgacctggtgaccagcatctctgtgcccccctacaccggggacctgagcctggccccccgcatcagcggcaccgtgtgcctgtctgtgccccagcccagcccctaccaggtgattggctgcagcggcttccacctgagcagcctgtacccctag

SEQ ID NO: 156919 - DNA, 714 bp, synthetic construct
  misc_feature 1..714: note = Description of Artificial Sequence: Synthetic coding sequence
  source 1..714: mol_type = other DNA
atgctgagcgccttccagaggctcttccgggtgctgtttgtgattgaaacagtgtctgaatatggagtgctgatcttcatctacggctggcccttcctgcagaccctggccatgctgctgattggaacagtgtccttccacctgtggatcagaagaaaccgggagaggaacagccgcagcggcaagacccgctgccgcagcaagaggtctgagcagagcatggacatgggcaccagcgccctgagcaagaagccctggtggaccctgccccagaacttccacgcccccatggtgttccacatggaggaggaccaggaggagctgatcttcggccacggggacacctacctgcgctgcatcgaggtgcacagccacaccctcatccagctggagagctggttcaccgccaccggccagaccagggtgacagtggtgggcccccaccgggcccggcagtggctgctgcacatgttctgctgcgtgggcagccaggacagctaccaccacgcccggggcctggagatgctggagcgggtgcgcagccagcccctgaccaatgatgacctggtgaccagcatctctgtgcccccctacacaggagacctgagcctggccccccgcatctctggaacagtgtgcctgtctgtgccccagcccagcccctaccaggtgattggctgcagcggcttccacctgagcagcctgtacccctag

SEQ ID NO: 156920 - DNA, 297 bp, synthetic construct
  misc_feature 1..297: note = Description of Artificial Sequence: Synthetic coding sequence
  source 1..297: mol_type = other DNA
atggacatgggcaccagcgccctgagcaagaagccctggtggaccctgccccagaacttccacgcccccatggtgttccacatggaggaggaccaggaggagctgatctttggacatggagacacctacctgcgctgcatcgaggtgcacagccacaccctcatccagctggagagctggttcaccgccaccggccagaccagggtgacagtggtgggcccccaccgggcccggcagtggctgctgcacatgttctgctgcgtgggcagccaggacagctaccaccacgccaggtag

SEQ ID NO: 156921 - DNA, 2133 bp, synthetic construct
  misc_feature 1..2133: note = Description of Artificial Sequence: Synthetic coding sequence
  source 1..2133: mol_type = other DNA
atgtctgactacagcactggaggccccccacctggccccccacctcctgctgggggcggcggcggggccggcggggccggcggcggccccccacctggccccccaggagctggggacagaggaggcggcggccctgggggcggcggccctgggggcggcagcgctgggggccccagccagcccccaggcggcggcggccctggcatcaggaaggatgcctttgctgatgctgtgcagagggcccggcagattgctgccaagattggaggagatgctgccaccaccgtgaacaacagcaccccagactttggatttggaggccagaagaggcagctggaggatggagaccagcctgagagcaagaagctggccagccagggcgacagcatcagcagccagctgggccccatccaccccccacccaggacctccatgacagaggagtacagagtgcctgatggcatggtgggcctcatcatcggccggggcggggagcagatcaacaagatccagcaggacagcggctgcaaggtgcagatcagcccagacagcggcggcctgcctgagaggtctgtgtccctgactggagcccctgagagcgtgcagaaggccaagatgatgctggatgacatcgtgtcccggggccggggcggccccccaggccagttccatgacaatgccaacggcggccagaatggcaccgtgcaggagatcatgatcccagctgggaaggccggcctggtgattggaaaaggaggagagaccatcaagcagctgcaggagagagctggggtgaagatgatcctgatccaggacggcagccagaacaccaacgtggacaagcccctgcgcatcatcggggacccctacaaggtgcagcaggcctgtgagatggtgatggacatcctgcgggagcgggaccagggcggctttggagacagaaatgaatatggcagcagaattggaggcggcattgatgtgcctgtgcccaggcacagcgtgggcgtggtgattggccgctctggagagatgatcaagaagatccagaatgatgctggggtgcgcatccagttcaagcaggatgatggcaccggccctgagaagatcgcccacatcatgggccccccagacagatgtgaacatgctgcccgcatcatcaatgacctgctgcagagcctgcggagcggccccccaggccccccaggcggccctggcatgcctcctgggggccggggccggggccggggccagggcaactggggccccccaggaggagagatgaccttcagcatccccacccacaagtgtggcctggtgattggaagaggaggagaaaatgtgaaggccatcaaccagcagacaggagcctttgtggagatcagccggcagctgcccccaaatggagaccccaacttcaagctgttcatcatccggggcagcccccagcagattgaccacgccaagcagctgattgaggagaagattgagggccccctgtgccctgtgggccctggccctgggggccctggccctgctggccccatgggccccttcaaccctggccccttcaaccagggccccccaggggcccctcctcatgctgggggccccccaccccaccagtacccaccccagggctggggcaacacctacccccagtggcagcccccagcccctcatgaccccagcaaggctgctgctgctgctgctgaccccaatgctgcctgggccgcctactacagccactactaccagcagcccccaggccctgtgcccggccctgccccagccccagctgcccccccagcccagggcgagcccccccagcccccacccaccggccagagcgactacaccaaggcctgggaggagtactacaagaagattggccagcagccccagcagcccggggccccaccccagcaggactacaccaaggcctgggaggagtactacaagaagcaggcccaggtggccaccggcggcggccctggggcccctcctggcttcctggcccccccaacagtgttccagcccctgctgagcagcgccctggcccagctgccccggccccggcccagccccctgcccggcctggtgtgctgcctcttcatctgcagcagaggagactag

SEQ ID NO: 156922 - DNA, 2136 bp, synthetic construct
  misc_feature 1..2136: note = Description of Artificial Sequence: Synthetic coding sequence
  source 1..2136: mol_type = other DNA
atgtctgactacagcactggaggccccccacctggccccccacctcctgctgggggcggcggcggggccggcggggccggcggcggccccccacctggccccccaggagctggggacagaggaggcggcggccctgggggcggcggccctgggggcggcagcgctgggggccccagccagcccccaggcggcggcggccctggcatcaggaaggatgcctttgctgatgctgtgcagagggcccggcagattgctgccaagattggaggagatgctgccaccaccgtgaacaacagcaccccagactttggatttggaggccagaagaggcagctggaggatggagaccagcctgagagcaagaagctggccagccagggcgacagcatcagcagccagctgggccccatccaccccccacccaggacctccatgacagaggagtacagagtgcctgatggcatggtgggcctcatcatcggccggggcggggagcagatcaacaagatccagcaggacagcggctgcaaggtgcagatcagcccagacagcggcggcctgcctgagaggtctgtgtccctgactggagcccctgagagcgtgcagaaggccaagatgatgctggatgacatcgtgtcccggggccggggcggccccccaggccagttccatgacaatgccaacggcggccagaatggcaccgtgcaggagatcatgatcccagctgggaaggccggcctggtgattggaaaaggaggagagaccatcaagcagctgcaggagagagctggggtgaagatgatcctgatccaggacggcagccagaacaccaacgtggacaagcccctgcgcatcatcggggacccctacaaggtgcagcaggcctgtgagatggtgatggacatcctgcgggagcgggaccagggcggctttggagacagaaatgaatatggcagcagaattggaggcggcattgatgtgcctgtgcccaggcacagcgtgggcgtggtgattggccgctctggagagatgatcaagaagatccagaatgatgctggggtgcgcatccagttcaagcaggatgatggcaccggccctgagaagatcgcccacatcatgggccccccagacagatgtgaacatgctgcccgcatcatcaatgacctgctgcagagcctgcggagcggccccccaggccccccaggcggccctggcatgcctcctgggggccggggccggggccggggccagggcaactggggccccccaggaggagagatgaccttcagcatccccacccacaagtgtggcctggtgattggaagaggaggagaaaatgtgaaggccatcaaccagcagacaggagcctttgtggagatcagccggcagctgcccccaaatggagaccccaacttcaagctgttcatcatccggggcagcccccagcagattgaccacgccaagcagctgattgaggagaagattgagggccccctgtgccctgtgggccctggccctgggggccctggccctgctggccccatgggccccttcaaccctggccccttcaaccagggccccccaggggcccctcctcatgctgggggccccccaccccaccagtacccaccccagggctggggcaacacctacccccagtggcagcccccagcccctcatgaccccagcaaggctgctgctgctgctgctgaccccaatgctgcctgggccgcctactacagccactactaccagcagcccccaggccctgtgcccggccctgccccagccccagctgcccccccagcccagggcgagcccccccagcccccacccaccggccagagcgactacaccaaggcctgggaggagtactacaagaagattggccagcagccccagcagcccggggccccaccccagcaggactacaccaaggcctgggaggagtactacaagaagcaggcccaggtggccaccggcggcggccctggggcccctcctggcagccagcctgactacagcgctgcctgggccgagtactaccggcagcaggccgcctactacggccagaccccaggccctgggggcccccagcccccacccacccagcagggccagcagcaggcccagtag

SEQ ID NO: 156923 - DNA, 1095 bp, synthetic construct
  misc_feature 1..1095: note = Description of Artificial Sequence: Synthetic coding sequence
  source 1..1095: mol_type = other DNA
atgtctgactacagccctgggggcggcagcgctgggggccccagccagcccccaggcggcggcggccctggcatcaggaaggatgcctttgctgatgctgtgcagagggcccggcagattgctgccaagattggaggagatgctgccaccaccgtgaacaacagcaccccagactttggatttggaggccagaagaggcagctggaggatggagaccagcctgagagcaagaagctggccagccagggcgacagcatcagcagccagctgggccccatccaccccccacccaggacctccatgacagaggagtacagagtgcctgatggcatggtgggcctcatcatcggccggggcggggagcagatcaacaagatccagcaggacagcggctgcaaggtgcagatcagcccagacagcggcggcctgcctgagaggtctgtgtccctgactggagcccctgagagcgtgcagaaggccaagatgatgctggatgacatcgtgtcccggggccggggcggccccccaggccagttccatgacaatgccaacggcggccagaatggcaccgtgcaggagatcatgatcccagctgggaaggccggcctggtgattggaaaaggaggagagaccatcaagcagctgcaggagagagctggggtgaagatgatcctgatccaggacggcagccagaacaccaacgtggacaagcccctgcgcatcatcggggacccctacaaggtgcagcaggcctgtgagatggtgatggacatcctgcgggagcgggaccagggcggctttggagacagaaatgaatatggcagcagaattggaggcggcattgatgtgcctgtgcccaggcacagcgtgggcgtggtgattggccgctctggagagatgatcaagaagatccagaatgatgctggggtgcgcatccagttcaagcaggatgatggcaccggccctgagaagatcgcccacatcatgggccccccagacagatgtgaacatgctgcccgcatcatcaatgaccccagcagcagcagcttcctgctgcccaccccaggccaccggcccagctgcctgtctggatag

SEQ ID NO: 156924 - DNA, 255 bp, synthetic construct
  misc_feature 1..255: note = Description of Artificial Sequence: Synthetic coding sequence
  source 1..255: mol_type = other DNA
atggatgatgatgctgccccccgggtggagggcgtgcctgtggccgtgcacaagcacgccctgcatgatggcctgcggcaggtggccggccctggagctgctgctgcccacctgccccgctggcccccaccccagctggccgccagccggcgggaggccccacccctgagccagaggccccacaggacccagggcgccggcagccccccagagaccaatgagaagctgaccaacccccaggtgaaggagaagtag

SEQ ID NO: 156925 - DNA, 822 bp, synthetic construct
  misc_feature 1..822: note = Description of Artificial Sequence: Synthetic coding sequence
  source 1..822: mol_type = other DNA
atgtccatgagccccaccgtcatcatcctggcctgcctgggcttcttcctggaccagagcgtgtgggcccacgtgggcggccaggacaagcccttctgcagcgcctggcccagcgctgtggtgccccagggcggccacgtgaccctgcgctgccactaccgccggggcttcaacatcttcaccctgtacaagaaggatggagtgcctgtgcctgagctgtacaaccgcatcttctggaacagcttcctgatcagccctgtgaccccagcccacgccggcacctaccgctgccggggcttccacccccacagccccacagagtggagcgcccccagcaaccccctggtgatcatggtgacaggcctgtatgagaagcccagcctgacagcccggcccggccccaccgtgcgggccggggagaatgtgaccctgagctgcagcagccagagcagctttgacatctaccacctgagccgggagggggaggcccacgagctgcggctgcctgctgtgcccagcatcaatggcaccttccaggccgacttccccctgggccctgccacccatggagagacctaccgctgcttcggcagcttccacggcagcccctatgagtggagcgaccccagcgaccccctgcctgtgtctgtgacaggcaaccccagcagctcctggcccagccccacagagcccagcttcaagacaggaattgcccggcacctgcatgctgtgatccgctacagcgtggccatcatcctcttcaccatcctgcccttcttcctgctgcaccgctggtgcagcaagaagaagatgctgctgtag

SEQ ID NO: 156926 - DNA, 1269 bp, synthetic construct
  misc_feature 1..1269: note = Description of Artificial Sequence: Synthetic coding sequence
  source 1..1269: mol_type = other DNA
atgggcggccaggacaagcccttcctgagcgcctggcccagcgctgtggtgccccggggcggccacgtgaccctgcgctgccactaccgccaccgcttcaacaacttcatgctgtacaaggaggaccgcatccacatccccatcttccacggccgcatcttccaggagagcttcaacatgagccctgtgaccacagcccacgccggcaactacacctgccggggcagccacccccacagccccaccggctggagcgcccccagcaaccctgtggtgatcatggtgacaggcaaccacaggaagcccagcctgctggcccaccctggccccctggtgaagagcggggagagggtcatcctgcagtgctggagcgacatcatgtttgagcacttcttcctgcacaaggagggcatcagcaaggaccccagccggctggtgggccagatccatgatggagtgtccaaggccaacttcagcatcggccccatgatgctggccctggccggcacctaccgctgctacggctctgtgacccacaccccctaccagctgagcgcccccagcgaccccctggacatcgtggtgacaggcccctatgagaagcccagcctgagcgcccagcccggccccaaggtgcaggccggggagagcgtgaccctgagctgcagcagccgcagcagctatgacatgtaccacctgagccgggagggcggggcccacgagcggcggctgcctgctgtgaggaaggtgaacagaaccttccaggccgacttccccctgggccctgccacccatggaggcacctaccgctgcttcggcagcttccgccacagcccctatgagtggagcgaccccagcgaccccctgctggtgtctgtgacaggcaaccccagcagctcctggcccagccccacagagcccagcagcaagagcggcaaccccaggcacctgcacatcctgattggcacctctgtggtgatcatcctcttcatcctgctgctcttcttcctgctgcacctgtggtgcagcaacaagaagaatgctgctgtgatggaccaggagcccgccggcaacagaacagccaacagcgaggacagtgatgagcaggaccctgaggaggtgacctacgcccagctggaccactgtgtgttcacccagaggaagatcacccggcccagccagaggcccaagaccccacccacagacaccatcctgtacacagagctgcccaatgccaagcccaggagcaaggtggtgtcctgcccctag

SEQ ID NO: 156927 - DNA, 1050 bp, synthetic construct
  misc_feature 1..1050: note = Description of Artificial Sequence: Synthetic coding sequence
  source 1..1050: mol_type = other DNA
atgagcctgatggtggtgtccatggcctgtgtgggcctcttcctggtgcagagagctggcccccacatgggcaaccacaggaagcccagcctgctggcccaccctggccccctggtgaagtctggagagagggtcatcctgcagtgctggagcgacatcatgtttgagcacttcttcctgcacaaggagggcatcagcaaggaccccagccggctggtgggccagatccatgatggagtgtccaaggccaacttcagcatcggccccatgatgctggccctggccggcacctaccgctgctacggctctgtgacccacaccccctaccagctgagcgcccccagcgaccccctggacatcgtggtgacaggcccctatgagaagcccagcctgagcgcccagcccggccccaaggtgcaggccggggagagcgtgaccctgagctgcagcagccgcagcagctatgacatgtaccacctgagccgggagggcggggcccatgaaagaaggctgcctgctgtgaggaaggtgaacagaaccttccaggccgacttccccctgggccctgccacccacggcggcacctaccgctgcttcggcagcttccgccacagcccctatgagtggagcgaccccagcgaccccctgctggtgtctgtgactggaaaccccagcagctcctggcccagccccacagagcccagcagcaagagcggcaaccccaggcacctgcacatcctgattggcacctctgtggtgatcatcctcttcatcctgctgctcttcttcctgctgcacctgtggtgcagcaacaagaagaatgctgctgtgatggaccaggagcctgctggcaacagaacagccaacagtgaagattctgatgagcaggaccctgaggaggtgacctacgcccagctggaccactgtgtgttcacccagaggaagatcacccggcccagccagaggcccaagaccccacccacagacaccatcctgtacacagagctgcccaatgccaagcccaggagcaaggtggtgtcctgcccctag

SEQ ID NO: 156928 - DNA, 1335 bp, synthetic construct
  misc_feature 1..1335: note = Description of Artificial Sequence: Synthetic coding sequence
  source 1..1335: mol_type = other DNA
atgagcctgatggtggtgtccatggcctgtgtgggcctcttcctggtgcagagagctggcccccacatgggcggccaggacaagcccttcctgagcgcctggcccagcgctgtggtgccccggggcggccacgtgaccctgcgctgccactaccgccaccgcttcaacaacttcatgctgtacaaggaggaccgcatccacatccccatcttccacggccgcatcttccaggagagcttcaacatgagccctgtgaccacagcccacgccggcaactacacctgccggggcagccacccccacagccccaccggctggagcgcccccagcaaccctgtggtgatcatggtgacaggcaaccacaggaagcccagcctgctggcccaccctggccccctggtgaagagcggggagagggtcatcctgcagtgctggagcgacatcatgtttgagcacttcttcctgcacaaggagggcatcagcaaggaccccagccggctggtgggccagatccatgatggagtgtccaaggccaacttcagcatcggccccatgatgctggccctggccggcacctaccgctgctacggctctgtgacccacaccccctaccagctgagcgcccccagcgaccccctggacatcgtggtgacaggcccctatgagaagcccagcctgagcgcccagcccggccccaaggtgcaggccggggagagcgtgaccctgagctgcagcagccgcagcagctatgacatgtaccacctgagccgggagggcggggcccacgagcggcggctgcctgctgtgaggaaggtgaacagaaccttccaggccgacttccccctgggccctgccacccatggaggcacctaccgctgcttcggcagcttccgccacagcccctatgagtggagcgaccccagcgaccccctgctggtgtctgtgacaggcaaccccagcagctcctggcccagccccacagagcccagcagcaagagcggcaaccccaggcacctgcacatcctgattggcacctctgtggtgatcatcctcttcatcctgctgctcttcttcctgctgcacctgtggtgcagcaacaagaagaatgctgctgtgatggaccaggagcccgccggcaacagaacagccaacagcgaggacagtgatgagcaggaccctgaggaggtgacctacgcccagctggaccactgtgtgttcacccagaggaagatcacccggcccagccagaggcccaagaccccacccacagacaccatcctgtacacagagctgcccaatgccaagcccaggagcaaggtggtgtcctgcccctag

SEQ ID NO: 156929 - DNA, 1368 bp, synthetic construct
  misc_feature 1..1368: note = Description of Artificial Sequence: Synthetic coding sequence
  source 1..1368: mol_type = other DNA
atgagcctgatggtggtgtccatggcctgtgtgggcctcttcctggtgcagagagctggcccccacatgggcggccaggacaagcccttcctgagcgcctggcccagcgctgtggtgccccggggcggccacgtgaccctgcgctgccactaccgccaccgcttcaacaacttcatgctgtacaaggaggaccgcatccacatccccatcttccacggccgcatcttccaggagagcttcaacatgagccctgtgaccacagcccacgccggcaactacacctgccggggcagccacccccacagccccaccggctggagcgcccccagcaaccctgtggtgatcatggtgacaggcaaccacaggaagcccagcctgctggcccaccctggccccctggtgaagagcggggagagggtcatcctgcagtgctggagcgacatcatgtttgagcacttcttcctgcacaaggagggcatcagcaaggaccccagccggctggtgggccagatccatgatggagtgtccaaggccaacttcagcatcggccccatgatgctggccctggccggcacctaccgctgctacggctctgtgacccacaccccctaccagctgagcgcccccagcgaccccctggacatcgtggtgacaggcccctatgagaagcccagcctgagcgcccagcccggccccaaggtgcaggccggggagagcgtgaccctgagctgcagcagccgcagcagctatgacatgtaccacctgagccgggagggcggggcccacgagcggcggctgcctgctgtgaggaaggtgaacagaaccttccaggccgacttccccctgggccctgccacccatggaggcacctaccgctgcttcggcagcttccgccacagcccctatgagtggagcgaccccagcgaccccctgctggtgtctgtgacaggcaaccccagcagctcctggcccagccccacagagcccagcagcaagagcggcatctgccgccacctgcacgtgctgattggcacctctgtggtgatcttcctgttcatcctgctgctcttcttcctgctgtaccgctggtgcagcaacaagaagaatgctgctgtgatggaccaggagcctgctggggacagaacagtgaaccggcaggacagtgatgagcaggacccccaggaggtgacctacgcccagctggaccactgtgtgttcatccagaggaagatcagccggcccagccagaggcccaagacccccctgacagacacctctgtgtacacagagctgcccaatgctgagcccaggagcaaggtggtgtcctgcccccgggccccccagagcggcctggagggcgtcttctag

SEQ ID NO: 156930 - DNA, 1335 bp, synthetic construct; identical to SEQ ID NO: 156928
  misc_feature 1..1335: note = Description of Artificial Sequence: Synthetic coding sequence
  source 1..1335: mol_type = other DNA

SEQ ID NO: 156931 - DNA, 1284 bp, synthetic construct
  misc_feature 1..1284: note = Description of Artificial Sequence: Synthetic coding sequence
  source 1..1284: mol_type = other DNA
atgagcctgatggtggtgtccatggcctgtgtgggcctcttcctggtgcagagagctggcccccacatgggcggccaggacaagcccttcctgagcgcctggcccagcgctgtggtgccccggggcggccacgtgaccctgcgctgccactaccgccaccgcttcaacaacttcatgctgtacaaggaggaccgcatccacatccccatcttccacggccgcatcttccaggagagcttcaacatgagccctgtgaccacagcccacgccggcaactacacctgccggggcagccacccccacagccccaccggctggagcgcccccagcaaccctgtggtgatcatggtgacaggcaaccacaggaagcccagcctgctggcccaccctggccccctggtgaagagcggggagagggtcatcctgcagtgctggagcgacatcatgtttgagcacttcttcctgcacaaggagggcatcagcaaggaccccagccggctggtgggccagatccatgatggagtgtccaaggccaacttcagcatcggccccatgatgctggccctggccggcacctaccgctgctacggctctgtgacccacaccccctaccagctgagcgcccccagcgaccccctggacatcgtggtgacaggcccctatgagaagcccagcctgagcgcccagcccggccccaaggtgcaggccggggagagcgtgaccctgagctgcagcagccgcagcagctatgacatgtaccacctgagccgggagggcggggcccacgagcggcggctgcctgctgtgaggaaggtgaacagaaccttccaggccgacttccccctgggccctgccacccatggaggcacctaccgctgcttcggcagcttccgccacagcccctatgagtggagcgaccccagcgaccccctgctggtgtctgtgacaggcaaccccaggcacctgcacatcctgattggcacctctgtggtgatcatcctcttcatcctgctgctcttcttcctgctgcacctgtggtgcagcaacaagaagaatgctgctgtgatggaccaggagcctgctggcaacagaacagccaacagtgaagattctgatgagcaggaccctgaggaggtgacctacgcccagctggaccactgtgtgttcacccagaggaagatcacccggcccagccagaggcccaagaccccacccacagacaccatcctgtacacagagctgcccaatgccaagcccaggagcaaggtggtgtcctgcccctag

SEQ ID NO: 156932 - DNA, 1368 bp, synthetic construct
  misc_feature 1..1368: note = Description of Artificial Sequence: Synthetic coding sequence
  source 1..1368: mol_type = other DNA
atgagcctgactgtggtgtccatggcctgtgtgggcttcttcctgctgcagggcgcctggcccctgatgggcggccaggacaagcccttcctgagcgcccggcccagcacagtggtgccccggggcggccacgtggccctgcagtgccactaccgccggggcttcaacaacttcatgctgtacaaggaggacaggagccacgtgcccatcttccacggccgcatcttccaggagagcttcatcatgggccctgtgaccccagcccacgccggcacctaccgctgccggggcagccggccccacagcctgaccggctggagcgcccccagcaaccccctggtgatcatggtgacaggcaaccacaggaagcccagcctgctggcccaccctggccccctgctgaagagcggggagaccgtcatcctgcagtgctggagcgatgtgatgtttgagcacttcttcctgcaccgggagggcatcagcgaggaccccagccggctggtgggccagatccatgatggagtgtccaaggccaacttcagcatcggccccctgatgcctgtgctggccggcacctaccgctgctacggctctgtgccccacagcccctaccagctgagcgcccccagcgaccccctggacatcgtcatcaccggcctgtatgagaagcccagcctgagcgcccagcccggccccaccgtgcaggccggggagaatgtgaccctgagctgcagctcctggagcagctatgacatctaccacctgagccgggagggggaggcccacgagcggcggctgcgggctgtgcccaaggtgaacagaaccttccaggccgacttccccctgggccctgccacccatggaggcacctaccgctgcttcggcagcttccgggccctgccctgtgtgtggagcaacagcagtgaccccctgctggtgtctgtgacaggcaaccccagcagctcctggcccagccccacagagcccagcagcaagagcggcatctgccgccacctgcacgtgctgattggcacctctgtggtgatcttcctgttcatcctgctgctcttcttcctgctgtaccgctggtgcagcaacaagaagaatgctgctgtgatggaccaggagcctgctggggacagaacagtgaaccggcaggacagtgatgagcaggacccccaggaggtgacctacgcccagctggaccactgtgtgttcatccagaggaagatcagccggcccagccagaggcccaagacccccctgacagacacctctgtgtacacagagctgcccaatgctgagcccaggagcaaggtggtgtcctgcccccgggccccccagagcggcctggagggcgtcttctag

SEQ ID NO: 156933 - DNA, 1047 bp, synthetic construct
  misc_feature 1..1047: note = Description of Artificial Sequence: Synthetic coding sequence
  source 1..1047: mol_type = other DNA
atgagcctgatggtggtgtccatggcctgtgtgggcttcttcctgctgcagggcgcctggccccatgagggcgtgcacaggaagcccagcctgctggcccaccctggccgcctggtgaagtctgaggagaccgtcatcctgcagtgctggagcgatgtgcgctttgagcacttcctgctgcaccgggagggcaagttcaaggacaccctgcacctgattggagagcaccatgatggagtgtccaaggccaacttcagcatcggccccatgatgcaggacctggccggcacctaccgctgctacggctctgtgacccacagcccctaccagctgagcgcccccagcgaccccctggacatcgtcatcaccggcctgtatgagaagcccagcctgagcgcccagcccggccccaccgtgctggccggggagagcgtgaccctgagctgcagcagccgcagcagctatgacatgtaccacctgagccgggagggggaggcccacgagtgccgcttctctgctggccccaaggtgaatggcaccttccaggccgacttccccctgggccctgccacccacggcggcacctaccgctgcttcggcagcttccgggacagcccctatgagtggagcaacagcagtgaccccctgctggtgtctgtgactggaaaccccagcaacagctggcccagccccacagagcccagcagcaagacaggcaaccccaggcacctgcacatcctgattggcacctctgtggtgatcatcctcttcatcctgctcttcttcctgctgcaccgctggtgcagcaacaagaagaatgctgctgtgatggaccaggagagcgctggcaacagaacagccaacagcgaggacagtgatgagcaggacccccaggaggtgacctacacccagctgaaccactgtgtgttcacccagaggaagatcacccggcccagccagaggcccaagaccccacccacagacatcatcgtgtacacagagctgcccaatgctgagagccgcagcaaggtggtgtcctgcccctag

SEQ ID NO: 156934 - DNA, 1128 bp, synthetic construct
  misc_feature 1..1128: note = Description of Artificial Sequence: Synthetic coding sequence
  source 1..1128: mol_type = other DNA
atgagcctgatggtggtgtccatggcctgtgtgggcttcttcctgctgcagggcgcctggccccatgagggcggccaggacaagcccctgctgagcgcctggcccagcgctgtggtgccccggggcggccacgtgaccctgctgtgccgcagccggctgggcttcaccatcttcagcctgtacaaggaggatggagtgcctgtgcctgagctgtacaacaagatcttctggaagagcatcctgatgggccctgtgaccccagcccacgccggcacctaccgctgccggggcagccaccccaggagccccatcgagtggagcgcccccagcaaccccctggtgattgtggtgacaggcctgtttgggaagcccagcctgagcgcccagcccggccccaccgtgaggactggagaaaatgtgaccctgagctgcagcagccgcagcagctttgacatgtaccacctgagccgggagggccgggcccacgagccccggctgcctgctgtgcccagcgtgaatggcaccttccaggccgacttccccctgggccctgccacccatggaggcacctacacctgcttcggcagcctgcatgacagcccctatgagtggagcgaccccagcgaccccctgctggtgtctgtgacaggcaacagcagcagcagcagcagcagccccacagagcccagcagcaagacaggcatccgccgccacctgcacatcctgattggcacctctgtggccatcatcctcttcatcatcctcttcttcttcctgctgcactgctgctgcagcaacaagaagaatgctgctgtgatggaccaggagcctgctggggacagaacagtgaaccgggaggacagtgatgaccaggacccccaggaggtgacctacgcccagctggaccactgtgtgttcacccagaccaagatcaccagccccagccagaggcccaagaccccacccacagacaccaccatgtacatggagctgcccaatgccaagcccaggagcctgagccctgcccacaagcaccacagccaggccctgcggggcagcagccgggagaccacagccctgagccagaacagagtggccagcagccacgtgcctgctgctggcatctag

SEQ ID NO: 156935 - DNA, 1128 bp, synthetic construct
  misc_feature 1..1128: note = Description of Artificial Sequence: Synthetic coding sequence
  source 1..1128: mol_type = other DNA
atgagcctgatggtgatctccatggcctgtgtgggcttcttcctgctgcagggcgcctggacccatgagggcggccaggacaagcccctgctgagcgcctggcccagcgctgtggtgccccggggcggccacgtgaccctgctgtgccgcagccggctgggcttcaccatcttcagcctgtacaaggaggatggagtgcctgtgcctgagctgtacaacaagatcttctggaagagcatcctgatgggccctgtgaccccagcccacgccggcacctaccgctgccggggcagccaccccaggagccccatcgagtggagcgcccccagcaaccccctggtgattgtggtgacaggcctgtttgggaagcccagcctgagcgcccagcccggccccaccgtgaggactggagaaaatgtgaccctgagctgcagcagccgcagcagctttgacatgtaccacctgagccgggagggccgggcccacgagccccggctgcctgctgtgcccagcgtgaatggcaccttccaggccgacttccccctgggccctgccacccatggaggcacctacacctgcttcggcagcctgcatgacagcccctatgagtggagcgaccccagcgaccccctgctggtgtctgtgacaggcaacagcagcagcagcagcagcagccccacagagcccagcagcaagacaggcatccgccgccacctgcacatcctgattggcacctctgtggccatcatcctcttcatcatcctcttcttcttcctgctgcactgctgctgcagcaacaagaagaatgctgctgtgatggaccaggagcctgctggggacagaacagtgaaccgggaggacagtgatgaccaggacccccaggaggtgacctacgcccagctggaccactgtgtgttcacccagaccaagatcaccagccccagccagaggcccaagaccccacccacagacaccaccatgtacatggagctgcccaatgccaagcccaggagcctgagccctgcccacaagcaccacagccaggccctgcggggcagcagccgggagaccacagccctgagccagaacagagtggccagcagccacgtgcctgctgctggcatctag

SEQ ID NO: 156936 - DNA, 1164 bp, synthetic construct
  misc_feature 1..1164: note = Description of Artificial Sequence: Synthetic coding sequence
  source 1..1164: mol_type = other DNA
atgagcctgatggtggtgtccatggcctgtgtgggcctcttcctggtgcagagagctggcccccacatgggcggccaggacaagcccttcctgagcgcctggcccagcgctgtggtgccccggggcggccacgtgaccctgcgctgccactaccgccaccgcttcaacaacttcatgctgtacaaggaggaccgcatccacgtgcccatcttccacggccgcatcttccaggagggcttcaacatgagccctgtgaccacagcccacgccggcaactacacctgccggggcagccacccccacagccccaccggctggagcgcccccagcaaccccatggtgatcatggtgacaggcaaccacaggaagcccagcctgctggcccaccctggccccctggtgaagagcggggagagggtcatcctgcagtgctggagcgacatcatgtttgagcacttcttcctgcacaaggagtggatcagcaaggaccccagccggctggtgggccagatccatgatggagtgtccaaggccaacttcagcatcggctccatgatgagggccctggccggcacctaccgctgctacggctctgtgacccacaccccctaccagctgagcgcccccagcgaccccctggacatcgtggtgacaggcctgtatgagaagcccagcctgagcgcccagcccggccccaaggtgcaggccggggagagcgtgaccctgagctgcagcagccgcagcagctatgacatgtaccacctgagccgggagggcggggcccacgagcggcggctgcctgctgtgaggaaggtgaacagaaccttccaggccgacttccccctgggccctgccacccatggaggcacctaccgctgcttcggcagcttccgccacagcccctatgagtggagcgaccccagcgaccccctgctggtgtctgtgacaggcaaccccagcagctcctggcccagccccacagagcccagcagcaagagcggcaacctgcggcacctgcacatcctgattggcacctctgtggtgaagatccccttcaccatcctgctcttcttcctgctgcaccgctggtgcagcaacaagaagaatgctgctgtgatggaccaggagcccgccggcaacagaagtgagcagaggggcttctag

SEQ ID NO: 156937 - DNA, 1149 bp, synthetic construct
  misc_feature 1..1149: note = Description of Artificial Sequence: Synthetic coding sequence
  source 1..1149: mol_type = other DNA
atgctgctgatggtggtgtccatggcctgtgtgggcctcttcctggtgcagagagctggcccccacatgggcggccaggacaagcccttcctgagcgcctggcccagcgctgtggtgccccggggcggccacgtgaccctgcgctgccactaccgccaccgcttcaacaacttcatgctgtacaaggaggaccgcatccacgtgcccatcttccacggccgcatcttccaggagggcttcaacatgagccctgtgaccacagcccacgccggcaactacacctgccggggcagccacccccacagccccaccggctggagcgcccccagcaaccccatggtgatcatggtgacaggcaaccacaggaagcccagcctgctggcccaccctggccccctggtgaagagcggggagagggtcatcctgcagtgctggagcgacatcatgtttgagcacttcttcctgcacaaggagtggatcagcaaggaccccagccggctggtgggccagatccatgatggagtgtccaaggccaacttcagcatcggctccatgatgagggccctggccggcacctaccgctgctacggctctgtgacccacaccccctaccagctgagcgcccccagcgaccccctggacatcgtggtgacaggcctgtatgagaagcccagcctgagcgcccagcccggccccaaggtgcaggccggggagagcgtgaccctgagctgcagcagccgcagcagctatgacatgtaccacctgagccgggagggcggggcccacgagcggcggctgcctgctgtgaggaaggtgaacagaaccttccaggccgacttccccctgggccctgccacccatggaggcacctaccgctgcttcggcagcttccgccacagcccctatgagtggagcgaccccagcgaccccctgctggtgtctgtgacaggcaaccccagcagctcctggcccagccccacagagcccagcagcaagagcggcaacctgcggcacctgcacatcctgattggcacctctgtggtgaagatccccttcaccatcctgctcttcttcctgctgcaccgctggtgcagcaacaagaagaagtgctgctgcaatggcccccgggcctgccgggagcagaagtag

SEQ ID NO: 156938 - DNA, 1194 bp, synthetic construct
  misc_feature 1..1194: note = Description of Artificial Sequence: Synthetic coding sequence
  source 1..1194: mol_type = other DNA
atgagcctgatggtggtgtccatggcctgtgtgggcttcttcctggaccagagcgtgtgggcccacgtgggcggccaggacaagcccttctgcagcgcctggcccagcgctgtggtgccccagggcggccacgtgaccctgcgctgccactgccggcggggcttcaacatcttcaccctgtacaagaaggatggagtgcctgtgcctgagctgtacaaccgcatcttctggaacagcttcctgatcagccctgtgaccccagcccacgccggcacctaccgctgccggggcttccacccccacagccccacagagtggagcgcccccagcaaccccctggtgatcatggtgacaggcctgtatgagaagcccagcctgacagcccggcccggccccaccgtgcgggccggggagaatgtgaccctgagctgcagcagccagagcagctttgacatctaccacctgagccgggagggggaggcccacgagctgcggctgcctgctgtgcccagcatcaatggcaccttccaggccgacttccccctgggccctgccacccatggagagacctaccgctgcttcggcagcttccacggcagcccctatgagtggagcgaccccagcgaccccctgcctgtgtctgtgacaggcaaccccagcagctcctggcccagccccacagagcccagcttcaagacaggaattgcccggcacctgcatgctgtgatccgctacagcgtggccatcatcctcttcaccatcctgcccttcttcctgctgcaccgctggtgcagcaagaagaaggtgtccctgaccaagcagaggccagaaaattctggcccctgtgccgaggccggctgggagcacgcagatgctgctgtgatgaaccaggagcccgccggccacaggacagtgaaccgggaggacagtgatgagcaggacccccaggaggtgacctacgcccagctggaccactgcatcttcacccagaggaagatcaccggccccagccagaggagcaagaggcccagcacagacacctctgtgtgcatcgagctgcccaatgctgagccccgggccctgagccctgcccacgagcaccacagccaggccctgatgggcagcagccgggagaccacagccctgagccagacccagctggccagcagcaatgtgcctgctgctggcatctag

SEQ ID NO: 156939 - DNA, 1029 bp, synthetic construct
  misc_feature 1..1029: note = Description of Artificial Sequence: Synthetic coding sequence
  source 1..1029: mol_type = other DNA
atgtccatgagccccaccgtcatcatcctggcctgcctgggcttcttcctggaccagagcgtgtgggcccacgtgggcggccaggacaagcccttctgcagcgcctggcccagcgctgtggtgccccagggcggccacgtgaccctgcgctgccactgccggcggggcttcaacatcttcaccctgtacaagaaggatggagtgcctgtgcctgagctgtacaaccgcatcttctggaacagcttcctgatcagccctgtgaccccagcccacgccggcacctaccgctgccggggcttccacccccacagccccacagagtggagcgcccccagcaaccccctggtgatcatggtgacaggcctgtatgagaagcccagcctgacagcccggcccggccccaccgtgcgggccggggagaatgtgaccctgagctgcagcagccagagcagctttgacatctaccacctgagccgggagggggaggcccacgagctgcggctgcctgctgtgcccagcatcaatggcaccttccaggccgacttccccctgggccctgccacccatggagagacctaccgctgcttcggcagcttccacggcagcccctatgagtggagcgaccccagcgaccccctgcctgtgtctgtgacaggcaaccccagcagctcctggcccagccccacagagcccagcttcaagacagatgctgctgtgatgaaccaggagcctgctggccacaggacagtgaacagagaagattctgatgagcaggacccccaggaggtgacctacgcccagctggaccactgcatcttcacccagaggaagatcaccggccccagccagaggagcaagaggcccagcacagacacctctgtgtgcatcgagctgcccaatgctgagccccgggccctgagccctgcccacgagcaccacagccaggccctgatgggcagcagccgggagaccacagccctgagccagacccagctggccagcagcaatgtgcctgctgctggcatctag

SEQ ID NO: 156940 - DNA, 1083 bp, synthetic construct
  misc_feature 1..1083: note = Description of Artificial Sequence: Synthetic coding sequence
  source 1..1083: mol_type = other DNA
atgtccatgagccccaccgtcatcatcctggcctgcctgggcttcttcctggaccagagcgtgtgggcccacgtgggcggccaggacaagcccttctgcagcgcctggcccagcgctgtggtgccccagggcggccacgtgaccctgcgctgccactgccggcggggcttcaacatcttcaccctgtacaagaaggatggagtgcctgtgcctgagctgtacaaccgcatcttctggaacagcttcctgatcagccctgtgaccccagcccacgccggcacctaccgctgccggggcttccacccccacagccccacagagtggagcgcccccagcaaccccctggtgatcatggtgacaggcctgtatgagaagcccagcctgacagcccggcccggccccaccgtgcgggccggggagaatgtgaccctgagctgcagcagccagagcagctttgacatctaccacctgagccgggagggggaggcccacgagctgcggctgcctgctgtgcccagcatcaatggcaccttccaggccgacttccccctgggccctgccacccatggagagacctaccgctgcttcggcagcttccacggcagcccctatgagtggagcgaccccagcgaccccctgcctgtgtctgtgacaggcatcgcccggcacctgcacgccgtcatccgctacagcgtggccatcatcctcttcaccatcctgcccttcttcctgctgcaccgctggtgcagcaagaagaagaatgctgctgtgatgaaccaggagcctgctggccacaggacagtgaacagagaagattctgatgagcaggacccccaggaggtgacctacgcccagctggaccactgcatcttcacccagaggaagatcaccggccccagccagaggagcaagaggcccagcacagacacctctgtgtgcatcgagctgcccaatgctgagccccgggccctgagccctgcccacgagcaccacagccaggccctgatgggcagcagccgggagaccacagccctgagccagacccagctggccagcagcaatgtgcctgctgctggcatctag

SEQ ID NO: 156941 - DNA, 1134 bp, synthetic construct
  misc_feature 1..1134: note = Description of Artificial Sequence: Synthetic coding sequence
  source 1..1134: mol_type = other DNA
atgtccatgagccccaccgtcatcatcctggcctgcctgggcttcttcctggaccagagcgtgtgggcccacgtgggcggccaggacaagcccttctgcagcgcctggcccagcgctgtggtgccccagggcggccacgtgaccctgcgctgccactgccggcggggcttcaacatcttcaccctgtacaagaaggatggagtgcctgtgcctgagctgtacaaccgcatcttctggaacagcttcctgatcagccctgtgaccccagcccacgccggcacctaccgctgccggggcttccacccccacagccccacagagtggagcgcccccagcaaccccctggtgatcatggtgacaggcctgtatgagaagcccagcctgacagcccggcccggccccaccgtgcgggccggggagaatgtgaccctgagctgcagcagccagagcagctttgacatctaccacctgagccgggagggggaggcccacgagctgcggctgcctgctgtgcccagcatcaatggcaccttccaggccgacttccccctgggccctgccacccatggagagacctaccgctgcttcggcagcttccacggcagcccctatgagtggagcgaccccagcgaccccctgcctgtgtctgtgacaggcaaccccagcagctcctggcccagccccacagagcccagcttcaagacaggaattgcccggcacctgcatgctgtgatccgctacagcgtggccatcatcctcttcaccatcctgcccttcttcctgctgcaccgctggtgcagcaagaagaagaatgctgctgtgatgaaccaggagcccgccggccacaggacagtgaaccgggaggacagtgatgagcaggacccccaggaggtgacctacgcccagctggaccactgcatcttcacccagaggaagatcaccggccccagccagaggagcaagaggcccagcacagacacctctgtgtgcatcgagctgcccaatgctgagccccgggccctgagccctgcccacgagcaccacagccaggccctgatgggcagcagccgggagaccacagccctgagccagacccagctggccagcagcaatgtgcctgctgctggcatctag

SEQ ID NO: 156942 - DNA, 1233 bp, synthetic construct
  misc_feature 1..1233: note = Description of Artificial Sequence: Synthetic coding sequence
  source 1..1233: mol_type = other DNA
atgagcctgatggtggtgtccatggcctgtgtgggcttcttcctgctggagggcccctggccccacgtgggcggccaggacaagcccttcctgagcgcctggccaggcaccgtggtgtctgagggccagcacgtgaccctgcagtgccgcagccggctgggcttcaatgagttcagcctgagcaaagaagatggcatgcctgtgcctgagctgtacaaccgcatcttcagaaattccttcctgatgggccctgtgaccccagcccacgccggcacctaccgctgctgcagcagccacccccacagccccaccggctggagcgcccccagcaaccctgtggtgatcatggtgactggagtgcacaggaagcccagcctgctggcccaccctggccccctggtgaagagcggggagaccgtcatcctgcagtgctggagcgatgtgcgctttgagcgcttcctgctgcaccgggagggcatcacagaggaccccctgcggctcatcggccagctgcatgatgctggcagccaggtgaactacagcatgggccccatgaccccagccctggccggcacctaccgctgcttcggctctgtgacccacctgccctatgagctgagcgcccccagcgaccccctggacatcgtggtggtgggcctgtatggcaagcccagcctgagcgcccagcccggccccaccgtgcaggccggggagaatgtgaccctgagctgcagcagccgcagcctgtttgacatctaccacctgagccgggaggccgaggccggggagctgcggctgacagctgtgctgcgggtgaatggcaccttccaggccaacttccccctgggccctgtgacccatggaggcaactaccgctgcttcggcagcttccgggccctgccccacgcctggagcgaccccagcgaccccctgcctgtgtctgtgacaggcaacagccgctacctgcacgccctgattggcacctctgtggtgatcatcccctttgccatcctgctcttcttcctgctgcaccgctggtgtgccaacaagaagaatgctgtggtgatggaccaggagcctgctggcaacagaacagtgaacagagaagattctgatgagcaggacccccaggaggtgacctacgcccagctgaaccactgtgtgttcacccagaggaagatcacccggcccagccagaggcccaagaccccacccacagacacctctgtgtag

SEQ ID NO: 156943 - DNA, 1047 bp, synthetic construct
  misc_feature 1..1047: note = Description of Artificial Sequence: Synthetic coding sequence
  source 1..1047: mol_type = other DNA
atgagcctgctggtggtgtccatggcctgtgtgggcttcttcctgctgcagggcgcctggccccatgagggcgtgcacaggaagcccagcctgctggcccaccctggccgcctggtgaagtctgaggagaccgtcatcctgcagtgctggagcgatgtgatgtttgagcacttcctgctgcaccgggagggcatgtttaatgacaccctgcggctgattggagagcaccatgatggagtgtccaaggccaacttcagcatcagcaggatgacccaggacctggccggcacctaccgctgctacggctctgtgacccacagcccctaccaggtgtctgcccccagcgaccccctggacatcgtcatcatcggcctgtatgagaagcccagcctgagcgcccagctgggccccaccgtgctggccggagaaaatgtgaccctgagctgcagcagccgcagcagctatgacatgtaccacctgagccgggagggggaggcccatgaaagaaggctgcctgctggccccaaggtgaatggcaccttccaggccgacttccccctgggccctgccacccacggcggcacctaccgctgcttcggcagcttccatgacagcccctatgagtggagcaagagcagtgaccccctgctggtgtctgtgactggaaaccccagcaacagctggcccagccccacagagcccagcagcaagacaggcaaccccaggcacctgcacatcctgattggcacctctgtggtgatcatcctcttcatcctgctcttcttcctgctgcaccgctggtgcagcaacaagaagaatgctgctgtgatggaccaggagagcgctggcaacagaacagccaacagcgaggacagtgatgagcaggacccccaggaggtgacctacacccagctgaaccactgtgtgttcacccagaggaagatcacccggcccagccagaggcccaagaccccacccacagacatcatcgtgtacacagagctgcccaatgctgagagccgcagcaaggtggtgtcctgcccctag

SEQ ID NO: 156944 - DNA, 1026 bp, synthetic construct
  misc_feature 1..1026: note = Description of Artificial Sequence: Synthetic coding sequence
  source 1..1026: mol_type = other DNA
atgagcctgatggtggtgtccatggtgtgtgtgggcttcttcctgctgcagggcgcctggccccatgagggcgtgcacaggaagcccagcctgctggcccaccctggccccctggtgaagtctgaggagaccgtcatcctgcagtgctggagcgatgtgcgcttccagcacttcctgctgcaccgggagggcaagttcaaggacaccctgcacctgattggagagcaccatgatggagtgtccaaggccaacttcagcatcggccccatgatgcaggacctggccggcacctaccgctgctacggctctgtgacccacagcccctaccagctgagcgcccccagcgaccccctggacatcgtcatcaccggcctgtatgagaagcccagcctgagcgcccagcccggccccaccgtgctggccggggagagcgtgaccctgagctgcagcagccgcagcagctatgacatgtaccacctgagccgggagggggaggcccatgaaagacgcttctctgctggccccaaggtgaatggcaccttccaggccgacttccccctgggccctgccacccacggcggcacctaccgctgcttcggcagcttccgggacagcccctatgagtggagcaacagcagtgaccccctgctggtgtctgtgactggaaaccccagcaacagctggcccagccccacagagcccagcagcgagaccggcaaccccaggcacctgcacgtgctgattggcacctctgtggtgatcatcctcttcatcctgctgctcttcttcctgctgcaccgctggtgctgcaacaagaagaatgctgtggtgatggaccaggagcctgctggcaacagaacagtgaacagagaagattctgatgagcaggacccccaggaggtgacctacgcccagctgaaccactgtgtgttcacccagaggaagatcacccggcccagccagaggcccaagaccccacccacagacatcatcgtgtacacagagctgcccaatgctgagccctag

SEQ ID NO: 156945 - DNA, 1047 bp, synthetic construct
  misc_feature 1..1047: note = Description of Artificial Sequence: Synthetic coding sequence
  source 1..1047: mol_type = other DNA
atgagcctgatggtggtgtccatggtgtgtgtgggcttcttcctgctgcagggcgcctggccccatgagggcgtgcacaggaagcccagcctgctggcccaccctggccccctggtgaagtctgaggagaccgtcatcctgcagtgctggagcgatgtgcgcttccagcacttcctgctgcaccgggagggcaagttcaaggacaccctgcacctgattggagagcaccatgatggagtgtccaaggccaacttcagcatcggccccatgatgcaggacctggccggcacctaccgctgctacggctctgtgacccacagcccctaccagctgagcgcccccagcgaccccctggacatcgtcatcaccggcctgtatgagaagcccagcctgagcgcccagcccggccccaccgtgctggccggggagagcgtgaccctgagctgcagcagccgcagcagctatgacatgtaccacctgagccgggagggggaggcccatgaaagacgcttctctgctggccccaaggtgaatggcaccttccaggccgacttccccctgggccctgccacccacggcggcacctaccgctgcttcggcagcttccgggacagcccctatgagtggagcaacagcagtgaccccctgctggtgtctgtgactggaaaccccagcaacagctggcccagccccacagagcccagcagcaagacaggcaaccccaggcacctgcacatcctgattggcacctctgtggtgatcatcctcttcatcctgctcttcttcctgctgcaccgctggtgcagcaacaagaagaatgctgctgtgatggaccaggagagcgctggcaacagaacagccaacagcgaggacagtgatgagcaggacccccaggaggtgacctacacccagctgaaccactgtgtgttcacccagaggaagatcacccggcccagccagaggcccaagaccccacccacagacatcatcgtgtacacagagctgcccaatgctgagagccgcagcaaggtggtgtcctgcccctag

SEQ ID NO: 156946 - DNA, 1029 bp, synthetic construct
  misc_feature 1..1029: note = Description of Artificial Sequence: Synthetic coding sequence
  source 1..1029: mol_type = other DNA
atgtccatgagccccaccgtcatcatcctggcctgcctgggcttcttcctggaccagagcgtgtgggcccacgtgggcggccaggacaagcccttctgcagcgcctggcccagcgctgtggtgccccagggcggccacgtgaccctgcgctgccactaccgccggggcttcaacatcttcaccctgtacaagaaggatggagtgcctgtgcctgagctgtacaaccgcatcttctggaacagcttcctgatcagccctgtgaccccagcccacgccggcacctaccgctgccggggcttccacccccacagccccacagagtggagcgcccccagcaaccccctggtgatcatggtgacaggcctgtatgagaagcccagcctgacagcccggcccggccccaccgtgcgggccggggagaatgtgaccctgagctgcagcagccagagcagctttgacatctaccacctgagccgggagggggaggcccacgagctgcggctgcctgctgtgcccagcatcaatggcaccttccaggccgacttccccctgggccctgccacccatggagagacctaccgctgcttcggcagcttccacggcagcccctatgagtggagcgaccccagcgaccccctgcctgtgtctgtgacaggcaaccccagcagctcctggcccagccccacagagcccagcttcaagacagatgctgctgtgatgaaccaggagcctgctggccacaggacagtgaacagagaagattctgatgagcaggacccccaggaggtgacctacgcccagctggaccactgcatcttcacccagaggaagatcaccggccccagccagaggagcaagaggcccagcacagacacctctgtgtgcatcgagctgcccaatgctgagccccgggccctgagccctgcccacgagcaccacagccaggccctgatgggcagcagccgggagaccacagccctgagccagacccagctggccagcagcaatgtgcctgctgctggcatctag

SEQ ID NO: 156947 - DNA, 978 bp, synthetic construct
  misc_feature 1..978: note = Description of Artificial Sequence: Synthetic coding sequence
  source 1..978: mol_type = other DNA
atgtccatgagccccaccgtcatcatcctggcctgcctgggcttcttcctggaccagagcgtgtgggcccacgtgggcggccaggacaagcccttctgcagcgcctggcccagcgctgtggtgccccagggcggccacgtgaccctgcgctgccactaccgccggggcttcaacatcttcaccctgtacaagaaggatggagtgcctgtgcctgagctgtacaaccgcatcttctggaacagcttcctgatcagccctgtgaccccagcccacgccggcacctaccgctgccggggcttccacccccacagccccacagagtggagcgcccccagcaaccccctggtgatcatggtgacaggcctgtatgagaagcccagcctgacagcccggcccggccccaccgtgcgggccggggagaatgtgaccctgagctgcagcagccagagcagctttgacatctaccacctgagccgggagggggaggcccacgagctgcggctgcctgctgtgcccagcatcaatggcaccttccaggccgacttccccctgggccctgccacccatggagagacctaccgctgcttcggcagcttccacggcagcccctatgagtggagcgaccccagcgaccccctgcctgtgtctgtgacagatgctgctgtgatgaaccaggagcccgccggccacaggacagtgaaccgggaggacagtgatgagcaggacccccaggaggtgacctacgcccagctggaccactgcatcttcacccagaggaagatcaccggccccagccagaggagcaagaggcccagcacagacacctctgtgtgcatcgagctgcccaatgctgagccccgggccctgagccctgcccacgagcaccacagccaggccctgatgggcagcagccgggagaccacagccctgagccagacccagctggccagcagcaatgtgcctgctgctggcatctag

SEQ ID NO: 156948 - DNA, 1194 bp, synthetic construct
  misc_feature 1..1194: note = Description of Artificial Sequence: Synthetic coding sequence
  source 1..1194: mol_type = other DNA
atgagcctgatggtggtgtccatggcctgtgtgggcttcttcctggaccagagcgtgtgggcccacgtgggcggccaggacaagcccttctgcagcgcctggcccagcgctgtggtgccccagggcggccacgtgaccctgcgctgccactaccgccggggcttcaacatcttcaccctgtacaagaaggatggagtgcctgtgcctgagctgtacaaccgcatcttctggaacagcttcctgatcagccctgtgaccccagcccacgccggcacctaccgctgccggggcttccacccccacagccccacagagtggagcgcccccagcaaccccctggtgatcatggtgacaggcctgtatgagaagcccagcctgacagcccggcccggccccaccgtgcgggccggggagaatgtgaccctgagctgcagcagccagagcagctttgacatctaccacctgagccgggagggggaggcccacgagctgcggctgcctgctgtgcccagcatcaatggcaccttccaggccgacttccccctgggccctgccacccatggagagacctaccgctgcttcggcagcttccacggcagcccctatgagtggagcgaccccagcgaccccctgcctgtgtctgtgacaggcaaccccagcagctcctggcccagccccacagagcccagcttcaagacaggaattgcccggcacctgcatgctgtgatccgctacagcgtggccatcatcctcttcaccatcctgcccttcttcctgctgcaccgctggtgcagcaagaagaaggtgtccctgaccaagcagaggccagaaaattctggcccctgtgccgaggccggctgggagcacgcagatgctgctgtgatgaaccaggagcccgccggccacaggacagtgaaccgggaggacagtgatgagcaggacccccaggaggtgacctacgcccagctggaccactgcatcttcacccagaggaagatcaccggccccagccagaggagcaagaggcccagcacagacacctctgtgtgcatcgagctgcccaatgctgagccccgggccctgagccctgcccacgagcaccacagccaggccctgatgggcagcagccgggagaccacagccctgagccagacccagctggccagcagcaatgtgcctgctgctggcatctag

SEQ ID NO: 156949 - DNA, 693 bp, synthetic construct
  misc_feature 1..693: note = Description of Artificial Sequence: Synthetic coding sequence
  source 1..693: mol_type = other DNA
atgtccatgagccccaccgtcatcatcctggcctgcctgggcttcttcctggaccagagcgtgtgggcccacgtgggcctgtatgagaagcccagcctgacagcccggcccggccccaccgtgcgggctggagaaaatgtgaccctgagctgcagcagccagagcagctttgacatctaccacctgagccgggagggggaggcccacgagctgcggctgcctgctgtgcccagcatcaatggcaccttccaggccgacttccccctgggccctgccacccacggggagacctaccgctgcttcggcagcttccacggcagcccctatgagtggagcgaccccagcgaccccctgcctgtgtctgtgacagatgctgctgtgatgaaccaggagcctgctggccacaggacagtgaacagagaagattctgatgagcaggacccccaggaggtgacctacgcccagctggaccactgcatcttcacccagaggaagatcaccggccccagccagaggagcaagaggcccagcacagacacctctgtgtgcatcgagctgcccaatgctgagccccgggccctgagccctgcccacgagcaccacagccaggccctgatgggcagcagccgggagaccacagccctgagccagacccagctggccagcagcaatgtgcctgctgctggcatctag

SEQ ID NO: 156950 - DNA, 762 bp, synthetic construct
  misc_feature 1..762: note = Description of Artificial Sequence: Synthetic coding sequence
  source 1..762: mol_type = other DNA
atgagctgcaccatcgagaaggccctggctgatgccaaggccctggtggagcggctgcgggaccatgatgatgctgctgagagcctcatcgagcagaccacagccctgaacaagagggtggaggccatgaagcagtaccaggaggagatccaggagctgaatgaggtggcccggcaccggcccaggagcaccctggtgatgggcatccagcaggagaaccggcagatccgggagctgcagcaggagaacaaggagctgcggaccagcctggaggagcaccagagcgccctggagctgatcatgagcaagtaccgggagcagatgttccggctgctgatggccagcaagaaggatgaccccggcatcatcatgaagctgaaggagcagcacagcaagattgacatggtgcacaggaacaagtctgagggcttcttcctggatgccagccgccacatcctggaggccccccagcacggcctggagcggcggcacctggaggccaaccagaatgagctgcaggcccacgtggaccagatcacagagatggctgctgtgatgaggaaggccatcgagattgatgagcagcagggctgcaaggagcaggagcgcatcttccagctggagcaggagaacaagggcctgcgggagatcctgcagatcacccgggagagcttcctgaacctgaggaaggatgatgccagcgagagcaccagcctgagcgccctggtgaccaacagcgacctgagcctgaggaagagctag

SEQ ID NO: 156951 - DNA, 648 bp, synthetic construct
  misc_feature 1..648: note = Description of Artificial Sequence: Synthetic coding sequence
  source 1..648: mol_type = other DNA
atggacaaccagggcgtcatctacagcgacctgaacctgccccccaaccccaagaggcagcagaggaagcccaagggcaacaagaacagcatcctggccacagagcaggagatcacctatgcagagctgaacctgcagaaggccagccaggacttccagggcaatgacaagacctaccactgcaaggacctgcccagcgcccctgagaagctgattgtgggcatcctgggcatcatctgcctgatcctgatggcctctgtggtgaccatcgtggtgatccccagccgccactgcggccactgcccagaggagtggatcacctacagcaacagctgctactacatcggcaaggagaggaggacctgggaggagagcctgctggcctgcaccagcaagaacagcagcctgctgagcattgacaatgaggaggagatgaagttcctgagcatcatcagccccagctcctggattggagtcttcaggaacagcagccaccacccctgggtgaccatgaatggcctggccttcaagcatgagatcaaggacagcgacaatgctgagctgaactgtgctgtgctgcaggtgaaccggctgaagagcgcccagtgtggcagcagcatcatctaccactgcaagcacaagctgtag

SEQ ID NO: 156952 - DNA, 702 bp, synthetic construct
  misc_feature 1..702: note = Description of Artificial Sequence: Synthetic coding sequence
  source 1..702: mol_type = other DNA
atggacaaccagggcgtcatctacagcgacctgaacctgccccccaaccccaagaggcagcagaggaagcccaagggcaacaagaacagcatcctggccacagagcaggagatcacctatgcagagctgaacctgcagaaggccagccaggacttccagggcaatgacaagacctaccactgcaaggacctgcccagcgcccctgagaagctgattgtgggcatcctgggcatcatctgcctgatcctgatggcctctgtggtgaccatcgtggtgatccccagcaccctcatccagaggcacaacaacagcagcctgaacaccaggacccagaaggcccggcactgcggccactgcccagaggagtggatcacctacagcaacagctgctactacatcggcaaggagaggaggacctgggaggagagcctgctggcctgcaccagcaagaacagcagcctgctgagcattgacaatgaggaggagatgaagttcctgagcatcatcagccccagctcctggattggagtcttcaggaacagcagccaccacccctgggtgaccatgaatggcctggccttcaagcatgagatcaaggacagcgacaatgctgagctgaactgtgctgtgctgcaggtgaaccggctgaagagcgcccagtgtggcagcagcatcatctaccactgcaagcacaagctgtag

SEQ ID NO: 156953 - DNA, 648 bp, synthetic construct; identical to SEQ ID NO: 156951
  misc_feature 1..648: note = Description of Artificial Sequence: Synthetic coding sequence
  source 1..648: mol_type = other DNA

SEQ ID NO: 156954 - DNA, 702 bp, synthetic construct; identical to SEQ ID NO: 156952
  misc_feature 1..702: note = Description of Artificial Sequence: Synthetic coding sequence
  source 1..702: mol_type = other DNA

SEQ ID NO: 156955 - DNA, 696 bp, synthetic construct
  misc_feature 1..696: note = Description of Artificial Sequence: Synthetic coding sequence
  source 1..696: mol_type = other DNA
atgaacaagcagaggggcaccttcagcgaggtgtccctggcccaggaccccaagaggcagcagaggaagcccaagggcaacaagagcagcatcagcggcacagagcaggagatcttccaggtggagctgaacctgcagaaccccagcctgaaccaccagggcatcgacaagatctatgactgccagggcctgctgcccccacctgagaagctgacagctgaggtgctgggcatcatctgcatcgtgctgatggccaccgtgctgaagaccatcgtgctgatccccttcctggagcagaacaacagcagccccaacaccaggacccagaagaccaggcactgcggccactgcccagaggagtggatcacctacagcaacagctgctactacatcggcaaggagaggaggacctgggaggagagcctgctggcctgcaccagcaagaacagcagcctgctgagcattgacaatgaggaggagatgaagttcctggccagcatcctgcccagctcctggattggagtcttcaggaacagcagccaccacccctgggtgaccatcaatggcctggccttcaagcacaagatcaaggacagcgacaatgctgagctgaactgtgctgtgctgcaggtgaaccggctgaagagcgcccagtgtggcagctccatgatctaccactgcaagcacaagctgtag

SEQ ID NO: 156956 - DNA, 696 bp, synthetic construct
  misc_feature 1..696: note = Description of Artificial Sequence: Synthetic coding sequence
  source 1..696: mol_type = other DNA
atgaacaagcagaggggcaccttcagcgaggtgtccctggcccaggaccccaagaggcagcagaggaagcccaagggcaacaagagcagcatcagcggcacagagcaggagatcttccaggtggagctgaacctgcagaaccccagcctgaaccaccagggcatcgacaagatctatgactgccagggcctgctgcccccacctgagaagctgacagctgaggtgctgggcatcatctgcatcgtgctgatggccaccgtgctgaagaccatcgtgctgatccccttcctggagcagaacaacttcagccccaacaccaggacccagaaggcccggcactgcggccactgcccagaggagtggatcacctacagcaacagctgctactacatcggcaaggagaggaggacctgggaggagagcctgctggcctgcaccagcaagaacagcagcctgctgagcattgacaatgaggaggagatgaagttcctggccagcatcctgcccagctcctggattggagtcttcaggaacagcagccaccacccctgggtgaccatcaatggcctggccttcaagcacaagatcaaggacagcgacaatgctgagctgaactgtgctgtgctgcaggtgaaccggctgaagagcgcccagtgtggcagctccatgatctaccactgcaagcacaagctgtag

SEQ ID NO: 156957 - DNA, 375 bp, synthetic construct
  misc_feature 1..375: note = Description of Artificial Sequence: Synthetic coding sequence
  source 1..375: mol_type = other DNA
atgatccccaccaggcactgcggccactgcccagaggagtggatcacctacagcaacagctgctactacatcggcaaggagaggaggacctgggaggagagcctgctggcctgcaccagcaagaacagcagcctgctgagcattgacaatgaggaggagatgaagttcctggccagcatcctgcccagctcctggattggagtcttcaggaacagcagccaccacccctgggtgaccatcaatggcctggccttcaagcacaagatcaaggacagcgacaatgctgagctgaactgtgctgtgctgcaggtgaaccggctgaagagcgcccagtgtggcagctccatgatctaccactgcaagcacaagctgtag

SEQ ID NO: 156958 - DNA, 774 bp, synthetic construct
  misc_feature 1..774: note = Description of Artificial Sequence: Synthetic coding sequence
  source 1..774: mol_type = other DNA
atgagcaagcagaggggcaccttcagcgaggtgtccctggcccaggaccccaagtggcagcagaggaagcccaagggcaacaagagcagcatcagcggcacagagcaggagatcttccaggtggagctgaacctgcagaatgccagcctgaaccaccagggcatcgacaagatctatgactgccagggcctgctgcccccacctgagaagctgacagctgaggtgctgggcatcatctgcatcgtgctgatggccaccgtgctgaagaccatcgtgctgatccccttcctggagcagaacaacagcagccccaatgcccggacccagaaggcccggcactgcggccactgcccagaggagtggatcacctacagcaacagctgctactacatcggcaaggagaggaggacctgggaggagagcctgcaggcctgtgccagcaagaacagcagcagcctgctgtgcatcgacaatgaggaggagatgaagttcctggccagcatcctgcccagctcctggattggagtcttcaggaacagcagccaccacccctgggtgaccatcaatggcctggccttcaagcatgagatcaaggacagcgaccatgctgagaggaactgtgccatgctgcacgtgcggggcctcatcagtgaccagtgtggcagcagccgcatcatcgtgtccatctccttccgcatcaaggccctggagctggccgtgcaccagatcaagttctacatctgcagcaacagaaatgacatcatgattgcctag

SEQ ID NO: 156959 - DNA, 723 bp, synthetic construct
  misc_feature 1..723: note = Description of Artificial Sequence: Synthetic coding sequence
  source 1..723: mol_type = other DNA
atgagcaagcagaggggcaccttcagcgaggtgtccctggcccaggaccccaagtggcagcagaggaagcccaagggcaacaagagcagcatcagcggcacagagcaggagatcttccaggtggagctgaacctgcagaatgccagcctgaaccaccagggcatcgacaagatctatgactgccagggcctgctgcccccacctgagaagctgacagctgaggtgctgggcatcatctgcatcgtgctgatggccaccgtgctgaagaccatcgtgctgatccccttcctggagcagaacaacagcagccccaacaccaggacccagaagaccaggcactgcggccactgcccagaggagtggatcacctacagcaacagctgctactacatcggcaaggagaggaggacctgggaggagagcctgcaggcctgtgccagcaagaacagcagcagcctgctgtgcatcgacaatgaggaggagatgaagttcctggccagcatcctgcccagctcctggattggagtcttcaggaacagcagccaccacccctgggtgaccatcaatggcctggccttcaagcatgagatcaaggacagcgaccatgctgagaggaactgtgccatgctgcacgtgcggggcctcatcagtgaccagtgtggcagcagccgcatcatcagaagaggcttcatcatgctgacccggctggtgctgaacagctag

SEQ ID NO: 156960 - DNA, 723 bp, synthetic construct
  misc_feature 1..723: note = Description of Artificial Sequence: Synthetic coding sequence
  source 1..723: mol_type = other DNA
atgagcaagcagaggggcaccttcagcgaggtgtccctggcccaggaccccaagtggcagcagaggaagcccaagggcaacaagagcagcatcagcggcacagagcaggagatcttccaggtggagctgaacctgcagaatgccagcctgaaccaccagggcatcgacaagatctatgactgccagggcctgctgcccccacctgagaagctgacagctgaggtgctgggcatcatctgcatcgtgctgatggccaccgtgctgaagaccatcgtgctgatccccttcctggagcagaacaacagcagccccaatgcccggacccagaaggcccggcactgcggccactgcccagaggagtggatcacctacagcaacagctgctactacatcggcaaggagaggaggacctgggaggagagcctgcaggcctgtgccagcaagaacagcagcagcctgctgtgcatcgacaatgaggaggagatgaagttcctggccagcatcctgcccagctcctggattggagtcttcaggaacagcagccaccacccctgggtgaccatcaatggcctggccttcaagcatgagatcaaggacagcgaccatgctgagaggaactgtgccatgctgcacgtgcggggcctcatcagtgaccagtgtggcagcagccgcatcatcagaagaggcttcatcatgctgacccggctggtgctgaacagctag

SEQ ID NO: 156961 - DNA, 477 bp, synthetic construct
  misc_feature 1..477: note = Description of Artificial Sequence: Synthetic coding sequence
  source 1..477: mol_type = other DNA
atgaacaagcagaggggcacctacagcgaggtgtccctggcccaggaccccaagaggcagcagaggaagctgaagggcaacaagatcagcatcagcggcaccaagcaggagatcttccaggtggagctgaacctgcagaatgccagcagtgaccaccagggcaatgacaagacctaccactgcaagggcctgctgcccccacctgagaagctgacagctgaggtgctgggcatcatctgcatcgtgctgatggccaccgtgctgaagaccatcgtgctgatcccctgcattggagtgctggagcagaacaacttcagcctgaacagaaggatgcagaaggcccggcactgcggccactgcccagaggagtggatcacctacagcaacagctgctactacatcggcaaggagaggaggacctgggaggagcgggtgtgctggcctgtgctgcggaggaccctcatctgcttcctgtag

SEQ ID NO: 156962 - DNA, 540 bp, synthetic construct
  misc_feature 1..540: note = Description of Artificial Sequence: Synthetic coding sequence
  source 1..540: mol_type = other DNA
atggctgtgttcaagaccaccctgtggaggctcatcagcggcaccctgggcatcatctgcctgagcctgatgagcaccctgggcatcctgctgaagaacagcttcaccaagctgagcattgagcccgccttcaccccaggccccaacatcgagctgcagaaggacagcgactgctgcagctgccaggagaagtgggtgggctaccgctgcaactgctacttcatcagcagcgagcagaagacctggaatgaaagccgccacctgtgtgccagccagaagagcagcctgctgcagctgcagaacacagatgagctggacttcatgagcagcagccagcagttctactggattggcctgagctacagcgaggagcacacagcctggctgtgggagaatggcagcgccctgagccagtacctgttccccagctttgagaccttcaacaccaagaactgcatcgcctacaaccccaatggaaatgccctggatgagagctgtgaggacaagaaccgctacatctgcaagcagcagctgatctag

SEQ ID NO: 156963 - DNA, 447 bp, synthetic construct
  misc_feature 1..447: note = Description of Artificial Sequence: Synthetic coding sequence
  source 1..447: mol_type = other DNA
atggccgccttcaccaagctgagcattgaaccagccttcaccccaggccccaacatcgagctgcagaaggacagcgactgctgcagctgccaggagaagtgggtgggctaccgctgcaactgctacttcatcagcagcgagcagaagacctggaatgaaagccgccacctgtgtgccagccagaagagcagcctgctgcagctgcagaacacagatgagctggacttcatgagcagcagccagcagttctactggattggcctgagctacagcgaggagcacacagcctggctgtgggagaatggaagtgccctgagccagtacctgttccccagctttgagaccttcaacaccaagaactgcatcgcctacaaccccaatggaaatgccctggatgagagctgtgaggacaagaaccgctacatctgcaagcagcagctgatctag

SEQ ID NO: 156964 - DNA, 540 bp, synthetic construct; identical to SEQ ID NO: 156962
  misc_feature 1..540: note = Description of Artificial Sequence: Synthetic coding sequence
  source 1..540: mol_type = other DNA

SEQ ID NO: 156965 - DNA, 543 bp, synthetic construct
  misc_feature 1..543: note = Description of Artificial Sequence: Synthetic coding sequence
  source 1..543: mol_type = other DNA
atggctgtgttcaagaccaccctgtggaggctcatcagcggcaccctgggcatcatctgcctgagcctgatgagcaccctgggcatcctgctgaagaacagcttcaccaagctgagcattgagcccgccttcaccccaggccccaacatcgagctgcagaaggacagcgactgctgcagctgccaggagaagtgggtgggctaccgctgcaactgctacttcatcagcagcgagcagaagacctggaatgaaagccgccacctgtgtgccagccagaagagcagcctgctgcagctgcagaacacagatgagctgcaggacttcatgagcagcagccagcagttctactggattggcctgagctacagcgaggagcacacagcctggctgtgggagaatggaagtgccctgagccagtacctgttccccagctttgagaccttcaacaccaagaactgcatcgcctacaaccccaatggaaatgccctggatgagagctgtgaggacaagaaccgctacatctgcaagcagcagctgatctag

SEQ ID NO: 156966 - DNA, 156 bp, synthetic construct
  misc_feature 1..156: note = Description of Artificial Sequence: Synthetic coding sequence
  source 1..156: mol_type = other DNA
tctgccctgagccagtacctgttccccagctttgagaccttcaacaccaagaactgcatcgcctacaaccccaatggaaatgccctggatgagagctgtgaggacaagaaccgctacatctacaaggtgctgctgtgctgccccggctggagctag

SEQ ID NO: 156967 - DNA, 420 bp, synthetic construct
  misc_feature 1..420: note = Description of Artificial Sequence: Synthetic coding sequence
  source 1..420: mol_type = other DNA
atggccgccttcaccaagctgagcattgaaccagccttcaccccaggccccaacatcgagctgcagaaggacagcgactgctgcagctgccaggagaagtgggtgggctaccgctgcaactgctacttcatcagcagcgagcagaagacctggaatgaaagccgccacctgtgtgccagccagaagagcagcctgctgcagctgcagaacacagatgagctggacttcatgagcagcagccagcagttctactggattggcctgagctacagcgaggagcacacagcctggctgtgggagaatggaagtgccctgagccagtacctgttccccagctttgagaccttcaacaccaagaactgcatcgcctacaaccccaatggaaatgccctggatgagagctgtgaggacaagaactag

SEQ ID NO: 156968 - DNA, 699 bp, synthetic construct
  misc_feature 1..699: note = Description of Artificial Sequence: Synthetic coding sequence
  source 1..699: mol_type = other DNA
atgcaggatgaggagcgctacatgaccctgaatgtgcagagcaagaagaggagcagcgcccagaccagccagctgaccttcaaggactacagcgtgaccctgcactggtacaagatcctgctgggcatcagcggcaccgtgaatggcatcctgaccctgaccctcatcagcctcatcctgctggtgtcccagggcgtgctgctgaagtgccagaagggcagctgcagcaatgccacccagtatgaggacaccggggacctgaaggtgaacaacggcaccaggaggaacatcagcaacaaggacctgtgtgccagccgctctgctgaccagacagtgctgtgccagagcgagtggctgaagtaccagggcaagtgctgctactggttcagcaatgagatgaagtcctggagcgacagctatgtgtactgcctggagaggaagagccacctgctgatcatccatgaccagctggagatggccttcatccagaagaacctgcggcagctgaactacgtgtggattggcctgaacttcaccagcctgaagatgacctggacctgggtggatggcagccccatcgacagcaagatcttcttcatcaagggccctgccaaggagaacagctgtgccgccatcaaggagagcaagatcttcagcgagacctgcagcagcgtcttcaagtggatctgccagtactag

SEQ ID NO: 156969 - DNA, 549 bp, synthetic construct
  misc_feature 1..549: note = Description of Artificial Sequence: Synthetic coding sequence
  source 1..549: mol_type = other DNA
atgcaggatgaggagcgctacatgaccctgaatgtgcagagcaagaagaggagcagcgcccagaccagccagctgaccttcaaggactacagcgtgaccctgcactggtacaagatcctgctgggcatcagcggcaccgtgaatggcatcctgaccctgaccctcatcagcctcatcctgctggtgctgtgccagagcgagtggctgaagtaccagggcaagtgctgctactggttcagcaatgagatgaagtcctggagcgacagctatgtgtactgcctggagaggaagagccacctgctgatcatccatgaccagctggagatggccttcatccagaagaacctgcggcagctgaactacgtgtggattggcctgaacttcaccagcctgaagatgacctggacctgggtggatggcagccccatcgacagcaagatcttcttcatcaagggccctgccaaggagaacagctgtgccgccatcaaggagagcaagatcttcagcgagacctgcagcagcgtcttcaagtggatctgccagtactag

SEQ ID NO: 156970 - DNA, 195 bp, synthetic construct
  misc_feature 1..195: note = Description of Artificial Sequence: Synthetic coding sequence
  source 1..195: mol_type = other DNA
atgcaggatgaggagcgctacatgaccctgaatgtgcagagcaagaagaggagcagcgcccagaccagccagctgaccttcaaggactacagcgtgaccctgcactggtacaagatcctgctgggcatcagcggcaccgtgaatggcatcctgaccctgaccctcatcagcctcatcctgctggacagcagctag

SEQ ID NO: 156971 - DNA, 588 bp, synthetic construct
  misc_feature 1..588: note = Description of Artificial Sequence: Synthetic coding sequence
  source 1..588: mol_type = other DNA
atgacagacagcgtcatctacagcatgctggagctgcccacagccacccaggcccagaatgactatggcccccagcagaagagcagcagcagccggcccagctgcagctgcctggtggccatcgccctgggcctgctgacagctgtgctgctgtctgtgctgctgtaccagtggatcctgtgccagggcagcaactacagcacctgtgccagctgccccagctgcccagaccgctggatgaagtatggcaaccactgctactacttctctgtggaggagaaggactggaacagcagcctggagttctgcctggcccgggacagccacctgctggtgatcacagacaaccaggagatgagcctgctgcaggtgttcctgtctgaggccttctgctggattggcctgaggaacaacagcggctggcgctgggaggatggcagccccctgaacttcagccgcatcagcagcaacagctttgtgcagacctgtggggccatcaacaagaatggcctgcaggccagcagctgtgaggtgcccctgcactgggtgtgcaagaagtgcccctttgctgaccaggccctcttctag

SEQ ID NO: 156972 - DNA, 570 bp, synthetic construct
  misc_feature 1..570: note = Description of Artificial Sequence: Synthetic coding sequence
  source 1..570: mol_type = other DNA
atgacagacagcgtcatctacagcatgctggagctgcccacagccacccaggcccagaatgactatggcccccagcagaagagcagcagcagccggcccagctgcagctgcctggtggccatcgccctgggcctgctgacagctgtgctgctgtctgtgctgctgtaccagtggatcctgtgccagggcagcaactacagcacctgtgccagctgccccagctgcccagaccgctggatgaagtatggcaaccactgctactacttctctgtggaggagaaggactggaacagcagcctggagttctgcctggcccgggacagccacctgctggtgatcacagacaaccaggagatgagcctgctgcaggtgttcctgtctgaggccttctgctggattggcctgaggaacaacagcggctggcgctgggaggatggcagccccctgaacttcagccgcatcagcagcaacagctttgtgcagacctgtggggccatcaacaagaatggcctgcaggccagcagctgtgaggtgcccctgcactgggtgtgcaagaaggtgcggctgtag

SEQ ID NO: 156973 - DNA, 651 bp, synthetic construct
  misc_feature 1..651: note = Description of Artificial Sequence: Synthetic coding sequence
  source 1..651: mol_type = other DNA
atgggctggatccggggcagaagaagccgccacagctgggagatgtctgagttccacaactacaacctggacctgaagaagagtgacttcagcacccgctggcagaagcagcgctgccctgtggtgaagagcaaatgtcgggagaatgccagccccttcttcttctgctgcttcatcgctgtggccatgggcatccgcttcatcatcatggtgaccatctggagcgctgtgttcctgaacagcctcttcaaccaggaggtgcagatccccctgacagagagctactgcggcccctgccccaagaactggatctgctacaagaacaactgctaccagttctttgatgagagcaagaactggtatgagagccaggccagctgcatgagccagaatgccagcctgctgaaggtgtacagcaaagaagaccaggacctgctgaagctggtgaagagctaccactggatgggcctggtgcacatccccaccaacggctcctggcagtgggaggatggcagcatcctgagccccaacctgctgaccatcatcgagatgcagaagggggactgtgccctgtatgccagcagcttcaagggctacatcgagaactgcagcacccccaacacctacatctgcatgcagaggacagtgtag

SEQ ID NO: 156974 - DNA, 243 bp, synthetic construct
  misc_feature 1..243: note = Description of Artificial Sequence: Synthetic coding sequence
  source 1..243: mol_type = other DNA
atgggctggatccggggcagaagaagccgccacagctgggagatgtctgagttccacaactacaacctggacctgaagaagagtgacttcagcacccgctggcagaagcagcgctgccctgtggtgaagagcaaatgtcgggagaatgccagccccttcttcttctgctgcttcatcgctgtggccatgggcatccgcttcatcatcatggtgaccatctggagcgctgtgttcctgaactag

SEQ ID NO: 156975 - DNA, 651 bp, synthetic construct; identical to SEQ ID NO: 156973
  misc_feature 1..651: note = Description of Artificial Sequence: Synthetic coding sequence
  source 1..651: mol_type = other DNA

SEQ ID NO: 156976 - DNA, 537 bp, synthetic construct
  misc_feature 1..537: note = Description of Artificial Sequence: Synthetic coding sequence
  source 1..537: mol_type = other DNA
atggaccggcccggccctggcagcgcccggcccggccgcacagtgcacgtgtggggctacagagtggagtggaaggtgagaaatggaaggaagctgcagcccagcgagtgggccggccgcggggacctgggcggcttcaagaggcgctggaaggacacccgggccaccgtgggcaccaccttcagaagaagaagccgggtgtccctggtgggggagctgagcaagttccccctgcccagcgacagcagcggcggcaagagcagcagcagctttgcccggggggccctggcctggtgccggcagaggaaccccaaccccagctgtgccgctgctgagactggagcccggaccagcctgcccaaggagcgctgccggggctggaggctgggcaactggctgcacaagcacccccaccccaacacctgcccccggctgcctgcctgctggctgccccccatcctgacagagcggggggagcgggtgcccaagctggtgcccctgctggcctgctaccccaagagcaagcccaaggactag

SEQ ID NO: 156977 - DNA, 1902 bp, synthetic construct
  misc_feature 1..1902: note = Description of Artificial Sequence: Synthetic coding sequence
  source 1..1902: mol_type = other DNA
atgctgaggatgagggtgcctgccctgctggtgctgctcttctgcttccggggccgggccggccccagcccccacttcctgcagcagcctgaggacctggtggtgctgctgggggaggaggcccggctgccctgtgccctgggcgcctactggggcctggtgcagtggaccaagagcggcctggccctgggcggccagagggacctgcccggctggagccgctactggatctctggaaatgctgccaacggccagcacgacctgcacatccggcctgtggagctggaggatgaggccagctatgagtgccaggccacccaggccggcctgcggagcaggcctgcccagctgcacgtgctggtgcccccagaggccccccaggtgctgggcggccccagcgtgtccctggtggccggcgtgcctgccaacctgacctgccgcagcagaggagatgcccggcccaccccagagctgctgtggttcagagatggagtgctgctggatggagccaccttccaccagaccctgctgaaggagggcaccccaggctctgtggagagcaccctgaccctgacccccttcagccatgatgatggagccacctttgtgtgccgggcccggagccaggccctgcccaccggccgggacacagccatcaccctgagcctgcagtacccacctgaggtgaccctgagcgccagcccccacacagtgcaggagggggagaaggtgatcttcctgtgccaggccacagcccagccccctgtgacaggctaccgctgggccaagggcggcagccctgtgctgggcgcccggggcccccggctggaggtggtggctgatgccagcttcctgacagagcctgtgtcctgtgaggtgtccaatgctgtgggcagcgccaacagaagcacagccctggatgtgctgtttggccccatcctgcaggccaagccagagcctgtgtctgtggatgtgggagaagatgccagcttcagctgtgcctggaggggcaaccccctgccccgggtgacctggaccaggagaggaggagcccaggtgctgggcagcggggccaccctgcggctgcccagcgtgggcccagaagatgctggggactatgtgtgcagagctgaggccggcctgagcggcctgcggggcggcgctgctgaggcccggctgactgtgaatgcccctcctgtggtgacagccctgcacagcgccccagccttcctgcggggccctgcccggctgcagtgcctggtgtttgccagccctgccccagatgctgtggtgtggagctgggatgagggcttcctggaggccggcagccagggccgcttcctggtggagaccttccctgcccctgagagcagaggaggcctgggccctggcctcatctctgtgctgcacatcagcggcacccaggagagtgacttcagccgctccttcaactgcagcgccaggaaccggctgggggagggcggggcccaggccagcctgggccggcgggacctgctgcccaccgtgagaattgtggccggcgtggccgccgccaccaccaccctgctgatggtgatcactggagtggccctgtgctgctggaggcacagcaaggccagcgccagcttcagcgagcagaagaacctgatgagaattcctggcagcagtgatggcagcagcagccggggccctgaggaggaggagaccggcagcagagaagatcggggccccatcgtgcacacagaccacagcgacctggtgctggaggagaagggcaccctggagaccaaggaccccaccaacggctactacaaggtgcggggcgtgtccccaccagccagcccagacagccgggtgaccagcttccagtggaagagccctggcatcagcaacctgccctag

SEQ ID NO: 156978 - DNA, 660 bp, synthetic construct
  misc_feature 1..660: note = Description of Artificial Sequence: Synthetic coding sequence
  source 1..660: mol_type = other DNA
atgctgaggatgagggtgcctgccctgctggtgctgctcttctgcttccggggccgggccggccccagcccccacttcctgcagcagcctgaggacctggtggtgctgctgggggagggcggggcccaggccagcctgggccggcgggccagcgccagcttcagcgagcagaagaacctgatgagaattcctggcagcagtgatggcagcagcagccggggccctgaggaggaggagaccggcagccgggaggaccggggccccatcgtgcacacagaccacagcgacctggtgctggaggagaagggcaccctggagaccaaggaccccaccaacggctactacaaggtgcggggcgtgtctgtgtccctgagcctgggggaggcccctgggggcggcctcttcctgcccccacccagccccctgggccccccaggcacccccaccttctatgacttcaacccccacctgggcatggtgcccccctgccgcctgtaccgggcccgggccggctacctgaccaccccccacccccgggccttcaccagctacatcaagcccaccagctttggccccccagacctggcccctggcaccccacccttcccctatgctgccttccccacccccagccacccccggctgcagacccacgtgtag

SEQ ID NO: 156979 - DNA, 2067 bp, synthetic construct
  misc_feature 1..2067: note = Description of Artificial Sequence: Synthetic coding sequence
  source 1..2067: mol_type = other DNA
atgctgaggatgagggtgcctgccctgctggtgctgctcttctgcttccggggccgggccggccccagcccccacttcctgcagcagcctgaggacctggtggtgctgctgggggaggaggcccggctgccctgtgccctgggcgcctactggggcctggtgcagtggaccaagagcggcctggccctgggcggccagagggacctgcccggctggagccgctactggatctctggaaatgctgccaacggccagcacgacctgcacatccggcctgtggagctggaggatgaggccagctatgagtgccaggccacccaggccggcctgcggagcaggcctgcccagctgcacgtgctggtgcccccagaggccccccaggtgctgggcggccccagcgtgtccctggtggccggcgtgcctgccaacctgacctgccgcagcagaggagatgcccggcccaccccagagctgctgtggttcagagatggagtgctgctggatggagccaccttccaccagaccctgctgaaggagggcaccccaggctctgtggagagcaccctgaccctgcccaccggccgggacacagccatcaccctgagcctgcagtacccacctgaggtgaccctgagcgccagcccccacacagtgcaggagggggagaaggtgatcttcctgtgccaggccacagcccagccccctgtgacaggctaccgctgggccaagggcggcagccctgtgctgggcgcccggggcccccggctggaggtggtggctgatgccagcttcctgacagagcctgtgtcctgtgaggtgtccaatgctgtgggcagcgccaacagaagcacagccctggatgtgctgtttggccccatcctgcaggccaagccagagcctgtgtctgtggatgtgggagaagatgccagcttcagctgtgcctggaggggcaaccccctgccccgggtgacctggaccaggagaggaggagcccaggtgctgggcagcggggccaccctgcggctgcccagcgtgggcccagaagatgctggggactatgtgtgcagagctgaggccggcctgagcggcctgcggggcggcgctgctgaggcccggctgactgtgaatgcccctcctgtggtgacagccctgcacagcgccccagccttcctgcggggccctgcccggctgcagtgcctggtgtttgccagccctgccccagatgctgtggtgtggagctgggatgagggcttcctggaggccggcagccagggccgcttcctggtggagaccttccctgcccctgagagcagaggaggcctgggccctggcctcatctctgtgctgcacatcagcggcacccaggagagtgacttcagccgctccttcaactgcagcgccaggaaccggctgggggagggcggggcccaggccagcctgggccggcgggacctgctgcccaccgtgagaattgtggccggcgtggccgccgccaccaccaccctgctgatggtgatcactggagtggccctgtgctgctggaggcacagcaaggccagcgccagcttcagcgagcagaagaacctgatgagaattcctggcagcagtgatggcagcagcagccggggccctgaggaggaggagaccggcagcagagaagatcggggccccatcgtgcacacagaccacagcgacctggtgctggaggagaagggcaccctggagaccaaggaccccaccaacggctactacaaggtgcggggcgtgtctgtgtccctgagcctgggggaggcccctgggggcggcctcttcctgcccccacccagccccctgggccccccaggcacccccaccttctatgacttcaacccccacctgggcatggtgcccccctgccgcctgtaccgggcccgggccggctacctgaccaccccccacccccgggccttcaccagctacatcaagcccaccagctttggacctccagacctggcccctggcaccccacccttcccctatgctgccttccccacccccagccacccccggctgcagacccacgtgtag

SEQ ID NO: 156980 - DNA, 1752 bp, synthetic construct
  misc_feature 1..1752: note = Description of Artificial Sequence: Synthetic coding sequence
  source 1..1752: mol_type = other DNA
atgctgaggatgagggtgcctgccctgctggtgctgctcttctgcttccggggccgggccggctggagccgctactggatctctggaaatgctgccaacggccagcacgacctgcacatccggcctgtggagctggaggatgaggccagctatgagtgccaggccacccaggccggcctgcggagcaggcctgcccagctgcacgtgctggtgcccccagaggccccccaggtgctgggcggccccagcgtgtccctggtggccggcgtgcctgccaacctgacctgccgcagcagaggagatgcccggcccaccccagagctgctgtggttcagagatggagtgctgctggatggagccaccttccaccagaccctgctgaaggagggcaccccaggctctgtggagagcaccctgaccctgacccccttcagccatgatgatggagccacctttgtgtgccgggcccggagccaggccctgcccaccggccgggacacagccatcaccctgagcctgcagtacccacctgaggtgaccctgagcgccagcccccacacagtgcaggagggggagaaggtgatcttcctgtgccaggccacagcccagccccctgtgacaggctaccgctgggccaagggcggcagccctgtgctgggcgcccggggcccccggctggaggtggtggctgatgccagcttcctgacagagcctgtgtcctgtgaggtgtccaatgctgtgggcagcgccaacagaagcacagccctggatgtgctgtttggccccatcctgcaggccaagccagagcctgtgtctgtggatgtgggagaagatgccagcttcagctgtgcctggaggggcaaccccctgccccgggtgacctggaccaggagaggaggagcccaggtgctgggcagcggggccaccctgcggctgcccagcgtgggcccagaagatgctggggactatgtgtgcagagctgaggccggcctgagcggcctgcggggcggcgctgctgaggcccggctgactgtgaatgcccctcctgtggtgacagccctgcacagcgccccagccttcctgcggggccctgcccggctgcagtgcctggtgtttgccagccctgccccagatgctgtggtgtggagctgggatgagggcttcctggaggccggcagccagggccgcttcctggtggagaccttccctgcccctgagagcagaggaggcctgggccctggcctcatctctgtgctgcacatcagcggcacccaggagagtgacttcagccgctccttcaactgcagcgccaggaaccggctgggggagggcggggcccaggccagcctgggccggcgggacctgctgcccaccgtgagaattgtggccggcgtggccgccgccaccaccaccctgctgatggtgatcactggagtggccctgtgctgctggaggcacagcaaggccagcgccagcttcagcgagcagaagaacctgatgagaattcctggcagcagtgatggcagcagcagccggggccctgaggaggaggagaccggcagcagagaagatcggggccccatcgtgcacacagaccacagcgacctggtgctggaggagaagggcaccctggagaccaaggaccccaccaacggctactacaaggtgcggggcgtgtccccaccagccagcccagacagccgggtgaccagcttccagtggaagagccctggcatcagcaacctgccctag

SEQ ID NO: 156981 - DNA, 2127 bp, synthetic construct
  misc_feature 1..2127: note = Description of Artificial Sequence: Synthetic coding sequence
  source 1..2127: mol_type = other DNA
atgctgaggatgagggtgcctgccctgctggtgctgctcttctgcttccggggccgggccggccccagcccccacttcctgcagcagcctgaggacctggtggtgctgctgggggaggaggcccggctgccctgtgccctgggcgcctactggggcctggtgcagtggaccaagagcggcctggccctgggcggccagagggacctgcccggctggagccgctactggatctctggaaatgctgccaacggccagcacgacctgcacatccggcctgtggagctggaggatgaggccagctatgagtgccaggccacccaggccggcctgcggagcaggcctgcccagctgcacgtgctggtgcccccagaggccccccaggtgctgggcggccccagcgtgtccctggtggccggcgtgcctgccaacctgacctgccgcagcagaggagatgcccggcccaccccagagctgctgtggttcagagatggagtgctgctggatggagccaccttccaccagaccctgctgaaggagggcaccccaggctctgtggagagcaccctgaccctgacccccttcagccatgatgatggagccacctttgtgtgccgggcccggagccaggccctgcccaccggccgggacacagccatcaccctgagcctgcagtacccacctgaggtgaccctgagcgccagcccccacacagtgcaggagggggagaaggtgatcttcctgtgccaggccacagcccagccccctgtgacaggctaccgctgggccaagggcggcagccctgtgctgggcgcccggggcccccggctggaggtggtggctgatgccagcttcctgacagagcctgtgtcctgtgaggtgtccaatgctgtgggcagcgccaacagaagcacagccctggatgtgctgtttggccccatcctgcaggccaagccagagcctgtgtctgtggatgtgggagaagatgccagcttcagctgtgcctggaggggcaaccccctgccccgggtgacctggaccaggagaggaggagcccaggtgctgggcagcggggccaccctgcggctgcccagcgtgggcccagaagatgctggggactatgtgtgcagagctgaggccggcctgagcggcctgcggggcggcgctgctgaggcccggctgactgtgaatgcccctcctgtggtgacagccctgcacagcgccccagccttcctgcggggccctgcccggctgcagtgcctggtgtttgccagccctgccccagatgctgtggtgtggagctgggatgagggcttcctggaggccggcagccagggccgcttcctggtggagaccttccctgcccctgagagcagaggaggcctgggccctggcctcatctctgtgctgcacatcagcggcacccaggagagtgacttcagccgctccttcaactgcagcgccaggaaccggctgggggagggcggggcccaggccagcctgggccggcgggacctgctgcccaccgtgagaattgtggccggcgtggccgccgccaccaccaccctgctgatggtgatcactggagtggccctgtgctgctggaggcacagcaaggccagcgccagcttcagcgagcagaagaacctgatgagaattcctggcagcagtgatggcagcagcagccggggccctgaggaggaggagaccggcagcagagaagatcggggccccatcgtgcacacagaccacagcgacctggtgctggaggagaagggcaccctggagaccaaggaccccaccaacggctactacaaggtgcggggcgtgtctgtgtccctgagcctgggggaggcccctgggggcggcctcttcctgcccccacccagccccctgggccccccaggcacccccaccttctatgacttcaacccccacctgggcatggtgcccccctgccgcctgtaccgggcccgggccggctacctgaccaccccccacccccgggccttcaccagctacatcaagcccaccagctttggacctccagacctggcccctggcaccccacccttcccctatgctgccttccccacccccagccacccccggctgcagacccacgtgtag

SEQ ID NO: 156982 - DNA, 738 bp, synthetic construct
  misc_feature 1..738: note = Description of Artificial Sequence: Synthetic coding sequence
  source 1..738: mol_type = other DNA
atggccgtcatcattggagtggccgtgggcgccggcgtggccttcctggtgctgatggccaccatcgtggccttctgctgtgcccggagccagaggaacctgaagggcgtggtgtctgccaagaatgacatccgggtggagatcgtgcacaaggagcccgccagcggccgggagggggaggagcacagcaccatcaagcagctgatgatggacagaggagagttccagcaggacagcgtgctgaagcagctggaggtgctgaaggaggaggagaaggagttccagaacctgaaggaccccaccaacggctactacagcgtgaacaccttcaaggagcaccacagcacccccaccatcagcctgagcagctgccagcctgacctgcggcctgctgggaagcagagggtgcccaccggcatgtccttcaccaacatctacagcaccctgagcggccagggccgcctgtatgactatggccagagatttgtgctgggcatgggcagcagcagcattgagctgtgtgagcgggagttccagaggggcagcctgagtgacagcagcagcttcctggacacccagtgtgacagctctgtgagcagcagcggcaagcaggacggctacgtgcagtttgacaaggccagcaaggccagcgccagcagcagccaccacagccagagcagcagccagaacagcgaccccagccggcccctgcagaggaggatgcagacccacgtgtag

SEQ ID NO: 156983 - DNA, 2337 bp, synthetic construct
  misc_feature 1..2337: note = Description of Artificial Sequence: Synthetic coding sequence
  source 1..2337: mol_type = other DNA
atgaagcccttccagctggacctgctgtttgtgtgcttcttcctgttcagccaggagctgggcctgcagaagaggggctgctgcctggtgctgggctacatggccaaggacaagttccggaggatgaatgaaggccaggtgtacagcttcagccagcagccccaggaccaggtggtggtgtctggccagcctgtgaccctgctgtgtgccatcccagaatatgatggctttgtgctgtggatcaaggatggcctggccctgggcgtgggccgggacctgagcagctacccccagtacctggtggtgggcaaccacctgtctggagagcaccacctgaagatcctgcgggcagagctgcaggatgatgctgtgtatgagtgccaggccatccaggccgccatccgcagcaggcctgcccggctgactgtgctggtgcccccagatgaccccgtcatcctgggcggccctgtgatcagcctgcgggccggggaccccctgaacctgacctgccacgccgacaatgccaagccagctgccagcatcatctggctgaggaagggggaggtgatcaatggagccacctacagcaagaccctgctgagagatggcaagcgggagagcatcgtgtccaccctcttcatcagccctggagatgtggagaatggccagagcatcgtgtgccgggccaccaacaaggccatccctgggggcaaggagacctctgtgaccatcgacatccagcacccccccctggtgaacctgtctgtggagccccagcctgtgctggaggacaacgtggtgaccttccactgcagcgccaaggccaacccagctgtgacccagtaccgctgggccaagaggggccagatcatcaaggaggccagcggggaggtgtaccgcaccaccgtggactacacctacttcagcgagcctgtgtcctgtgaggtgaccaatgccctgggcagcaccaacctgagcaggacagtggatgtgtacttcggccccaggatgaccacagagccccagagcctgctggtggacctgggcagtgatgccatcttcagctgtgcctggacaggcaaccccagcctgaccatcgtgtggatgaagaggggcagcggcgtggtgctgagcaatgagaagaccctgaccctgaagtctgtgcggcaggaggatgctgggaagtatgtgtgcagagctgtggtgccccgggtgggcgctggggagcgggaggtgaccctgactgtgaatggaccacccatcatcagcagcacccagacccagcacgccctgcacggggagaagggccagatcaagtgcttcatccgcagcaccccacctccagacagaattgcctggagctggaaggaaaatgtgctggagagcggcaccagcggccgctacacagtggagaccatcagcacagaggagggcgtcatcagcaccctgaccatcagcaacatcgtgcgggctgacttccagaccatctacaactgcacagcctggaacagctttggaagtgacacagagatcatccggctgaaggagcagggcagcgagatgaagtctggagctggcctggaggccgagagcgtgcccatggctgtgatcatcggcgtggccgtgggcgctggggtggccttcctggtgctgatggccaccatcgtggccttctgctgtgcccggagccagaggaacctgaagggcgtggtgtctgccaagaatgacatccgggtggagatcgtgcacaaggagcccgccagcggccgggagggggaggagcacagcaccatcaagcagctgatgatggacagaggagagttccagcaggacagcgtgctgaagcagctggaggtgctgaaggaggaggagaaggagttccagaacctgaaggaccccaccaacggctactacagcgtgaacaccttcaaggagcaccacagcacccccaccatcagcctgagcagctgccagcctgacctgcggcctgctgggaagcagagggtgcccaccggcatgtccttcaccaacatctacagcaccctgagcggccagggccgcctgtatgactatggccagagatttgtgctgggcatgggcagcagcagcattgagctgtgtgagcgggagttccagaggggcagcctgagtgacagcagcagcttcctggacacccagtgtgacagctctgtgagcagcagcggcaagcaggacggctacgtgcagtttgacaaggccagcaaggccagcgccagcagcagccaccacagccagagcagcagccagaacagcgaccccagccggcccctgcagaggaggatgcagacccacgtgtag

SEQ ID NO: 156984 - DNA, 1803 bp, synthetic construct
  misc_feature 1..1803: note = Description of Artificial Sequence: Synthetic coding sequence
  source 1..1803: mol_type = other DNA
atgaagcccttccagctggacctgctgtttgtgtgcttcttcctgttcagccaggagctgggcctgcagaagaggggctgctgcctggtgctgggctacatggccaaggacaagttccggaggatgaatgaaggccaggtgtacagcttcagccagcagccccaggaccaggtggtggtgtctggccagcctgtgaccctgctgtgtgccatcccagaatatgatggctttgtgctgtggatcaaggatggcctggccctgggcgtgggccgggacctgagcagctacccccagtacctggtggtgggcaaccacctgtctggagagcaccacctgaagatcctgcgggcagagctgcaggatgatgctgtgtatgagtgccaggccatccaggccgccatccgcagcaggcctgcccggctgactgtgctggtgcccccagatgaccccgtcatcctgggcggccctgtgatcagcctgcgggccggggaccccctgaacctgacctgccacgccgacaatgccaagccagctgccagcatcatctggctgaggaagggggaggtgatcaatggagccacctacagcaagaccctgctgagagatggcaagcgggagagcatcgtgtccaccctcttcatcagccctggagatgtggagaatggccagagcatcgtgtgccgggccaccaacaaggccatccctgggggcaaggagacctctgtgaccatcgacatccagcacccccccctggtgaacctgtctgtggagccccagcctgtgctggaggacaacgtggtgaccttccactgcagcgccaaggccaacccagctgtgacccagtaccgctgggccaagaggggccagatcatcaaggaggccagcggggaggtgtaccgcaccaccgtggactacacctacttcagcgagcctgtgtcctgtgaggtgaccaatgccctgggcagcaccaacctgagcaggacagtggatgtgtacttcggccccaggatgaccacagagccccagagcctgctggtggacctgggcagtgatgccatcttcagctgtgcctggacaggcaaccccagcctgaccatcgtgtggatgaagaggggcagcggcgtggtgctgagcaatgagaagaccctgaccctgaagtctgtgcggcaggaggatgctgggaagtatgtgtgcagagctgtggtgccccgggtgggcgctggggagcgggaggtgaccctgactgtgaatggaccacccatcatcagcagcacccagacccagcacgccctgcacggggagaagggccagatcaagtgcttcatccgcagcaccccacctccagacagaattgcctggagctggaaggaaaatgtgctggagagcggcaccagcggccgctacacagtggagaccatcagcacagaggagggcgtcatcagcaccctgaccatcagcaacatcgtgcgggctgacttccagaccatctacaactgcacagcctggaacagctttggaagtgacacagagatcatccggctgaaggagcagggcagcgagatgaagtctggagctggcctggaggccgagagcgtgcccatggctgtgatcatcggcgtggccgtgggcgctggggtggccttcctggtgctgatggccaccatcgtggccttctgctgtgcccggagccagaggagcactggaggccgcagcggcatcagcggccggggcacagagaagaaggcccggctgcggctgccccggcgggccagcaagcaggagtgcaatgagcagggcagctag

SEQ ID NO: 156985 - DNA, 2301 bp, synthetic construct
  misc_feature 1..2301: note = Description of Artificial Sequence: Synthetic coding sequence
  source 1..2301: mol_type = other DNA
atgaagcccttccagctggacctgctgtttgtgtgcttcttcctgttcagccaggagctgggcctgcagaagaggggctgctgcctggtgctgggctacatggccaaggacaagttccggaggatgaatgaaggccaggtgtacagcttcagccagcagccccaggaccaggtggtggtgtctggccagcctgtgaccctgctgtgtgccatcccagaatatgatggctttgtgctgtggatcaaggatggcctggccctgggcgtgggccgggacctgagcagctacccccagtacctggtggtgggcaaccacctgtctggagagcaccacctgaagatcctgcgggcagagctgcaggatgatgctgtgtatgagtgccaggccatccaggccgccatccgcagcaggcctgcccggctgactgtgctggtgcccccagatgaccccgtcatcctgggcggccctgtgatcagcctgcgggccggggaccccctgaacctgacctgccacgccgacaatgccaagccagctgccagcatcatctggctgaggaagggggaggtgatcaatggagccacctacagcaagaccctgctgagagatggcaagcgggagagcatcgtgtccaccctcttcatcagccctggagatgtggagaatggccagagcatcgtgtgccgggccaccaacaaggccatccctgggggcaaggagacctctgtgaccatcgacatccagcacccccccctggtgaacctgtctgtggagccccagcctgtgctggaggacaacgtggtgaccttccactgcagcgccaaggccaacccagctgtgacccagtaccgctgggccaagaggggccagatcatcaaggaggccagcggggaggtgtaccgcaccaccgtggactacacctacttcagcgagcctgtgtcctgtgaggtgaccaatgccctgggcagcaccaacctgagcaggacagtggatgtgtacttcggccccaggatgaccacagagccccagagcctgctggtggacctgggcagtgatgccatcttcagctgtgcctggacaggcaaccccagcctgaccatcgtgtggatgaagaggggcagcggcgtggtgctgagcaatgagaagaccctgaccctgaagtctgtgcggcaggaggatgctgggaagtatgtgtgcagagctgtggtgccccgggtgggcgctggggagcgggaggtgaccctgactgtgaatggaccacccatcatcagcagcacccagacccagcacgccctgcacggggagaagggccagatcaagtgcttcatccgcagcaccccacctccagacagaattgcctggagctggaaggaaaatgtgctggagagcggcaccagcggccgctacacagtggagaccatcagcacagaggagggcgtcatcagcaccctgaccatcagcaacatcgtgcgggctgacttccagaccatctacaactgcacagcctggaacagctttggaagtgacacagagatcatccggctgaaggagcaggagagcgtgcccatggctgtgatcatcggcgtggccgtgggcgctggggtggccttcctggtgctgatggccaccatcgtggccttctgctgtgcccggagccagaggaacctgaagggcgtggtgtctgccaagaatgacatccgggtggagatcgtgcacaaggagcccgccagcggccgggagggggaggagcacagcaccatcaagcagctgatgatggacagaggagagttccagcaggacagcgtgctgaagcagctggaggtgctgaaggaggaggagaaggagttccagaacctgaaggaccccaccaacggctactacagcgtgaacaccttcaaggagcaccacagcacccccaccatcagcctgagcagctgccagcctgacctgcggcctgctgggaagcagagggtgcccaccggcatgtccttcaccaacatctacagcaccctgagcggccagggccgcctgtatgactatggccagagatttgtgctgggcatgggcagcagcagcattgagctgtgtgagcgggagttccagaggggcagcctgagtgacagcagcagcttcctggacacccagtgtgacagctctgtgagcagcagcggcaagcaggacggctacgtgcagtttgacaaggccagcaaggccagcgccagcagcagccaccacagccagagcagcagccagaacagcgaccccagccggcccctgcagaggaggatgcagacccacgtgtag

SEQ ID NO: 156986 - DNA, 1182 bp, synthetic construct
  misc_feature 1..1182: note = Description of Artificial Sequence: Synthetic coding sequence
  source 1..1182: mol_type = other DNA
atgggcaagagtgacttcctgacccccaaggccatcgccaaccgcatcaagagcaagggcctgcagaagctgcgctggtactgccagatgtgccagaagcagtgcagagatgaaaatggcttcaagtgccactgcatgtctgagagccaccagaggcagctgctgctggccagcgagaacccccagcagttcatggactacttcagcgaggagttcagaaatgacttcctggagctgctgcggcggcgcttcggcaccaagagggtgcacaacaacatcgtgtacaatgagtacatcagccaccgggagcacatccacatgaatgccacccagtgggagaccctgacagacttcaccaagtggctgggccgggagggcctgtgcaaggtggatgagacccccaagggctggtacatccagtacatcgaccgggaccctgagaccatccggcggcagctggagctggagaagaagaagaagcaggacctggatgatgaggagaagacagccaagttcatcgaggagcaggtgcggcggggcctggagggcaaggagcaggaggtgcccaccttcacagagctgagcagagaaaatgatgaggagaaggtgaccttcaacctgagcaaaggagcctgcagcagcagcggggccaccagcagcaagagcagcaccctgggccccagcgccctgaagaccatcggcagcagcgcctctgtgaagaggaaggagagcagccagagcagcacccagagcaaggagaagaagaagaagaagagcgccctggatgagatcatggagattgaggaggagaagaagaggacagccaggacagactactggctgcagcctgagatcatcgtgaagatcatcaccaagaagctgggggagaagtaccacaagaagaaggccatcgtgaaggaggtgattgacaagtacacagctgtggtgaagatgattgattctggggacaagctgaagctggaccagacccacctggagaccgtcatcccagcccctgggaagaggatcctggtgctgaatggaggctacagaggaaatgaaggcaccctggagagcatcaatgagaagaccttcagcgccaccatcgtgattgaaacaggccccctgaagggcagaagagtggagggcatccagtatgaggacatcagcaagctggcctag

SEQ ID NO: 156987 - DNA, 1125 bp, synthetic construct
  misc_feature 1..1125: note = Description of Artificial Sequence: Synthetic coding sequence
  source 1..1125: mol_type = other DNA
atgggcaagagtgacttcctgacccccaaggccatcgccaaccgcatcaagagcaagggcctgcagaagctgcgctggtactgccagatgtgccagaagcagtgcagagatgaaaatggcttcaagtgccactgcatgtctgagagccaccagaggcagctgctgctggccagcgagaacccccagcagttcatggactacttcagcgaggagttcagaaatgacttcctggagctgctgcggcggcgcttcggcaccaagagggtgcacaacaacatcgtgtacaatgagtacatcagccaccgggagcacatccacatgaatgccacccagtgggagaccctgacagacttcaccaagtggctgggccgggagggcctgtgcaaggtggatgagacccccaagggctggtacatccagtacatcgaccgggaccctgagaccatccggcggcagctggagctggagaagaagaagaagcaggacctggatgatgaggagaagacagccaagttcatcgaggagcaggtgcggcggggcctggagggcaaggagcaggaggtgcccaccttcacagagctgagcagagaaaatgatgaggagaaggtgaccttcaacctgagcaaaggagcctgcagcagcagcggggccaccagcagcaagagcagcaccctgggccccagcgccctgaagaccatcggcagcagcgcctctgtgaagaggaaggagagcagccagagcagcacccagagcaaggagaagaagaagaagaagagcgccctggatgagatcatggagattgaggaggagaagaagaggacagccaggacagactactggctgcagcctgagatcatcgtgaagatcatcaccaagaagctgggggagaagtaccacaagaagaaggccatcgtgaaggaggtgattgacaagtacacagctgtggtgaagatgattgattctggggacaagctgaagctggaccagacccacctggagaccgtcatcccagcccctgggaagaggatcctggtgctgaatggaggctacagaggaaatgaaggcaccctggagagcatcaatgagaagaccttcagcgccaccatcgtgattgaaacagtgtag

SEQ ID NO: 156988 - DNA, 867 bp, synthetic construct
  misc_feature 1..867: note = Description of Artificial Sequence: Synthetic coding sequence
  source 1..867: mol_type = other DNA
atgaatgccacccagtgggagaccctgacagacttcaccaagtggctgggccgggagggcctgtgcaaggtggatgagacccccaagggctggtacatccagtacatcgaccgggaccctgagaccatccggcggcagctggagctggagaagaagaagaagcaggacctggatgatgaggagaagacagccaagttcatcgaggagcaggtgcggcggggcctggagggcaaggagcaggaggtgcccaccttcacagagctgagcagagaaaatgatgaggagaaggtgaccttcaacctgagcaaaggagcctgcagcagcagcggggccaccagcagcaagagcagcaccctgggccccagcgccctgaagaccatcggcagcagcgcctctgtgaagaggaaggagagcagccagagcagcacccagagcaaggagaagaagaagaagaagagcgccctggatgagatcatggagattgaggaggagaagaagaggacagccaggacagactactggctgcagcctgagatcatcgtgaagatcatcaccaagaagctgggggagaagtaccacaagaagaaggccatcgtgaaggaggtgattgacaagtacacagctgtggtgaagatgattgattctggggacaagctgaagctggaccagacccacctggagaccgtcatcccagcccctgggaagaggatcctggtgctgaatggaggctacagaggaaatgaaggcaccctggagagcatcaatgagaagaccttcagcgccaccatcgtgattgaaacagtgtccctcttcacccagaggcagaagttccagaatgccctgaagatgtgccacagcttcttctag

SEQ ID NO: 156989 - DNA, 2361 bp, synthetic construct
  misc_feature 1..2361: note = Description of Artificial Sequence: Synthetic coding sequence
  source 1..2361: mol_type = other DNA
atgaatgaggccaaggtgaaggagaccctgcggcgctgtggggccagcggagatgaatgtggccgcctgcagtatgccctgacctgcctgaggaaggtgacaggcctgggcggggagcacaaggaggacagctcctggagcagcctggatgcccggcgggagagcggcagcggccccagcacagacaccctgtctgctgccagcctgccctggcccccaggcagcagccagctgggccgggccggcaacagcgcccagggccccaggagcatctctgtgtctgccctgcctgccagtgacagccccacccccagcttcagcgagggcctgagtgacacctgcatccccctgcacgccagcggccgcctgaccccccgggccctgcacagcttcatcaccccacccaccaccccccagctgcggcggcacaccaagctgaagccacccaggaccccacctccacccagcaggaaggtgttccagctgctgcccagcttccccaccctgaccaggagcaagagccatgagagccagctgggcaacagaattgatgatgtgtcctccatgagatttgacctgagccacggcagcccccagatggtgcggcgggacatcggcctgtctgtgacccaccgcttcagcaccaagtcctggctgagccaggtgtgccacgtgtgccagaagtccatgatcttcggcgtgaagtgcaagcactgccgcctgaagtgccacaacaagtgcaccaaggaggccccagcctgccgcatctccttcctgcccctgacccggctgcggaggacagaatctgtgcccagcgacatcaacaaccctgtggacagagctgctgagccccacttcggcaccctgcccaaggccctgaccaagaaggagcaccccccagccatgaaccacctggacagcagcagcaaccccagcagcaccaccagcagcacccccagcagccctgcccccttccccaccagcagcaaccccagcagcgccaccaccccacccaaccccagccctggccagagggacagccgcttcaacttccctgctgcctacttcatccaccaccggcagcagttcatcttccctgtgcccagcgctggccactgctggaagtgcctgctgattgctgagagcctgaaggaaaatgccttcaacatcagcgcctttgcccacgccgcccccctgcctgaggccgcagatggcacccggctggatgaccagcccaaggcagatgtgctggaggcccacgaggccgaggccgaggagcctgaggccggcaagtctgaggctgaagatgatgaagatgaggtggatgacctgcccagcagccggcggccctggaggggccccatcagcaggaaggccagccagacctctgtgtacctgcaggagtgggacatcccctttgagcaggtggagctgggggagcccatcggccagggccgctggggccgggtgcaccggggccgctggcacggggaggtggccatccggctgctggagatggatggccacaaccaggaccacctgaagctgttcaagaaggaggtgatgaactaccggcagaccaggcatgaaaatgtggtgctcttcatgggcgcctgcatgaaccccccccacctggccatcatcaccagcttctgcaagggccgcaccctgcacagctttgtgcgggaccccaagaccagcctggacatcaacaagacccggcagatcgcccaggagatcatcaagggcatgggctacctgcacgccaagggcatcgtgcacaaggacctgaagagcaagaatgtgttctatgacaacgggaaggtggtgatcacagactttggcctgtttggcatcagcggcgtggtgcgggagggcagaagagagaaccagctgaagctgagccatgactggctgtgctacctggcccctgagatcgtgcgggagatgacccctgggaaggatgaggaccagctgcccttcagcaaggctgctgatgtgtatgccttcggcaccgtgtggtatgagctgcaggcccgggactggcccctgaagaaccaggccgctgaggccagcatctggcagatcggcagcggggagggcatgaagagggtgctgacctctgtgtccctgggcaaggaggtgtctgagatcctgagcgcctgctgggcctttgacctgcaggagcggcccagcttcagcctgctgatggacatgctggagaagctgcccaagctgaacagaaggctgagccaccctggccacttctggaagtctgctgacatcaacagcagcaaggtggtgcccaggtttgagcgcttcggcctgggcgtgctggagagcagcaaccccaagatgtag

SEQ ID NO: 156990 - DNA, 2772 bp, synthetic construct
  misc_feature 1..2772: note = Description of Artificial Sequence: Synthetic coding sequence
  source 1..2772: mol_type = other DNA
atggaccgggccgccctgcgggctgctgccatgggagagaagaaggagggcggcggcggcggagatgctgctgctgctgagggcggggccggggctgctgccagccgggccctgcagcagtgtggccagctgcagaagctgattgacatcagcatcggcagcctgcggggcctgcggaccaagtgtgctgtgtccaatgacctgacccagcaggagatccgcaccctggaggccaagctggtgcgctacatctgcaagcagaggcagtgcaagctgtctgtggcccctggagagaggaccccagagctgaacagctacccccgcttcagtgactggctgtacaccttcaacgtgcggcctgaggtggtgcaggagatcccccgggacctgaccctggatgccctgctggagatgaatgaggccaaggtgaaggagaccctgcggcgctgtggggccagcggagatgaatgtggccgcctgcagtatgccctgacctgcctgaggaaggtgacaggcctgggcggggagcacaaggaggacagctcctggagcagcctggatgcccggcgggagagcggcagcggccccagcacagacaccctgtctgctgccagcctgccctggcccccaggcagcagccagctgggccgggccggcaacagcgcccagggccccaggagcatctctgtgtctgccctgcctgccagtgacagccccacccccagcttcagcgagggcctgagtgacacctgcatccccctgcacgccagcggccgcctgaccccccgggccctgcacagcttcatcaccccacccaccaccccccagctgcggcggcacaccaagctgaagccacccaggaccccacctccacccagcaggaaggtgttccagctgctgcccagcttccccaccctgaccaggagcaagagccatgagagccagctgggcaacagaattgatgatgtgtcctccatgagatttgacctgagccacggcagcccccagatggtgagaagagacatcggcctgtctgtgacccaccgcttcagcaccaagtcctggctgagccaggtgtgccacgtgtgccagaagtccatgatctttggagtgaagtgcaagcactgccgcctgaagtgccacaacaagtgcaccaaggaggccccagcctgccgcatctccttcctgcccctgacccggctgcggaggacagagagcgtgcccagcgacatcaacaaccctgtggacagagctgctgagccccacttcggcaccctgcccaaggccctgaccaagaaggagcaccccccagccatgaaccacctggacagcagcagcaaccccagcagcaccaccagcagcacccccagcagccctgcccccttccccaccagcagcaaccccagcagcgccaccaccccacccaaccccagccctggccagagggacagccgcttcaacttccctgctgcctacttcatccaccaccggcagcagttcatcttccctgtgcccagcgctggccactgctggaagtgcctgctgattgctgagagcctgaaggaaaatgccttcaacatcagcgcctttgcccatgctgcccccctgcctgaggccgcagatggcacccggctggatgaccagcccaaggcagatgtgctggaggcccatgaagctgaggccgaggagcctgaggccggcaagtctgaggccgaggatgatgaagatgaggtggatgacctgcccagcagcagaagaccctggaggggccccatcagcaggaaggccagccagacctctgtgtacctgcaggagtgggacatcccctttgagcaggtggagctgggggagcccatcggccagggccgctggggccgggtgcaccggggccgctggcatggagaggtggccatccggctgctggagatggatggccacaaccaggaccacctgaagctgttcaagaaggaggtgatgaactaccggcagaccaggcatgaaaatgtggtgctcttcatgggcgcctgcatgaaccccccccacctggccatcatcaccagcttctgcaagggccgcaccctgcacagctttgtgcgggaccccaagaccagcctggacatcaacaagacccggcagatcgcccaggagatcatcaagggcatgggctacctgcacgccaagggcatcgtgcacaaggacctgaagagcaagaatgtgttctatgacaatggcaaggtggtgatcacagactttggcctgtttggcatctctggagtggtgcgggagggccggcgggagaaccagctgaagctgagccatgactggctgtgctacctggcccctgagatcgtgcgggagatgaccccaggcaaggatgaggaccagctgcccttcagcaaggccgcagatgtgtatgcctttggaacagtgtggtatgagctgcaggcccgggactggcccctgaagaaccaggccgctgaggccagcatctggcagatcggcagcggggagggcatgaagagggtgctgacctctgtgtccctgggcaaggaggtgtctgagatcctgagcgcctgctgggcctttgacctgcaggagcggcccagcttcagcctgctgatggacatgctggagaagctgcccaagctgaacagaaggctgagccaccctggccacttctggaagtctgctgacatcaacagcagcaaggtggtgcccaggtttgaaagatttggcctgggcgtgctggagagcagcaaccccaagatgtag

SEQ ID NO: 156991 - DNA, 2289 bp, synthetic construct
  misc_feature 1..2289: note = Description of Artificial Sequence: Synthetic coding sequence
  source 1..2289: mol_type = other DNA
atgaatgaggccaaggtgaaggagaccctgcggcgctgtggggccagcggagatgaatgtggccgcctgcagtatgccctgacctgcctgaggaaggtgacaggcctgggcggggagcacaaggaggacagctcctggagcagcctggatgcccggcgggagagcggcagcggccccagcacagacaccctgtctgctgccagcctgccctggcccccaggcagcagccagctgggccgggccggcaacagcgcccagggccccaggagcatctctgtgtctgccctgcctgccagtgacagccccacccccagcttcagcgagggcctgagtgacacctgcatccccctgcacgccagcggccgcctgaccccccgggccctgcacagcttcatcaccccacccaccaccccccagctgcggcggcacaccaagctgaagccacccaggaccccacctccacccagcaggaaggtgttccagctgctgcccagcttccccaccctgaccaggagcaagagccatgagagccagctgggcaacagaattgatgatgtgtcctccatgagatttgacctgagccacggcagcccccagatggtgcggcgggacatcggcctgtctgtgacccaccgcttcagcaccaagtcctggctgagccaggtgtgccacgtgtgccagaagtccatgatcttcggcgtgaagtgcaagcactgccgcctgaagtgccacaacaagtgcaccaaggaggccccagcctgccgcatctccttcctgcccctgacccggctgcggaggacagaatctgtgcccagcgacatcaacaaccctgtggacagagctgctgagccccacttcggcaccctgcccaaggccctgaccaagaaggagcaccccccagccatgaaccacctggacagcagcagcaaccccagcagcaccaccagcagcacccccagcagccctgcccccttccccaccagcagcaaccccagcagcgccaccaccccacccaaccccagccctggccagagggacagccgcttcaacttccctgctgcctacttcatccaccaccggcagcagttcatcttccctgtgcccagcgctggccactgctggaagtgcctgctgattgctgagagcctgaaggaaaatgccttcaacatcagcgcctttgcccacgccgcccccctgcctgaggccgcagatggcacccggctggatgaccagcccaaggcagatgtgctggaggcccacgaggccgaggccgaggagcctgaggccggcaagtctgaggctgaagatgatgaagatgaggtggatgacctgcccagcagccggcggccctggaggggccccatcagcaggaaggccagccagacctctgtgtacctgcaggagtgggacatcccctttgagcaggtggagctgggggagcccatcggccagggccgctggggccgggtgcaccggggccgctggcacggggaggtggccatccggctgctggagatggatggccacaaccaggaccacctgaagctgttcaagaaggaggtgatgaactaccggcagaccaggcatgaaaatgtggtgctcttcatgggcgcctgcatgaaccccccccacctggccatcatcaccagcttctgcaagggccgcaccctgcacagctttgtgcgggaccccaagaccagcctggacatcaacaagacccggcagatcgcccaggagatcatcaagggcatgggctacctgcacgccaagggcatcgtgcacaaggacctgaagagcaagaatgtgttctatgacaacgggaaggtggtgatcacagactttggcctgtttggcatcagcggcgtggtgcgggagggcagaagagagaaccagctgaagctgagccatgactggctgtgctacctggcccctgagatcgtgcgggagatgacccctgggaaggatgaggaccagctgcccttcagcaaggctgctgatgtgtatgccttcggcaccgtgtggtatgagctgcaggcccgggactggcccctgaagaaccaggccgctgaggccagcatctggcagatcggcagcggggagggcatgaagagggtgctgacctctgtgtccctgggcaaggaggtgtctgagatcctgagcgcctgctgggcctttgacctgcaggagcggcccagcttcagcctgctgatggacatgctggagaagctgcccaagctgaacagaaggctgagccaccctggccacttctggaagtctgctgagctgtag

SEQ ID NO: 156992 - DNA, 375 bp, synthetic construct
  misc_feature 1..375: note = Description of Artificial Sequence: Synthetic coding sequence
  source 1..375: mol_type = other DNA
atgcaggccgacctggagatcccccgggacctgaccctggatgccctgctggagatgaatgaggccaaggtgaaggagaccctgcggcgctgtggggccagcggagatgaatgtggccgcctgcagtatgccctgacctgcctgaggaaggtgacaggcctgggcacctggggcctgccccccagccccctgcccggcctggtgcccctgggcctgtggcccagcctgtggtgggtgatggagcggggcaagaggggccctggcttcctgggccagcccgggaaggcccgggtgggctgcagccagcccccagagaagctgagccagggcccccagggcagcggctcctggtgggtgtggccaggccgcatctag

SEQ ID NO: 156993 - DNA, 1842 bp, synthetic construct
  misc_feature 1..1842: note = Description of Artificial Sequence: Synthetic coding sequence
  source 1..1842: mol_type = other DNA
tgacattccttcatcaccccacccaccaccccccagctgcggcggcacaccaagctgaagccacccaggaccccacctccacccagcaggaaggtgttccagctgctgcccagcttccccaccctgaccaggagcaagagccatgagagccagctgggcaacagaattgatgatgtgtcctccatgagatttgacctgagccacggcagcccccagatggtgagaagagacatcggcctgtctgtgacccaccgcttcagcaccaagtcctggctgagccaggtgtgccacgtgtgccagaagtccatgatctttggagtgaagtgcaagcactgccgcctgaagtgccacaacaagtgcaccaaggaggccccagcctgccgcatctccttcctgcccctgacccggctgcggaggacagagagcgtgcccagcgacatcaacaaccctgtggacagagctgctgagccccacttcggcaccctgcccaaggccctgaccaagaaggagcaccccccagccatgaaccacctggacagcagcagcaaccccagcagcaccaccagcagcacccccagcagccctgcccccttccccaccagcagcaaccccagcagcgccaccaccccacccaaccccagccctggccagagggacagccgcttcaacttccctgctgcctacttcatccaccaccggcagcagttcatcttcccagacatcagcgcctttgcccatgctgcccccctgcctgaggccgcagatggcacccggctggatgaccagcccaaggcagatgtgctggaggcccatgaagctgaggccgaggagcctgaggccggcaagtctgaggccgaggatgatgaagatgaggtggatgacctgcccagcagcagaagaccctggaggggccccatcagcaggaaggccagccagacctctgtgtacctgcaggagtgggacatcccctttgagcaggtggagctgggggagcccatcggccagggccgctggggccgggtgcaccggggccgctggcatggagaggtggccatccggctgctggagatggatggccacaaccaggaccacctgaagctgttcaagaaggaggtgatgaactaccggcagaccaggcatgaaaatgtggtgctcttcatgggcgcctgcatgaaccccccccacctggccatcatcaccagcttctgcaagggccgcaccctgcacagctttgtgcgggaccccaagaccagcctggacatcaacaagacccggcagatcgcccaggagatcatcaagggcatgggctacctgcacgccaagggcatcgtgcacaaggacctgaagagcaagaatgtgttctatgacaatggcaaggtggtgatcacagactttggcctgtttggcatctctggagtggtgcgggagggccggcgggagaaccagctgaagctgagccatgactggctgtgctacctggcccctgagatcgtgcgggagatgaccccaggcaaggatgaggaccagctgcccttcagcaaggccgcagatgtgtatgcctttggaacagtgtggtatgagctgcaggcccgggactggcccctgaagaaccaggccgctgaggccagcatctggcagatcggcagcggggagggcatgaagagggtgctgacctctgtgtccctgggcaaggaggtgtctgagatcctgagcgcctgctgggcctttgacctgcaggagcggcccagcttcagcctgctgatggacatgctggagaagctgcccaagctgaacagaaggctgagccaccctggccacttctggaagtctgctgagctgtag

SEQ ID NO: 156994 - DNA, 2634 bp, synthetic construct
  misc_feature 1..2634: note = Description of Artificial Sequence: Synthetic coding sequence
  source 1..2634: mol_type = other DNA
atggaccgggccgccctgcgggctgctgccatgggagagaagaaggagggcggcggcggcggagatgctgctgctgctgagggcggggccggggctgctgccagccgggccctgcagcagtgtggccagctgcagaagctgattgacatcagcatcggcagcctgcggggcctgcggaccaagtgtgctgtgtccaatgacctgacccagcaggagatccgcaccctggaggccaagctggtgcgctacatctgcaagcagaggcagtgcaagctgtctgtggcccctggagagaggaccccagagctgaacagctacccccgcttcagtgactggctgtacaccttcaacgtgcggcctgaggtggtgcaggagatcccccgggacctgaccctggatgccctgctggagatgaatgaggccaaggtgaaggagaccctgcggcgctgtggggccagcggagatgaatgtggccgcctgcagtatgccctgacctgcctgaggaaggtgacaggcctgggcggggagcacaaggaggacagctcctggagcagcctggatgcccggcgggagagcggcagcggccccagcacagacaccctgtctgctgccagcctgccctggcccccaggcagcagccagctgggccgggccggcaacagcgcccagggccccaggagcatctctgtgtctgccctgcctgccagtgacagccccacccccagcttcagcgagggcctgagtgacacctgcatccccctgcacgccagcggccgcctgaccccccgggccctgcacagcttcatcaccccacccaccaccccccagctgcggcggcacaccaagctgaagccacccaggaccccacctccacccagcaggaaggtgttccagctgctgcccagcttccccaccctgaccaggagcaagagccatgagagccagctgggcaacagaattgatgatgtgtcctccatgagatttgacctgagccacggcagcccccagatggtgagaagagacatcggcctgtctgtgacccaccgcttcagcaccaagtcctggctgagccaggtgtgccacgtgtgccagaagtccatgatctttggagtgaagtgcaagcactgccgcctgaagtgccacaacaagtgcaccaaggaggccccagcctgccgcatctccttcctgcccctgacccggctgcggaggacagagagcgtgcccagcgacatcaacaaccctgtggacagagctgctgagccccacttcggcaccctgcccaaggccctgaccaagaaggagcaccccccagccatgaaccacctggacagcagcagcaaccccagcagcaccaccagcagcacccccagcagccctgcccccttccccaccagcagcaaccccagcagcgccaccaccccacccaaccccagccctggccagagggacagccgcttcaacttccctgctgcctacttcatccaccaccggcagcagttcatcttcccagacatcagcgcctttgcccatgctgcccccctgcctgaggccgcagatggcacccggctggatgaccagcccaaggcagatgtgctggaggcccatgaagctgaggccgaggagcctgaggccggcaagtctgaggccgaggatgatgaagatgaggtggatgacctgcccagcagcagaagaccctggaggggccccatcagcaggaaggccagccagacctctgtgtacctgcaggagtgggacatcccctttgagcaggtggagctgggggagcccatcggccagggccgctggggccgggtgcaccggggccgctggcatggagaggtggccatccggctgctggagatggatggccacaaccaggaccacctgaagctgttcaagaaggaggtgatgaactaccggcagaccaggcatgaaaatgtggtgctcttcatgggcgcctgcatgaaccccccccacctggccatcatcaccagcttctgcaagggccgcaccctgcacagctttgtgcgggaccccaagaccagcctggacatcaacaagacccggcagatcgcccaggagatcatcaagggcatgggctacctgcacgccaagggcatcgtgcacaaggacctgaagagcaagaatgtgttctatgacaatggcaaggtggtgatcacagactttggcctgtttggcatctctggagtggtgcgggagggccggcgggagaaccagctgaagctgagccatgactggctgtgctacctggcccctgagatcgtgcgggagatgaccccaggcaaggatgaggaccagctgcccttcagcaaggccgcagatgtgtatgcctttggaacagtgtggtatgagctgcaggcccgggactggcccctgaagaaccaggccgctgaggccagcatctggcagatcggcagcggggagggcatgaagagggtgctgacctctgtgtccctgggcaaggaggtgtctgagatcctgagcgcctgctgggcctttgacctgcaggagcggcccagcttcagcctgctgatggacatgctggagaagctgcccaagctgaacagaaggctgagccaccctggccacttctggaagtctgctgagctgtag

SEQ ID NO: 156995 - DNA, 1311 bp, synthetic construct
  misc_feature 1..1311: note = Description of Artificial Sequence: Synthetic coding sequence
  source 1..1311: mol_type = other DNA
atgtacaacaagaaggccaagatggagcccaatgccagcgagagcgccatcccagcccggcggcagaggcagccccgggccaagaagaagagcaagcccctgaacctgaagatccacagctctgtgggcagctgtgagaacatccccagccagcagaggagccccctgctgtctgagaggagcctgcggagcttctttgtgggccacgcccccttcctgcccagcaccccacctgtgcacacagaggccaacttcagcgccaacaccctgtctgtgccccgctggagcccccagatcccccggcgggacctgggcaacagcatcaagcaccgcttcagcaccaagtactggatgagccagacctgcaccgtgtgtgggaagggcatgctgtttggcctgaagtgcaagaactgcaagctgaagtgccacaacaagtgcaccaaggaggccccaccctgccacctgctgatcatccacagaggagaccctgcccggctggtgaggacagaatctgtgccctgtgacatcaacaaccccctgaggaagcccccacgctacagcgacctgcacatcagccagaccctgcccaagaccaacaagatcaacaaggaccacatccctgtgccctaccagcctgacagcagcagcaaccccagcagcaccaccagcagcacccccagcagccctgccccacccctgccccccagcgccaccccacccagccccctgcaccccagcccccagtgcacccggcagcagaagaacttcaacctgcctgccagccactactacaagtacaagcagcagttcatcttcccagatgtggtgcctgtgcctgagacccccacccgggccccccaggtgatcctgcaccctgtgaccagcaaccccatcctggagggcaaccccctgctgcagatcgaggtggagcccaccagtgaaaatgaggaggtgcatgatgaggccgaggagagtgaagatgactttgaggagatgaacctgagcctgctgagcgcccgctccttccccaggaaggccagccagaccagcatcttcctgcaggagtgggacatcccctttgagcagctggagattggagagctgattggcaagggccgcttcggccaggtgtaccacggccgctggcatggagaggtggccatccggctgattgatattgagcgggacaatgaagaccagctgaaggccttcaagcgggaggtgatggcctaccggcagaccaggcatgaaaatgtggtgctcttcatgggcgcctgcatgagccccccccacctggccatcatcacctag

SEQ ID NO: 156996 - DNA, 2853 bp, synthetic construct
  misc_feature 1..2853: note = Description of Artificial Sequence: Synthetic coding sequence
  source 1..2853: mol_type = other DNA
atggatgaggagaacatgaccaagtctgaggagcagcagcccctgagcctgcagaaggccctgcagcagtgtgagctggtgcagaacatgattgacctgagcatcagcaacctggagggcctgcggaccaagtgtgccaccagcaatgacctgacccagaaggagatccgcaccctggagagcaagctggtgaagtacttcagccggcagctgagctgcaagaagaaggtggccctgcaggagagaaatgctgagctggatggcttcccccagctgcggcactggttccgcatcgtggatgtgaggaaggaggtgctggaggagatcagccctggccagctgagcctggaggacctgctggagatgacagatgagcaggtgtgtgagaccgtggagaagtacggggccaaccgggaggagtgtgcccggctgaatgccagcctgagctgcctgagaaatgtgcacatgtctgggggcaacctgagcaagcaggactggaccatccagtggcccaccacagaaacaggcaaggagaacaaccctgtgtgccccccagagcccaccccctggatccgcacccacctgagccagagcccccgggtgcccagcaaatgtgtgcagcactactgccacaccagccccacccctggggcccctgtgtacacccacgtggaccggctgactgtggatgcctacccaggcctgtgccccccaccacccctggagagcggccacaggagcctgccccccagcccccggcagagacatgctgtgaggaccccacccaggacccccaacatcgtgaccaccgtgaccccacctggcaccccacccatgaggaagaagaacaagctgaagcccccaggcaccccaccacccagcagcaggaagctgatccacctgatccctggcttcaccgccctgcacaggagcaagagccatgagttccagctgggccaccgggtggatgaggcccacacccccaaggccaagaagaagagcaagcccctgaacctgaagatccacagctctgtgggcagctgtgagaacatccccagccagcagaggagccccctgctgtctgagaggagcctgcgctccttctttgtgggccacgcccccttcctgcccagcaccccacctgtgcacacagaggccaacttcagcgccaacaccctgtctgtgccccgctggagcccccagatcccccggcgggacctgggcaacagcatcaagcaccgcttcagcaccaagtactggatgagccagacctgcaccgtgtgtgggaagggcatgctgtttggcctgaagtgcaagaactgcaagctgaagtgccacaacaagtgcaccaaggaggccccaccctgccacctgctgatcatccacagaggagaccctgcccggctggtgaggacagagagcgtgccctgtgacatcaacaaccccctgaggaagccaccccgctacagcgacctgcacatcagccagaccctgcccaagaccaacaagatcaacaaggaccacatccctgtgccctaccagcctgacagcagcagcaaccccagcagcaccaccagcagcacccccagcagccctgccccacccctgcccccatctgccaccccacccagccccctgcaccccagcccccagtgcacccggcagcagaagaacttcaacctgcctgccagccactactacaagtacaagcagcagttcatcttcccagatgtggtgcctgtgcctgagacccccacccgggccccccaggtgatcctgcaccctgtgaccagcaaccccatcctggagggcaaccccctgctgcagatcgaggtggagcccaccagtgaaaatgaggaggtgcatgatgaagctgaggagagtgaagatgactttgaggagatgaacctgagcctgctgagcgcccggagcttccccaggaaggccagccagaccagcatcttcctgcaggagtgggacatcccctttgagcagctggagatcggggagctgattggcaagggccgcttcggccaggtgtaccacggccgctggcacggggaggtggccatccggctgattgacatcgagcgggacaatgaagaccagctgaaggccttcaagcgggaggtgatggcctaccggcagaccaggcatgaaaatgtggtgctcttcatgggcgcctgcatgagccccccccacctggccatcatcaccagcctgtgcaagggccgcaccctgtacagcgtggtgagagatgccaagatcgtgctggatgtgaacaagacccggcagatcgcccaggagatcgtgaagggcatgggctacctgcacgccaagggcatcctgcacaaggacctgaagagcaagaatgtgttctatgacaacgggaaggtggtgatcacagactttggcctcttcagcatcagcggcgtgctgcaggccggcagaagagaggacaagctgcgcatccagaatggctggctgtgccacctggcccctgagatcatccggcagctgagcccagacacagaggaggacaagctgcccttcagcaagcacagtgatgtgtttgccctgggcaccatctggtatgagctgcacgcccgggagtggcccttcaagacccagcctgctgaggccatcatctggcagatgggcaccggcatgaagcccaacctgagccagatcggcatgggcaaggagatcagtgacatcctgctcttctgctgggcctttgagcaggaggagcggcccaccttcaccaagctgatggacatgctggagaagctgcccaagaggaacagaaggctgagccaccctggccacttctggaagtctgctgagctgtag

SEQ ID NO: 156997 - DNA, 2766 bp, synthetic construct
  misc_feature 1..2766: note = Description of Artificial Sequence: Synthetic coding sequence
  source 1..2766: mol_type = other DNA
atgattgacctgagcatcagcaacctggagggcctgcggaccaagtgtgccaccagcaatgacctgacccagaaggagatccgcaccctggagagcaagctggtgaagtacttcagccggcagctgagctgcaagaagaaggtggccctgcaggagagaaatgctgagctggatggcttcccccagctgcggcactggttcagaattgtggatgtgaggaaggaggtgctggaggagatcagccctggccagctgagcctggaggacctgctggagatgacagatgagcaggtgtgtgaaacagtggagaagtatggagccaaccgggaggagtgtgcccggctgaatgccagcctgagctgcctgagaaatgtgcacatgtctgggggcaacctgagcaagcaggactggaccatccagtggcccaccacagagaccgggaaggagaacaaccctgtgtgccccccagagcccaccccctggatccgcacccacctgagccagagcccccgggtgcccagcaaatgtgtgcagcactactgccacaccagccccacccctggggcccctgtgtacacccacgtggaccggctgactgtggatgcctacccaggcctgtgccccccaccacccctggagagcggccacaggagcctgccccccagcccccggcagagacatgctgtgaggaccccacccaggacccccaacatcgtgaccaccgtgaccccacctggcaccccacccatgaggaagaagaacaagctgaagcccccaggcaccccaccacccagcagcaggaagctgatccacctgatccctggcttcaccgccctgcacaggagcaagagccatgagttccagctgggccaccgggtggatgaggcccacacccccaaggccaagaagaagagcaagcccctgaacctgaagatccacagctctgtgggcagctgtgagaacatccccagccagcagaggagccccctgctgtctgagaggagcctgcggagcttctttgtgggccacgcccccttcctgcccagcaccccacctgtgcacacagaggccaacttcagcgccaacaccctgtctgtgccccgctggagcccccagatcccccggcgggacctgggcaacagcatcaagcaccgcttcagcaccaagtactggatgagccagacctgcaccgtgtgtgggaagggcatgctgtttggcctgaagtgcaagaactgcaagctgaagtgccacaacaagtgcaccaaggaggccccaccctgccacctgctgatcatccacagaggagaccctgcccggctggtgaggacagaatctgtgccctgtgacatcaacaaccccctgaggaagcccccacgctacagcgacctgcacatcagccagaccctgcccaagaccaacaagatcaacaaggaccacatccctgtgccctaccagcctgacagcagcagcaaccccagcagcaccaccagcagcacccccagcagccctgccccacccctgccccccagcgccaccccacccagccccctgcaccccagcccccagtgcacccggcagcagaagaacttcaacctgcctgccagccactactacaagtacaagcagcagttcatcttcccagatgtggtgcctgtgcctgagacccccacccgggccccccaggtgatcctgcaccctgtgaccagcaaccccatcctggagggcaaccccctgctgcagatcgaggtggagcccaccagtgaaaatgaggaggtgcatgatgaggccgaggagagtgaagatgactttgaggagatgaacctgagcctgctgagcgcccgctccttccccaggaaggccagccagaccagcatcttcctgcaggagtgggacatcccctttgagcagctggagattggagagctgattggcaagggccgcttcggccaggtgtaccacggccgctggcatggagaggtggccatccggctgattgatattgagcgggacaatgaagaccagctgaaggccttcaagcgggaggtgatggcctaccggcagaccaggcatgaaaatgtggtgctcttcatgggcgcctgcatgagccccccccacctggccatcatcaccagcctgtgcaagggccgcaccctgtacagcgtggtgagagatgccaagatcgtgctggatgtgaacaagacccggcagatcgcccaggagatcgtgaagggcatgggctacctgcacgccaagggcatcctgcacaaggacctgaagagcaagaatgtgttctatgacaatggcaaggtggtgatcacagactttggcctcttcagcatctctggagtgctgcaggccggccggcgggaggacaagctgcgcatccagaatggctggctgtgccacctggcccctgagatcatccggcagctgagcccagacacagaggaggacaagctgcccttcagcaagcacagtgatgtgtttgccctgggcaccatctggtatgagctgcacgcccgggagtggcccttcaagacccagcctgctgaggccatcatctggcagatgggcaccggcatgaagcccaacctgagccagatcggcatgggcaaggagatcagtgacatcctgctcttctgctgggcctttgagcaggaggagcggcccaccttcaccaagctgatggacatgctggagaagctgcccaagaggaacagaaggctgagccaccctggccacttctggaagtctgctgagctgtag

SEQ ID NO: 156998 - DNA, 1245 bp, synthetic construct
  misc_feature 1..1245: note = Description of Artificial Sequence: Synthetic coding sequence
  source 1..1245: mol_type = other DNA
cgggccaagaagaagagcaagcccctgaacctgaagatccacagctctgtgggcagctgtgagaacatccccagccagcagaggagccccctgctgtctgagaggagcctgcgctccttctttgtgggccacgcccccttcctgcccagcaccccacctgtgcacacagaggccaacttcagcgccaacaccctgtctgtgccccgctggagcccccagatcccccggcgggacctgggcaacagcatcaagcaccgcttcagcaccaagtactggatgagccagacctgcaccgtgtgtgggaagggcatgctgtttggcctgaagtgcaagaactgcaagctgaagtgccacaacaagtgcaccaaggaggccccaccctgccacctgctgatcatccacagaggagaccctgcccggctggtgaggacagagagcgtgccctgtgacatcaacaaccccctgaggaagccaccccgctacagcgacctgcacatcagccagaccctgcccaagaccaacaagatcaacaaggaccacatccctgtgccctaccagcctgacagcagcagcaaccccagcagcaccaccagcagcacccccagcagccctgccccacccctgcccccatctgccaccccacccagccccctgcaccccagcccccagtgcacccggcagcagaagaacttcaacctgcctgccagccactactacaagtacaagcagcagttcatcttcccagatgtggtgcctgtgcctgagacccccacccgggccccccaggtgatcctgcaccctgtgaccagcaaccccatcctggagggcaaccccctgctgcagatcgaggtggagcccaccagtgaaaatgaggaggtgcatgatgaagctgaggagagtgaagatgactttgaggagatgaacctgagcctgctgagcgcccggagcttccccaggaaggccagccagaccagcatcttcctgcaggagtgggacatcccctttgagcagctggagatcggggagctgattggcaagggccgcttcggccaggtgtaccacggccgctggcacggggaggtggccatccggctgattgacatcgagcgggacaatgaagaccagctgaaggccttcaagcgggaggtgatggcctaccggcagaccaggcatgaaaatgtggtgctcttcatgggcgcctgcatgagccccccccacctggccatcatcaccaggcctgtgtag

SEQ ID NO: 156999 - DNA, 3921 bp, synthetic construct
  misc_feature 1..3921: note = Description of Artificial Sequence: Synthetic coding sequence
  source 1..3921: mol_type = other DNA
atggagttctatgagagcgcctacttcatcgtgctgatccccagcatcgtcatcaccgtcatcttcctgttcttctggctgttcatgaaggagaccctgtatgatgaggtgctggccaagcagaagcgggagcagaagctgatccccaccaagacagacaagaagaaggccgagaagaagaagaacaagaagaaggagatccagaatggaaacctgcatgaaagtgacagcgagagcgtgccccgggacttcaagctgagtgatgccctggccgtggaggatgaccaggtggcccctgtgcccctgaatgtggtggagaccagcagctctgtgcgggagaggaagaagaaggagaagaagcagaagcctgtgctggaggagcaggtgatcaaggagagtgatgccagcaagatccctgggaagaaggtggagcctgtgcctgtgaccaagcagcccaccccacccagcgaggccgccgccagcaagaagaagccaggccagaagaagagcaagaatggaagtgatgaccaggacaagaaggtggagaccctgatggtgcccagcaagaggcaggaggccctgcccctgcaccaggagaccaagcaggagagcggcagcggcaagaagaaggccagcagcaagaagcagaagacagaaaatgtgtttgtggatgagcccctcatccacgccaccacctacatccccctgatggacaatgctgacagcagccctgtggtggacaagcgggaggtgattgacctgctgaagccagaccaggtggagggcatccagaagagcggcaccaagaagctgaagacagaaacagacaaggaaaatgctgaggtgaagttcaaggacttcctgctgagcctgaagaccatgatgttttctgaagatgaggccctgtgtgtggtggacctgctgaaggagaagagcggggtcatccaggatgccctgaagaagagcagcaagggggagctgaccaccctcatccaccagctgcaggagaaggacaagctgctggccgctgtgaaggaggatgctgctgccaccaaggaccgctgcaagcagctgacccaggagatgatgacagagaaggagaggagcaatgtggtgatcaccaggatgaaggaccgcatcggcaccctggagaaggagcacaacgtgttccagaacaagatccacgtgtcctaccaggagacccagcagatgcagatgaagttccagcaggtgcgggagcagatggaggccgagatcgcccacctgaagcaggagaatggcatcctgagagatgctgtgagcaacaccaccaaccagctggagagcaagcagagcgctgagctgaacaagctgcggcaggactatgcccggctggtgaatgagctgacagagaagacaggcaagctgcagcaggaggaggtgcagaagaagaatgctgagcaggccgccacccagctgaaggtgcagctgcaggaggccgagcggcgctgggaggaggtgcagagctacatcaggaagaggacagctgagcatgaagctgcccagcaggacctgcagagcaagtttgtggccaaggaaaatgaggtgcagagcctgcacagcaagctgacagacaccctggtgtccaagcagcagctggagcagaggctgatgcagctgatggagagcgagcagaagagggtgaacaaggaggagagcctgcagatgcaggtgcaggacatcctggagcagaatgaggccctgaaggcccagatccagcagttccacagccagattgctgcccagaccagcgcctctgtgctggccgaggagctgcacaaggtgattgctgagaaggacaagcagatcaagcagacagaggacagcctggccagcgagcgggaccggctgaccagcaaggaggaggagctgaaggacatccagaacatgaacttcctgctgaaggccgaggtgcagaagctgcaggccctggccaatgagcaggccgccgccgcccacgagctggagaagatgcagcagagcgtgtatgtgaaggatgacaagatccggctgctggaggagcagctgcagcacgagatcagcaacaagatggaggagttcaagatcctgaatgaccagaacaaggccctgaagtctgaggtgcagaagctgcagaccctggtgtctgagcagcccaacaaggatgtggtggagcagatggagaagtgcatccaggagaaggatgagaagctgaagacagtggaggagctgctggagaccggcctcatccaggtggccaccaaggaggaggagctgaatgccatcagaacagagaacagcagcctgaccaaggaggtgcaggacctgaaggccaagcagaatgaccaggtgtcctttgccagcctggtggaggagctgaagaaggtgatccacgagaaggatggcaagatcaagtctgtggaggagctgctggaggccgagctgctgaaggtggccaacaaggagaagacagtgcagctgagcatcaccagcaaggtgcaggagctgcagaacctgctgaagggcaaggaggagcagatgaacaccatgaaggctgtgctggaggagaaggagaaggacctggccaacacaggcaagtggctgcaggacctgcaggaggagaatgaaagcctgaaggcccacgtgcaggaggtggcccagcacaacctgaaggaggccagcagcgccagccagtttgaggagctggagatcgtgctgaaggagaaggaaaatgagctgaagaggctggaggccatgctgaaggagcgggagagtgacctgagcagcaagacccagctgctgcaggatgtgcaggatgagaacaagctgttcaagagccagatcgagcagctgaagcagcagaactaccagcaggccagcagcttcccccctcatgaggagctgctgaaggtgatcagcgagcgggagaaggagatcagcggcctgtggaatgagctggacagcctgaaggatgctgtggagcaccagaggaagaagaacaatgacctgcgggagaagaactgggaggccatggaggccctggccagcacagagaagatgctgcaggacaaggtgaacaagaccagcaaggagcggcagcagcaggtggaggccgtggagctggaggccaaggaggtgctgaagaagctgttccccaaggtgtctgtgcccagcaacctgtcctatggagagtggctgcacggctttgagaagaaggccaaggagtgcatggccggcaccagcggcagcgaggaggtgaaggtgctggagcacaagctgaaggaggctgatgagatgcacaccctgctgcagctggagtgtgagaagtacaagtctgtgctggccgagacagagggcatcctgcagaagctgcagaggtctgtggagcaggaggagaacaagtggaaggtgaaggtggatgagagccacaagaccatcaagcagatgcagagcagcttcaccagcagcgagcaggagctggagcggctgcggtctgagaacaaggacatcgagaacctgcggcgggagcgggagcacctggagatggagctggagaaggccgagatggagaggagcacctacgtgacagaggtgcgggagctgaaggcccagctgaatgagaccctgaccaagctgaggacagagcagaatgaaaggcagaaggtggccggggacctgcacaaggcccagcagagcctggagctgatccagagcaagatcgtgaaggccgccggggacaccaccgtgattgaaaattctgatgtgtccccagagacagagagcagcgagaaggagaccatgtctgtgtccctgaaccagacagtgacccagctgcagcagctgctgcaggccgtgaaccagcagctgaccaaggagaaggagcactaccaggtgctggagtag

SEQ ID NO: 157000 - DNA, 4074 bp, synthetic construct
  misc_feature 1..4074: note = Description of Artificial Sequence: Synthetic coding sequence
  source 1..4074: mol_type = other DNA
atggagttctatgagagcgcctacttcatcgtgctgatccccagcatcgtcatcaccgtcatcttcctgttcttctggctgttcatgaaggagaccctgtatgatgaggtgctggccaagcagaagcgggagcagaagctgatccccaccaagacagacaagaagaaggccgagaagaagaagaacaagaagaaggagatccagaatggaaacctgcatgaaagtgacagcgagagcgtgccccgggacttcaagctgagtgatgccctggccgtggaggatgaccaggtggcccctgtgcccctgaatgtggtggagaccagcagctctgtgcgggagaggaagaagaaggagaagaagcagaagcctgtgctggaggagcaggtgatcaaggagagtgatgccagcaagatccctgggaagaaggtggagcctgtgcctgtgaccaagcagcccaccccacccagcgaggccgccgccagcaagaagaagccaggccagaagaagagcaagaatggaagtgatgaccaggacaagaaggtggagaccctgatggtgcccagcaagaggcaggaggccctgcccctgcaccaggagaccaagcaggagagcggcagcggcaagaagaaggccagcagcaagaagcagaagacagaaaatgtgtttgtggatgagcccctcatccacgccaccacctacatccccctgatggacaatgctgacagcagccctgtggtggacaagcgggaggtgattgacctgctgaagccagaccaggtggagggcatccagaagagcggcaccaagaagctgaagacagaaacagacaaggaaaatgctgaggtgaagttcaaggacttcctgctgagcctgaagaccatgatgttttctgaagatgaggccctgtgtgtggtggacctgctgaaggagaagagcggggtcatccaggatgccctgaagaagagcagcaagggggagctgaccaccctcatccaccagctgcaggagaaggacaagctgctggccgctgtgaaggaggatgctgctgccaccaaggaccgctgcaagcagctgacccaggagatgatgacagagaaggagaggagcaatgtggtgatcaccaggatgaaggaccgcatcggcaccctggagaaggagcacaacgtgttccagaacaagatccacgtgtcctaccaggagacccagcagatgcagatgaagttccagcaggtgcgggagcagatggaggccgagatcgcccacctgaagcaggagaatggcatcctgagagatgctgtgagcaacaccaccaaccagctggagagcaagcagagcgctgagctgaacaagctgcggcaggactatgcccggctggtgaatgagctgacagagaagacaggcaagctgcagcaggaggaggtgcagaagaagaatgctgagcaggccgccacccagctgaaggtgcagctgcaggaggccgagcggcgctgggaggaggtgcagagctacatcaggaagaggacagctgagcatgaagctgcccagcaggacctgcagagcaagtttgtggccaaggaaaatgaggtgcagagcctgcacagcaagctgacagacaccctggtgtccaagcagcagctggagcagaggctgatgcagctgatggagagcgagcagaagagggtgaacaaggaggagagcctgcagatgcaggtgcaggacatcctggagcagaatgaggccctgaaggcccagatccagcagttccacagccagattgctgcccagaccagcgcctctgtgctggccgaggagctgcacaaggtgattgctgagaaggacaagcagatcaagcagacagaggacagcctggccagcgagcgggaccggctgaccagcaaggaggaggagctgaaggacatccagaacatgaacttcctgctgaaggccgaggtgcagaagctgcaggccctggccaatgagcaggccgccgccgcccacgagctggagaagatgcagcagagcgtgtatgtgaaggatgacaagatccggctgctggaggagcagctgcagcacgagatcagcaacaagatggaggagttcaagatcctgaatgaccagaacaaggccctgaagtctgaggtgcagaagctgcagaccctggtgtctgagcagcccaacaaggatgtggtggagcagatggagaagtgcatccaggagaaggatgagaagctgaagacagtggaggagctgctggagaccggcctcatccaggtggccaccaaggaggaggagctgaatgccatcagaacagagaacagcagcctgaccaaggaggtgcaggacctgaaggccaagcagaatgaccaggtgtcctttgccagcctggtggaggagctgaagaaggtgatccacgagaaggatggcaagatcaagtctgtggaggagctgctggaggccgagctgctgaaggtggccaacaaggagaagacagtgcaggacctgaagcaggagatcaaggccctgaaggaggagattggaaatgtgcagctggagaaggcccagcagctgagcatcaccagcaaggtgcaggagctgcagaacctgctgaagggcaaggaggagcagatgaacaccatgaaggctgtgctggaggagaaggagaaggacctggccaacacaggcaagtggctgcaggacctgcaggaggagaatgaaagcctgaaggcccacgtgcaggaggtggcccagcacaacctgaaggaggccagcagcgccagccagtttgaggagctggagatcgtgctgaaggagaaggaaaatgagctgaagaggctggaggccatgctgaaggagcgggagagtgacctgagcagcaagacccagctgctgcaggatgtgcaggatgagaacaagctgttcaagagccagatcgagcagctgaagcagcagaactaccagcaggccagcagcttcccccctcatgaggagctgctgaaggtgatcagcgagcgggagaaggagatcagcggcctgtggaatgagctggacagcctgaaggatgctgtggagcaccagaggaagaagaacaatgacctgcgggagaagaactgggaggccatggaggccctggccagcacagagaagatgctgcaggacaaggtgaacaagaccagcaaggagcggcagcagcaggtggaggccgtggagctggaggccaaggaggtgctgaagaagctgttccccaaggtgtctgtgcccagcaacctgtcctatggagagtggctgcacggctttgagaagaaggccaaggagtgcatggccggcaccagcggcagcgaggaggtgaaggtgctggagcacaagctgaaggaggctgatgagatgcacaccctgctgcagctggagtgtgagaagtacaagtctgtgctggccgagacagagggcatcctgcagaagctgcagaggtctgtggagcaggaggagaacaagtggaaggtgaaggtggatgagagccacaagaccatcaagcagatgcagagcagcttcaccagcagcgagcaggagctggagcggctgcggtctgagaacaaggacatcgagaacctgcggcgggagcgggagcacctggagatggagctggagaaggccgagatggagaggagcacctacgtgacagaggtgcgggagctgaaggacctgctgacagagctgcagaagaagctggatgacagctacagcgaggccgtgcggcagaatgaggagctgaacctgctgaaggcccagctgaatgagaccctgaccaagctgaggacagagcagaatgaaaggcagaaggtggccggggacctgcacaaggcccagcagagcctggagctgatccagagcaagatcgtgaaggctgctggggacaccaccgtgattgagaacagtgatgtgtccccagagacagagagcagcgagaaggagaccatgtctgtgtccctgaaccagacagtgacccagctgcagcagctgctgcaggccgtgaaccagcagctgaccaaggagaaggagcactaccaggtgctggagtag

SEQ ID NO: 157001 - DNA, 3921 bp, synthetic construct; identical to SEQ ID NO: 156999
  misc_feature 1..3921: note = Description of Artificial Sequence: Synthetic coding sequence
  source 1..3921: mol_type = other DNA

SEQ ID NO: 157002 - DNA, 4074 bp, synthetic construct; identical to SEQ ID NO: 157000
  misc_feature 1..4074: note = Description of Artificial Sequence: Synthetic coding sequence
  source 1..4074: mol_type = other DNA

SEQ ID NO: 157003 - DNA, 3921 bp, synthetic construct; identical to SEQ ID NO: 156999
  misc_feature 1..3921: note = Description of Artificial Sequence: Synthetic coding sequence
  source 1..3921: mol_type = other DNA

SEQ ID NO: 157004 - DNA, 4074 bp, synthetic construct; identical to SEQ ID NO: 157000
  misc_feature 1..4074: note = Description of Artificial Sequence: Synthetic coding sequence
  source 1..4074: mol_type = other DNA

SEQ ID NO: 157005 - DNA, 3903 bp, synthetic construct
  misc_feature 1..3903: note = Description of Artificial Sequence: Synthetic coding sequence
  source 1..3903: mol_type = other DNA
atggagttctatgagagcgcctacttcatcgtgctgatccccagcatcgtcatcaccgtcatcttcctgttcttctggctgttcatgaaggagaccctgtatgatgaggtgctggccaagcagaagcgggagcagaagctgatccccaccaagacagacaagaagaaggccgagaagaagaagaacaagaagaaggagatccagaatggaaacctgcatgaaagtgacagcgagagcgtgccccgggacttcaagctgagtgatgccctggccgtggaggatgaccaggtggcccctgtgcccctgaatgtggtggagaccagcagctctgtgcgggagaggaagaagaaggagaagaagcagaagcctgtgctggaggagcaggtgatcaaggagagtgatgccagcaagatccctgggaagaaggtggagcctgtgcctgtgaccaagcagcccaccccacccagcgaggccgccgccagcaagaagaagccaggccagaagaagagcaagaatggaagtgatgaccaggacaagaaggtggagaccctgatggtgcccagcaagaggcaggaggccctgcccctgcaccaggagaccaagcaggagagcggcagcggcaagaagaaggccagcagcaagaagcagaagacagaaaatgtgtttgtggatgagcccctcatccacgccaccacctacatccccctgatggacaatgctgacagcagccctgtggtggacaagcgggaggtgattgacctgctgaagccagaccaggtggagggcatccagaagagcggcaccaagaagctgaagacagaaacagacaaggaaaatgctgaggtgaagttcaaggacttcctgctgagcctgaagaccatgatgttttctgaagatgaggccctgtgtgtggtggacctgctgaaggagaagagcggggtcatccaggatgccctgaagaagagcagcaagggggagctgaccaccctcatccaccagctgcaggagaaggacaagctgctggccgctgtgaaggaggatgctgctgccaccaaggaccgctgcaagcagctgacccaggagatgatgacagagaaggagaggagcaatgtggtgatcaccaggatgaaggaccgcatcggcaccctggagaaggagcacaacgtgttccagaacaagatccacgtgtcctaccaggagacccagcagatgcagatgaagttccagcaggtgcgggagcagatggaggccgagatcgcccacctgaagcaggagaatggcatcctgagagatgctgtgagcaacaccaccaaccagctggagagcaagcagagcgctgagctgaacaagctgcggcaggactatgcccggctggtgaatgagctgacagagaagacaggcaagctgcagcaggaggaggtgcagaagaagaatgctgagcaggccgccacccagctgaaggtgcagctgcaggaggccgagcggcgctgggaggaggtgcagagctacatcaggaagaggacagctgagcatgaagctgcccagcaggacctgcagagcaagtttgtggccaaggaaaatgaggtgcagagcctgcacagcaagctgacagacaccctggtgtccaagcagcagctggagcagaggctgatgcagctgatggagagcgagcagaagagggtgaacaaggaggagagcctgcagatgcaggtgcaggacatcctggagcagaatgaggccctgaaggcccagatccagcagttccacagccagattgctgcccagaccagcgcctctgtgctggccgaggagctgcacaaggtgattgctgagaaggacaagcagatcaagcagacagaggacagcctggccagcgagcgggaccggctgaccagcaaggaggaggagctgaaggacatccagaacatgaacttcctgctgaaggccgaggtgcagaagctgcaggccctggccaatgagcaggccgccgccgcccacgagctggagaagatgcagcagagcgtgtatgtgaaggatgacaagatccggctgctggaggagcagctgcagcacgagatcagcaacaagatggaggagttcaagatcctgaatgaccagaacaaggccctgaagtctgaggtgcagaagctgcagaccctggtgtctgagcagcccaacaaggatgtggtggagcagatggagaagtgcatccaggagaaggatgagaagctgaagacagtggaggagctgctggagaccggcctcatccaggtggccaccaaggaggaggagctgaatgccatcagaacagagaacagcagcctgaccaaggaggtgcaggacctgaaggccaagcagaatgaccaggtgtcctttgccagcctggtggaggagctgaagaaggtgatccacgagaaggatggcaagatcaagtctgtggaggagctgctggaggccgagctgctgaaggtggccaacaaggagaagacagtgcaggacctgaagcaggagatcaaggccctgaaggaggagattggaaatgtgcagctggagaaggcccagcagctgagcatcaccagcaaggtgcaggagctgcagaacctgctgaagggcaaggaggagcagatgaacaccatgaaggctgtgctggaggagaaggagaaggacctggccaacacaggcaagtggctgcaggacctgcaggaggagaatgaaagcctgaaggcccacgtgcaggaggtggcccagcacaacctgaaggaggccagcagcgccagccagtttgaggagctggagatcgtgctgaaggagaaggaaaatgagctgaagaggctggaggccatgctgaaggagcgggagagtgacctgagcagcaagacccagctgctgcaggatgtgcaggatgagaacaagctgttcaagagccagatcgagcagctgaagcagcagaactaccagcaggccagcagcttcccccctcatgaggagctgctgaaggtgatcagcgagcgggagaaggagatcagcggcctgtggaatgagctggacagcctgaaggatgctgtggagcaccagaggaagaagaacaatgaaaggcagcagcaggtggaggccgtggagctggaggccaaggaggtgctgaagaagctgttccccaaggtgtctgtgcccagcaacctgtcctatggagagtggctgcacggctttgagaagaaggccaaggagtgcatggccggcaccagcggcagcgaggaggtgaaggtgctggagcacaagctgaaggaggctgatgagatgcacaccctgctgcagctggagtgtgagaagtacaagtctgtgctggccgagacagagggcatcctgcagaagctgcagaggtctgtggagcaggaggagaacaagtggaaggtgaaggtggatgagagccacaagaccatcaagcagatgcagagcagcttcaccagcagcgagcaggagctggagcggctgcggtctgagaacaaggacatcgagaacctgcggcgggagcgggagcacctggagatggagctggagaaggccgagatggagaggagcacctacgtgacagaggtgcgggagctgaaggcccagctgaatgagaccctgaccaagctgaggacagagcagaatgaaaggcagaaggtggccggggacctgcacaaggcccagcagagcctggagctgatccagagcaagatcgtgaaggccgccggggacaccaccgtgattgaaaattctgatgtgtccccagagacagagagcagcgagaaggagaccatgtctgtgtccctgaaccagacagtgacccagctgcagcagctgctgcaggccgtgaaccagcagctgaccaaggagaaggagcactaccaggtgctggagtag

SEQ ID NO: 157006 - DNA, 4074 bp, synthetic construct; identical to SEQ ID NO: 157000
  misc_feature 1..4074: note = Description of Artificial Sequence: Synthetic coding sequence
  source 1..4074: mol_type = other DNA

SEQ ID NO: 157007 - DNA, 228 bp, synthetic construct
  misc_feature 1..228: note = Description of Artificial Sequence: Synthetic coding sequence
  source 1..228: mol_type = other DNA
atggagttctatgagagcgcctacttcatcgtgctgatccccagcatcgtcatcaccgtcatcttcctgttcttctggctgttcatgaaggagaccctgtatgatgaggtgctggccaagcagaagcgggagcagaagctgatccccaccaagacagacaagaagaaggccgagaagaagaagaacaagaagaaggagatccagaatggaaacctgcacgagagctag

SEQ ID NO: 157008 - DNA, 183 bp, synthetic construct
  misc_feature 1..183: note = Description of Artificial Sequence: Synthetic coding sequence
  source 1..183: mol_type = other DNA
atggagttctatgagagcgcctacttcatcgtgctgatccccagcatcgtcatcaccgtcatcttcctgttcttctggctgttcatgaaggagaccctgtatgatgaggtgctggccaagcagaagcgggagcagaagctgatccccaccaagacagacaagaagaaggccgagaagaagtag

SEQ ID NO: 157009 - DNA, 3171 bp, synthetic construct
  misc_feature 1..3171: note = Description of Artificial Sequence: Synthetic coding sequence
  source 1..3171: mol_type = other DNA
atggccagccagcccaacagcagcgccaagaagaaggaggagaagggcaagaacatccaggtggtggtgcgctgccggcccttcaacctggccgagaggaaggccagcgcccacagcatcgtggagtgtgaccctgtgaggaaggaggtgtctgtgaggactggaggcctggccgacaagagcagcaggaagacctacacctttgacatggtgtttggagccagcaccaagcagattgatgtgtacagatctgtggtgtgccccatcctggatgaagtcatcatgggctacaactgcaccatctttgcctacggccagacaggaacaggcaagaccttcaccatggagggggagaggagccccaatgaggagtacacctgggaggaggaccccctggccggcatcatccccaggaccctgcaccagatctttgagaagctgacagacaatggaacagagttctctgtgaaggtgtccctgctggagatctacaatgaggagctgtttgacctgctgaaccccagcagtgatgtgtctgagcggctgcagatgtttgatgaccccaggaacaagaggggcgtcatcatcaagggcctggaggagatcaccgtgcacaacaaggatgaggtgtaccagatcctggagaagggggccgccaagaggaccacagctgccaccctgatgaatgcctacagcagccgcagccacagcgtcttctctgtgaccatccacatgaaggagaccaccattgatggagaggagctggtgaagattggcaagctgaacctggtggacctggccggcagcgagaacatcggccgctctggagctgtggacaagagggcccgggaggccggcaacatcaaccagagcctgctgaccctgggccgggtcatcacagccctggtggagaggaccccccacgtgccctaccgggagagcaagctgacccgcatcctgcaggacagcctgggcggccgcaccaggaccagcatcatcgccaccatcagccctgccagcctgaacctggaggagaccctgagcaccctggagtatgcccaccgggccaagaacatcctgaacaagccagaggtgaaccagaagctgaccaagaaggccctgatcaaggagtacacagaggagattgaaaggctgaagagggacctggccgccgcccgggagaagaatggagtgtacatcagcgaggagaacttccgggtgatgtctgggaagctgactgtgcaggaggagcagatcgtggagctgattgagaagatcggggctgtggaggaggagctgaacagagtgacagagctgttcatggacaacaagaatgagctggaccagtgcaagagtgacctgcagaacaagacccaggagctggagaccacccagaagcacctgcaggagaccaagctgcagctggtgaaggaggagtacatcaccagcgccctggagagcacagaggagaagctgcatgatgctgccagcaagctgctgaacacagtggaggagaccaccaaggatgtgtctggcctgcacagcaagctggacaggaagaaggctgtggaccagcacaatgctgaggcccaggacatctttgggaagaacctgaacagcctcttcaacaacatggaggagctgatcaaggatggcagcagcaagcagaaggccatgctggaggtgcacaagaccctgtttggaaacctgctgagcagctctgtgtctgccctggacaccatcaccaccgtggccctgggcagcctgaccagcatcccagaaaatgtgtccacccacgtgtcccagatcttcaacatgatcctgaaggagcagagcctggccgctgagagcaagacagtgctgcaggagctgatcaacgtgctgaagacagacctgctgagcagcctggagatgatcctgagccccaccgtggtgtccatcctgaagatcaacagccagctgaagcacatcttcaagaccagcctgactgtggccgacaagattgaggaccagaagaaggagctggatggcttcctgagcatcctgtgcaacaacctgcacgagctgcaggagaacaccatctgcagcctggtggagagccagaagcagtgtggcaacctgacagaggacctgaagaccatcaagcagacccacagccaggagctgtgcaagctgatgaacctgtggacagagcgcttctgtgccctggaggagaagtgtgagaacatccagaagcccctgagctctgtgcaggagaacatccagcagaagagcaaggacatcgtgaacaagatgaccttccacagccagaagttctgtgccgacagtgatggcttcagccaggagctgaggaacttcaaccaggagggcaccaagctggtggaggagagcgtgaagcacagcgacaagctgaatggaaacctggagaagatcagccaggagacagagcagagatgtgagagcctgaacaccaggacagtgtacttcagcgagcagtgggtgagcagcctgaatgaaagagagcaggagctgcacaacctgctggaggtggtgtcccagtgctgtgaggccagcagcagtgacatcacagagaagagtgatggcaggaaggccgcccacgagaagcagcacaacatcttcctggaccagatgaccattgatgaggacaagctgattgcccagaacctggagctgaatgagaccatcaagattggcctgaccaagctgaactgcttcctggagcaggacctgaagctggacatccccaccggcaccaccccccagaggaagagctacctgtaccccagcaccctggtgaggacagagccccgggagcacctgctggaccagctgaagaggaagcagcctgagctgctgatgatgctgaactgcagcgagaacaacaaggaggagaccatcccagatgtggatgtggaggaggccgtgctgggccagtacacagaggagcccctgagccaggagcccagcgtggatgctggggtggactgcagcagcatcggcggcgtgcccttcttccagcacaagaagagccacggcaaggacaaggaaaatagaggcatcaacaccctggagaggagcaaggtggaggagaccacagagcacctggtgaccaagagccggctgcccctgcgggcccagatcaacctgtag

SEQ ID NO: 157010 - DNA, 5418 bp, synthetic construct
  misc_feature 1..5418: note = Description of Artificial Sequence: Synthetic coding sequence
  source 1..5418: mol_type = other DNA
atgtctgacaccaaggtgaaggtggccgtgcgggtgcggcccatgaacagaagagagctggagctgaacaccaagtgtgtggtggagatggagggcaaccagacagtgctgcaccccccacccagcaacaccaagcagggcgagaggaagccacccaaggtgtttgcctttgactactgcttctggagcatggatgagagcaacaccaccaagtatgccggccaggaggtggtgttcaagtgcctgggggagggcatcctggagaaggccttccagggctacaatgcctgcatctttgcctacggccagacaggcagcggcaagagcttctccatgatgggccacgccgagcagctgggcctcatcccccggctgtgctgtgccctcttcaagaggatcagcctggagcagaatgaaagccagaccttcaaggtggaggtgtcctacatggagatctacaatgagaaggtgcgggacctgctggaccccaagggcagccggcagagcctgaaggtgcgggagcacaaggtgctgggcccctacgtggatggcctgagccagctggccgtgaccagctttgaggacatcgagagcctgatgtctgagggcaacaagagcaggacagtggccgccaccaacatgaatgaggagagcagccgcagccatgctgtgttcaacatcatcatcacccagaccctgtatgacctgcagagcggcaacagcggggagaaggtgtccaaggtgtccctggtggacctggccggcagcgagcgggtgtccaagacaggagctgctggggagcggctgaaggagggcagcaacatcaacaagagcctgaccaccctgggcctggtgatcagcagcctggccgaccaggccgccggcaagggcaagagcaagtttgtgccctacagagattctgtgctgacctggctgctgaaggacaacctgggcggcaacagccagacctccatgattgccaccatcagccctgctgctgacaactatgaggagaccctgagcaccctgcgctatgctgaccgggccaagagaattgtgaaccacgctgtggtgaatgaagaccccaatgccaaggtgatccgggagctgcgggaggaggtggagaagctgcgggagcagctgagccaggccgaggccatgaaggcccctgagctgaaggagaagctggaggagagcgagaagctgatcaaggagctgactgtgacctgggaggagaagctgaggaagacagaggagatcgcccaggagcggcagaggcagctggagagcatgggcatcagcctggagatgagcggcatcaaggtgggagatgacaagtgctacctggtgaacctgaatgctgaccctgccctgaatgagctgctggtgtactacctgaaggaccacaccagggtgggcgctgacaccagccaggacatccagctgtttggaattggcatccagccccagcactgtgaaattgacatcgccagtgatggagatgtgaccctgacccccaaggaaaatgcccggagctgtgtgaatggcaccctggtgtgcagcaccacccagctgtggcatggagaccgcatcctgtggggcaacaaccacttcttccgcatcaacctgcccaagaggaagaggcgggactggctgaaggactttgagaaggagactggacctcctgagcatgacctggatgctgccagcgaggccagcagcgagccagactacaactatgaatttgcccagatggaggtgatcatgaagaccctgaacagcaatgaccctgtgcagaatgtggtgcaggtgctggagaagcagtacctggaggagaagaggtctgccctggaggagcagaggctgatgtatgaaagagagctggagcagctgcggcagcagctgagcccagaccggcagccccagagcagcggccctgaccggctggcctacagcagccagacagcccagcagaaggtgacccagtgggccgaggagagagatgagctgttccggcagagcctggccaagctgcgggagcagctggtgaaggccaacaccctggtgcgggaggccaacttcctggccgaggagatgagcaagctgacagactaccaggtgaccctgcagatcccagctgccaacctgagcgccaacaggaagagaggagccatcgtgtctgagcccgccatccaggtgcggaggaagggcaagagcacccaggtgtggaccatcgagaagctggagaacaagctgattgacatgagggacctgtaccaggagtggaaggagaaggtgcctgaggccaagaggctgtatggcaagagaggagaccccttctatgaggcccaggagaaccacaacctgattggagtggccaacgtgttcctggagtgcctcttctgtgatgtgaagctgcagtatgctgtgcccatcatcagccagcagggcgaggtggccggccgcctgcacgtggaggtgatgagggtgactggagctgtgcctgagcgggtggtggaggatgacagcagcgagaacagcagcgagagcggcagcctggaggtggtggacagcagtggagagatcatccaccgggtgaagaagctgacctgccgggtgaagatcaaggaggccaccggcctgcccctgaacctgagcaactttgtgttctgccagtacaccttctgggaccagtgtgagagcacagtggccgcccctgtggtggaccctgaggtgcccagcccccagagcaaggatgcccagtacacagtgaccttcagccactgcaaggactatgtggtgaatgtgacagaggagttcctggagttcatcagtgatggagccctggccatcgaggtgtggggccaccgctgtgctggaaatggcagcagcatctgggaggtggacagcctgcacgccaagaccaggaccctgcatgaccgctggaatgaggtgaccaggagaattgagatgtggatcagcatcctggagctgaatgagctgggggagtatgctgctgtggagctgcaccaggccaaggatgtgaacacaggaggcatcttccagctgcggcagggccacagcagaagagtgcaggtgacagtgaagcctgtgcagcacagcggcaccctgcccctgatggtggaggccatcctgtctgtgtccatcggctgtgtgacagcccggagcaccaagctgcagaggggcctggacagctaccagagagatgatgaagatggagatgacatggacagctaccaggaggaggacctgaactgtgtgcgggagcgctggagcgatgccctgatcaagagaagagagtacctggatgagcagatcaagaaggtgagcaacaagacagagaagacagaagatgatgtggagcgggaggcccagctggtggagcagtgggtgggcctgacagaggagagaaatgctgtgctggtgcctgcccctggcagcggcatccctggggccccagctgactggatccccccacctggcatggagacccacatccctgtgctcttcctggacctgaatgctgatgacctgagcgccaatgagcagctggtgggcccccacgccagcggcgtgaacagcatcctgcccaaggagcacggcagccagttcttctacctgcccatcatcaagcacagtgatgatgaggtgtctgccacagcctcctgggacagctctgtgcatgattctgtgcacctgaacagagtgaccccccagaatgaaagaatctacctgattgtgaagaccaccgtgcagctgagccaccctgctgccatggagctggtgctgaggaagagaattgctgccaacatctacaacaagcagagcttcacccagagcctgaagaggcgcatcagcctgaagaacatcttctacagctgtggggtgacctatgaaattgtgagcaacatccccaaggccacagaggagattgaagatcgggagaccctggccctgctggccgcccggagtgaaaatgaaggcaccagtgatggagagacctacatcgagaagtacacccggggcgtgctgcaggtggagaacatcctgagcctggagcggctgcggcaggccgtgacagtgaaggaggccctgagcaccaaggcccggcacatccgccgcagcctgagcaccccaaatgtgcacaacgtgagcagcagcaggccagacctgagcggctttgatgaagatgacaagggctggccagagaaccagctggacatgtctgactacagcagcagctaccaggatgtggcctgctacggcaccctgccccgggacagccccaggaggaacaaggagggctgcaccagcgagacccctcatgccctgactgtgagccccttcaaggccttcagcccccagccccccaagttcttcaagcccctgatgcctgtgaaggaggagcacaagaagagaattgccctggaggcccggcccctgctgagccaggagagcatgcccccaccccaggcccacaaccctggctgcatcgtgcccagcggcagcaatggcagctccatgcctgtggagcacaacagcaagcgggagaagaagattgattctgaggaggaggagaatgagctggaggccatcaacaggaagctgatcagcagccagccctacgtgcctgtggagtttgctgacttctctgtgtacaatgccagcctggagaaccgggagtggttcagcagcaaggtggacctgagcaacagccgggtgctggagaaggaggtgagccgcagccccaccaccagcagcatcaccagcggctacttcagccacagcgccagcaatgccaccctgagtgacatggtggtgcccagcagtgacagcagtgaccagctggccatccagaccaaggatgctgacagcacagagcacagcacccccagcctggtgcatgacttccggcccagcagcaacaaggagctgacagaggtggagaagggcctggtgaaggacaagatcatcgtggtgcccctgaaggaaaattctgccctggccaagggcagccccagcagccagagcatccctgagaagaacagcaagagcctgtgcaggacaggcagctgcagcgagctggatgcctgccccagcaagatcagccagcctgcccggggcttctgcccccgggaggtgacagtggagcacaccaccaacatcctggaggaccacagcttcacagagttcatgggcgtgtctgagggcaaggactttgatggcctgacagacagcagcgctggggagctgagcagcagaagaagcctgcccaacaagacaggaggcaagacagtgtctgatggcctgcaccaccccagccagctgcacagcaagctggagaatgaccaggtgatcatccctgaggccgccttctgggtgctgtgctgccagtag

SEQ ID NO: 157011 - DNA, 5250 bp, synthetic construct
  misc_feature 1..5250: note = Description of Artificial Sequence: Synthetic coding sequence
  source 1..5250: mol_type = other DNA
atgtctgacaccaaggtgaaggtggccgtgcgggtgcggcccatgaacagaagagagctggagctgaacaccaagtgtgtggtggagatggagggcaaccagacagtgctgcaccccccacccagcaacaccaagcagggcgagaggaagccacccaaggtgtttgcctttgactactgcttctggagcatggatgagagcaacaccaccaagtatgccggccaggaggtggtgttcaagtgcctgggggagggcatcctggagaaggccttccagggctacaatgcctgcatctttgcctacggccagacaggcagcggcaagagcttctccatgatgggccacgccgagcagctgggcctcatcccccggctgtgctgtgccctcttcaagaggatcagcctggagcagaatgaaagccagaccttcaaggtggaggtgtcctacatggagatctacaatgagaaggtgcgggacctgctggaccccaagggcagccggcagagcctgaaggtgcgggagcacaaggtgctgggcccctacgtggatggcctgagccagctggccgtgaccagctttgaggacatcgagagcctgatgtctgagggcaacaagagcaggacagtggccgccaccaacatgaatgaggagagcagccgcagccatgctgtgttcaacatcatcatcacccagaccctgtatgacctgcagagcggcaacagcggggagaaggtgtccaaggtgtccctggtggacctggccggcagcgagcgggtgtccaagacaggagctgctggggagcggctgaaggagggcagcaacatcaacaagagcctgaccaccctgggcctggtgatcagcagcctggccgaccaggccgccggcaagggcaagagcaagtttgtgccctacagagattctgtgctgacctggctgctgaaggacaacctgggcggcaacagccagacctccatgattgccaccatcagccctgctgctgacaactatgaggagaccctgagcaccctgcgctatgctgaccgggccaagagaattgtgaaccacgctgtggtgaatgaagaccccaatgccaaggtgatccgggagctgcgggaggaggtggagaagctgcgggagcagctgagccaggccgaggccatgaaggcccctgagctgaaggagaagctggaggagagcgagaagctgatcaaggagctgactgtgacctgggaggagaagctgaggaagacagaggagatcgcccaggagcggcagaggcagctggagagcatgggcatcagcctggagatgagcggcatcaaggtgggagatgacaagtgctacctggtgaacctgaatgctgaccctgccctgaatgagctgctggtgtactacctgaaggaccacaccagggtgggcgctgacaccagccaggacatccagctgtttggaattggcatccagccccagcactgtgaaattgacatcgccagtgatggagatgtgaccctgacccccaaggaaaatgcccggagctgtgtgaatggcaccctggtgtgcagcaccacccagctgtggcatggagaccgcatcctgtggggcaacaaccacttcttccgcatcaacctgcccaagaggaagaggcgggactggctgaaggactttgagaaggagactggacctcctgagcatgacctggatgctgccagcgaggccagcagcgagccagactacaactatgaatttgcccagatggaggtgatcatgaagaccctgaacagcaatgaccctgtgcagaatgtggtgcaggtgctggagaagcagtacctggaggagaagaggtctgccctggaggagcagaggctgatgtatgaaagagagctggagcagctgcggcagcagctgagcccagaccggcagccccagagcagcggccctgaccggctggcctacagcagccagacagcccagcagaaggtgacccagtgggccgaggagagagatgagctgttccggcagagcctggccaagctgcgggagcagctggtgaaggccaacaccctggtgcgggaggccaacttcctggccgaggagatgagcaagctgacagactaccaggtgaccctgcagatcccagctgccaacctgagcgccaacaggaagagaggagccatcgtgtctgagcccgccatccaggtgcggaggaagggcaagagcacccaggtgtggaccatcgagaagctggagaacaagctgattgacatgagggacctgtaccaggagtggaaggagaaggtgcctgaggccaagaggctgtatggcaagagaggagaccccttctatgaggcccaggagaaccacaacctgattggagtggccaacgtgttcctggagtgcctcttctgtgatgtgaagctgcagtatgctgtgcccatcatcagccagcagggcgaggtggccggccgcctgcacgtggaggtgatgagggtgactggagctgtgcctgagcgggtggtggaggatgacagcagcgagaacagcagcgagagcggcagcctggaggtggtggacagcagtggagagatcatccaccgggtgaagaagctgacctgccgggtgaagatcaaggaggccaccggcctgcccctgaacctgagcaactttgtgttctgccagtacaccttctgggaccagtgtgagagcacagtggccgcccctgtggtggaccctgaggtgcccagcccccagagcaaggatgcccagtacacagtgaccttcagccactgcaaggactatgtggtgaatgtgacagaggagttcctggagttcatcagtgatggagccctggccatcgaggtgtggggccaccgctgtgctggaaatggcagcagcatctgggaggtggacagcctgcacgccaagaccaggaccctgcatgaccgctggaatgaggtgaccaggagaattgagatgtggatcagcatcctggagctgaatgagctgggggagtatgctgctgtggagctgcaccaggccaaggatgtgaacacaggaggcatcttccagctgcggcagggccacagcagaagagtgcaggtgacagtgaagcctgtgcagcacagcggcaccctgcccctgatggtggaggccatcctgtctgtgtccatcggctgtgtgacagcccggagcaccaagctgcagaggggcctggacagctaccaggaggaggacctgaactgtgtgcgggagcgctggagcgatgccctgatcaagaggcgggagtacctggatgagcagatcaagaaggtgagcaacaagacagagaagacagaagatgatgtggagcgggaggcccagctggtggagcagtgggtgggcctgacagaggagagaaatgctgtgctggtgcctgcccctggcagcggcatccctggggccccagctgactggatccccccacctggcatggagacccacatccctgtgctcttcctggacctgaatgctgatgacctgagcgccaatgagcagctggtgggcccccacgccagcggcgtgaacagcatcctgcccaaggagcacggcagccagttcttctacctgcccatcatcaagcacagtgatgatgaggtgtctgccacagcctcctgggacagctctgtgcatgacagcgtgcacctgaacagagtgaccccccagaatgaaagaatctacctgattgtgaagaccaccgtgcagctgagccaccctgctgccatggagctggtgctgaggaagagaattgctgccaacatctacaacaagcagagcttcacccagagcctgaagaggcgcatcagcctgaagaacatcttctacagctgtggggtgacctatgagatcgtgagcaacatccccaaggccacagaggagattgaggaccgggagaccctggccctgctggccgcccggagtgaaaatgaaggcaccagtgatggagagacctacatcgagaagtacacccggggcgtgctgcaggtggagaacatcctgagcctggagcggctgcggcaggccgtgacagtgaaggaggccctgagcaccaaggcccggcacatcagaagaagcctgagcacccccaacgtgcacaacgtgagcagcagcaggccagacctgagcggctttgatgaagatgacaagggctggccagagaaccagctggacatgtctgactacagcagcagctaccaggatgtggcctgctacggcaccctgccccgggacagccccaggaggaacaaggagggctgcaccagcgagaccccccacgccctgactgtgagccccttcaaggccttcagcccccagccccccaagttcttcaagcccctgatgcctgtgaaggaggagcacaagaagagaattgccctggaggcccggcccctgctgagccaggaggacagcgaggaggaggagaatgagctggaggccatcaacaggaagctgatcagcagccagccctacgtgcctgtggagtttgctgacttctctgtgtacaatgccagcctggagaaccgggagtggttcagcagcaaggtggacctgagcaacagccgggtgctggagaaggaggtgagccgcagccccaccaccagcagcatcaccagcggctacttcagccacagcgccagcaatgccaccctgagtgacatggtggtgcccagcagtgacagcagtgaccagctggccatccagaccaaggatgctgacagcacagagcacagcacccccagcctggtgcatgacttccggcccagcagcaacaaggagctgacagaggtggagaagggcctggtgaaggacaagatcatcgtggtgcccctgaaggaaaattctgccctggccaagggcagccccagcagccagagcatccctgagaagaacagcaagagcctgtgcaggacaggcagctgcagcgagctggatgcctgccccagcaagatcagccagcctgcccggggcttctgcccccgggaggtgacagtggagcacaccaccaacatcctggaggaccacagcttcacagagttcatgggcgtgtctgagggcaaggactttgatggcctgacagacagcagcgctggggagctgagcagcagaagaagcctgcccaacaagacaggaggcaagacagtgtctgatggcctgcaccaccccagccagctgcacagcaagctggagaatgaccagggcggcaccaccagcaggtag

SEQ ID NO: 157012 - DNA, 5313 bp, synthetic construct
  misc_feature 1..5313: note = Description of Artificial Sequence: Synthetic coding sequence
  source 1..5313: mol_type = other DNA
atgtctgacaccaaggtgaaggtggccgtgcgggtgcggcccatgaacagaagagagctggagctgaacaccaagtgtgtggtggagatggagggcaaccagacagtgctgcaccccccacccagcaacaccaagcagggcgagcggcggcccagccaggtgtttgcctttgactactgcttctggagcatggatgagagcaacaccaccaagtatgccggccaggaggtggtgttcaagtgcctgggggagggcatcctggagaaggccttccagggctacaatgcctgcatctttgcctacggccagacaggcagcggcaagagcttctccatgatgggccacgccgagcagctgggcctcatcccccggctgtgctgtgccctcttcaagaggatcagcctggagcagaatgaaagccagaccttcaaggtggaggtgtcctacatggagatctacaatgagaaggtgcgggacctgctggaccccaagggcagccggcagagcctgaaggtgcgggagcacaaggtgctgggcccctacgtggatggcctgagccagctggccgtgaccagctttgaggacatcgagagcctgatgtctgagggcaacaagagcaggacagtggccgccaccaacatgaatgaggagagcagccgcagccatgctgtgttcaacatcatcatcacccagaccctgtatgacctgcagagcggcaacagcggggagaaggtgtccaaggtgtccctggtggacctggccggcagcgagcgggtgtccaagacaggagctgctggggagcggctgaaggagggcagcaacatcaacaagagcctgaccaccctgggcctggtgatcagcagcctggccgaccaggccgccggcaagggcaagagcaagtttgtgccctacagagattctgtgctgacctggctgctgaaggacaacctgggcggcaacagccagacctccatgattgccaccatcagccctgctgctgacaactatgaggagaccctgagcaccctgcgctatgctgaccgggccaagagaattgtgaaccacgctgtggtgaatgaagaccccaatgccaaggtgatccgggagctgcgggaggaggtggagaagctgcgggagcagctgagccaggccgaggccatgaaggcccctgagctgaaggagaagctggaggagagcgagaagctgatcaaggagctgactgtgacctgggaggagaagctgaggaagacagaggagatcgcccaggagcggcagaggcagctggagagcatgggcatcagcctggagatgagcggcatcaaggtgggagatgacaagtgctacctggtgaacctgaatgctgaccctgccctgaatgagctgctggtgtactacctgaaggaccacaccagggtgggcgctgacaccagccaggacatccagctgtttggaattggcatccagccccagcactgtgaaattgacatcgccagtgatggagatgtgaccctgacccccaaggaaaatgcccggagctgtgtgaatggcaccctggtgtgcagcaccacccagctgtggcatggagaccgcatcctgtggggcaacaaccacttcttccgcatcaacctgcccaagaggaagaggcgggactggctgaaggactttgagaaggagactggacctcctgagcatgacctggatgctgccagcgaggccagcagcgagccagactacaactatgaatttgcccagatggaggtgatcatgaagaccctgaacagcaatgaccctgtgcagaatgtggtgcaggtgctggagaagcagtacctggaggagaagaggtctgccctggaggagcagaggctgatgtatgaaagagagctggagcagctgcggcagcagctgagcccagaccggcagccccagagcagcggccctgaccggctggcctacagcagccagacagcccagcagaaggtgacccagtgggccgaggagagagatgagctgttccggcagagcctggccaagctgcgggagcagctggtgaaggccaacaccctggtgcgggaggccaacttcctggccgaggagatgagcaagctgacagactaccaggtgaccctgcagatcccagctgccaacctgagcgccaacaggaagagaggagccatcgtgtctgagcccgccatccaggtgcggaggaagggcaagagcacccaggtgtggaccatcgagaagctggagaacaagctgattgacatgagggacctgtaccaggagtggaaggagaaggtgcctgaggccaagaggctgtatggcaagagaggagaccccttctatgaggcccaggagaaccacaacctgattggagtggccaacgtgttcctggagtgcctcttctgtgatgtgaagctgcagtatgctgtgcccatcatcagccagcagggcgaggtggccggccgcctgcacgtggaggtgatgagggtgactggagctgtgcctgagcgggtggtggaggatgacagcagcgagaacagcagcgagagcggcagcctggaggtggtggacagcagtggagagatcatccaccgggtgaagaagctgacctgccgggtgaagatcaaggaggccaccggcctgcccctgaacctgagcaactttgtgttctgccagtacaccttctgggaccagtgtgagagcacagtggccgcccctgtggtggaccctgaggtgcccagcccccagagcaaggatgcccagtacacagtgaccttcagccactgcaaggactatgtggtgaatgtgacagaggagttcctggagttcatcagtgatggagccctggccatcgaggtgtggggccaccgctgtgctggaaatggcagcagcatctgggaggtggacagcctgcacgccaagaccaggaccctgcatgaccgctggaatgaggtgaccaggagaattgagatgtggatcagcatcctggagctgaatgagctgggggagtatgctgctgtggagctgcaccaggccaaggatgtgaacacaggaggcatcttccagctgcggcagggccacagcagaagagtgcaggtgacagtgaagcctgtgcagcacagcggcaccctgcccctgatggtggaggccatcctgtctgtgtccatcggctgtgtgacagcccggagcaccaagctgcagaggggcctggacagctaccagagagatgatgaagatggagatgacatggacagctaccaggaggaggacctgaactgtgtgcgggagcgctggagcgatgccctgatcaagagaagagagtacctggatgagcagatcaagaaggtgagcaacaagacagagaagacagaagatgatgtggagcgggaggcccagctggtggagcagtgggtgggcctgacagaggagagaaatgctgtgctggtgcctgcccctggcagcggcatccctggggccccagctgactggatccccccacctggcatggagacccacatccctgtgctcttcctggacctgaatgctgatgacctgagcgccaatgagcagctggtgggcccccacgccagcggcgtgaacagcatcctgcccaaggagcacggcagccagttcttctacctgcccatcatcaagcacagtgatgatgaggtgtctgccacagcctcctgggacagctctgtgcatgattctgtgcacctgaacagagtgaccccccagaatgaaagaatctacctgattgtgaagaccaccgtgcagctgagccaccctgctgccatggagctggtgctgaggaagagaattgctgccaacatctacaacaagcagagcttcacccagagcctgaagaggcgcatcagcctgaagaacatcttctacagctgtggggtgacctatgaaattgtgagcaacatccccaaggccacagaggagattgaagatcgggagaccctggccctgctggccgcccggagtgaaaatgaaggcaccagtgatggagagacctacatcgagaagtacacccggggcgtgctgcaggtggagaacatcctgagcctggagcggctgcggcaggccgtgacagtgaaggaggccctgagcaccaaggcccggcacatccgccgcagcctgagcaccccaaatgtgcacaacgtgagcagcagcaggccagacctgagcggctttgatgaagatgacaagggctggccagagaaccagctggacatgtctgactacagcagcagctaccaggatgtggcctgctacggcaccctgccccgggacagccccaggaggaacaaggagggctgcaccagcgagacccctcatgccctgactgtgagccccttcaaggccttcagcccccagccccccaagttcttcaagcccctgatgcctgtgaaggaggagcacaagaagagaattgccctggaggcccggcccctgctgagccaggaggacagcgaggaggaggagaatgagctggaggccatcaacaggaagctgatcagcagccagccctacgtgcctgtggagtttgctgacttctctgtgtacaatgccagcctggagaaccgggagtggttcagcagcaaggtggacctgagcaacagccgggtgctggagaaggaggtgagccgcagccccaccaccagcagcatcaccagcggctacttcagccacagcgccagcaatgccaccctgagtgacatggtggtgcccagcagtgacagcagtgaccagctggccatccagaccaaggatgctgacagcacagagcacagcacccccagcctggtgcatgacttccggcccagcagcaacaaggagctgacagaggtggagaagggcctggtgaaggacaagatcatcgtggtgcccctgaaggagaacagcgccctggccaagggcagccccagcagccagagcatccctgagaagaacagcaagagcctgtgcaggacaggcagctgcagcgagctggatgcctgccccagcaagatcagccagcctgcccggggcttctgcccccgggaggtgacagtggagcacaccaccaacatcctggaggaccacagcttcacagagttcatgggcgtgtctgagggcaaggactttgatggcctgacagacagcagcgctggggagctgagcagccgccgcagcctgcccaacaagacaggaggcaagacagtgtctgatggcctgcaccaccccagccagctgcacagcaagctggagaatgaccaggtgatcatccctgaggccgccttctgggtgctgtgctgccagtag

SEQ ID NO: 157013 - DNA, 5313 bp, synthetic construct
  misc_feature 1..5313: note = Description of Artificial Sequence: Synthetic coding sequence
  source 1..5313: mol_type = other DNA
atgtctgacaccaaggtgaaggtggccgtgcgggtgcggcccatgaacagaagagagctggagctgaacaccaagtgtgtggtggagatggagggcaaccagacagtgctgcaccccccacccagcaacaccaagcagggcgagaggaagccacccaaggtgtttgcctttgactactgcttctggagcatggatgagagcaacaccaccaagtatgccggccaggaggtggtgttcaagtgcctgggggagggcatcctggagaaggccttccagggctacaatgcctgcatctttgcctacggccagacaggcagcggcaagagcttctccatgatgggccacgccgagcagctgggcctcatcccccggctgtgctgtgccctcttcaagaggatcagcctggagcagaatgaaagccagaccttcaaggtggaggtgtcctacatggagatctacaatgagaaggtgcgggacctgctggaccccaagggcagccggcagagcctgaaggtgcgggagcacaaggtgctgggcccctacgtggatggcctgagccagctggccgtgaccagctttgaggacatcgagagcctgatgtctgagggcaacaagagcaggacagtggccgccaccaacatgaatgaggagagcagccgcagccatgctgtgttcaacatcatcatcacccagaccctgtatgacctgcagagcggcaacagcggggagaaggtgtccaaggtgtccctggtggacctggccggcagcgagcgggtgtccaagacaggagctgctggggagcggctgaaggagggcagcaacatcaacaagagcctgaccaccctgggcctggtgatcagcagcctggccgaccaggccgccggcaagggcaagagcaagtttgtgccctacagagattctgtgctgacctggctgctgaaggacaacctgggcggcaacagccagacctccatgattgccaccatcagccctgctgctgacaactatgaggagaccctgagcaccctgcgctatgctgaccgggccaagagaattgtgaaccacgctgtggtgaatgaagaccccaatgccaaggtgatccgggagctgcgggaggaggtggagaagctgcgggagcagctgagccaggccgaggccatgaaggcccctgagctgaaggagaagctggaggagagcgagaagctgatcaaggagctgactgtgacctgggaggagaagctgaggaagacagaggagatcgcccaggagcggcagaggcagctggagagcatgggcatcagcctggagatgagcggcatcaaggtgggagatgacaagtgctacctggtgaacctgaatgctgaccctgccctgaatgagctgctggtgtactacctgaaggaccacaccagggtgggcgctgacaccagccaggacatccagctgtttggaattggcatccagccccagcactgtgaaattgacatcgccagtgatggagatgtgaccctgacccccaaggaaaatgcccggagctgtgtgaatggcaccctggtgtgcagcaccacccagctgtggcatggagaccgcatcctgtggggcaacaaccacttcttccgcatcaacctgcccaagaggaagaggcgggactggctgaaggactttgagaaggagactggacctcctgagcatgacctggatgctgccagcgaggccagcagcgagccagactacaactatgaatttgcccagatggaggtgatcatgaagaccctgaacagcaatgaccctgtgcagaatgtggtgcaggtgctggagaagcagtacctggaggagaagaggtctgccctggaggagcagaggctgatgtatgaaagagagctggagcagctgcggcagcagctgagcccagaccggcagccccagagcagcggccctgaccggctggcctacagcagccagacagcccagcagaaggtgacccagtgggccgaggagagagatgagctgttccggcagagcctggccaagctgcgggagcagctggtgaaggccaacaccctggtgcgggaggccaacttcctggccgaggagatgagcaagctgacagactaccaggtgaccctgcagatcccagctgccaacctgagcgccaacaggaagagaggagccatcgtgtctgagcccgccatccaggtgcggaggaagggcaagagcacccaggtgtggaccatcgagaagctggagaacaagctgattgacatgagggacctgtaccaggagtggaaggagaaggtgcctgaggccaagaggctgtatggcaagagaggagaccccttctatgaggcccaggagaaccacaacctgattggagtggccaacgtgttcctggagtgcctcttctgtgatgtgaagctgcagtatgctgtgcccatcatcagccagcagggcgaggtggccggccgcctgcacgtggaggtgatgagggtgactggagctgtgcctgagcgggtggtggaggatgacagcagcgagaacagcagcgagagcggcagcctggaggtggtggacagcagtggagagatcatccaccgggtgaagaagctgacctgccgggtgaagatcaaggaggccaccggcctgcccctgaacctgagcaactttgtgttctgccagtacaccttctgggaccagtgtgagagcacagtggccgcccctgtggtggaccctgaggtgcccagcccccagagcaaggatgcccagtacacagtgaccttcagccactgcaaggactatgtggtgaatgtgacagaggagttcctggagttcatcagtgatggagccctggccatcgaggtgtggggccaccgctgtgctggaaatggcagcagcatctgggaggtggacagcctgcacgccaagaccaggaccctgcatgaccgctggaatgaggtgaccaggagaattgagatgtggatcagcatcctggagctgaatgagctgggggagtatgctgctgtggagctgcaccaggccaaggatgtgaacacaggaggcatcttccagctgcggcagggccacagcagaagagtgcaggtgacagtgaagcctgtgcagcacagcggcaccctgcccctgatggtggaggccatcctgtctgtgtccatcggctgtgtgacagcccggagcaccaagctgcagaggggcctggacagctaccagagagatgatgaagatggagatgacatggacagctaccaggaggaggacctgaactgtgtgcgggagcgctggagcgatgccctgatcaagagaagagagtacctggatgagcagatcaagaaggtgagcaacaagacagagaagacagaagatgatgtggagcgggaggcccagctggtggagcagtgggtgggcctgacagaggagagaaatgctgtgctggtgcctgcccctggcagcggcatccctggggccccagctgactggatccccccacctggcatggagacccacatccctgtgctcttcctggacctgaatgctgatgacctgagcgccaatgagcagctggtgggcccccacgccagcggcgtgaacagcatcctgcccaaggagcacggcagccagttcttctacctgcccatcatcaagcacagtgatgatgaggtgtctgccacagcctcctgggacagctctgtgcatgattctgtgcacctgaacagagtgaccccccagaatgaaagaatctacctgattgtgaagaccaccgtgcagctgagccaccctgctgccatggagctggtgctgaggaagagaattgctgccaacatctacaacaagcagagcttcacccagagcctgaagaggcgcatcagcctgaagaacatcttctacagctgtggggtgacctatgaaattgtgagcaacatccccaaggccacagaggagattgaagatcgggagaccctggccctgctggccgcccggagtgaaaatgaaggcaccagtgatggagagacctacatcgagaagtacacccggggcgtgctgcaggtggagaacatcctgagcctggagcggctgcggcaggccgtgacagtgaaggaggccctgagcaccaaggcccggcacatccgccgcagcctgagcaccccaaatgtgcacaacgtgagcagcagcaggccagacctgagcggctttgatgaagatgacaagggctggccagagaaccagctggacatgtctgactacagcagcagctaccaggatgtggcctgctacggcaccctgccccgggacagccccaggaggaacaaggagggctgcaccagcgagacccctcatgccctgactgtgagccccttcaaggccttcagcccccagccccccaagttcttcaagcccctgatgcctgtgaaggaggagcacaagaagagaattgccctggaggcccggcccctgctgagccaggaggacagcgaggaggaggagaatgagctggaggccatcaacaggaagctgatcagcagccagccctacgtgcctgtggagtttgctgacttctctgtgtacaatgccagcctggagaaccgggagtggttcagcagcaaggtggacctgagcaacagccgggtgctggagaaggaggtgagccgcagccccaccaccagcagcatcaccagcggctacttcagccacagcgccagcaatgccaccctgagtgacatggtggtgcccagcagtgacagcagtgaccagctggccatccagaccaaggatgctgacagcacagagcacagcacccccagcctggtgcatgacttccggcccagcagcaacaaggagctgacagaggtggagaagggcctggtgaaggacaagatcatcgtggtgcccctgaaggagaacagcgccctggccaagggcagccccagcagccagagcatccctgagaagaacagcaagagcctgtgcaggacaggcagctgcagcgagctggatgcctgccccagcaagatcagccagcctgcccggggcttctgcccccgggaggtgacagtggagcacaccaccaacatcctggaggaccacagcttcacagagttcatgggcgtgtctgagggcaaggactttgatggcctgacagacagcagcgctggggagctgagcagccgccgcagcctgcccaacaagacaggaggcaagacagtgtctgatggcctgcaccaccccagccagctgcacagcaagctggagaatgaccaggtgatcatccctgaggccgccttctgggtgctgtgctgccagtag

SEQ ID NO: 157014 - DNA, 5274 bp, synthetic construct
  misc_feature 1..5274: note = Description of Artificial Sequence: Synthetic coding sequence
  source 1..5274: mol_type = other DNA
atgtctgacaccaaggtgaaggtggccgtgcgggtgcggcccatgaacagaagagagctggagctgaacaccaagtgtgtggtggagatggagggcaaccagacagtgctgcaccccccacccagcaacaccaagcagggcgagaggaagccacccaaggtgtttgcctttgactactgcttctggagcatggatgagagcaacaccaccaagtatgccggccaggaggtggtgttcaagtgcctgggggagggcatcctggagaaggccttccagggctacaatgcctgcatctttgcctacggccagacaggcagcggcaagagcttctccatgatgggccacgccgagcagctgggcctcatcccccggctgtgctgtgccctcttcaagaggatcagcctggagcagaatgaaagccagaccttcaaggtggaggtgtcctacatggagatctacaatgagaaggtgcgggacctgctggaccccaagggcagccggcagagcctgaaggtgcgggagcacaaggtgctgggcccctacgtggatggcctgagccagctggccgtgaccagctttgaggacatcgagagcctgatgtctgagggcaacaagagcaggacagtggccgccaccaacatgaatgaggagagcagccgcagccatgctgtgttcaacatcatcatcacccagaccctgtatgacctgcagagcggcaacagcggggagaaggtgtccaaggtgtccctggtggacctggccggcagcgagcgggtgtccaagacaggagctgctggggagcggctgaaggagggcagcaacatcaacaagagcctgaccaccctgggcctggtgatcagcagcctggccgaccaggccgccggcaagggcaagagcaagtttgtgccctacagagattctgtgctgacctggctgctgaaggacaacctgggcggcaacagccagacctccatgattgccaccatcagccctgctgctgacaactatgaggagaccctgagcaccctgcgctatgctgaccgggccaagagaattgtgaaccacgctgtggtgaatgaagaccccaatgccaaggtgatccgggagctgcgggaggaggtggagaagctgcgggagcagctgagccaggccgaggccatgaaggcccctgagctgaaggagaagctggaggagagcgagaagctgatcaaggagctgactgtgacctgggaggagaagctgaggaagacagaggagatcgcccaggagcggcagaggcagctggagagcatgggcatcagcctggagatgagcggcatcaaggtgggagatgacaagtgctacctggtgaacctgaatgctgaccctgccctgaatgagctgctggtgtactacctgaaggaccacaccagggtgggcgctgacaccagccaggacatccagctgtttggaattggcatccagccccagcactgtgaaattgacatcgccagtgatggagatgtgaccctgacccccaaggaaaatgcccggagctgtgtgaatggcaccctggtgtgcagcaccacccagctgtggcatggagaccgcatcctgtggggcaacaaccacttcttccgcatcaacctgcccaagaggaagaggcgggactggctgaaggactttgagaaggagactggacctcctgagcatgacctggatgctgccagcgaggccagcagcgagccagactacaactatgaatttgcccagatggaggtgatcatgaagaccctgaacagcaatgaccctgtgcagaatgtggtgcaggtgctggagaagcagtacctggaggagaagaggtctgccctggaggagcagaggctgatgtatgaaagagagctggagcagctgcggcagcagctgagcccagaccggcagccccagagcagcggccctgaccggctggcctacagcagccagacagcccagcagaaggtgacccagtgggccgaggagagagatgagctgttccggcagagcctggccaagctgcgggagcagctggtgaaggccaacaccctggtgcgggaggccaacttcctggccgaggagatgagcaagctgacagactaccaggtgaccctgcagatcccagctgccaacctgagcgccaacaggaagagaggagccatcgtgtctgagcccgccatccaggtgcggaggaagggcaagagcacccaggtgtggaccatcgagaagctggagaacaagctgattgacatgagggacctgtaccaggagtggaaggagaaggtgcctgaggccaagaggctgtatggcaagagaggagaccccttctatgaggcccaggagaaccacaacctgattggagtggccaacgtgttcctggagtgcctcttctgtgatgtgaagctgcagtatgctgtgcccatcatcagccagcagggcgaggtggccggccgcctgcacgtggaggtgatgagggtgactggagctgtgcctgagcgggtggtggaggatgacagcagcgagaacagcagcgagagcggcagcctggaggtggtggacagcagtggagagatcatccaccgggtgaagaagctgacctgccgggtgaagatcaaggaggccaccggcctgcccctgaacctgagcaactttgtgttctgccagtacaccttctgggaccagtgtgagagcacagtggccgcccctgtggtggaccctgaggtgcccagcccccagagcaaggatgcccagtacacagtgaccttcagccactgcaaggactatgtggtgaatgtgacagaggagttcctggagttcatcagtgatggagccctggccatcgaggtgtggggccaccgctgtgctggaaatggcagcagcatctgggaggtggacagcctgcacgccaagaccaggaccctgcatgaccgctggaatgaggtgaccaggagaattgagatgtggatcagcatcctggagctgaatgagctgggggagtatgctgctgtggagctgcaccaggccaaggatgtgaacacaggaggcatcttccagctgcggcagggccacagcagaagagtgcaggtgacagtgaagcctgtgcagcacagcggcaccctgcccctgatggtggaggccatcctgtctgtgtccatcggctgtgtgacagcccggagcaccaagctgcagaggggcctggacagctaccaggaggaggacctgaactgtgtgcgggagcgctggagcgatgccctgatcaagaggcgggagtacctggatgagcagatcaagaaggtgagcaacaagacagagaagacagaagatgatgtggagcgggaggcccagctggtggagcagtgggtgggcctgacagaggagagaaatgctgtgctggtgcctgcccctggcagcggcatccctggggccccagctgactggatccccccacctggcatggagacccacatccctgtgctcttcctggacctgaatgctgatgacctgagcgccaatgagcagctggtgggcccccacgccagcggcgtgaacagcatcctgcccaaggagcacggcagccagttcttctacctgcccatcatcaagcacagtgatgatgaggtgtctgccacagcctcctgggacagctctgtgcatgacagcgtgcacctgaacagagtgaccccccagaatgaaagaatctacctgattgtgaagaccaccgtgcagctgagccaccctgctgccatggagctggtgctgaggaagagaattgctgccaacatctacaacaagcagagcttcacccagagcctgaagaggcgcatcagcctgaagaacatcttctacagctgtggggtgacctatgagatcgtgagcaacatccccaaggccacagaggagattgaggaccgggagaccctggccctgctggccgcccggagtgaaaatgaaggcaccagtgatggagagacctacatcgagaagtacacccggggcgtgctgcaggtggagaacatcctgagcctggagcggctgcggcaggccgtgacagtgaaggaggccctgagcaccaaggcccggcacatcagaagaagcctgagcacccccaacgtgcacaacgtgagcagcagcaggccagacctgagcggctttgatgaagatgacaagggctggccagagaaccagctggacatgtctgactacagcagcagctaccaggatgtggcctgctacggcaccctgccccgggacagccccaggaggaacaaggagggctgcaccagcgagaccccccacgccctgactgtgagccccttcaaggccttcagcccccagccccccaagttcttcaagcccctgatgcctgtgaaggaggagcacaagaagagaattgccctggaggcccggcccctgctgagccaggaggacagcgaggaggaggagaatgagctggaggccatcaacaggaagctgatcagcagccagccctacgtgcctgtggagtttgctgacttctctgtgtacaatgccagcctggagaaccgggagtggttcagcagcaaggtggacctgagcaacagccgggtgctggagaaggaggtgagccgcagccccaccaccagcagcatcaccagcggctacttcagccacagcgccagcaatgccaccctgagtgacatggtggtgcccagcagtgacagcagtgaccagctggccatccagaccaaggatgctgacagcacagagcacagcacccccagcctggtgcatgacttccggcccagcagcaacaaggagctgacagaggtggagaagggcctggtgaaggacaagatcatcgtggtgcccctgaaggaaaattctgccctggccaagggcagccccagcagccagagcatccctgagaagaacagcaagagcctgtgcaggacaggcagctgcagcgagctggatgcctgccccagcaagatcagccagcctgcccggggcttctgcccccgggaggtgacagtggagcacaccaccaacatcctggaggaccacagcttcacagagttcatgggcgtgtctgagggcaaggactttgatggcctgacagacagcagcgctggggagctgagcagcagaagaagcctgcccaacaagacaggaggcaagacagtgtctgatggcctgcaccaccccagccagctgcacagcaagctggagaatgaccaggtgatcatccctgaggccgccttctgggtgctgtgctgccagtag

SEQ ID NO: 157015 - DNA, 213 bp, synthetic construct
  misc_feature 1..213: note = Description of Artificial Sequence: Synthetic coding sequence
  source 1..213: mol_type = other DNA
atgtctgacaccaaggtgaaggtggccgtgcgggtgcggcccatgaacagaagagagctggagctgaacaccaagtgtgtggtggagatggagggcaaccagacagtgctgcaccccccacccagcaacaccaagcagggcgagcggctggtgacagtggcccacatcagcaacagcagcaccctgggcggccagggcaagaggatcacctag

SEQ ID NO: 157016 - DNA, 1038 bp, synthetic construct
  misc_feature 1..1038: note = Description of Artificial Sequence: Synthetic coding sequence
  source 1..1038: mol_type = other DNA
atgcccaagctgctgaagagcctcttccctgtgagagatgagaagaggggcaagaggcccagccccctggcccaccaggcccagcctgagatgggcccagatgtgctggtgcagaccatgggcgccccagccctgaagatctgtgacaagccagccaaggtgcccagccccccacctgtgattgctgtgacagctgtgaccccagcccctgaggcccaggacggcccccccagccccctgtctgaggccagcagcggctacttcagccacagcgtgtccacagccaccctgagtgatgccctgggccctggcctggatgctgctgcccctcctggctccatgcccacagcccctgaggccgagcctgaggcccccatcagccaccccccaccacccacagctgtgcctgctgaggagcccccaggcccccagcagctggtgtccccaggccgggagaggccagacctggaggccccagcccctggcagccccttccgggtgcggcgggtgcgggccagcgagctgcgctccttcagcaggatgctggccggggaccccggctgcagccctggagctgagggcaatgccccagcccctggagctgggggccaggccctggccagtgacagcgaggaggctgatgaggtgcctgagtggctgcgggagggggagtttgtgacagtgggcgcccacaagacaggagtggtgcgctacgtgggccctgctgacttccaggagggcacctgggtgggcgtggagctggacctgcccagcggcaagaatgatggcagcattggaggcaagcagtacttccgctgcaaccctggctacggcctgctggtgcggcccagccgggtgagaagagccaccggccctgtgagaagaagaagcacaggcctgcggctgggcgcccctgaggcccggcgcagcgccaccctgagcggcagcgccaccaacctggccagcctgacagctgccctggccaaggctgacaggagccacaagaaccctgagaacaggaagtcctgggccagctag

SEQ ID NO: 157017 - DNA, 5481 bp, synthetic construct
  misc_feature 1..5481: note = Description of Artificial Sequence: Synthetic coding sequence
  source 1..5481: mol_type = other DNA
atgggagacagcaaggtgaaggtggccgtgcgcatccggcccatgaacagaagagaaacagacctgcacaccaagtgtgtggtggatgtggatgccaacaaggtgatcctgaaccctgtgaacaccaacctgagcaaaggagatgcccggggccagcccaaggtgtttgcctatgaccactgcttctggagcatggatgagagcgtgaaggagaagtatgccggccaggacatcgtgttcaagtgcctgggggagaacatcctgcagaatgcctttgatggctacaatgcctgcatctttgcctacggccagacaggcagcggcaagagctacaccatgatgggcacagctgaccagcccggcctcatcccccggctgtgcagcggcctgtttgagaggacccagaaggaggagaatgaggagcagagcttcaaggtggaggtgtcctacatggagatctacaatgagaaggtgcgggacctgctggaccccaagggcagccggcagaccctgaaggtgcgggagcacagcgtgctgggcccctacgtggatggcctgagcaagctggccgtgaccagctacaaggacatcgagagcctgatgtctgagggcaacaagagcaggacagtggccgccaccaacatgaatgaggagagcagccgcagccatgctgtgttcaagatcaccctgacccacaccctgtatgatgtgaagagcggcaccagcggggagaaggtgggcaagctgagcctggtggacctggccggcagcgagcgggccaccaagacaggagctgctggggaccggctgaaggagggcagcaacatcaacaagagcctgaccaccctgggcctggtgatcagcgccctggccgaccagagcgctgggaagaacaagaacaagtttgtgccctacagagacagcgtgctgacctggctgctgaaggacagcctgggcggcaacagcaagacagccatggtggccaccgtgtccccagctgctgacaactatgatgagaccctgagcaccctgcgctatgctgaccgggccaagcacatcgtgaaccacgctgtggtgaatgaagaccccaatgcccgcatcatccgggacctgcgggaggaggtggagaagctgcgggagcagctgaccaaggccgaggccatgaagagccctgagctgaaggaccggctggaggagagcgagaagctgatccaggagatgacagtgacctgggaggagaagctgaggaagacagaggagatcgcccaggagcggcagaagcagctggagagcctgggcatcagcctgcagagcagcggcatcaaggtgggagatgacaagtgcttcctggtgaacctgaatgctgaccctgccctgaatgagctgctggtgtactacctgaaggagcacaccctgattggcagcgccaacagccaggacatccagctgtgtggcatgggcatcctgcctgagcactgcatcatcgacatcaccagcgagggccaggtgatgctgaccccccagaagaacaccaggacctttgtgaatggcagctctgtgagcagccccatccagctgcaccacggggaccgcatcctgtggggcaacaaccacttcttccggctgaacctgcccaagaagaagaagaaggccgagcgggaggatgaggaccaggaccccagcatgaagaatgaaaacagcagcgagcagctggatgtggatggagacagcagcagcgaggtgtcctctgaggtgaacttcaactatgaatatgcccagatggaggtgaccatgaaggccctgggcagcaatgaccccatgcagagcatcctgaacagcctggagcagcagcacgaggaggagaagaggtctgccctggagcggcagaggctgatgtatgaacatgagctggagcagctgcggcggcggctgagccctgagaagcagaactgccgctccatggaccgcttctccttccacagccccagcgcccagcagaggctgcggcagtgggccgaggagcgggaggccaccctgaacaacagcctgatgaggctgcgggagcagatcgtgaaggccaacctgctggtgcgggaggccaactacatcgccgaggagctggacaagaggacagagtacaaggtgaccctgcagatcccagccagcagcctggatgccaacaggaagaggggcagcctgctgtctgagcccgccatccaggtgcggaggaagggcaagggcaagcagatctggagcctggagaagctggacaaccggctgctggacatgagggacctgtaccaggagtggaaggaatgtgaggaggacaaccctgtgatccgcagctacttcaagagagctgaccccttctatgatgagcaggagaaccacagcctcatcggcgtggccaacgtgttcctggagagcctcttctatgatgtgaagctgcagtatgctgtgcccatcatcaaccagaagggggaggtggccggccgcctgcacgtggaggtgatgaggctgtctggagatgtgggggagagaattgctggaggagatgaggtggccgaggtgtcctttgagaaggagacccaggagaacaagctggtgtgcatggtgaagatcctgcaggccaccggcctgccccagcacctgagccactttgtgttctgcaagtacagcttctgggaccagcaggagcccgtcatcgtggcccctgaggtggacaccagcagcagctctgtgtccaaggagccccactgcatggtggtgtttgaccactgcaatgagttctctgtgaacatcacagaggacttcatcgagcacctgtctgagggcgccctggccatcgaggtgtatggccacaagatcaatgaccccaggaagaacccagccctgtgggacctgggcatcatccaggccaagaccaggagcctgcgggaccgctggagcgaggtgaccaggaagctggagttctgggtgcagatcctggagcagaatgaaaatggagagtactgccctgtggaggtgatcagcgccaaggatgtgcccactggaggcatcttccagctgcggcagggccagagcagaagagtgcaggtggaggtgaagtctgtgcaggagagcggcaccctgcccctgatggaggagtgcatcctgtctgtgggcatcggctgtgtgaaggtgcggcccctgcgggcccccaggacccatgagaccttccacgaggaggaggaggacatggacagctaccaggaccgggacctggagcggctgcggaggaagtggctgaatgccctgaccaagaggcaggagtacctggaccagcagctgcagaagctggtgtccaagagggacaagacagaagatgatgctgaccgggaggcccagctgctggagatgaggctgaccctgacagaggagagaaatgctgtgatggtgcccagcgctggcagcggcatccctggggccccagctgagtggacccctgtgcccggcatggagacccacatccctgtgatcttcctggacctgaatgctgatgacttcagcagccaggacaacctggatgatcctgaggccggcggctgggatgccaccctgactggagaggaggaggaggagttctttgagctgcagatcgtgaagcagcatgatggagaggtgaaggccgaggcctcctgggacagcgctgtgcacggctgcccccagctgagccggggcacccctgtggatgagcggctcttcctgattgtgcgggtgacagtgcagctgagccaccctgctgacatgcagctggtgctgaggaagaggatctgtgtgaatgtgcacggccggcagggctttgcccagagcctgctgaagaagatgagccacaggagcagcatccctggctgcggcgtgacctttgagatcgtgagcaacatcccagaagatgcccagggcgtggaggagcgggaggccctggccaggatggccgccaacgtggagaacccagccagcgctgacagcgaggcctacatcgagaagtacctgcggtctgtgctggccgtggagaacctgctgaccctggaccggctgcggcaggaggtggccgtgaaggagcagctgaccgggaagggcaagctgagcagaagaagcatcagcagccccaacgtgaaccggctgagcggcagccggcaggacctgatccccagctacagcctgggcagcaacaagggccgctgggagagccagcaggatgtgtcccagaccaccgtgtcccggggcatcgccccagccccagccctgtctgtgagcccccagaacaaccacagcccagaccccggcctgagcaacctggccgccagctacctgaaccctgtgaagagctttgtgccccagatgcccaagctgctgaagagcctcttccctgtgagagatgagaagaggggcaagaggcccagccccctggcccaccagcctgtgccccgcatcatggtgcagagcgccagcccagacatccgggtgaccaggatggaggaggcccagcctgagatgggcccagatgtgctggtgcagaccatgggcgccccagccctgaagatctgtgacaagccagccaaggtgcccagccccccacctgtgattgctgtgacagctgtgaccccagcccctgaggcccaggacggcccccccagccccctgtctgaggccagcagcggctacttcagccacagcgtgtccacagccaccctgagtgatgccctgggccctggcctggatgctgctgcccctcctggctccatgcccacagcccctgaggccgagcctgaggcccccatcagccaccccccaccacccacagctgtgcctgctgaggagcccccaggcccccagcagctggtgtccccaggccgggagaggccagacctggaggccccagcccctggcagccccttccgggtgagaagagtgcgggccagcgagctgcggagcttcagcaggatgctggccggggaccccggctgcagccctggagctgagggcaatgccccagcccctggggccggcggccaggccctggccagtgacagcgaggaggctgatgaggtgcctgagtggctgcgggagggggagtttgtgacagtgggcgcccacaagacaggagtggtgcgctacgtgggccctgctgacttccaggagggcacctgggtgggcgtggagctggacctgcccagcggcaagaatgatggcagcatcggcggcaagcagtacttccgctgcaaccctggctacggcctgctggtgcggcccagccgggtgcggcgggccactggacctgtgagaagaagaagcacaggcctgcggctgggcgcccctgaggccaggagaagtgccaccctgagcggcagcgccaccaacctggccagcctgacagctgccctggccaaggctgacaggagccacaagaacccagaaaataggaagtcctgggccagctag

SEQ ID NO: 157018 - DNA, 4947 bp, synthetic construct
  misc_feature 1..4947: note = Description of Artificial Sequence: Synthetic coding sequence
  source 1..4947: mol_type = other DNA
atgagcctgcacagcacccacaacagaaacaacagcggggacatcctggacatccccagcagccagaacagcagcagcctgaatgccctgacccacagcagccggctgaagctgcacctgaagagtgacatgtctgaatgtgaaaatgatgaccccctgctgcggtctgctgggaaggtgcgggacatcaacagaacctacgtgatcagcgccagcaggaagacagctgacatgcccctgacccccaaccctgtgggccgcctggccctgcagaggaggaccaccaggaacaaggagagcagcctgctggtgtctgagctggaggacaccacagagaagacagctgagacccggctgaccctgcagaggcgggccaagacagattctgctgagaagtggaagacagctgagattgacagcgtgaagatgaccctgaatgtgggcggggagacagagaacaacggggtgtccaaggagagcaggaccaacgtgcgcatcgtgaacaatgccaagaacagctttgtggccagctctgtgcccctggatgaggacccccaggtgattgagatgatggctgacaagaagtacaaggagaccttcagcgcccccagccgggccaatgaaaatgtggccctgaagtacagcagcaacagaccacccatcgccagcctgagccagacagaggtggtgcgcagcggccacctgaccaccaagcccacccagagcaagctggacatcaaggtgctgggcactggaaacctgtaccacaggagcatcggcaaggagatcgccaagaccagcaacaagtttggcagcctggagaagaggacccccaccaagtgcaccacagagcacaagctgaccaccaagtgcagcctgccccagctgaagagccctgcccccagcatcctgaagaacaggatgagcaacctgcaggtgaagcagaggcccaagagcagcttcctggccaacaagcaggagaggtctgctgagaacaccatcctgcctgaggaggagaccgtggtgcagaacaccagcgctgggaaggaccccctgaaggtggagaacagccaggtgacagtggccgtgcgggtgcggcccttcaccaagcgggagaagattgagaaggccagccaggtggtgttcatgtctgggaaggagatcaccgtggagcacccagacaccaagcaggtgtacaacttcatctatgatgtgtccttctggagctttgatgagtgccacccccactacgccagccagaccaccgtgtatgagaagctggccgcccccctgctggagcgggcctttgagggcttcaacacctgcctgtttgcctacggccagacaggcagcggcaagagctacaccatgatgggcttcagcgaggagcccggcatcatcccccgcttctgtgaggacctcttcagccaggtggccaggaagcagacccaggaggtgtcctaccacatcgagatgtccttctttgaggtgtacaatgagaagatccatgacctgctggtgtgcaaggatgaaaatggccagaggaagcagcccctgcgggtgcgggagcaccctgtgtatggcccctacgtggaggccctgtccatgaacatcgtgtcctcctatgctgacatccagagctggctggagctgggcaacaagcagagggccacagctgccaccggcatgaatgacaagagcagccgcagccacagcgtcttcaccctggtgatgacccagaccaagacagaatttgtggagggggaggagcatgaccaccgcatcaccagccgcatcaacctgattgacctggccggcagcgagcgctgcagcacagcccacaccaacggggaccggctgaaggagggcgtgtccatcaacaagagcctgctgaccctgggcaaggtgatcagcgccctgtctgagcaggccaaccagaggagcgtcttcatcccctaccgggagagcgtgctgacctggctgctgaaggagagcctgggcggcaacagcaagacagccatgattgccaccatcagccctgctgccagcaacatcgaggagaccctgagcaccctgcgctatgccaaccaggcccggctgattgtgaacatcgccaaggtgaatgaagacatgaatgccaagctgatccgggagctgaaggccgagatcgccaagctgaaggccgcccagaggaacagcaggaacatcgaccctgagcgctaccgcctgtgccggcaggagatcaccagcctgaggatgaagctgcaccagcaggagcgggacatggccgagatgcagagggtgtggaaggagaagtttgagcaggccgagaagaggaagctgcaggagaccaaggagctgcagaaggccggcatcatgttccagatggacaaccacctgcccaacctggtgaacctgaatgaagacccccagctgtctgagatgctgctgtacatgatcaaggagggcaccaccaccgtgggcaagtacaagcccaacagcagccatgacatccagctgtctggagtgctgattgctgatgaccactgcaccatcaagaactttggaggcaccgtgtccatcatccctgtgggggaggccaagacctacgtgaatggcaagcacatcctggagatcaccgtgctgcggcacggggacagagtcatcctgggcggggaccactacttccgcttcaaccaccctgtggaggtgcagaagggcaagaggccttctggccgggacacccccatcagcgagggccccaaggactttgaatttgccaagaatgagctgctgatggcccagaggagccagctggaggccgagatcaaggaggcccagctgaaggccaaggaggagatgatgcagggcatccagatcgccaaggagatggcccagcaggagctgagcagccagaaggccgcctatgagagcaagatcaaggccctggaggccgagctgcgggaggagagccagaggaagaagatgcaggagatcaacaaccagaaggccaaccacaagattgaggagctggagaaggccaagcagcacctggagcaggagatctacgtgaacaagaagaggctggagatggagaccctggccaccaagcaggccctggaggaccacagcatcagacatgcccgcatcctggaggccctggagacagagaagcagaagatcgccaaggaggtgcagatcctgcagcagaacagaaacaacagagacaagaccttcaccgtgcagaccacctggagctccatgaagctgtccatgatgatccaggaggccaatgccatcagcagcaagctgaagacctactacgtgtttggaagacatgacatcagtgacaagagcagcagtgacaccagcatccgggtgaggaacctgaagctgggcatcagcaccttctggagcctggagaagtttgagagcaagctggccgccatgaaggagctgtatgagagcaatggcagcaacagaggagaagatgccttctgtgaccctgaagatgagtgggagccagacatcacagatgcccctgtgagcagcctgagcagaagaagaagccgcagcctgatgaagaacagacgcatcagcggctgcctgcatgacatccaggtgcaccccatcaagaacctgcacagcagccacagcagcggcctgatggacaagagcagcaccatctacagcaacagcgctgagagcttcctgcccggcatctgcaaggagctgattggcagcagcctggacttcttcggccagagctatgatgaggagaggaccatcgctgacagcctcatcaacagcttcctgaagatctacaacggcctgtttgccatcagcaaggcccacgaggagcaggatgaggagagccaggacaacctcttcagcagtgaccgggccatccagagcctgaccatccagacagcctgtgcctttgagcagctggtggtgctgatgaagcactggctgagtgacctgctgccctgcaccaacatcgcccggctggaggatgagctgcggcaggaggtgaagaagctgggcggctacctgcagctgttcctgcagggctgctgcctggacatcagctccatgatcaaggaggcccagaagaatgccatccagatcgtgcagcaggccgtgaagtatgtgggccagctggccgtgctgaagggcagcaagctgcacttcctggagaatggaaacaacaaggccgcctctgtgcaggaggagttcatggatgctgtgtgtgatggagtgggcctgggcatgaagatcctgctggacagcggcctggagaaggccaaggagctgcagcacgagctgttccggcagtgcaccaagaatgaggtgaccaaggagatgaagaccaatgccatgggcctcatccgcagcctggagaacatctttgctgagagcaagatcaagagcttccggcggcaggtgcaggaggagaactttgagtaccaggacttcaagaggatggtgaacagagcccctgagttcctgaagctgaagcactgcctggagaaggccatcgagatcatcatcagcgccctgaagggctgccacagcgacatcaacctgctgcagacctgtgtggagagcatccggaacctggccagtgacttctacagcgacttctctgtgcccagcacctctgtgggcagctatgagagccgggtgacccacatcgtgcaccaggagctggagagcctggccaagagcctgctcttctgctttgagagcgaggagagcccagacctgctgaagccctgggagacctacaaccagaacaccaaggaggagcaccagcagagcaagagcagcggcattgatggcagcaagaacaagggcgtgcccaagagggtgtatgagctgcacggcagcagccctgctgtgtccagtgaagaatgtacccccagccgcatccagtgggtgtag

SEQ ID NO: 157019 - DNA, 5073 bp, synthetic construct
  misc_feature 1..5073: note = Description of Artificial Sequence: Synthetic coding sequence
  source 1..5073: mol_type = other DNA
atggccggggcctctgtgaaggtggccgtgcgggtgcggcccttcaacagccgggagatgagccgggacagcaagtgcatcatccagatgagcggcagcaccaccaccatcgtgaaccccaagcagcccaaggagacccccaagagcttctcctttgactacagctactggagccacaccagccctgaggacatcaactatgccagccagaagcaggtgtacagagacattggagaggagatgctgcagcacgcctttgagggctacaacgtgtgcatctttgcctacggccagacaggagctgggaagagctacaccatgatgggcaagcaggagaaggaccagcagggcatcatcccccagctgtgtgaggacctcttcagccgcatcaatgacaccaccaatgacaacatgagctacagcgtggaggtgtcctacatggagatctactgtgagcgggtgcgggacctgctgaaccccaagaacaagggcaacctgcgggtgcgggagcaccccctgctgggcccctacgtggaggacctgagcaagctggccgtgaccagctacaatgacatccaggacctgatggacagcggcaacaaggccaggacagtggccgccaccaacatgaatgagaccagcagccgcagccatgctgtgttcaacatcatcttcacccagaagagacatgatgctgagaccaacatcaccacagagaaggtgtccaagatcagcctggtggacctggccggcagcgagagagctgacagcactggagccaagggcacccggctgaaggagggcgccaacatcaacaagagcctgaccaccctgggcaaggtgatcagcgccctggccgagatggacagcggccccaacaagaacaagaagaagaagaagacagacttcatcccctacagagattctgtgctgacctggctgctgcgggagaacctgggcggcaacagcaggacagccatggtggccgccctgagccctgctgacatcaactatgatgagaccctgagcaccctgcgctatgctgaccgggccaagcagatccgctgcaatgctgtgatcaatgaagaccccaacaacaagctgatccgggagctgaaggatgaggtgacccggctgcgggacctgctgtatgcccagggcctgggggacatcacagacatgaccaatgccctggtgggcatgagccccagcagcagcctgagcgccctgagcagccgggccgcctctgtgagcagcctgcacgagcgcatcctgtttgcccctggcagcgaggaggccatcgagcggctgaaggagacagagaagatcatcgccgagctgaatgagacctgggaggagaagctgcggaggacagaggccatccgcatggagcgggaggccctgctggccgagatgggcgtggccatgagagaagatggcggcaccctgggcgtcttcagccccaagaagaccccccacctggtgaacctgaatgaagaccccctgatgtctgaatgtctgctgtactacatcaaggatggcatcaccagggtgggcagagaagatggagagcggcggcaggacatcgtgctgagcggccacttcatcaaggaggagcactgtgtgttcagaagtgacagcagaggaggcagcgaggccgtggtgaccctggagccctgtgagggcgctgacacctacgtgaatggcaagaaggtgacagagcccagcatcctgcggagcggcaaccgcatcatcatgggcaagagccacgtgttccgcttcaaccaccctgagcaggcccggcaggagcgggagaggaccccctgtgccgagaccccagctgagcctgtggactgggcctttgcccagcgggagctgctggagaagcagggcatcgacatgaagcaggagatggagcagaggctgcaggagctggaggaccagtaccgccgggagcgggaggaggccacctacctgctggagcagcagaggctggactatgagagcaagctggaggccctgcagaagcagatggacagccgctactacccagaggtgaatgaggaggaggaggagccagaagatgaggtgcagtggacagaaagagaatgtgagctggccctgtgggccttcaggaagtggaagtggtaccagttcaccagcctgcgggacctgctgtggggcaatgccatcttcctgaaggaggccaatgccatctctgtggagctgaagaagaaggtgcagttccagtttgtgctgctgacagacaccctgtacagccccctgcccccagacctgctgcccccagaggccgccaaggaccgggagacccggcccttccccaggaccatcgtggccgtggaggtgcaggaccagaagaatggagccacccactactggaccctggagaagctgcggcagaggctggacctgatgagggagatgtatgacagagctgctgaggtgcccagctctgtgattgaggactgtgacaacgtggtgactggaggagaccccttctatgaccgcttcccctggttccggctggtgggccgggcctttgtgtacctgagcaacctgctgtaccctgtgcccctggtgcaccgggtggccatcgtgtctgagaagggggaggtgaagggcttcctgcgggtggccgtgcaggccatctctgcagatgaggaggccccagactatggcagcggcgtgcggcagagcggcacagccaagatcagctttgatgaccagcactttgagaagttccagagcgagagctgccctgtggtgggcatgagccgcagcggcaccagccaggaggagctgagaattgtggagggccagggccagggcgcagatgtgggccccagcgcagatgaggtgaacaacaacacctgcagcgctgtgcccccagagggcctgctgctggacagcagcgagaaggccgccctggatggccccctggatgctgccctggaccacctgcggctgggcaacaccttcaccttccgggtgacagtgctgcaggccagcagcatctctgcagaatatgctgacatcttctgccagttcaacttcatccacagacatgatgaggccttcagcacagagcccctgaagaacacaggccggggcccccccctgggcttctaccacgtgcagaacattgctgtggaggtgaccaagagcttcatcgagtacatcaagagccagcccatcgtgtttgaggtgtttggccactaccagcagcaccccttcccccccctgtgcaaggatgtgctgagccccctgcggcccagccgccgccacttcccccgggtgatgcccctgagcaagcctgtgcctgccaccaagctgagcaccctgacccggccctgccccggcccctgccactgcaagtatgacctgctggtgtactttgagatctgtgagctggaggccaatggagactacatcccagctgtggtggaccacagaggaggcatgccctgcatgggcaccttcctgctgcaccagggcatccagaggcgcatcaccgtgaccctgctgcatgaaacaggcagccacatccgctggaaggaggtgcgggagctggtggtgggccgcatccggaacaccccagagacagatgagagcctgattgaccccaacatcctgagcctgaacatcctgagcagcggctacatccacccagcccaggatgacaggaccttctaccagtttgaggccgcctgggacagctccatgcacaacagcctgctgctgaacagagtgaccccctaccgggagaagatctacatgaccctgagcgcctacatcgagatggagaactgcacccagcctgctgtggtgaccaaggacttctgcatggtgttctacagcagagatgccaagctgcctgccagccgcagcatccggaacctgtttggcagcggcagcctgcgggccagcgagagcaacagagtgactggagtgtatgagctgagcctgtgccacgtggctgatgctggcagccctggcatgcagaggagaagaagaagagtgctggacacctctgtggcctacgtgcggggggaggagaacctggccggctggaggcccaggagtgacagcctcatcctggaccaccagtgggagctggagaagctgagcctgctgcaggaggtggagaagaccaggcactacctgctgctgcgggagaagctggagacagcccagaggcctgtgcctgaggccctgagccctgccttcagcgaggacagcgagagccacggcagcagcagcgccagcagccccctgtctgctgagggccggcccagccccctggaggccccaaatgaaaggcagcgggagctggccgtgaagtgcctgcggctgctgacccacaccttcaaccgggagtacacccacagccacgtgtgtgtgtctgccagcgagagcaagctgtctgagatgtctgtgaccctgctgcgggaccccagcatgagccccctgggcgtggccaccctgacccccagcagcacctgccccagcctggtggagggccgctacggggccacagacctgcggaccccccagccctgcagcaggcctgccagccctgagcctgagctgctgcctgaggccgacagcaagaagctgcccagccctgcccgggccacagaaacagacaaggagccccagaggctgctggtgcctgacatccaggagatccgggtgagccccatcgtgtccaagaagggctacctgcacttcctggagccccacaccagcggctgggccaggagatttgtggtggtgcggcggccctatgcctacatgtacaacagcgacaaggacacagtggagagatttgtgctgaacctggccacagcccaggtggagtacagcgaggaccagcaggccatgctgaagacccccaacacctttgctgtgtgcacagagcaccggggcatcctgctgcaggccgccagtgacaaggacatgcatgactggctgtatgccttcaaccccctgctggccggcaccatccgcagcaagctgagcagaagaagaagtgcccagatgagggtgtag

SEQ ID NO: 157020 - DNA, 5400 bp, synthetic construct
  misc_feature 1..5400: note = Description of Artificial Sequence: Synthetic coding sequence
  source 1..5400: mol_type = other DNA
atggccggggcctctgtgaaggtggccgtgcgggtgcggcccttcaacagccgggagatgagccgggacagcaagtgcatcatccagatgagcggcagcaccaccaccatcgtgaaccccaagcagcccaaggagacccccaagagcttctcctttgactacagctactggagccacaccagccctgaggacatcaactatgccagccagaagcaggtgtacagagacattggagaggagatgctgcagcacgcctttgagggctacaacgtgtgcatctttgcctacggccagacaggagctgggaagagctacaccatgatgggcaagcaggagaaggaccagcagggcatcatcccccagctgtgtgaggacctcttcagccgcatcaatgacaccaccaatgacaacatgagctacagcgtggaggtgtcctacatggagatctactgtgagcgggtgcgggacctgctgaaccccaagaacaagggcaacctgcgggtgcgggagcaccccctgctgggcccctacgtggaggacctgagcaagctggccgtgaccagctacaatgacatccaggacctgatggacagcggcaacaaggccaggacagtggccgccaccaacatgaatgagaccagcagccgcagccatgctgtgttcaacatcatcttcacccagaagagacatgatgctgagaccaacatcaccacagagaaggtgtccaagatcagcctggtggacctggccggcagcgagagagctgacagcactggagccaagggcacccggctgaaggagggcgccaacatcaacaagagcctgaccaccctgggcaaggtgatcagcgccctggccgagatggtgtctggccctgccaggaacaagaagaagaagaagacagacttcatcccctacagagattctgtgctgacctggctgctgcgggagaacctgggcggcaacagcaggacagccatggtggccgccctgagccctgctgacatcaactatgatgagaccctgagcaccctgcgctatgctgaccgggccaagcagatccgctgcaatgctgtgatcaatgaagaccccaacaacaagctgatccgggagctgaaggatgaggtgacccggctgcgggacctgctgtatgcccagggcctgggggacatcacagacaccaacacagtgcctgggggccccaagctgaccaatgccctggtgggcatgagccccagcagcagcctgagcgccctgagcagcagagctgcctctgtgagcagcctgcacgagcgcatcctgtttgcccctggcagcgaggaggccatcgagcggctgaaggagacagagaagatcatcgccgagctgaatgagacctgggaggagaagctgcggaggacagaggccatccgcatggagcgggaggccctgctggccgagatgggcgtggccatgagagaagatggcggcaccctgggcgtcttcagccccaagaagaccccccacctggtgaacctgaatgaagaccccctgatgtctgagtgcctgctgtactacatcaaggatggcatcaccagggtgggccgggaggatggagagcggcggcaggacatcgtgctgagcggccacttcatcaaggaggagcactgtgtgttcagaagtgacagccggggcggcagcgaggccgtggtgaccctggagccctgtgagggcgctgacacctacgtgaatggcaagaaggtgacagagcccagcatcctgcggagcggcaaccgcatcatcatgggcaagagccacgtgttccgcttcaaccaccctgagcaggcccggcaggagcgggagaggaccccctgtgccgagaccccagctgagcctgtggactgggcctttgcccagcgggagctgctggagaagcagggcatcgacatgaagcaggagatggagcagaggctgcaggagctggaggaccagtacagaagagagcgggaggaggccacctacctgctggagcagcagaggctggactatgagagcaagctggaggccctgcagaagcagatggacagccgctactacccagaggtgaatgaggaggaggaggagccagaagatgaggtgcagtggacagagcgggagtgtgagctggccctgtgggccttcaggaagtggaagtggtaccagttcaccagcctgcgggacctgctgtggggcaatgccatcttcctgaaggaggccaatgccatctctgtggagctgaagaagaaggtgcagttccagtttgtgctgctgacagacaccctgtacagccccctgcccccagacctgctgcccccagaggccgccaaggaccgggagacccggcccttccccaggaccatcgtggccgtggaggtgcaggaccagaagaatggagccacccactactggaccctggagaagctgcggcagaggctggacctgatgagggagatgtatgacagagctgctgaggtgcccagctctgtgattgaggactgtgacaacgtggtgactggaggagaccccttctatgaccgcttcccctggttccggctggtgggcagcagcgccatcagcggctgcaacagctaccccctgctgaacacctgcatgtctgagaggatggccgccctgacccccagccccaccttcagcagcccagacagtgatgccacagagcctgctgaggagcagagcgtgggggaggaggaggaggaggaggaggaggaggaggatgaggaggaggaggacctggaggatgatgtgtttcctgagcacgccctgtgtgatggccgggaccccttctatgacaggcctcctctcttcagcctggtgggccgggcctttgtgtacctgagcaacctgctgtaccctgtgcccctggtgcaccgggtggccatcgtgtctgagaagggggaggtgaagggcttcctgcgggtggccgtgcaggccatctctgcagatgaggaggccccagactatggcagcggcgtgcggcagagcggcacagccaagatcagctttgatgaccagcactttgagaagttccagagcgagagctgccctgtggtgggcatgagccgcagcggcaccagccaggaggagctgcgcatcgtggagggccagggccagggcgcagatgtgggccccagcgcagatgaggtgaacaacaacacctgcagcgctgtgcccccagagggcctgctgctggacagcagcgagaaggccgccctggatggccccctggatgctgccctggaccacctgcggctgggcaacaccttcaccttccgggtgacagtgctgcaggccagcagcatctctgcagaatatgctgacatcttctgccagttcaacttcatccacagacatgatgaggccttcagcacagagcccctgaagaacacaggccggggcccccccctgggcttctaccacgtgcagaacattgctgtggaggtgaccaagagcttcatcgagtacatcaagagccagcccatcgtgtttgaggtgtttggccactaccagcagcaccccttcccccccctgtgcaaggatgtgctgagccccctgcggcccagcagaagacacttcccccgggtgatgcccctgagcaagcctgtgcctgccaccaagctgagcaccctgacccggccctgccccggcccctgccactgcaagtatgacctgctggtgtactttgagatctgtgagctggaggccaacggggactacatcccagctgtggtggaccaccggggcggcatgccctgcatgggcaccttcctgctgcaccagggcatccagaggcgcatcaccgtgaccctgctgcacgagaccggcagccacatccgctggaaggaggtgcgggagctggtggtgggccgcatccggaacaccccagagacagatgagagcctgattgaccccaacatcctgagcctgaacatcctgagcagcggctacatccacccagcccaggatgacagagtgtccctgggcaatgacaccaggaccttctaccagtttgaagctgcctgggacagctccatgcacaacagcctgctgctgaacagagtgaccccctaccgggagaagatctacatgaccctgagcgcctacatcgagatggagaactgcacccagcctgctgtggtgaccaaggacttctgcatggtgttctacagcagagatgccaagctgcctgccagccgcagcatccggaacctgtttggaagtggcagcctgcgggccagcgagagcaacagagtgactggagtgtatgagctgagcctgtgccacgtggctgatgctggcagccctggcatgcagaggagaagaagaagagtgctggacacctctgtggcctacgtgcggggggaggagaacctggccggctggaggcccaggagtgacagcctcatcctggaccaccagtgggagctggagaagctgagcctgctgcaggaggtggagaagaccaggcactacctgctgctgcgggagaagctggagacagcccagaggcctgtgcctgaggccctgagccctgccttctctgaagattctgagagccacggcagcagcagcgccagcagccccctgtctgctgagggccggcccagccccctggaggccccaaatgaaaggcagcgggagctggccgtgaagtgcctgcggctgctgacccacaccttcaaccgggagtacacccacagccacgtgtgtgtgtctgccagcgagagcaagctgtctgagatgtctgtgaccctgctgcgggaccccagcatgagccccctgggcgtggccaccctgacccccagcagcacctgccccagcctggtggagggccgctatggagccacagacctgcggaccccccagccctgcagcaggcctgccagccctgagcctgagctgctgcctgaggccgacagcaagaagctgcccagccctgcccgggccacagaaacagacaaggagccccagaggctgctggtgcctgacatccaggagatccgggtgagccccatcgtgtccaagaagggctacctgcacttcctggagccccacaccagcggctgggccaggagatttgtggtggtgagaagaccctatgcctacatgtacaacagcgacaaggacacagtggagagatttgtgctgaacctggccacagcccaggtggagtacagcgaggaccagcaggccatgctgaagacccccaacacctttgctgtgtgcacagagcaccggggcatcctgctgcaggccgccagtgacaaggacatgcatgactggctgtatgccttcaaccccctgctggccggcaccatccgcagcaagctgagcagaagaagaagtgcccagatgagggtgtag

SEQ ID NO: 157021 - DNA, 117 bp, synthetic construct
  misc_feature 1..117: note = Description of Artificial Sequence: Synthetic coding sequence
  source 1..117: mol_type = other DNA
atggccggggcctctgtgaaggtggccgtgcgggtgcggcccttcaacagccgggagatgagccgggacagcaagtgcatcatccagatgagcggcagcaccaccaccatcgtgtag

SEQ ID NO: 157022 - DNA, 5376 bp, synthetic construct
  misc_feature 1..5376: note = Description of Artificial Sequence: Synthetic coding sequence
  source 1..5376: mol_type = other DNA
atggccggggcctctgtgaaggtggccgtgcgggtgcggcccttcaacagccgggagatgagccgggacagcaagtgcatcatccagatgagcggcagcaccaccaccatcgtgaaccccaagcagcccaaggagacccccaagagcttctcctttgactacagctactggagccacaccagccctgaggacatcaactatgccagccagaagcaggtgtacagagacattggagaggagatgctgcagcacgcctttgagggctacaacgtgtgcatctttgcctacggccagacaggagctgggaagagctacaccatgatgggcaagcaggagaaggaccagcagggcatcatcccccagctgtgtgaggacctcttcagccgcatcaatgacaccaccaatgacaacatgagctacagcgtggaggtgtcctacatggagatctactgtgagcgggtgcgggacctgctgaaccccaagaacaagggcaacctgcgggtgcgggagcaccccctgctgggcccctacgtggaggacctgagcaagctggccgtgaccagctacaatgacatccaggacctgatggacagcggcaacaaggccaggacagtggccgccaccaacatgaatgagaccagcagccgcagccatgctgtgttcaacatcatcttcacccagaagagacatgatgctgagaccaacatcaccacagagaaggtgtccaagatcagcctggtggacctggccggcagcgagagagctgacagcactggagccaagggcacccggctgaaggagggcgccaacatcaacaagagcctgaccaccctgggcaaggtgatcagcgccctggccgagatggacagcggccccaacaagaacaagaagaagaagaagacagacttcatcccctacagagattctgtgctgacctggctgctgcgggagaacctgggcggcaacagcaggacagccatggtggccgccctgagccctgctgacatcaactatgatgagaccctgagcaccctgcgctatgctgaccgggccaagcagatccgctgcaatgctgtgatcaatgaagaccccaacaacaagctgatccgggagctgaaggatgaggtgacccggctgcgggacctgctgtatgcccagggcctgggggacatcacagacaccaacacagtgcctgggggccccaagctgaccaatgccctggtgggcatgagccccagcagcagcctgagcgccctgagcagcagagctgcctctgtgagcagcctgcacgagcgcatcctgtttgcccctggcagcgaggaggccatcgagcggctgaaggagacagagaagatcatcgccgagctgaatgagacctgggaggagaagctgcggaggacagaggccatccgcatggagcgggaggccctgctggccgagatgggcgtggccatgagagaagatggcggcaccctgggcgtcttcagccccaagaagaccccccacctggtgaacctgaatgaagaccccctgatgtctgagtgcctgctgtactacatcaaggatggcatcaccagggtgggccgggaggatggagagcggcggcaggacatcgtgctgagcggccacttcatcaaggaggagcactgtgtgttcagaagtgacagccggggcggcagcgaggccgtggtgaccctggagccctgtgagggcgctgacacctacgtgaatggcaagaaggtgacagagcccagcatcctgcggagcggcaaccgcatcatcatgggcaagagccacgtgttccgcttcaaccaccctgagcaggcccggcaggagcgggagaggaccccctgtgccgagaccccagctgagcctgtggactgggcctttgcccagcgggagctgctggagaagcagggcatcgacatgaagcaggagatggagcagaggctgcaggagctggaggaccagtacagaagagagcgggaggaggccacctacctgctggagcagcagaggctggactatgagagcaagctggaggccctgcagaagcagatggacagccgctactacccagaggtgaatgaggaggaggaggagccagaagatgaggtgcagtggacagagcgggagtgtgagctggccctgtgggccttcaggaagtggaagtggtaccagttcaccagcctgcgggacctgctgtggggcaatgccatcttcctgaaggaggccaatgccatctctgtggagctgaagaagaaggtgcagttccagtttgtgctgctgacagacaccctgtacagccccctgcccccagacctgctgcccccagaggccgccaaggaccgggagacccggcccttccccaggaccatcgtggccgtggaggtgcaggaccagaagaatggagccacccactactggaccctggagaagctgcggcagaggctggacctgatgagggagatgtatgacagagctgctgaggtgcccagctctgtgattgaggactgtgacaacgtggtgactggaggagaccccttctatgaccgcttcccctggttccggctggtgggcagcagcgccatcagcggctgcaacagctaccccctgctgaacacctgcatgtctgagaggatggccgccctgacccccagccccaccttcagcagcccagacagtgatgccacagagcctgctgaggagcagagcgtgggggaggaggaggaggaggaggaggaggaggaggatgaggaggaggaggacctggaggatgatgtgtttcctgagcacgccctgtgtgatggccgggaccccttctatgacaggcctcctctcttcagcctggtgggccgggcctttgtgtacctgagcaacctgctgtaccctgtgcccctggtgcaccgggtggccatcgtgtctgagaagggggaggtgaagggcttcctgcgggtggccgtgcaggccatctctgcagatgaggaggccccagactatggcagcggcgtgcggcagagcggcacagccaagatcagctttgatgaccagcactttgagaagttccagagcgagagctgccctgtggtgggcatgagccgcagcggcaccagccaggaggagctgcgcatcgtggagggccagggccagggcgcagatgtgggccccagcgcagatgaggtgaacaacaacacctgcagcgctgtgcccccagagggcctgctgctggacagcagcgagaaggccgccctggatggccccctggatgctgccctggaccacctgcggctgggcaacaccttcaccttccgggtgacagtgctgcaggccagcagcatctctgcagaatatgctgacatcttctgccagttcaacttcatccacagacatgatgaggccttcagcacagagcccctgaagaacacaggccggggcccccccctgggcttctaccacgtgcagaacattgctgtggaggtgaccaagagcttcatcgagtacatcaagagccagcccatcgtgtttgaggtgtttggccactaccagcagcaccccttcccccccctgtgcaaggatgtgctgagccccctgcggcccagcagaagacacttcccccgggtgatgcccctgagcaagcctgtgcctgccaccaagctgagcaccctgacccggccctgccccggcccctgccactgcaagtatgacctgctggtgtactttgagatctgtgagctggaggccaacggggactacatcccagctgtggtggaccaccggggcggcatgccctgcatgggcaccttcctgctgcaccagggcatccagaggcgcatcaccgtgaccctgctgcacgagaccggcagccacatccgctggaaggaggtgcgggagctggtggtgggccgcatccggaacaccccagagacagatgagagcctgattgaccccaacatcctgagcctgaacatcctgagcagcggctacatccacccagcccaggatgacaggaccttctaccagtttgaagctgcctgggacagctccatgcacaacagcctgctgctgaacagagtgaccccctaccgggagaagatctacatgaccctgagcgcctacatcgagatggagaactgcacccagcctgctgtggtgaccaaggacttctgcatggtgttctacagcagagatgccaagctgcctgccagccgcagcatccggaacctgtttggaagtggcagcctgcgggccagcgagagcaacagagtgactggagtgtatgagctgagcctgtgccacgtggctgatgctggcagccctggcatgcagaggagaagaagaagagtgctggacacctctgtggcctacgtgcggggggaggagaacctggccggctggaggcccaggagtgacagcctcatcctggaccaccagtgggagctggagaagctgagcctgctgcaggaggtggagaagaccaggcactacctgctgctgcgggagaagctggagacagcccagaggcctgtgcctgaggccctgagccctgccttctctgaagattctgagagccacggcagcagcagcgccagcagccccctgtctgctgagggccggcccagccccctggaggccccaaatgaaaggcagcgggagctggccgtgaagtgcctgcggctgctgacccacaccttcaaccgggagtacacccacagccacgtgtgtgtgtctgccagcgagagcaagctgtctgagatgtctgtgaccctgctgcgggaccccagcatgagccccctgggcgtggccaccctgacccccagcagcacctgccccagcctggtggagggccgctatggagccacagacctgcggaccccccagccctgcagcaggcctgccagccctgagcctgagctgctgcctgaggccgacagcaagaagctgcccagccctgcccgggccacagaaacagacaaggagccccagaggctgctggtgcctgacatccaggagatccgggtgagccccatcgtgtccaagaagggctacctgcacttcctggagccccacaccagcggctgggccaggagatttgtggtggtgagaagaccctatgcctacatgtacaacagcgacaaggacacagtggagagatttgtgctgaacctggccacagcccaggtggagtacagcgaggaccagcaggccatgctgaagacccccaacacctttgctgtgtgcacagagcaccggggcatcctgctgcaggccgccagtgacaaggacatgcatgactggctgtatgccttcaaccccctgctggccggcaccatccgcagcaagctgagcagaagaagaagtgcccagatgagggtgtag

SEQ ID NO: 157023 - DNA, 5313 bp, synthetic construct
  misc_feature 1..5313: note = Description of Artificial Sequence: Synthetic coding sequence
  source 1..5313: mol_type = other DNA
atgtctggggcctctgtgaaggtggccgtgcgggtgcggcccttcaacagccgggagaccagcaaggagagcaagtgcatcatccagatgcagggcaacagcaccagcatcatcaaccccaagaaccccaaggaggcccccaagagcttctcctttgactacagctactggagccacaccagccctgaggacccctgctttgccagccagaacagagtgtacaatgacatcggcaaggagatgctgctgcacgcctttgagggctacaacgtgtgcatctttgcctacggccagacaggagctgggaagagctacaccatgatgggcaagcaggaggagagccaggccggcatcatcccccagctgtgtgaggagctgtttgagaagatcaatgacaactgcaatgaggagatgagctacagcgtggaggtgtcctacatggagatctactgtgagcgggtgcgggacctgctgaaccccaagaacaagggcaacctgcgggtgcgggagcaccccctgctgggcccctacgtggaggacctgagcaagctggccgtgaccagctacacagacattgctgacctgatggatgctggcaacaaggccaggacagtggccgccaccaacatgaatgagaccagcagccgcagccatgctgtgttcaccatcgtgttcacccagaagaagcatgacaatgagaccaacctgagcacagagaaggtgtccaagatcagcctggtggacctggccggcagcgagagagctgacagcactggagccaagggcacccggctgaaggagggcgccaacatcaacaagagcctgaccaccctgggcaaggtgatcagcgccctggccgaggtgtccaagaagaagaagaagacagacttcatcccctacagagattctgtgctgacctggctgctgcgggagaacctgggcggcaacagcaggacagccatggtggccgccctgagccctgctgacatcaactatgatgagaccctgagcaccctgcgctatgctgaccgggccaagcagatcaagtgcaatgctgtgatcaatgaagaccccaatgccaagctggtgcgggagctgaaggaggaggtgacccggctgaaggacctgctgcgggcccagggcctgggggacatcatcgacacctccatgggcagcctgaccagcagccccagcagctgcagcctgagcagccaggtgggcctgacctctgtgaccagcatccaggagcgcatcatgagcaccccaggaggagaggaggccatcgagcggctgaaggagagcgagaagatcatcgccgagctgaatgagacctgggaggagaagctgaggaagacagaggccatccgcatggagcgggaggccctgctggccgagatgggcgtggccatccgggaggatggcggcaccctgggcgtcttcagccccaagaagaccccccacctggtgaacctgaatgaagaccccctgatgtctgaatgtctgctgtactacatcaaggatggcatcaccagggtgggccaggctgatgctgagcggcggcaggacatcgtgctgagcggggcccacatcaaggaggagcactgcatcttccgctctgagaggagcaacagcggggaggtgattgtgaccctggagccctgtgagaggtctgagacctacgtgaatggcaagagggtgtcccagcctgtgcagctgcggagcggcaaccgcatcatcatgggcaagaaccacgtgttccgcttcaaccaccctgagcaggcccgggcagagcgggagaagaccccatctgctgagacccccagcgagcctgtggactggacctttgcccagcgggagctgctggagaagcagggcatcgacatgaagcaggagatggagaagaggctgcaggagatggagatcctgtacaagaaggagaaggaggaggccgacctgctgctggagcagcagaggctggactatgagagcaagctgcaggccctgcagaagcaggtggagaccaggagcctggccgctgagaccacagaggaggaggaggaggaggaggaggtgccctggacccagcacgagtttgagctggcccagtgggccttcaggaagtggaagagccaccagttcaccagcctgcgggacctgctgtggggcaatgctgtgtacctgaaggaggccaatgccatctctgtggagctgaagaagaaggtgcagttccagtttgtgctgctgacagacaccctgtacagccccctgcccccagagctgctgcccacagagatggagaagacccatgaggaccggcccttccccaggacagtggtggccgtggaggtgcaggacctgaagaatggagccacccactactggagcctggagaagctgaagcagaggctggacctgatgagggagatgtatgacagagctggggagatggccagcagcgcccaggatgagagcgagaccaccgtgactggaagtgaccccttctatgaccgcttccactggttcaagctggtgggcagcagccccatcttccacggctgtgtgaatgaaaggctggccgacaggacccccagccccaccttcagcacagctgacagcgacatcacagagctggctgatgagcagcaggatgagatggaggactttgatgatgaggcctttgtggatgatgctggcagtgatgctggaacagaggagggcagtgacctcttcagtgatggccatgaccccttctatgacaggagcccctggttcatcctggtgggccgggcctttgtgtacctgagcaacctgctgtaccctgtgcccctcatccaccgggtggccatcgtgtctgagaagggggaggtgcggggcttcctgcgggtggccgtgcaggccatcgctgctgatgaggaggccccagactatggcagcggcatccggcagagcggcacagccaagatcagctttgacaatgagtacttcaaccagagcgacttcagctctgtggccatgaccaggagcggcctgagcctggaggagctgagaattgtggagggccagggccagagcagcgaggtgatcaccccacctgaggagatcagccgcatcaatgacctggacctgaagagcagcaccctgctggatggcaagatggtgatggagggcttcagcgaggagatcggcaaccacctgaagctgggcagcgccttcaccttccgggtgacagtgctgcaggccagcggcatcctgcctgaatatgctgacatcttctgccagttcaacttcctgcacagacatgatgaggccttcagcacagagcccctgaagaacaacggccggggcagccccctggccttctaccacgtgcagaacattgctgtggagatcacagagagctttgtggactacatcaagaccaagcccatcgtgtttgaggtgtttggccactaccagcagcaccccctgcacctgcagggccaggagctgaacagccccccccagccctgccgccgcttcttccccccacccatgcccctgagcaagcctgtgcctgccaccaagctgaacaccatgagcaagaccagcctgggccagagcatgagcaaatatgacctgctggtgtggtttgagatcagcgagctggagcccaccggggagtacatcccagctgtggtggaccacacagctggcctgccctgccagggcaccttcctgctgcaccagggcatccagaggcgcatcaccgtgaccatcatccacgagaagggcagcgagctgcactggaaggatgtgcgggagctggtggtgggccgcatccggaacaagccagaggtggatgaggccgctgtggatgccatcctgagcctgaacatcatcagcgccaagtacctgaagagcagccacaacagcagcaggaccttctacagatttgaagctgtgtgggacagcagcctgcacaacagcctgctgctgaacagagtgaccccctatggagagaagatctacatgaccctgagcgcctacctggagctggaccactgcatccagcctgctgtgatcaccaaggatgtgtgcatggtgttctacagcagagatgccaagatcagccccccaagaagcctgcggagcctgtttggaagtggctacagcaagagcccagacagcaacagagtgacaggcatctatgagctgagcctgtgcaagatgtctgacaccggcagccctggcatgcagaggagaagaaggaagatcctggacacctctgtggcctacgtgcggggggaggagaacctggccggctggaggcccaggggggacagcctcatcctggagcaccagtgggagctggagaagctggagctgctgcacgaggtggagaagaccaggcacttcctgctgctgcgggagcggctgggggacagcatccccaagagcctgagtgacagcctgagccccagcctgagcagcggcaccctgagcaccagcaccagcatcagcagccagatcagcaccaccacctttgagagcgccatcaccccatctgagagcagcggctatgacagcggggacatcgagagcctggtggaccgggagaaggagctggccaccaagtgcctgcagctgctgacccacaccttcaaccgggagttcagccaggtgcacggctctgtgtctgactgcaagctgagtgacatcagccccatcggccgggaccccagcgagagcagcttcagcagcgccaccctgacccccagcagcacctgccccagcctggtggacagccgcagcaacagcctggaccagaagaccccagaggccaacagccgggccagcagcccctgcccagagtttgagcagttccagatcgtgcctgctgtggagaccccctacctggcccgggccggcaagaatgagttcctgaacctggtgcctgacatcgaggagatccggcccagctctgtggtgtccaagaagggctacctgcacttcaaggagcccctgtacagcaactgggccaagcactttgtggtggtgcggcggccctacgtgttcatctacaacagcgacaaggaccctgtggagcggggcatcatcaacctgagcacagcccaggtggagtacagcgaggaccagcaggccatggtgaagacccccaacacctttgctgtgtgcaccaagcaccggggcgtgctgctgcaggccctgaatgacaaggacatgaatgactggctgtatgccttcaaccccctgctggccggcaccatccgcagcaagctgagccgccgctgccccagccagagcaagtactag

SEQ ID NO: 157024 - DNA, 5472 bp, synthetic construct
  misc_feature 1..5472: note = Description of Artificial Sequence: Synthetic coding sequence
  source 1..5472: mol_type = other DNA
atgtctggggcctctgtgaaggtggccgtgcgggtgcggcccttcaacagccgggagaccagcaaggagagcaagtgcatcatccagatgcagggcaacagcaccagcatcatcaaccccaagaaccccaaggaggcccccaagagcttctcctttgactacagctactggagccacaccagccctgaggacccctgctttgccagccagaacagagtgtacaatgacatcggcaaggagatgctgctgcacgcctttgagggctacaacgtgtgcatctttgcctacggccagacaggagctgggaagagctacaccatgatgggcaagcaggaggagagccaggccggcatcatcccccagctgtgtgaggagctgtttgagaagatcaatgacaactgcaatgaggagatgagctacagcgtggaggtgtcctacatggagatctactgtgagcgggtgcgggacctgctgaaccccaagaacaagggcaacctgcgggtgcgggagcaccccctgctgggcccctacgtggaggacctgagcaagctggccgtgaccagctacacagacattgctgacctgatggatgctggcaacaaggccaggacagtggccgccaccaacatgaatgagaccagcagccgcagccatgctgtgttcaccatcgtgttcacccagaagaagcatgacaatgagaccaacctgagcacagagaaggtgtccaagatcagcctggtggacctggccggcagcgagagagctgacagcactggagccaagggcacccggctgaaggagggcgccaacatcaacaagagcctgaccaccctgggcaaggtgatcagcgccctggccgaggtggacaccagcaagaagaagagcaagaagaagaagaagacagacttcatcccctacagagattctgtgctgacctggctgctgcgggagaacctgggcggcaacagcaggacagccatggtggccgccctgagccctgctgacatcaactatgatgagaccctgagcaccctgcgctatgctgaccgggccaagcagatcaagtgcaatgctgtgatcaatgaagaccccaatgccaagctggtgcgggagctgaaggaggaggtgacccggctgaaggacctgctgcgggcccagggcctgggggacatcatcgacatcgaccccctgattgatgactacagcggcagcggcagcaagtacctgaaggacttccagaacaacaagcaccgctacctgctggccagcgagaaccagaggcctggccacttcagcacagcctccatgggcagcctgaccagcagccccagcagctgcagcctgagcagccaggtgggcctgacctctgtgaccagcatccaggagcgcatcatgagcaccccaggaggagaggaggccatcgagcggctgaaggagagcgagaagatcatcgccgagctgaatgagacctgggaggagaagctgaggaagacagaggccatccgcatggagcgggaggccctgctggccgagatgggcgtggccatccgggaggatggcggcaccctgggcgtcttcagccccaagaagaccccccacctggtgaacctgaatgaagaccccctgatgtctgaatgtctgctgtactacatcaaggatggcatcaccagggtgggccaggctgatgctgagcggcggcaggacatcgtgctgagcggggcccacatcaaggaggagcactgcatcttccgctctgagaggagcaacagcggggaggtgattgtgaccctggagccctgtgagaggtctgagacctacgtgaatggcaagagggtgtcccagcctgtgcagctgcggagcggcaaccgcatcatcatgggcaagaaccacgtgttccgcttcaaccaccctgagcaggcccgggcagagcgggagaagaccccatctgctgagacccccagcgagcctgtggactggacctttgcccagcgggagctgctggagaagcagggcatcgacatgaagcaggagatggagaagaggctgcaggagatggagatcctgtacaagaaggagaaggaggaggccgacctgctgctggagcagcagaggctggactatgagagcaagctgcaggccctgcagaagcaggtggagaccaggagcctggccgctgagaccacagaggaggaggaggaggaggaggaggtgccctggacccagcacgagtttgagctggcccagtgggccttcaggaagtggaagagccaccagttcaccagcctgcgggacctgctgtggggcaatgctgtgtacctgaaggaggccaatgccatctctgtggagctgaagaagaaggtgcagttccagtttgtgctgctgacagacaccctgtacagccccctgcccccagagctgctgcccacagagatggagaagacccatgaggaccggcccttccccaggacagtggtggccgtggaggtgcaggacctgaagaatggagccacccactactggagcctggagaagctgaagcagaggctggacctgatgagggagatgtatgacagagctggggagatggccagcagcgcccaggatgagagcgagaccaccgtgactggaagtgaccccttctatgaccgcttccactggttcaagctggtgggcagcagccccatcttccacggctgtgtgaatgaaaggctggccgacaggacccccagccccaccttcagcacagctgacagcgacatcacagagctggctgatgagcagcaggatgagatggaggactttgatgatgaggcctttgtggatgatgctggcagtgatgctggaacagaggagggcagtgacctcttcagtgatggccatgaccccttctatgacaggagcccctggttcatcctggtgggccgggcctttgtgtacctgagcaacctgctgtaccctgtgcccctcatccaccgggtggccatcgtgtctgagaagggggaggtgcggggcttcctgcgggtggccgtgcaggccatcgctgctgatgaggaggccccagactatggcagcggcatccggcagagcggcacagccaagatcagctttgacaatgagtacttcaaccagagcgacttcagctctgtggccatgaccaggagcggcctgagcctggaggagctgagaattgtggagggccagggccagagcagcgaggtgatcaccccacctgaggagatcagccgcatcaatgacctggacctgaagagcagcaccctgctggatggcaagatggtgatggagggcttcagcgaggagatcggcaaccacctgaagctgggcagcgccttcaccttccgggtgacagtgctgcaggccagcggcatcctgcctgaatatgctgacatcttctgccagttcaacttcctgcacagacatgatgaggccttcagcacagagcccctgaagaacaacggccggggcagccccctggccttctaccacgtgcagaacattgctgtggagatcacagagagctttgtggactacatcaagaccaagcccatcgtgtttgaggtgtttggccactaccagcagcaccccctgcacctgcagggccaggagctgaacagccccccccagccctgccgccgcttcttccccccacccatgcccctgagcaagcctgtgcctgccaccaagctgaacaccatgagcaagaccagcctgggccagagcatgagcaaatatgacctgctggtgtggtttgagatcagcgagctggagcccaccggggagtacatcccagctgtggtggaccacacagctggcctgccctgccagggcaccttcctgctgcaccagggcatccagaggcgcatcaccgtgaccatcatccacgagaagggcagcgagctgcactggaaggatgtgcgggagctggtggtgggccgcatccggaacaagccagaggtggatgaggccgctgtggatgccatcctgagcctgaacatcatcagcgccaagtacctgaagagcagccacaacagcagcaggaccttctacagatttgaagctgtgtgggacagcagcctgcacaacagcctgctgctgaacagagtgaccccctatggagagaagatctacatgaccctgagcgcctacctggagctggaccactgcatccagcctgctgtgatcaccaaggatgtgtgcatggtgttctacagcagagatgccaagatcagccccccaagaagcctgcggagcctgtttggaagtggctacagcaagagcccagacagcaacagagtgacaggcatctatgagctgagcctgtgcaagatgtctgacaccggcagccctggcatgcagaggagaagaaggaagatcctggacacctctgtggcctacgtgcggggggaggagaacctggccggctggaggcccaggggggacagcctcatcctggagcaccagtgggagctggagaagctggagctgctgcacgaggtggagaagaccaggcacttcctgctgctgcgggagcggctgggggacagcatccccaagagcctgagtgacagcctgagccccagcctgagcagcggcaccctgagcaccagcaccagcatcagcagccagatcagcaccaccacctttgagagcgccatcaccccatctgagagcagcggctatgacagcggggacatcgagagcctggtggaccgggagaaggagctggccaccaagtgcctgcagctgctgacccacaccttcaaccgggagttcagccaggtgcacggctctgtgtctgactgcaagctgagtgacatcagccccatcggccgggaccccagcgagagcagcttcagcagcgccaccctgacccccagcagcacctgccccagcctggtggacagccgcagcaacagcctggaccagaagaccccagaggccaacagccgggccagcagcccctgcccagagtttgagcagttccagatcgtgcctgctgtggagaccccctacctggcccgggccggcaagaatgagttcctgaacctggtgcctgacatcgaggagatccggcccagctctgtggtgtccaagaagggctacctgcacttcaaggagcccctgtacagcaactgggccaagcactttgtggtggtgcggcggccctacgtgttcatctacaacagcgacaaggaccctgtggagcggggcatcatcaacctgagcacagcccaggtggagtacagcgaggaccagcaggccatggtgaagacccccaacacctttgctgtgtgcaccaagcaccggggcgtgctgctgcaggccctgaatgacaaggacatgaatgactggctgtatgccttcaaccccctgctggccggcaccatccggcccggccacctggccagcgagatcatccgggaggacaagtctgtgtccttcagctgccagtag

SEQ ID NO: 157025 - DNA, 5472 bp, synthetic construct
  misc_feature 1..5472: note = Description of Artificial Sequence: Synthetic coding sequence
  source 1..5472: mol_type = other DNA
atgtctggggcctctgtgaaggtggccgtgcgggtgcggcccttcaacagccgggagaccagcaaggagagcaagtgcatcatccagatgcagggcaacagcaccagcatcatcaaccccaagaaccccaaggaggcccccaagagcttctcctttgactacagctactggagccacaccagccctgaggacccctgctttgccagccagaacagagtgtacaatgacatcggcaaggagatgctgctgcacgcctttgagggctacaacgtgtgcatctttgcctacggccagacaggagctgggaagagctacaccatgatgggcaagcaggaggagagccaggccggcatcatcccccagctgtgtgaggagctgtttgagaagatcaatgacaactgcaatgaggagatgagctacagcgtggaggtgtcctacatggagatctactgtgagcgggtgcgggacctgctgaaccccaagaacaagggcaacctgcgggtgcgggagcaccccctgctgggcccctacgtggaggacctgagcaagctggccgtgaccagctacacagacattgctgacctgatggatgctggcaacaaggccaggacagtggccgccaccaacatgaatgagaccagcagccgcagccatgctgtgttcaccatcgtgttcacccagaagaagcatgacaatgagaccaacctgagcacagagaaggtgtccaagatcagcctggtggacctggccggcagcgagagagctgacagcactggagccaagggcacccggctgaaggagggcgccaacatcaacaagagcctgaccaccctgggcaaggtgatcagcgccctggccgaggtggacaactgcaccagcaagagcaagaagaagaagaagacagacttcatcccctacagagattctgtgctgacctggctgctgcgggagaacctgggcggcaacagcaggacagccatggtggccgccctgagccctgctgacatcaactatgatgagaccctgagcaccctgcgctatgctgaccgggccaagcagatcaagtgcaatgctgtgatcaatgaagaccccaatgccaagctggtgcgggagctgaaggaggaggtgacccggctgaaggacctgctgcgggcccagggcctgggggacatcatcgacatcgaccccctgattgatgactacagcggcagcggcagcaagtacctgaaggacttccagaacaacaagcaccgctacctgctggccagcgagaaccagaggcctggccacttcagcacagcctccatgggcagcctgaccagcagccccagcagctgcagcctgagcagccaggtgggcctgacctctgtgaccagcatccaggagcgcatcatgagcaccccaggaggagaggaggccatcgagcggctgaaggagagcgagaagatcatcgccgagctgaatgagacctgggaggagaagctgaggaagacagaggccatccgcatggagcgggaggccctgctggccgagatgggcgtggccatccgggaggatggcggcaccctgggcgtcttcagccccaagaagaccccccacctggtgaacctgaatgaagaccccctgatgtctgaatgtctgctgtactacatcaaggatggcatcaccagggtgggccaggctgatgctgagcggcggcaggacatcgtgctgagcggggcccacatcaaggaggagcactgcatcttccgctctgagaggagcaacagcggggaggtgattgtgaccctggagccctgtgagaggtctgagacctacgtgaatggcaagagggtgtcccagcctgtgcagctgcggagcggcaaccgcatcatcatgggcaagaaccacgtgttccgcttcaaccaccctgagcaggcccgggcagagcgggagaagaccccatctgctgagacccccagcgagcctgtggactggacctttgcccagcgggagctgctggagaagcagggcatcgacatgaagcaggagatggagaagaggctgcaggagatggagatcctgtacaagaaggagaaggaggaggccgacctgctgctggagcagcagaggctggactatgagagcaagctgcaggccctgcagaagcaggtggagaccaggagcctggccgctgagaccacagaggaggaggaggaggaggaggaggtgccctggacccagcacgagtttgagctggcccagtgggccttcaggaagtggaagagccaccagttcaccagcctgcgggacctgctgtggggcaatgctgtgtacctgaaggaggccaatgccatctctgtggagctgaagaagaaggtgcagttccagtttgtgctgctgacagacaccctgtacagccccctgcccccagagctgctgcccacagagatggagaagacccatgaggaccggcccttccccaggacagtggtggccgtggaggtgcaggacctgaagaatggagccacccactactggagcctggagaagctgaagcagaggctggacctgatgagggagatgtatgacagagctggggagatggccagcagcgcccaggatgagagcgagaccaccgtgactggaagtgaccccttctatgaccgcttccactggttcaagctggtgggcagcagccccatcttccacggctgtgtgaatgaaaggctggccgacaggacccccagccccaccttcagcacagctgacagcgacatcacagagctggctgatgagcagcaggatgagatggaggactttgatgatgaggcctttgtggatgatgctggcagtgatgctggaacagaggagggcagtgacctcttcagtgatggccatgaccccttctatgacaggagcccctggttcatcctggtgggccgggcctttgtgtacctgagcaacctgctgtaccctgtgcccctcatccaccgggtggccatcgtgtctgagaagggggaggtgcggggcttcctgcgggtggccgtgcaggccatcgctgctgatgaggaggccccagactatggcagcggcatccggcagagcggcacagccaagatcagctttgacaatgagtacttcaaccagagcgacttcagctctgtggccatgaccaggagcggcctgagcctggaggagctgagaattgtggagggccagggccagagcagcgaggtgatcaccccacctgaggagatcagccgcatcaatgacctggacctgaagagcagcaccctgctggatggcaagatggtgatggagggcttcagcgaggagatcggcaaccacctgaagctgggcagcgccttcaccttccgggtgacagtgctgcaggccagcggcatcctgcctgaatatgctgacatcttctgccagttcaacttcctgcacagacatgatgaggccttcagcacagagcccctgaagaacaacggccggggcagccccctggccttctaccacgtgcagaacattgctgtggagatcacagagagctttgtggactacatcaagaccaagcccatcgtgtttgaggtgtttggccactaccagcagcaccccctgcacctgcagggccaggagctgaacagccccccccagccctgccgccgcttcttccccccacccatgcccctgagcaagcctgtgcctgccaccaagctgaacaccatgagcaagaccagcctgggccagagcatgagcaaatatgacctgctggtgtggtttgagatcagcgagctggagcccaccggggagtacatcccagctgtggtggaccacacagctggcctgccctgccagggcaccttcctgctgcaccagggcatccagaggcgcatcaccgtgaccatcatccacgagaagggcagcgagctgcactggaaggatgtgcgggagctggtggtgggccgcatccggaacaagccagaggtggatgaggccgctgtggatgccatcctgagcctgaacatcatcagcgccaagtacctgaagagcagccacaacagcagcaggaccttctacagatttgaagctgtgtgggacagcagcctgcacaacagcctgctgctgaacagagtgaccccctatggagagaagatctacatgaccctgagcgcctacctggagctggaccactgcatccagcctgctgtgatcaccaaggatgtgtgcatggtgttctacagcagagatgccaagatcagccccccaagaagcctgcggagcctgtttggaagtggctacagcaagagcccagacagcaacagagtgacaggcatctatgagctgagcctgtgcaagatgtctgacaccggcagccctggcatgcagaggagaagaaggaagatcctggacacctctgtggcctacgtgcggggggaggagaacctggccggctggaggcccaggggggacagcctcatcctggagcaccagtgggagctggagaagctggagctgctgcacgaggtggagaagaccaggcacttcctgctgctgcgggagcggctgggggacagcatccccaagagcctgagtgacagcctgagccccagcctgagcagcggcaccctgagcaccagcaccagcatcagcagccagatcagcaccaccacctttgagagcgccatcaccccatctgagagcagcggctatgacagcggggacatcgagagcctggtggaccgggagaaggagctggccaccaagtgcctgcagctgctgacccacaccttcaaccgggagttcagccaggtgcacggctctgtgtctgactgcaagctgagtgacatcagccccatcggccgggaccccagcgagagcagcttcagcagcgccaccctgacccccagcagcacctgccccagcctggtggacagccgcagcaacagcctggaccagaagaccccagaggccaacagccgggccagcagcccctgcccagagtttgagcagttccagatcgtgcctgctgtggagaccccctacctggcccgggccggcaagaatgagttcctgaacctggtgcctgacatcgaggagatccggcccagctctgtggtgtccaagaagggctacctgcacttcaaggagcccctgtacagcaactgggccaagcactttgtggtggtgcggcggccctacgtgttcatctacaacagcgacaaggaccctgtggagcggggcatcatcaacctgagcacagcccaggtggagtacagcgaggaccagcaggccatggtgaagacccccaacacctttgctgtgtgcaccaagcaccggggcgtgctgctgcaggccctgaatgacaaggacatgaatgactggctgtatgccttcaaccccctgctggccggcaccatccggcccggccacctggccagcgagatcatccgggaggacaagtctgtgtccttcagctgccagtag

SEQ ID NO: 157026 - DNA, 3462 bp, synthetic construct
  misc_feature 1..3462: note = Description of Artificial Sequence: Synthetic coding sequence
  source 1..3462: mol_type = other DNA
atgtctggggcctctgtgaaggtggccgtgcgggtgcggcccttcaacagccgggagaccagcaaggagagcaagtgcatcatccagatgcagggcaacagcaccagcatcatcaaccccaagaaccccaaggaggcccccaagagcttctcctttgactacagctactggagccacaccagccctgaggacccctgctttgccagccagaacagagtgtacaatgacatcggcaaggagatgctgctgcacgcctttgagggctacaacgtgtgcatctttgcctacggccagacaggagctgggaagagctacaccatgatgggcaagcaggaggagagccaggccggcatcatcccccagctgtgtgaggagctgtttgagaagatcaatgacaactgcaatgaggagatgagctacagcgtggaggtgtcctacatggagatctactgtgagcgggtgcgggacctgctgaaccccaagaacaagggcaacctgcgggtgcgggagcaccccctgctgggcccctacgtggaggacctgagcaagctggccgtgaccagctacacagacattgctgacctgatggatgctggcaacaaggccaggacagtggccgccaccaacatgaatgagaccagcagccgcagccatgctgtgttcaccatcgtgttcacccagaagaagcatgacaatgagaccaacctgagcacagagaaggtgtccaagatcagcctggtggacctggccggcagcgagagagctgacagcactggagccaagggcacccggctgaaggagggcgccaacatcaacaagagcctgaccaccctgggcaaggtgatcagcgccctggccgaggtgtccaagaagaagaagaagacagacttcatcccctacagagattctgtgctgacctggctgctgcgggagaacctgggcggcaacagcaggacagccatggtggccgccctgagccctgctgacatcaactatgatgagaccctgagcaccctgcgctatgctgaccgggccaagcagatcaagtgcaatgctgtgatcaatgaagaccccaatgccaagctggtgcgggagctgaaggaggaggtgacccggctgaaggacctgctgcgggcccagggcctgggggacatcatcgacacctccatgggcagcctgaccagcagccccagcagctgcagcctgagcagccaggtgggcctgacctctgtgaccagcatccaggagcgcatcatgagcaccccaggaggagaggaggccatcgagcggctgaaggagagcgagaagatcatcgccgagctgaatgagacctgggaggagaagctgaggaagacagaggccatccgcatggagcgggaggccctgctggccgagatgggcgtggccatccgggaggatggcggcaccctgggcgtcttcagccccaagaagaccccccacctggtgaacctgaatgaagaccccctgatgtctgaatgtctgctgtactacatcaaggatggcatcaccagggtgggccaggctgatgctgagcggcggcaggacatcgtgctgagcggggcccacatcaaggaggagcactgcatcttccgctctgagaggagcaacagcggggaggtgattgtgaccctggagccctgtgagaggtctgagacctacgtgaatggcaagagggtgtcccagcctgtgcagctgcggagcggcaaccgcatcatcatgggcaagaaccacgtgttccgcttcaaccaccctgagcaggcccgggcagagcgggagaagaccccatctgctgagacccccagcgagcctgtggactggacctttgcccagcgggagctgctggagaagcagggcatcgacatgaagcaggagatggagaagaggctgcaggagatggagatcctgtacaagaaggagaaggaggaggccgacctgctgctggagcagcagaggctggatgctgacagcgacagcggagatgacagcgacaagaggagctgtgaggagagctggaagctgatcaccagcctgcgggagaagctgccccccagcaagctgcagaccatcgtgaagaagtgtggcctgcccagcagcggcaagaagcgggagcccatcaagatgtaccagatcccccagaggcggcggctgagcaaggacagcaagtgggtgaccatcagtgacctgaagatccaggccgtgaaggagatctgctatgaggtggccctgaatgacttccgccacagccggcaggagattgaggccctggccatcgtgaagatgaaggagctgtgtgccatgtatggcaagaaggaccccaatgaaagagacagctggagggctgtggccagagatgtgtgggacacagtgggcgtgggagatgagaagattgaagatgtgatggccaccgggaagggcagcacagatgtggatgacctgaaggtgcacatcgacaagctggaggacatcctgcaggaggtgaagaagcagaacaacatgaaggatgaggagatcaaggtgctgaggaacaagatgctgaagatggagaaggtgctgcccctgattggcagccaggagcagaagagccctggcagccacaaggccaaggagcctgtgggcgctggggtgagcagcaccagtgaaaataatgtgtccaagggggacaatggagagctggccaaggaggagcgggtgtcccagctgatgaatggagaccctgccttcagaagaggccgcctgcgctggatgaggcaggagcagatccgcttcaagaacctgcagcagcaggagatcaccaagcagctgcggcggcagaatgtgccccaccgcttcatccccccagagaacaggaagccccgcttccccttcaagagcaaccccaagcacagaaattcctggagccctggcacccacatcatcatcacagaagatgaagtcatcgagctgcgcatccccaaggatgatgaggccaggaagggcaacaaggaggagagccaggagaagggcggcaagggggccttcaaggacccccagttcccctggggcagccagggcatgaggagccaggaccacatccaggtgtccaagcagcacatcaacaaccagcagcagcccccccagctgcgctggaggagcaacagcctgaacaacggccagcccaagagcacccgctgccaggccagcgccagcgctgagagcctgaacagccacagcggccaccccacagcagatgtgcagaccttccaggccaagaggcacatccaccagcaccggcagagctactgcaactacaacacaggaggccagctggagggcaatgctgccaccagctaccagaagcagacagacaagcccagccactgcagccagtttgtgaccccacccaggatgaggcggcagttcagcgcccccaacctgaaggccggccgggagaccaccgtgtag

SEQ ID NO: 157027 - DNA, 5451 bp, synthetic construct
  misc_feature 1..5451: note = Description of Artificial Sequence: Synthetic coding sequence
  source 1..5451: mol_type = other DNA
atgtctggggcctctgtgaaggtggccgtgcgggtgcggcccttcaacagccgggagaccagcaaggagagcaagtgcatcatccagatgcagggcaacagcaccagcatcatcaaccccaagaaccccaaggaggcccccaagagcttctcctttgactacagctactggagccacaccagccctgaggacccctgctttgccagccagaacagagtgtacaatgacatcggcaaggagatgctgctgcacgcctttgagggctacaacgtgtgcatctttgcctacggccagacaggagctgggaagagctacaccatgatgggcaagcaggaggagagccaggccggcatcatcccccagctgtgtgaggagctgtttgagaagatcaatgacaactgcaatgaggagatgagctacagcgtggaggtgtcctacatggagatctactgtgagcgggtgcgggacctgctgaaccccaagaacaagggcaacctgcgggtgcgggagcaccccctgctgggcccctacgtggaggacctgagcaagctggccgtgaccagctacacagacattgctgacctgatggatgctggcaacaaggccaggacagtggccgccaccaacatgaatgagaccagcagccgcagccatgctgtgttcaccatcgtgttcacccagaagaagcatgacaatgagaccaacctgagcacagagaaggtgtccaagatcagcctggtggacctggccggcagcgagagagctgacagcactggagccaagggcacccggctgaaggagggcgccaacatcaacaagagcctgaccaccctgggcaaggtgatcagcgccctggccgaggtggacaactgcaccagcaagagcaagaagaagaagaagacagacttcatcccctacagagattctgtgctgacctggctgctgcgggagaacctgggcggcaacagcaggacagccatggtggccgccctgagccctgctgacatcaactatgatgagaccctgagcaccctgcgctatgctgaccgggccaagcagatcaagtgcaatgctgtgatcaatgaagaccccaatgccaagctggtgcgggagctgaaggaggaggtgacccggctgaaggacctgctgcgggcccagggcctgggggacatcatcgacatcgaccccctgattgatgactacagcggcagcggcagcaagtacctgaaggacttccagaacaacaagcaccgctacctgctggccagcgagaaccagaggcctggccacttcagcacagcctccatgggcagcctgaccagcagccccagcagctgcagcctgagcagccaggtgggcctgacctctgtgaccagcatccaggagcgcatcatgagcaccccaggaggagaggaggccatcgagcggctgaaggagagcgagaagatcatcgccgagctgaatgagacctgggaggagaagctgaggaagacagaggccatccgcatggagcgggaggccctgctggccgagatgggcgtggccatccgggaggatggcggcaccctgggcgtcttcagccccaagaagaccccccacctggtgaacctgaatgaagaccccctgatgtctgaatgtctgctgtactacatcaaggatggcatcaccagggtgggccaggctgatgctgagcggcggcaggacatcgtgctgagcggggcccacatcaaggaggagcactgcatcttccgctctgagaggagcaacagcggggaggtgattgtgaccctggagccctgtgagaggtctgagacctacgtgaatggcaagagggtgtcccagcctgtgcagctgcggagcggcaaccgcatcatcatgggcaagaaccacgtgttccgcttcaaccaccctgagcaggcccgggcagagcgggagaagaccccatctgctgagacccccagcgagcctgtggactggacctttgcccagcgggagctgctggagaagcagggcatcgacatgaagcaggagatggagaagaggctgcaggagatggagatcctgtacaagaaggagaaggaggaggccgacctgctgctggagcagcagaggctggactatgagagcaagctgcaggccctgcagaagcaggtggagaccaggagcctggccgctgagaccacagaggaggaggaggaggaggaggaggtgccctggacccagcacgagtttgagctggcccagtgggccttcaggaagtggaagagccaccagttcaccagcctgcgggacctgctgtggggcaatgctgtgtacctgaaggaggccaatgccatctctgtggagctgaagaagaaggtgcagttccagtttgtgctgctgacagacaccctgtacagccccctgcccccagagctgctgcccacagagatggagaagacccatgaggaccggcccttccccaggacagtggtggccgtggaggtgcaggacctgaagaatggagccacccactactggagcctggagaagctgaagcagaggctggacctgatgagggagatgtatgacagagctggggagatggccagcagcgcccaggatgagagcgagaccaccgtgactggaagtgaccccttctatgaccgcttccactggttcaagctggtgggcagcagccccatcttccacggctgtgtgaatgaaaggctggccgacaggacccccagccccaccttcagcacagctgacagcgacatcacagagctggctgatgagcagcaggatgagatggaggactttgatgatgaggcctttgtggatgatgctggcagtgatgctggaacagaggagggcagtgacctcttcagtgatggccatgaccccttctatgacaggagcccctggttcatcctggtgggccgggcctttgtgtacctgagcaacctgctgtaccctgtgcccctcatccaccgggtggccatcgtgtctgagaagggggaggtgcggggcttcctgcgggtggccgtgcaggccatcgctgctgatgaggaggccccagactatggcagcggcatccggcagagcggcacagccaagatcagctttgacaatgagtacttcaaccagagcgacttcagctctgtggccatgaccaggagcggcctgagcctggaggagctgagaattgtggagggccagggccagagcagcgaggtgatcaccccacctgaggagatcagccgcatcaatgacctggacctgaagagcagcaccctgctggatggcaagatggtgatggagggcttcagcgaggagatcggcaaccacctgaagctgggcagcgccttcaccttccgggtgacagtgctgcaggccagcggcatcctgcctgaatatgctgacatcttctgccagttcaacttcctgcacagacatgatgaggccttcagcacagagcccctgaagaacaacggccggggcagccccctggccttctaccacgtgcagaacattgctgtggagatcacagagagctttgtggactacatcaagaccaagcccatcgtgtttgaggtgtttggccactaccagcagcaccccctgcacctgcagggccaggagctgaacagccccccccagccctgccgccgcttcttccccccacccatgcccctgagcaagcctgtgcctgccaccaagctgaacaccatgagcaagaccagcctgggccagagcatgagcaaatatgacctgctggtgtggtttgagatcagcgagctggagcccaccggggagtacatcccagctgtggtggaccacacagctggcctgccctgccagggcaccttcctgctgcaccagggcatccagaggcgcatcaccgtgaccatcatccacgagaagggcagcgagctgcactggaaggatgtgcgggagctggtggtgggccgcatccggaacaagccagaggtggatgaggccgctgtggatgccatcctgagcctgaacatcatcagcgccaagtacctgaagagcagccacaacagcagcaggaccttctacagatttgaagctgtgtgggacagcagcctgcacaacagcctgctgctgaacagagtgaccccctatggagagaagatctacatgaccctgagcgcctacctggagctggaccactgcatccagcctgctgtgatcaccaaggatgtgtgcatggtgttctacagcagagatgccaagatcagccccccaagaagcctgcggagcctgtttggaagtggctacagcaagagcccagacagcaacagagtgacaggcatctatgagctgagcctgtgcaagatgtctgacaccggcagccctggcatgcagaggagaagaaggaagatcctggacacctctgtggcctacgtgcggggggaggagaacctggccggctggaggcccaggggggacagcctcatcctggagcaccagtgggagctggagaagctggagctgctgcacgaggtggagaagaccaggcacttcctgctgctgcgggagcggctgggggacagcatccccaagagcctgagtgacagcctgagccccagcctgagcagcggcaccctgagcaccagcaccagcatcagcagccagatcagcaccaccacctttgagagcgccatcaccccatctgagagcagcggctatgacagcggggacatcgagagcctggtggaccgggagaaggagctggccaccaagtgcctgcagctgctgacccacaccttcaaccgggagttcagccaggtgcacggctctgtgtctgactgcaagctgagtgacatcagccccatcggccgggaccccagcgagagcagcttcagcagcgccaccctgacccccagcagcacctgccccagcctggtggacagccgcagcaacagcctggaccagaagaccccagaggccaacagccgggccagcagcccctgcccagagtttgagcagttccagatcgtgcctgctgtggagaccccctacctggcccgggccggcaagaatgagttcctgaacctggtgcctgacatcgaggagatccggcccagctctgtggtgtccaagaagggctacctgcacttcaaggagcccctgtacagcaactgggccaagcactttgtggtggtgcggcggccctacgtgttcatctacaacagcgacaaggaccctgtggagcggggcatcatcaacctgagcacagcccaggtggagtacagcgaggaccagcaggccatggtgaagacccccaacacctttgctgtgtgcaccaagcaccggggcgtgctgctgcaggccctgaatgacaaggacatgaatgactggctgtatgccttcaaccccctgctggccggcaccatccgcagcaagctgagccgccgctgccccagccagagcaagtactag

SEQ ID NO: 157028 - DNA, 3462 bp, synthetic construct; identical to SEQ ID NO: 157026
  misc_feature 1..3462: note = Description of Artificial Sequence: Synthetic coding sequence
  source 1..3462: mol_type = other DNA

SEQ ID NO: 157029 - DNA, 2673 bp, synthetic construct
  misc_feature 1..2673: note = Description of Artificial Sequence: Synthetic coding sequence
  source 1..2673: mol_type = other DNA
atgagccagggcatcctgagccccccagctggcctgctgagtgatgatgatgtggtggtgagccccatgtttgagagcacagctgctgacctgggctctgtggtgaggaagaacctgctgagtgactgcagcgtggtgtccaccagcctggaggacaagcagcaggtgcccagtgaagattccatggagaaggtgaaggtgtacctgcgggtgcggcccctgctgcccagcgagctggagcggcaggaggaccagggctgtgtgagaattgaaaatgtggagaccctggtgctgcaggcccccaaggacagctttgccctgaagagcaatgaaagaggcatcggccaggccacccaccgcttcaccttcagccagatctttggacctgaggtgggccaggccagcttcttcaacctgactgtgaaggagatggtgaaggatgtgctgaagggccagaactggctgatctacacctatggagtgaccaacagcggcaagacccacaccatccagggcaccatcaaggatggcggcatcctgcccaggagcctggccctgatcttcaacagcctgcagggccagctgcaccccaccccagacctgaagcccctgctgagcaatgaagtcatctggctggacagcaagcagatccggcaggaggagatgaagaagctgagcctgctgaatggaggcctgcaggaggaggagctgagcaccagcctgaagaggtctgtgtacatcgagagcagaattggcaccagcaccagctttgattctggaattgctggcctgagcagcatcagccagtgcaccagcagcagccagctggatgagaccagccaccgctgggcccagcctgacacagcccccctgcctgtgcctgccaacatccgcttcagcatctggatctccttctttgagatctacaatgagctgctgtatgacctgctggagccccccagccagcagaggaagaggcagaccctgcggctgtgtgaggaccagaatggaaacccctacgtgaaggacctgaactggatccacgtgcaggatgctgaggaggcctggaagctgctgaaggtgggcaggaagaaccagagctttgccagcacccacctgaaccagaacagcagccgcagccacagcatcttcagcatccgcatcctgcacctgcagggcgagggggacatcgtgcccaagatcagcgagctgagcctgtgtgacctggccggcagcgagcgctgcaaggaccagaagagcggggagcggctgaaggaggccggcaacatcaacaccagcctgcacaccctgggccgctgcatcgccgccctgcggcagaaccagcagaacagaagcaagcagaacctggtgcccttccgggacagcaagctgaccagggtcttccagggcttcttcaccggccggggccgcagctgcatgattgtgaatgtgaacccctgtgccagcacctatgatgagaccctgcacgtggccaagttcagcgccatcgccagccagctggtgcacgccccacccatgcagctgggcttccccagcctgcacagcttcatcaaggagcacagcctgcaggtgagccccagcctggagaagggggccaaggctgacaccggcctggatgatgacattgaaaatgaagctgacatctccatgtatggcaaggaggagctgctgcaggtggtggaggccatgaagaccctgctgctgaaggagcggcaggagaagctgcagctggagatgcacctgagagatgagatctgcaatgagatggtggagcagatgcagcagcgggagcagtggtgcagcgagcacctggacacccagaaggagctgctggaggagatgtatgaggagaagctgaacatcctgaaggagagcctgaccagcttctaccaggaggagatccaggagagagatgagaagattgaggagctggaggccctgctgcaggaggcccggcagcagagcgtggcccaccagcagagcggcagcgagctggccctgcggcgcagccagaggctggccgccagcgccagcacccagcagctgcaggaggtgaaggccaagctgcagcagtgcaaggccgagctgaacagcaccacagaggagctgcacaagtaccagaagatgctggagcccccacccagcgccaagcccttcaccattgatgtggacaagaagctggaggagggccagaagaacatccggctgctgaggacagagctgcagaagctgggggagagcctgcagagcgctgagcgggcctgctgccacagcactggagctgggaagctgcggcaggccctgaccacctgtgatgacatcctgatcaagcaggaccagaccctggccgagctgcagaacaacatggtgctggtgaagctggacctgaggaagaaggccgcctgcatcgccgagcagtaccacacagtgctgaagctgcagggccaggtgtctgccaagaagaggctgggcaccaaccaggagaaccagcagcccaaccagcagcccccaggcaagaagcccttcctgaggaacctgctgcccaggacccccacctgccagagcagcacagactgcagcccctatgcccgcatcctgcggagccgccgcagccccctgctgaagagcggcccctttgggaagaagtactag

SEQ ID NO: 157030 - DNA, 678 bp, synthetic construct
  misc_feature 1..678: note = Description of Artificial Sequence: Synthetic coding sequence
  source 1..678: mol_type = other DNA
atgagccagggcatcctgagccccccagctggcctgctgagtgatgatgatgtggtggtgagccccatgtttgagagcacagctgctgacctgggctctgtggtgaggaagaacctgctgagtgactgcagcgtggtgtccaccagcctggaggacaagcagcaggtgcccagtgaagattccatggagaaggtgaaggtgtacctgcgggtgcggcccctgctgcccagcgagctggagcggcaggaggaccagggctgtgtgagaattgaaaatgtggagaccctggtgctgcaggcccccaaggacagctttgccctgaagagcaatgaaagaggcatcggccaggccacccaccgcttcaccttcagccagatctttggacctgaggtgggccaggccagcttcttcaacctgactgtgaaggagatggtgaaggatgtgctgaagggccagaactggctgatctacacctatggagtgaccaacagcggcaagacccacaccatccagggcaccatcaaggatggcggcatcctgcccaggagcctggccctgatcttcaacagcctgcagggccagctgcaccccaccccagacctgaagcccctgctgagcaatgaagtcatctggctggacagcaagcagatccggcaggaggagatgaagaagctgtag

SEQ ID NO: 157031 - DNA, 2619 bp, synthetic construct
  misc_feature 1..2619: note = Description of Artificial Sequence: Synthetic coding sequence
  source 1..2619: mol_type = other DNA
atgagccagggcatcctgagccccccagctggcctgctgagtgatgatgatgtggtggtgagccccatgtttgagagcacagctgctgacctgggctctgtggtgaggaagaacctgctgagtgactgcagcgtggtgtccaccagcctggaggacaagcagcaggtgcccagtgaagattccatggagaaggaggaccagggctgtgtgagaattgaaaatgtggagaccctggtgctgcaggcccccaaggacagctttgccctgaagagcaatgaaagaggcatcggccaggccacccaccgcttcaccttcagccagatctttggacctgaggtgggccaggccagcttcttcaacctgactgtgaaggagatggtgaaggatgtgctgaagggccagaactggctgatctacacctatggagtgaccaacagcggcaagacccacaccatccagggcaccatcaaggatggcggcatcctgcccaggagcctggccctgatcttcaacagcctgcagggccagctgcaccccaccccagacctgaagcccctgctgagcaatgaagtcatctggctggacagcaagcagatccggcaggaggagatgaagaagctgagcctgctgaatggaggcctgcaggaggaggagctgagcaccagcctgaagaggtctgtgtacatcgagagcagaattggcaccagcaccagctttgattctggaattgctggcctgagcagcatcagccagtgcaccagcagcagccagctggatgagaccagccaccgctgggcccagcctgacacagcccccctgcctgtgcctgccaacatccgcttcagcatctggatctccttctttgagatctacaatgagctgctgtatgacctgctggagccccccagccagcagaggaagaggcagaccctgcggctgtgtgaggaccagaatggaaacccctacgtgaaggacctgaactggatccacgtgcaggatgctgaggaggcctggaagctgctgaaggtgggcaggaagaaccagagctttgccagcacccacctgaaccagaacagcagccgcagccacagcatcttcagcatccgcatcctgcacctgcagggcgagggggacatcgtgcccaagatcagcgagctgagcctgtgtgacctggccggcagcgagcgctgcaaggaccagaagagcggggagcggctgaaggaggccggcaacatcaacaccagcctgcacaccctgggccgctgcatcgccgccctgcggcagaaccagcagaacagaagcaagcagaacctggtgcccttccgggacagcaagctgaccagggtcttccagggcttcttcaccggccggggccgcagctgcatgattgtgaatgtgaacccctgtgccagcacctatgatgagaccctgcacgtggccaagttcagcgccatcgccagccagctggtgcacgccccacccatgcagctgggcttccccagcctgcacagcttcatcaaggagcacagcctgcaggtgagccccagcctggagaagggggccaaggctgacaccggcctggatgatgacattgaaaatgaagctgacatctccatgtatggcaaggaggagctgctgcaggtggtggaggccatgaagaccctgctgctgaaggagcggcaggagaagctgcagctggagatgcacctgagagatgagatctgcaatgagatggtggagcagatgcagcagcgggagcagtggtgcagcgagcacctggacacccagaaggagctgctggaggagatgtatgaggagaagctgaacatcctgaaggagagcctgaccagcttctaccaggaggagatccaggagagagatgagaagattgaggagctggaggccctgctgcaggaggcccggcagcagagcgtggcccaccagcagagcggcagcgagctggccctgcggcgcagccagaggctggccgccagcgccagcacccagcagctgcaggaggtgaaggccaagctgcagcagtgcaaggccgagctgaacagcaccacagaggagctgcacaagtaccagaagatgctggagcccccacccagcgccaagcccttcaccattgatgtggacaagaagctggaggagggccagaagaacatccggctgctgaggacagagctgcagaagctgggggagagcctgcagagcgctgagcgggcctgctgccacagcactggagctgggaagctgcggcaggccctgaccacctgtgatgacatcctgatcaagcaggaccagaccctggccgagctgcagaacaacatggtgctggtgaagctggacctgaggaagaaggccgcctgcatcgccgagcagtaccacacagtgctgaagctgcagggccaggtgtctgccaagaagaggctgggcaccaaccaggagaaccagcagcccaaccagcagcccccaggcaagaagcccttcctgaggaacctgctgcccaggacccccacctgccagagcagcacagactgcagcccctatgcccgcatcctgcggagccgccgcagccccctgctgaagagcggcccctttgggaagaagtactag

SEQ ID NO: 157032 - DNA, 480 bp, synthetic construct
  misc_feature 1..480: note = Description of Artificial Sequence: Synthetic coding sequence
  source 1..480: mol_type = other DNA
atgagccagggcatcctgagccccccagctggcctgctgagtgatgatgatgtggtggtgagccccatgtttgagagcacagctgctgacctgggctctgtggtgaggaagaacctgctgagtgactgcagcgtggtgtccaccagcctggaggacaagcagcaggtgcccagtgaagattccatggagaaggtgaaggtgtacctgcgggtgcggcccctgctgcccagcgagctggagcggcaggaggaccagggctgtgtgagaattgaaaatgtggagaccctggtgctgcaggcccccaaggacagctttgccctgaagagcaatgaaagaggcatcggccaggccacccaccgcttcaccttcagccagatctttggacctgaggtgggccaggccagcttcttcaacctgactgtgaaggagatggtgaaggatgtgctgaagggccagaactggctgatctacacctactag

SEQ ID NO: 157033 - DNA, 4884 bp, synthetic construct
  misc_feature 1..4884: note = Description of Artificial Sequence: Synthetic coding sequence
  source 1..4884: mol_type = other DNA
atgctgggcgccccagatgagagctctgtgcgggtggccgtgcgcatccggccccagctggccaaggagaagattgagggctgccacatctgcacctctgtgaccccaggagagccccaggtgttcctgggcaaggacaaggccttcacctttgattatgtgtttgatattgacagccagcaggagcagatctacatccagtgcatcgagaagctgattgagggctgctttgagggctacaatgccaccgtgtttgcctacggccagacaggagctgggaagacctacaccatgggcaccggctttgatgtgaacatcgtggaggaggagctgggcatcatcagcagagctgtgaagcacctgttcaagagcattgaggagaagaagcacatcgccatcaagaatggcctgcctgccccagacttcaaggtgaatgcccagttcctggagctgtacaatgaggaggtgctggacctgtttgacaccacccgggacattgatgccaagagcaagaagagcaacatccgcatccacgaggacagcactggaggcatctacacagtgggcgtgaccaccaggacagtgaacacagaaagtgagatgatgcagtgcctgaagctgggcgccctgagcaggaccacagccagcacccagatgaatgtgcagagcagccgcagccacgccatcttcaccatccacgtgtgccagaccagggtgtgcccccagattgatgctgacaatgccacagacaacaagatcatcagcgagagcgcccagatgaatgaatttgagaccctgacagccaagttccactttgtggacctggccggcagcgagcggctgaagaggactggagccactggagagcgggccaaggagggcatcagcatcaactgtggcctgctggccctgggcaatgtcatcagcgccctgggggacaagagcaagagggccacccacgtgccctacagagacagcaagctgacccggctgctgcaggacagcctgggcggcaacagccagaccatcatgattgcctgtgtgagccccagcgaccgggacttcatggagaccctgaacaccctgaagtatgccaacagagccaggaacatcaagaacaaggtgatggtgaaccaggaccgggccagccagcagatcaatgccctgcggtctgagatcacccggctgcagatggagctgatggagtacaagacaggcaagaggatcattgatgaggagggcgtggagagcatcaatgacatgtttcatgaaaatgccatgctgcagacagagaacaacaacctgcgggtgcgcatcaaggccatgcaggagaccgtggatgccctgcggagccgcatcacccagctggtgtctgaccaggccaaccacgtgctggcccgggccggggagggcaatgaggagatcagcaacatgatccacagctacatcaaggagattgaggacctgcgggccaagctgctggagagcgaggccgtgaatgaaaacctgaggaagaacctgacccgggccacagcccgggccccctacttcagcggcagcagcaccttcagccccaccatcctgagcagtgacaaggagaccatcgagatcatcgacctggccaagaaggacctggagaagctgaagaggaaggagaagaggaagaagaagaggctgcagaagctggaggagagcaaccgggaggagaggtctgtggccggcaaggaggacaacacagacacagaccaggagaagaaggaggagaagggcgtgtctgaaagagaaaataatgagctggaggtggaggagagccaggaggtgtctgaccatgaagatgaggaggaggaggaggaggaggaggaggatgacattgatggaggagagagcagtgatgaaagtgacagcgagagtgatgagaaggccaactaccaggccgacctggccaacatcacctgtgagatcgccatcaagcagaagctgattgatgagctggagaacagccagaagaggctgcagaccctgaagaagcagtatgaggagaagctgatgatgctgcagcacaagatccgggacacccagctggagcgggaccaggtgctgcagaacctgggctctgtggagagctacagcgaggagaaggccaagaaggtgcgctcagaatatgagaagaagctgcaggccatgaacaaggagctgcagaggctgcaggccgcccagaaggagcacgcccggctgctgaagaaccagagccagtatgagaagcagctgaagaagctgcagcaggatgtgatggagatgaagaagaccaaggtgcggctgatgaagcagatgaaggaggagcaggagaaggcccggctgacagagagcagaagaaaccgggagatcgcccagctgaagaaggaccagaggaagagggaccaccagctgcggctgctggaggcccagaagaggaaccaggaggtggtgctgcggaggaagacagaggaggtgacagccctgcggcggcaggtgcggcccatgtctgacaaggtggccggcaaggtgaccaggaagctgagcagcagtgatgccccagcccaggacaccggcagcagcgctgctgctgtggagacagatgccagcaggactggagcccagcagaagatgagaattcctgtggcccgggtgcaggccctgcccaccccagccaccaacggcaacaggaagaagtaccagaggaagggcctgaccggccgggtcttcatcagcaagacagccaggatgaagtggcagctgctggagcggcgggtgacagacatcatcatgcagaagatgaccatcagcaacatggaggccgacatgaaccggctgctgaagcagcgggaggagctgaccaagaggcgggagaagctgagcaagagaagagagaagatcgtgaaggaaaatggagagggggacaagaatgtggccaacatcaatgaggagatggagagcctgacagccaacatcgactacatcaatgacagcatcagtgactgccaggccaacatcatgcagatggaggaggccaaggaggagggggagaccctggatgtgacagctgtgatcaatgcctgcaccctgacagaggcccgctacctgctggaccacttcctgtccatgggcatcaacaagggcctgcaggccgcccagaaggaggcccagatcaaggtgctggagggccgcctgaagcagacagagatcaccagcgccacccagaaccagctgctcttccacatgctgaaggagaaggccgagctgaaccctgagctggatgccctgctgggccacgccctgcaggacttcaagcacttctttgtggagaatgtggaggacagcacagatgaagatgcccccctgaacagccctggcagcgagggcagcaccctgagcagtgacctgatgaagctgtgtggggaggtgaagcccaagaacaaggcccggcggaggaccaccacccagatggagctgctgtatgctgacagcagcgagctggccagtgacaccagcactggagatgccagcctgcccggccccctgacccctgtggccgagggccaggagatcggcatgaacacagagaccagcggcaccagcgcccgggagaaggagctgagccccccacctggcctgcccagcaagattggcagcatcagccggcagagcagcctgtctgagaagaagatccctgagcccagccctgtgaccaggaggaaggcctatgagaaggccgagaagagcaaggccaaggagcagaagcagagtgatgaaagtgacagcagcctgtctgaggtgcaccggggcatcatcaaccccttccctgccagcaagggcatccgggccttccccctgcagtgcatccacatcgccgagggccacaccaaggctgtgctgtgtgtggacagcacagatgacctgctcttcaccggcagcaaggacaggacctgcaaggtgtggaacctggtgacaggccaggagatcatgagcctgggcggccaccccaacaacgtggtgtctgtgaagtactgcaactacaccagcctggtgttcaccgtgtccaccagctacatcaaggtgtgggacatccgggacagcgccaagtgcatccgcaccctgaccagcagcggccaggtgaccctgggagatgcctgcagcgccagcaccagcaggacagtggccatccccagcggggagaaccagatcaaccagatcgccctgaaccccaccggcaccttcctgtatgctgccagcggaaatgctgtgaggatgtgggacctgaagcgcttccagagcacaggcaagctgaccggccacctgggccctgtgatgtgcctgactgtggaccagatcagcagcggccaggacctgatcatcaccggcagcaaggaccactacatcaagatgtttgatgtgacagagggcgccctgggcaccgtgagccccacccacaactttgagcccccccactatgatggcatcgaggccctgaccatccagggcgacaacctcttcagcggcagccgggacaatggcatcaagaagtgggacctgacccagaaggacctgctgcagcaggtgcccaatgcccacaaggactgggtgtgtgccctgggcgtggtgcctgaccaccctgtgctgctgagcggctgccggggcggcatcctgaaggtgtggaacatggacaccttcatgcctgtgggggagatgaagggccatgacagccccatcaatgccatctgtgtgaacagcacccacatcttcaccgctgctgatgacagaacagtgcgcatctggaaggccaggaacctgcaggacggccagatcagtgacacaggagacctgggggaggacatcgccagcaactag

SEQ ID NO: 157034 - DNA, 5025 bp, synthetic construct
  misc_feature 1..5025: note = Description of Artificial Sequence: Synthetic coding sequence
  source 1..5025: mol_type = other DNA
atgctgggcgccccagatgagagctctgtgcgggtggccgtgcgcatccggccccagctggccaaggagaagattgagggctgccacatctgcacctctgtgaccccaggagagccccaggtgttcctgggcaaggacaaggccttcacctttgattatgtgtttgatattgacagccagcaggagcagatctacatccagtgcatcgagaagctgattgagggctgctttgagggctacaatgccaccgtgtttgcctacggccagacaggagctgggaagacctacaccatgggcaccggctttgatgtgaacatcgtggaggaggagctgggcatcatcagcagagctgtgaagcacctgttcaagagcattgaggagaagaagcacatcgccatcaagaatggcctgcctgccccagacttcaaggtgaatgcccagttcctggagctgtacaatgaggaggtgctggacctgtttgacaccacccgggacattgatgccaagagcaagaagagcaacatccgcatccacgaggacagcactggaggcatctacacagtgggcgtgaccaccaggacagtgaacacagaaagtgagatgatgcagtgcctgaagctgggcgccctgagcaggaccacagccagcacccagatgaatgtgcagagcagccgcagccacgccatcttcaccatccacgtgtgccagaccagggtgtgcccccagattgatgctgacaatgccacagacaacaagatcatcagcgagagcgcccagatgaatgaatttgagaccctgacagccaagttccactttgtggacctggccggcagcgagcggctgaagaggactggagccactggagagcgggccaaggagggcatcagcatcaactgtggcctgctggccctgggcaatgtcatcagcgccctgggggacaagagcaagagggccacccacgtgccctacagagacagcaagctgacccggctgctgcaggacagcctgggcggcaacagccagaccatcatgattgcctgtgtgagccccagcgaccgggacttcatggagaccctgaacaccctgaagtatgccaacagagccaggaacatcaagaacaaggtgatggtgaaccaggaccgggccagccagcagatcaatgccctgcggtctgagatcacccggctgcagatggagctgatggagtacaagacaggcaagaggatcattgatgaggagggcgtggagagcatcaatgacatgtttcatgaaaatgccatgctgcagacagagaacaacaacctgcgggtgcgcatcaaggccatgcaggagaccgtggatgccctgcggagccgcatcacccagctggtgtctgaccaggccaaccacgtgctggcccgggccggggagggcaatgaggagatcagcaacatgatccacagctacatcaaggagattgaggacctgcgggccaagctgctggagagcgaggccgtgaatgaaaacctgaggaagaacctgacccgggccacagcccgggccccctacttcagcggcagcagcaccttcagccccaccatcctgagcagtgacaaggagaccatcgagatcatcgacctggccaagaaggacctggagaagctgaagaggaaggagaagaggaagaagaagaggctgcagaagctggaggagagcaaccgggaggagaggtctgtggccggcaaggaggacaacacagacacagaccaggagaagaaggaggagaagggcgtgtctgaaagagaaaataatgagctggaggtggaggagagccaggaggtgtctgaccatgaagatgaggaggaggaggaggaggaggaggaggatgacattgatggaggagagagcagtgatgaaagtgacagcgagagtgatgagaaggccaactaccaggccgacctggccaacatcacctgtgagatcgccatcaagcagaagctgattgatgagctggagaacagccagaagaggctgcagaccctgaagaagcagtatgaggagaagctgatgatgctgcagcacaagatccgggacacccagctggagcgggaccaggtgctgcagaacctgggctctgtggagagctacagcgaggagaaggccaagaaggtgcgctcagaatatgagaagaagctgcaggccatgaacaaggagctgcagaggctgcaggccgcccagaaggagcacgcccggctgctgaagaaccagagccagtatgagaagcagctgaagaagctgcagcaggatgtgatggagatgaagaagaccaaggtgcggctgatgaagcagatgaaggaggagcaggagaaggcccggctgacagagagcagaagaaaccgggagatcgcccagctgaagaaggaccagaggaagagggaccaccagctgcggctgctggaggcccagaagaggaaccaggaggtggtgctgcggaggaagacagaggaggtgacagccctgcggcggcaggtgcggcccatgtctgacaaggtggccggcaaggtgaccaggaagctgagcagcagtgatgccccagcccaggacaccggcagcagcgctgctgctgtggagacagatgccagcaggactggagcccagcagaagatgagaattcctgtggcccgggtgcaggccctgcccaccccagccaccaacggcaacaggaagaagtaccagaggaagggcctgaccggccgggtcttcatcagcaagacagccaggatgaagtggcagctgctggagcggcgggtgacagacatcatcatgcagaagatgaccatcagcaacatggaggccgacatgaaccggctgctgaagcagcgggaggagctgaccaagaggcgggagaagctgagcaagagaagagagaagatcgtgaaggaaaatggagagggggacaagaatgtggccaacatcaatgaggagatggagagcctgacagccaacatcgactacatcaatgacagcatcagtgactgccaggccaacatcatgcagatggaggaggccaaggaggagggggagaccctggatgtgacagctgtgatcaatgcctgcaccctgacagaggcccgctacctgctggaccacttcctgtccatgggcatcaacaagggcctgcaggccgcccagaaggaggcccagatcaaggtgctggagggccgcctgaagcagacagagatcaccagcgccacccagaaccagctgctcttccacatgctgaaggagaaggccgagctgaaccctgagctggatgccctgctgggccacgccctgcaggacctggacagcgtgcccctggagaatgtggaggacagcacagatgaagatgcccccctgaacagccctggcagcgagggcagcaccctgagcagtgacctgatgaagctgtgtggggaggtgaagcccaagaacaaggcccggcggaggaccaccacccagatggagctgctgtatgctgacagcagcgagctggccagtgacaccagcactggagatgccagcctgcccggccccctgacccctgtggccgagggccaggagatcggcatgaacacagagaccagcggcaccagcgcccgggagaaggagctgagccccccacctggcctgcccagcaagattggcagcatcagccggcagagcagcctgtctgagaagaagatccctgagcccagccctgtgaccaggaggaaggcctatgagaaggccgagaagagcaaggccaaggagcagaagcacagcgacagcggcaccagcgaggccagcctgagcccccccagcagcccccccagccggcccagaaatgagctgaatgtgttcaaccggctgactgtgtcccagggcaacacctctgtgcagcaggacaagagtgatgaaagtgacagcagcctgtctgaggtgcacaggagcagcagaagaggcatcatcaaccccttccctgccagcaagggcatccgggccttccccctgcagtgcatccacatcgccgagggccacaccaaggctgtgctgtgtgtggacagcacagatgacctgctcttcaccggcagcaaggacaggacctgcaaggtgtggaacctggtgacaggccaggagatcatgagcctgggcggccaccccaacaacgtggtgtctgtgaagtactgcaactacaccagcctggtgttcaccgtgtccaccagctacatcaaggtgtgggacatccgggacagcgccaagtgcatccgcaccctgaccagcagcggccaggtgaccctgggagatgcctgcagcgccagcaccagcaggacagtggccatccccagcggggagaaccagatcaaccagatcgccctgaaccccaccggcaccttcctgtatgctgccagcggaaatgctgtgaggatgtgggacctgaagcgcttccagagcacaggcaagctgaccggccacctgggccctgtgatgtgcctgactgtggaccagatcagcagcggccaggacctgatcatcaccggcagcaaggaccactacatcaagatgtttgatgtgacagaaggagccctgggcaccgtgagccccacccacaactttgagcccccccactatgatggcatcgaggccctgaccatccagggcgacaacctcttcagcggcagccgggacaatggcatcaagaagtgggacctgacccagaaggacctgctgcagcaggtgcccaatgcccacaaggactgggtgtgtgccctgggcgtggtgcctgaccaccctgtgctgctgagcggctgccggggcggcatcctgaaggtgtggaacatggacaccttcatgcctgtgggggagatgaagggccatgacagccccatcaatgccatctgtgtgaacagcacccacatcttcaccgctgctgatgacagaacagtgcgcatctggaaggccaggaacctgcaggacggccagatcagtgacaccggggacctgggagaagatattgccagcaactag

SEQ ID NO: 157035 - DNA, 4986 bp, synthetic construct
  misc_feature 1..4986: note = Description of Artificial Sequence: Synthetic coding sequence
  source 1..4986: mol_type = other DNA
atgctgggcgccccagatgagagctctgtgcgggtggccgtgcgcatccggccccagctggccaaggagaagattgagggctgccacatctgcacctctgtgaccccaggagagccccaggtgttcctgggcaaggacaaggccttcacctttgattatgtgtttgatattgacagccagcaggagcagatctacatccagtgcatcgagaagctgattgagggctgctttgagggctacaatgccaccgtgtttgcctacggccagacaggagctgggaagacctacaccatgggcaccggctttgatgtgaacatcgtggaggaggagctgggcatcatcagcagagctgtgaagcacctgttcaagagcattgaggagaagaagcacatcgccatcaagaatggcctgcctgccccagacttcaaggtgaatgcccagttcctggagctgtacaatgaggaggtgctggacctgtttgacaccacccgggacattgatgccaagagcaagaagagcaacatccgcatccacgaggacagcactggaggcatctacacagtgggcgtgaccaccaggacagtgaacacagaaagtgagatgatgcagtgcctgaagctgggcgccctgagcaggaccacagccagcacccagatgaatgtgcagagcagccgcagccacgccatcttcaccatccacgtgtgccagaccagggtgtgcccccagattgatgctgacaatgccacagacaacaagatcatcagcgagagcgcccagatgaatgaatttgagaccctgacagccaagttccactttgtggacctggccggcagcgagcggctgaagaggactggagccactggagagcgggccaaggagggcatcagcatcaactgtggcctgctggccctgggcaatgtcatcagcgccctgggggacaagagcaagagggccacccacgtgccctacagagacagcaagctgacccggctgctgcaggacagcctgggcggcaacagccagaccatcatgattgcctgtgtgagccccagcgaccgggacttcatggagaccctgaacaccctgaagtatgccaacagagccaggaacatcaagaacaaggtgatggtgaaccaggaccgggccagccagcagatcaatgccctgcggtctgagatcacccggctgcagatggagctgatggagtacaagacaggcaagaggatcattgatgaggagggcgtggagagcatcaatgacatgtttcatgaaaatgccatgctgcagacagagaacaacaacctgcgggtgcgcatcaaggccatgcaggagaccgtggatgccctgcggagccgcatcacccagctggtgtctgaccaggccaaccacgtgctggcccgggccggggagggcaatgaggagatcagcaacatgatccacagctacatcaaggagattgaggacctgcgggccaagctgctggagagcgaggccgtgaatgaaaacctgaggaagaacctgacccgggccacagcccgggccccctacttcagcggcagcagcaccttcagccccaccatcctgagcagtgacaaggagaccatcgagatcatcgacctggccaagaaggacctggagaagctgaagaggaaggagaagaggaagaagaagtctgtggccggcaaggaggacaacacagacacagaccaggagaagaaggaggagaagggcgtgtctgagcgggagaacaatgagctggaggtggaggagagccaggaggtgtctgaccatgaagatgaggaggaggaggaggaggaggaggaggatgacattgatggaggagagagcagtgatgaaagtgacagcgagagtgatgagaaggccaactaccaggccgacctggccaacatcacctgtgaaattgccatcaagcagaagctgattgatgagctggagaacagccagaagaggctgcagaccctgaagaagcagtatgaggagaagctgatgatgctgcagcacaagatccgggacacccagctggagcgggaccaggtgctgcagaacctgggctctgtggagagctacagcgaggagaaggccaagaaggtgcgctcagaatatgagaagaagctgcaggccatgaacaaggagctgcagaggctgcaggccgcccagaaggagcacgcccggctgctgaagaaccagagccagtatgagaagcagctgaagaagctgcagcaggatgtgatggagatgaagaagaccaaggtgcggctgatgaagcagatgaaggaggagcaggagaaggcccggctgacagagagcagaagaaaccgggagatcgcccagctgaagaaggaccagaggaagagggaccaccagctgcggctgctggaggcccagaagaggaaccaggaggtggtgctgcggaggaagacagaggaggtgacagccctgcggcggcaggtgcggcccatgtctgacaaggtggccggcaaggtgaccaggaagctgagcagcagtgatgccccagcccaggacaccggcagcagcgctgctgctgtggagacagatgccagcaggactggagcccagcagaagatgagaattcctgtggcccgggtgcaggccctgcccaccccagccaccaatggaaacaggaagaagtaccagaggaagggcctgaccggccgggtcttcatcagcaagacagccaggatgaagtggcagctgctggagaggagagtgacagacatcatcatgcagaagatgaccatcagcaacatggaggccgacatgaaccggctgctgaagcagcgggaggagctgaccaagagaagagagaagctgagcaagaggcgggagaagatcgtgaaggaaaatggagagggggacaagaatgtggccaacatcaatgaggagatggagagcctgacagccaacatcgactacatcaatgacagcatcagtgactgccaggccaacatcatgcagatggaggaggccaaggaggagggggagaccctggatgtgacagctgtgatcaatgcctgcaccctgacagaggcccgctacctgctggaccacttcctgtccatgggcatcaacaagggcctgcaggccgcccagaaggaggcccagatcaaggtgctggagggccgcctgaagcagacagagatcaccagcgccacccagaaccagctgctcttccacatgctgaaggagaaggccgagctgaaccctgagctggatgccctgctgggccacgccctgcaggacctggacagcgtgcccctggagaatgtggaggacagcacagatgaagatgcccccctgaacagccctggcagcgagggcagcaccctgagcagtgacctgatgaagctgtgtggggaggtgaagcccaagaacaaggcccggcggaggaccaccacccagatggagctgctgtatgctgacagcagcgagctggccagtgacaccagcactggagatgccagcctgcccggccccctgacccctgtggccgagggccaggagatcggcatgaacacagagaccagcggcaccagcgcccgggagaaggagctgagccccccacctggcctgcccagcaagattggcagcatcagccggcagagcagcctgtctgagaagaagatccctgagcccagccctgtgaccaggaggaaggcctatgagaaggccgagaagagcaaggccaaggagcagaagcacagcgacagcggcaccagcgaggccagcctgagcccccccagcagcccccccagccggcccagaaatgagctgaatgtgttcaaccggctgactgtgtcccagggcaacacctctgtgcagcaggacaagagtgatgaaagtgacagcagcctgtctgaggtgcacaggagcagccggcggggcatcatcaaccccttccctgccagcaagggcatccgggccttccccctgcagtgcatccacatcgccgagggccacaccaaggctgtgctgtgtgtggacagcacagatgacctgctcttcaccggcagcaaggacaggacctgcaaggtgtggaacctggtgacaggccaggagatcatgagcctgggcggccaccccaacaacgtggtgtctgtgaagtactgcaactacaccagcctggtgttcaccgtgtccaccagctacatcaaggtgtgggacatccgggacagcgccaagtgcatccgcaccctgaccagcagcggccaggtgaccctgggagatgcctgcagcgccagcaccagcaggacagtggccatccccagcggggagaaccagatcaaccagatcgccctgaaccccaccggcaccttcctgtatgctgccagcggaaatgctgtgaggatgtgggacctgaagcgcttccagagcacaggcaagctgaccggccacctgggccctgtgatgtgcctgactgtggaccagatcagcagcggccaggacctgatcatcaccggcagcaaggaccactacatcaagatgtttgatgtgacagagggcgccctgggcaccgtgagccccacccacaactttgagcccccccactatgatggcatcgaggccctgaccatccagggcgacaacctcttcagcggcagccgggacaatggcatcaagaagtgggacctgacccagaaggacctgctgcagcaggtgcccaatgcccacaaggactgggtgtgtgccctgggcgtggtgcctgaccaccctgtgctgctgagcggctgccggggcggcatcctgaaggtgtggaacatggacaccttcatgcctgtgggggagatgaagggccatgacagccccatcaatgccatctgtgtgaacagcacccacatcttcaccgctgctgatgacagaacagtgcgcatctggaaggccaggaacctgcaggacggccagatcagtgacacaggagacctgggggaggacatcgccagcaactag

SEQ ID NO: 157036 - DNA, 5028 bp, synthetic construct
  misc_feature 1..5028: note = Description of Artificial Sequence: Synthetic coding sequence
  source 1..5028: mol_type = other DNA
atgctgggcgccccagatgagagctctgtgcgggtggccgtgcgcatccggccccagctggccaaggagaagattgagggctgccacatctgcacctctgtgaccccaggagagccccaggtgttcctgggcaaggacaaggccttcacctttgattatgtgtttgatattgacagccagcaggagcagatctacatccagtgcatcgagaagctgattgagggctgctttgagggctacaatgccaccgtgtttgcctacggccagacaggagctgggaagacctacaccatgggcaccggctttgatgtgaacatcgtggaggaggagctgggcatcatcagcagagctgtgaagcacctgttcaagagcattgaggagaagaagcacatcgccatcaagaatggcctgcctgccccagacttcaaggtgaatgcccagttcctggagctgtacaatgaggaggtgctggacctgtttgacaccacccgggacattgatgccaagagcaagaagagcaacatccgcatccacgaggacagcactggaggcatctacacagtgggcgtgaccaccaggacagtgaacacagaaagtgagatgatgcagtgcctgaagctgggcgccctgagcaggaccacagccagcacccagatgaatgtgcagagcagccgcagccacgccatcttcaccatccacgtgtgccagaccagggtgtgcccccagattgatgctgacaatgccacagacaacaagatcatcagcgagagcgcccagatgaatgaatttgagaccctgacagccaagttccactttgtggacctggccggcagcgagcggctgaagaggactggagccactggagagcgggccaaggagggcatcagcatcaactgtggcctgctggccctgggcaatgtcatcagcgccctgggggacaagagcaagagggccacccacgtgccctacagagacagcaagctgacccggctgctgcaggacagcctgggcggcaacagccagaccatcatgattgcctgtgtgagccccagcgaccgggacttcatggagaccctgaacaccctgaagtatgccaacagagccaggaacatcaagaacaaggtgatggtgaaccaggaccgggccagccagcagatcaatgccctgcggtctgagatcacccggctgcagatggagctgatggagtacaagacaggcaagaggatcattgatgaggagggcgtggagagcatcaatgacatgtttcatgaaaatgccatgctgcagacagagaacaacaacctgcgggtgcgcatcaaggccatgcaggagaccgtggatgccctgcggagccgcatcacccagctggtgtctgaccaggccaaccacgtgctggcccgggccggggagggcaatgaggagatcagcaacatgatccacagctacatcaaggagattgaggacctgcgggccaagctgctggagagcgaggccgtgaatgaaaacctgaggaagaacctgacccgggccacagcccgggccccctacttcagcggcagcagcaccttcagccccaccatcctgagcagtgacaaggagaccatcgagatcatcgacctggccaagaaggacctggagaagctgaagaggaaggagaagaggaagaagaagaggctgcagaagctggaggagagcaaccgggaggagaggtctgtggccggcaaggaggacaacacagacacagaccaggagaagaaggaggagaagggcgtgtctgaaagagaaaataatgagctggaggtggaggagagccaggaggtgtctgaccatgaagatgaggaggaggaggaggaggaggaggaggatgacattgatggaggagagagcagtgatgaaagtgacagcgagagtgatgagaaggccaactaccaggccgacctggccaacatcacctgtgagatcgccatcaagcagaagctgattgatgagctggagaacagccagaagaggctgcagaccctgaagaagcagtatgaggagaagctgatgatgctgcagcacaagatccgggacacccagctggagcgggaccaggtgctgcagaacctgggctctgtggagagctacagcgaggagaaggccaagaaggtgcgctcagaatatgagaagaagctgcaggccatgaacaaggagctgcagaggctgcaggccgcccagaaggagcacgcccggctgctgaagaaccagagccagtatgagaagcagctgaagaagctgcagcaggatgtgatggagatgaagaagaccaaggtgcggctgatgaagcagatgaaggaggagcaggagaaggcccggctgacagagagcagaagaaaccgggagatcgcccagctgaagaaggaccagaggaagagggaccaccagctgcggctgctggaggcccagaagaggaaccaggaggtggtgctgcggaggaagacagaggaggtgacagccctgcggcggcaggtgcggcccatgtctgacaaggtggccggcaaggtgaccaggaagctgagcagcagtgatgccccagcccaggacaccggcagcagcgctgctgctgtggagacagatgccagcaggactggagcccagcagaagatgagaattcctgtggcccgggtgcaggccctgcccaccccagccaccaacggcaacaggaagaagtaccagaggaagggcctgaccggccgggtcttcatcagcaagacagccaggatgaagtggcagctgctggagcggcgggtgacagacatcatcatgcagaagatgaccatcagcaacatggaggccgacatgaaccggctgctgaagcagcgggaggagctgaccaagaggcgggagaagctgagcaagagaagagagaagatcgtgaaggaaaatggagagggggacaagaatgtggccaacatcaatgaggagatggagagcctgacagccaacatcgactacatcaatgacagcatcagtgactgccaggccaacatcatgcagatggaggaggccaaggaggagggggagaccctggatgtgacagctgtgatcaatgcctgcaccctgacagaggcccgctacctgctggaccacttcctgtccatgggcatcaacaagggcctgcaggccgcccagaaggaggcccagatcaaggtgctggagggccgcctgaagcagacagagatcaccagcgccacccagaaccagctgctcttccacatgctgaaggagaaggccgagctgaaccctgagctggatgccctgctgggccacgccctgcaggacttcaagcacttctttgtggagaatgtggaggacagcacagatgaagatgcccccctgaacagccctggcagcgagggcagcaccctgagcagtgacctgatgaagctgtgtggggaggtgaagcccaagaacaaggcccggcggaggaccaccacccagatggagctgctgtatgctgacagcagcgagctggccagtgacaccagcactggagatgccagcctgcccggccccctgacccctgtggccgagggccaggagatcggcatgaacacagagaccagcggcaccagcgcccgggagaaggagctgagccccccacctggcctgcccagcaagattggcagcatcagccggcagagcagcctgtctgagaagaagatccctgagcccagccctgtgaccaggaggaaggcctatgagaaggccgagaagagcaaggccaaggagcagaagcacagcgacagcggcaccagcgaggccagcctgagcccccccagcagcccccccagccggcccagaaatgagctgaatgtgttcaaccggctgactgtgtcccagggcaacacctctgtgcagcaggacaagagtgatgaaagtgacagcagcctgtctgaggtgcacaggaacagcaacctgcggggcatcatcaaccccttccctgccagcaagggcatccgggccttccccctgcagtgcatccacatcgccgagggccacaccaaggctgtgctgtgtgtggacagcacagatgacctgctcttcaccggcagcaaggacaggacctgcaaggtgtggaacctggtgacaggccaggagatcatgagcctgggcggccaccccaacaacgtggtgtctgtgaagtactgcaactacaccagcctggtgttcaccgtgtccaccagctacatcaaggtgtgggacatccgggacagcgccaagtgcatccgcaccctgaccagcagcggccaggtgaccctgggagatgcctgcagcgccagcaccagcaggacagtggccatccccagcggggagaaccagatcaaccagatcgccctgaaccccaccggcaccttcctgtatgctgccagcggaaatgctgtgaggatgtgggacctgaagcgcttccagagcacaggcaagctgaccggccacctgggccctgtgatgtgcctgactgtggaccagatcagcagcggccaggacctgatcatcaccggcagcaaggaccactacatcaagatgtttgatgtgacagagggcgccctgggcaccgtgagccccacccacaactttgagcccccccactatgatggcatcgaggccctgaccatccagggcgacaacctcttcagcggcagccgggacaatggcatcaagaagtgggacctgacccagaaggacctgctgcagcaggtgcccaatgcccacaaggactgggtgtgtgccctgggcgtggtgcctgaccaccctgtgctgctgagcggctgccggggcggcatcctgaaggtgtggaacatggacaccttcatgcctgtgggggagatgaagggccatgacagccccatcaatgccatctgtgtgaacagcacccacatcttcaccgctgctgatgacagaacagtgcgcatctggaaggccaggaacctgcaggacggccagatcagtgacacaggagacctgggggaggacatcgccagcaactag

SEQ ID NO: 157037 - DNA, 4866 bp, synthetic construct
  misc_feature 1..4866: note = Description of Artificial Sequence: Synthetic coding sequence
  source 1..4866: mol_type = other DNA
atgctgggcgccccagatgagagctctgtgcgggtggccgtgcgcatccggccccagctggccaaggagaagattgagggctgccacatctgcacctctgtgaccccaggagagccccaggtgttcctgggcaaggacaaggccttcacctttgattatgtgtttgatattgacagccagcaggagcagatctacatccagtgcatcgagaagctgattgagggctgctttgagggctacaatgccaccgtgtttgcctacggccagacaggagctgggaagacctacaccatgggcaccggctttgatgtgaacatcgtggaggaggagctgggcatcatcagcagagctgtgaagcacctgttcaagagcattgaggagaagaagcacatcgccatcaagaatggcctgcctgccccagacttcaaggtgaatgcccagttcctggagctgtacaatgaggaggtgctggacctgtttgacaccacccgggacattgatgccaagagcaagaagagcaacatccgcatccacgaggacagcactggaggcatctacacagtgggcgtgaccaccaggacagtgaacacagaaagtgagatgatgcagtgcctgaagctgggcgccctgagcaggaccacagccagcacccagatgaatgtgcagagcagccgcagccacgccatcttcaccatccacgtgtgccagaccagggtgtgcccccagattgatgctgacaatgccacagacaacaagatcatcagcgagagcgcccagatgaatgaatttgagaccctgacagccaagttccactttgtggacctggccggcagcgagcggctgaagaggactggagccactggagagcgggccaaggagggcatcagcatcaactgtggcctgctggccctgggcaatgtcatcagcgccctgggggacaagagcaagagggccacccacgtgccctacagagacagcaagctgacccggctgctgcaggacagcctgggcggcaacagccagaccatcatgattgcctgtgtgagccccagcgaccgggacttcatggagaccctgaacaccctgaagtatgccaacagagccaggaacatcaagaacaaggtgatggtgaaccaggaccgggccagccagcagatcaatgccctgcggtctgagatcacccggctgcagatggagctgatggagtacaagacaggcaagaggatcattgatgaggagggcgtggagagcatcaatgacatgtttcatgaaaatgccatgctgcagacagagaacaacaacctgcgggtgcgcatcaaggccatgcaggagaccgtggatgccctgcggagccgcatcacccagctggtgtctgaccaggccaaccacgtgctggcccgggccggggagggcaatgaggagatcagcaacatgatccacagctacatcaaggagattgaggacctgcgggccaagctgctggagagcgaggccgtgaatgaaaacctgaggaagaacctgacccgggccacagcccgggccccctacttcagcggcagcagcaccttcagccccaccatcctgagcagtgacaaggagaccatcgagatcatcgacctggccaagaaggacctggagaagctgaagaggaaggagaagaggaagaagaagtctgtggccggcaaggaggacaacacagacacagaccaggagaagaaggaggagaagggcgtgtctgagcgggagaacaatgagctggaggtggaggagagccaggaggtgtctgaccatgaagatgaggaggaggaggaggaggaggaggaggatgacattgatggaggagagagcagtgatgaaagtgacagcgagagtgatgagaaggccaactaccaggccgacctggccaacatcacctgtgaaattgccatcaagcagaagctgattgatgagctggagaacagccagaagaggctgcagaccctgaagaagcagtatgaggagaagctgatgatgctgcagcacaagatccgggacacccagctggagcgggaccaggtgctgcagaacctgggctctgtggagagctacagcgaggagaaggccaagaaggtgcgctcagaatatgagaagaagctgcaggccatgaacaaggagctgcagaggctgcaggccgcccagaaggagcacgcccggctgctgaagaaccagagccagtatgagaagcagctgaagaagctgcagcaggatgtgatggagatgaagaagaccaaggtgcggctgatgaagcagatgaaggaggagcaggagaaggcccggctgacagagagcagaagaaaccgggagatcgcccagctgaagaaggaccagaggaagagagatgtgacagccctgcggcggcaggtgcggcccatgtctgacaaggtggccggcaaggtgaccaggaagctgagcagcagtgatgccccagcccaggacaccggcagcagcgctgctgctgtggagacagatgccagcaggactggagcccagcagaagatgagaattcctgtggcccgggtgcaggccctgcccaccccagccaccaacggcaacaggaagaagtaccagaggaagggcctgaccggccgggtcttcatcagcaagacagccaggatgaagtggcagctgctggagcggcgggtgacagacatcatcatgcagaagatgaccatcagcaacatggaggccgacatgaaccggctgctgaagcagcgggaggagctgaccaagaggcgggagaagctgagcaagagaagagagaagatcgtgaaggaaaatggagagggggacaagaatgtggccaacatcaatgaggagatggagagcctgacagccaacatcgactacatcaatgacagcatcagtgactgccaggccaacatcatgcagatggaggaggccaaggaggagggggagaccctggatgtgacagctgtgatcaatgcctgcaccctgacagaggcccgctacctgctggaccacttcctgtccatgggcatcaacaagggcctgcaggccgcccagaaggaggcccagatcaaggtgctggagggccgcctgaagcagacagagatcaccagcgccacccagaaccagctgctcttccacatgctgaaggagaaggccgagctgaaccctgagctggatgccctgctgggccacgccctgcaggacctggacagcgtgcccctggagaatgtggaggacagcacagatgaagatgcccccctgaacagccctggcagcgagggcagcaccctgagcagtgacctgatgaagctgtgtggggaggtgaagcccaagaacaaggcccggcggaggaccaccacccagatggagctgctgtatgctgacagcagcgagctggccagtgacaccagcactggagatgccagcctgcccggccccctgacccctgtggccgagggccaggagatcggcatgaacacagagaccagcggcaccagcgcccgggagaaggagctgagccccccacctggcctgcccagcaagattggcagcatcagccggcagagcagcctgtctgagaagaagatccctgagcccagccctgtgaccaggaggaaggcctatgagaaggccgagaagagcaaggccaaggagcagaagcacagcgacagcggcaccagcgaggccagcctgagcccccccagcagcccccccagccggcccagaaatgagctgaatgtgttcaaccggctgactgtgtcccagggcaacacctctgtgcagcaggacaagggcatcatcaaccccttccctgccagcaagggcatccgggccttccccctgcagtgcatccacatcgccgagggccacaccaaggctgtgctgtgtgtggacagcacagatgacctgctcttcaccggcagcaaggacaggacctgcaaggtgtggaacctggtgacaggccaggagatcatgagcctgggcggccaccccaacaacgtggtgtctgtgaagtactgcaactacaccagcctggtgttcaccgtgtccaccagctacatcaaggtgtgggacatccgggacagcgccaagtgcatccgcaccctgaccagcagcggccaggtgaccctgggagatgcctgcagcgccagcaccagcaggacagtggccatccccagcggggagaaccagatcaaccagatcgccctgaaccccaccggcaccttcctgtatgctgccagcggaaatgctgtgaggatgtgggacctgaagcgcttccagagcacaggcaagctgaccggccacctgggccctgtgatgtgcctgactgtggaccagatcagcagcggccaggacctgatcatcaccggcagcaaggaccactacatcaagatgtttgatgtgacagagggcgccctgggcaccgtgagccccacccacaactttgagcccccccactatgatggcatcgaggccctgaccatccagggcgacaacctcttcagcggcagccgggacaatggcatcaagaagtgggacctgacccagaaggacctgctgcagcaggtgcccaatgcccacaaggactgggtgtgtgccctgggcgtggtgcctgaccaccctgtgctgctgagcggctgccggggcggcatcctgaaggtgtggaacatggacaccttcatgcctgtgggggagatgaagggccatgacagccccatcaatgccatctgtgtgaacagcacccacatcttcaccgctgctgatgacagaacagtgcgcatctggaaggccaggaacctgcaggacggccagatcagtgacacaggagacctgggggaggacatcgccagcaactag

SEQ ID NO: 157038 - DNA, 4914 bp, synthetic construct
  misc_feature 1..4914: note = Description of Artificial Sequence: Synthetic coding sequence
  source 1..4914: mol_type = other DNA
atgctgggcgccccagatgagagctctgtgcgggtggccgtgcgcatccggccccagctggccaaggagaagattgagggctgccacatctgcacctctgtgaccccaggagagccccaggtgttcctgggcaaggacaaggccttcacctttgattatgtgtttgatattgacagccagcaggagcagatctacatccagtgcatcgagaagctgattgagggctgctttgagggctacaatgccaccgtgtttgcctacggccagacaggagctgggaagacctacaccatgggcaccggctttgatgtgaacatcgtggaggaggagctgggcatcatcagcagagctgtgaagcacctgttcaagagcattgaggagaagaagcacatcgccatcaagaatggcctgcctgccccagacttcaaggtgaatgcccagttcctggagctgtacaatgaggaggtgctggacctgtttgacaccacccgggacattgatgccaagagcaagaagagcaacatccgcatccacgaggacagcactggaggcatctacacagtgggcgtgaccaccaggacagtgaacacagaaagtgagatgatgcagtgcctgaagctgggcgccctgagcaggaccacagccagcacccagatgaatgtgcagagcagccgcagccacgccatcttcaccatccacgtgtgccagaccagggtgtgcccccagattgatgctgacaatgccacagacaacaagatcatcagcgagagcgcccagatgaatgaatttgagaccctgacagccaagttccactttgtggacctggccggcagcgagcggctgaagaggactggagccactggagagcgggccaaggagggcatcagcatcaactgtggcctgctggccctgggcaatgtcatcagcgccctgggggacaagagcaagagggccacccacgtgccctacagagacagcaagctgacccggctgctgcaggacagcctgggcggcaacagccagaccatcatgattgcctgtgtgagccccagcgaccgggacttcatggagaccctgaacaccctgaagtatgccaacagagccaggaacatcaagaacaaggtgatggtgaaccaggaccgggccagccagcagatcaatgccctgcggtctgagatcacccggctgcagatggagctgatggagtacaagacaggcaagaggatcattgatgaggagggcgtggagagcatcaatgacatgtttcatgaaaatgccatgctgcagacagagaacaacaacctgcgggtgcgcatcaaggccatgcaggagaccgtggatgccctgcggagccgcatcacccagctggtgtctgaccaggccaaccacgtgctggcccgggccggggagggcaatgaggagatcagcaacatgatccacagctacatcaaggagattgaggacctgcgggccaagctgctggagagcgaggccgtgaatgaaaacctgaggaagaacctgacccgggccacagcccgggccccctacttcagcggcagcagcaccttcagccccaccatcctgagcagtgacaaggagaccatcgagatcatcgacctggccaagaaggacctggagaagctgaagaggaaggagaagaggaagaagaagtctgtggccggcaaggaggacaacacagacacagaccaggagaagaaggaggagaagggcgtgtctgagcgggagaacaatgagctggaggtggaggagagccaggaggtgtctgaccatgaagatgaggaggaggaggaggaggaggaggaggatgacattgatggaggagagagcagtgatgaaagtgacagcgagagtgatgagaaggccaactaccaggccgacctggccaacatcacctgtgaaattgccatcaagcagaagctgattgatgagctggagaacagccagaagaggctgcagaccctgaagaagcagtatgaggagaagctgatgatgctgcagcacaagatccgggacacccagctggagcgggaccaggtgctgcagaacctgggctctgtggagagctacagcgaggagaaggccaagaaggtgcgctcagaatatgagaagaagctgcaggccatgaacaaggagctgcagaggctgcaggccgcccagaaggagcacgcccggctgctgaagaaccagagccagtatgagaagcagctgaagaagctgcagcaggatgtgatggagatgaagaagaccaaggtgcggctgatgaagcagatgaaggaggagcaggagaaggcccggctgacagagagcagaagaaaccgggagatcgcccagctgaagaaggaccagaggaagagggaccaccagctgcggctgctggaggcccagaagaggaaccaggaggtggtgctgcggaggaagacagaggaggtgacagccctgcggcggcaggtgcggcccatgtctgacaaggtggccggcaaggtgaccaggaagctgagcagcagtgatgccccagcccaggacaccggcagcagcgctgctgctgtggagacagatgccagcaggactggagcccagcagaagatgagaattcctgtggcccgggtgcaggccctgcccaccccagccaccaatggaaacaggaagaagtaccagaggaagggcctgaccggccgggtcttcatcagcaagacagccaggatgaagtggcagctgctggagaggagagtgacagacatcatcatgcagaagatgaccatcagcaacatggaggccgacatgaaccggctgctgaagcagcgggaggagctgaccaagagaagagagaagctgagcaagaggcgggagaagatcgtgaaggaaaatggagagggggacaagaatgtggccaacatcaatgaggagatggagagcctgacagccaacatcgactacatcaatgacagcatcagtgactgccaggccaacatcatgcagatggaggaggccaaggaggagggggagaccctggatgtgacagctgtgatcaatgcctgcaccctgacagaggcccgctacctgctggaccacttcctgtccatgggcatcaacaagggcctgcaggccgcccagaaggaggcccagatcaaggtgctggagggccgcctgaagcagacagagatcaccagcgccacccagaaccagctgctcttccacatgctgaaggagaaggccgagctgaaccctgagctggatgccctgctgggccacgccctgcaggagaatgtggaggacagcacagatgaagatgcccccctgaacagccctggcagcgagggcagcaccctgagcagtgacctgatgaagctgtgtggggaggtgaagcccaagaacaaggcccggcggaggaccaccacccagatggagctgctgtatgctgacagcagcgagctggccagtgacaccagcactggagatgccagcctgcccggccccctgacccctgtggccgagggccaggagatcggcatgaacacagagaccagcggcaccagcgcccgggagaaggagctgagccccccacctggcctgcccagcaagattggcagcatcagccggcagagcagcctgtctgagaagaagatccctgagcccagccctgtgaccaggaggaaggcctatgagaaggccgagaagagcaaggccaaggagcagaagcacagcgacagcggcaccagcgaggccagcctgagcccccccagcagcccccccagccggcccagaaatgagctgaatgtgttcaaccggctgactgtgtcccagggcaacacctctgtgcagcaggacaagggcatcatcaaccccttccctgccagcaagggcatccgggccttccccctgcagtgcatccacatcgccgagggccacaccaaggctgtgctgtgtgtggacagcacagatgacctgctcttcaccggcagcaaggacaggacctgcaaggtgtggaacctggtgacaggccaggagatcatgagcctgggcggccaccccaacaacgtggtgtctgtgaagtactgcaactacaccagcctggtgttcaccgtgtccaccagctacatcaaggtgtgggacatccgggacagcgccaagtgcatccgcaccctgaccagcagcggccaggtgaccctgggagatgcctgcagcgccagcaccagcaggacagtggccatccccagcggggagaaccagatcaaccagatcgccctgaaccccaccggcaccttcctgtatgctgccagcggaaatgctgtgaggatgtgggacctgaagcgcttccagagcacaggcaagctgaccggccacctgggccctgtgatgtgcctgactgtggaccagatcagcagcggccaggacctgatcatcaccggcagcaaggaccactacatcaagatgtttgatgtgacagagggcgccctgggcaccgtgagccccacccacaactttgagcccccccactatgatggcatcgaggccctgaccatccagggcgacaacctcttcagcggcagccgggacaatggcatcaagaagtgggacctgacccagaaggacctgctgcagcaggtgcccaatgcccacaaggactgggtgtgtgccctgggcgtggtgcctgaccaccctgtgctgctgagcggctgccggggcggcatcctgaaggtgtggaacatggacaccttcatgcctgtgggggagatgaagggccatgacagccccatcaatgccatctgtgtgaacagcacccacatcttcaccgctgctgatgacagaacagtgcgcatctggaaggccaggaacctgcaggacggccagatcagtgacacaggagacctgggggaggacatcgccagcaactag

SEQ ID NO: 157039 - DNA, 1986 bp, synthetic construct
  misc_feature 1..1986: note = Description of Artificial Sequence: Synthetic coding sequence
  source 1..1986: mol_type = other DNA
atgaaccggctgctgaagcagcgggaggagctgaccaagaggcgggagaagctgagcaagagaagagagaagatcgtgaaggaaaatggagagggggacaagaatgtggccaacatcaatgaggagatggagagcctgacagccaacatcgactacatcaatgacagcatcagtgactgccaggccaacatcatgcagatggaggaggccaaggaggagggggagaccctggatgtgacagctgtgatcaatgcctgcaccctgacagaggcccgctacctgctggaccacttcctgtccatgggcatcaacaagggcctgcaggccgcccagaaggaggcccagatcaaggtgctggagggccgcctgaagcagacagagatcaccagcgccacccagaaccagctgctcttccacatgctgaaggagaaggccgagctgaaccctgagctggatgccctgctgggccacgccctgcaggagaatgtggaggacagcacagatgaagatgcccccctgaacagccctggcagcgagggcagcaccctgagcagtgacctgatgaagctgtgtggggaggtgaagcccaagaacaaggcccggcggaggaccaccacccagatggagctgctgtatgctgacagcagcgagctggccagtgacaccagcactggagatgccagcctgcccggccccctgacccctgtggccgagggccaggagatcggcatgaacacagagaccagcggcaccagcgcccgggagaaggagctgagccccccacctggcctgcccagcaagattggcagcatcagccggcagagcagcctgtctgagaagaagatccctgagcccagccctgtgaccaggaggaaggcctatgagaaggccgagaagagcaaggccaaggagcagaagcagggcatcatcaaccccttccctgccagcaagggcatccgggccttccccctgcagtgcatccacatcgccgagggccacaccaaggctgtgctgtgtgtggacagcacagatgacctgctcttcaccggcagcaaggacaggacctgcaaggtgtggaacctggtgacaggccaggagatcatgagcctgggcggccaccccaacaacgtggtgtctgtgaagtactgcaactacaccagcctggtgttcaccgtgtccaccagctacatcaaggtgtgggacatccgggacagcgccaagtgcatccgcaccctgaccagcagcggccaggtgaccctgggagatgcctgcagcgccagcaccagcaggacagtggccatccccagcggggagaaccagatcaaccagatcgccctgaaccccaccggcaccttcctgtatgctgccagcggaaatgctgtgaggatgtgggacctgaagcgcttccagagcacaggcaagctgaccggccacctgggccctgtgatgtgcctgactgtggaccagatcagcagcggccaggacctgatcatcaccggcagcaaggaccactacatcaagatgtttgatgtgacagagggcgccctgggcaccgtgagccccacccacaactttgagcccccccactatgatggcatcgaggccctgaccatccagggcgacaacctcttcagcggcagccgggacaatggcatcaagaagtgggacctgacccagaaggacctgctgcagcaggtgcccaatgcccacaaggactgggtgtgtgccctgggcgtggtgcctgaccaccctgtgctgctgagcggctgccggggcggcatcctgaaggtgtggaacatggacaccttcatgcctgtgggggagatgaagggccatgacagccccatcaatgccatctgtgtgaacagcacccacatcttcaccgctgctgatgacagaacagtgcgcatctggaaggccaggaacctgcaggacggccagatcagtgacacaggagacctgggggaggacatcgccagcaactag

SEQ ID NO: 157040 - DNA, 4875 bp, synthetic construct
  misc_feature 1..4875: note = Description of Artificial Sequence: Synthetic coding sequence
  source 1..4875: mol_type = other DNA
atggccggccagggcgactgctgcgtgaaggtggccgtgcgcatccggccccagctgagcaaggagaagattgagggctgccacatctgcacctctgtgaccccaggagagccccaggtgctgctgggcaaggacaaggccttcacctatgactttgtgtttgacctggacacctggcaggagcagatctacagcacctgtgtgtccaagctgattgagggctgctttgagggctacaatgccaccgtgctggcctacggccagacaggagctgggaagacctacaccatgggcactggatttgacatggccaccagcgaggaggagcagggcatcatcccccgggccatcgcccacctgtttggaggcattgctgagaggaagagaagagcccaggagcagggcgtggccggccctgagttcaaggtgtctgcccagttcctggagctgtacaatgaggagatcctggacctgtttgacagcacccgggaccctgacaccaggcaccggcgcagcaacatcaagatccatgaagatgccaatggaggcatctacaccactggagtgaccagccgcctcatccacagccaggaggagctgatccagtgcctgaagcagggcgccctgagcaggaccacagccagcacccagatgaatgtgcagagcagccgcagccacgccatcttcaccatccacctgtgccagatgaggatgtgcacccagcctgacctggtgaatgaggccgtgacaggcctgcctgatggcaccccacccagcagtgaatatgagaccctgacagccaagttccactttgtggacctggccggcagcgagcggctgaagaggactggagccaccggggagcgggccaaggagggcatcagcatcaactgtggcctgctggccctgggcaatgtcatcagcgccctgggggaccagagcaagaaggtggtgcacgtgccctacagagacagcaagctgacccggctgctgcaggacagcctgggcggcaacagccagaccatcatgattgcctgtgtgagccccagcgaccgggacttcatggagaccctgaacaccctgaagtatgccaacagagccaggaacatcaagaacaaggtggtggtgaaccaggacaagaccagccagcagatcagcgccctgcgggcagagatcgcccggctgcagatggagctgatggagtacaaggccggcaagagggtgattggagaagatggagctgagggctacagcgacctcttcagagaaaatgccatgctgcagaaggaaaatggagccctgcggctgcgggtgaaggccatgcaggaggccattgatgccatcaacaacagagtgacccagctgatgagccaggaggccaacctgctgctggccaaggctggagatggaaatgaggccatcggggccctgatccagaactacatccgggagattgaggagctgcggaccaagctgctggagagcgaggccatgaatgaaagcctgcggcgcagcctgagccgggccagcgcccggagcccctacagcctgggcgccagccctgctgccccagccttcggcggcagccctgccagctccatggaggatgccagcgaggtgatccggcgggccaagcaggacctggagcggctgaagaagaaggaggtgcggcagaggaggaagagccctgagaaggaggccttcaagaagagggccaagctgcagcaggagaacagcgaggagacagatgaaaatgaagctgaggaggaggaggaggagagagatgaaagtggctgtgaggaggaggagggccgggaggatgaagatgaggacagcggcagcgaggagagcctggtggacagcgacagcgaccctgaggagaaggaggtgaacttccaggccgacctggccgacctgacctgtgaaattgagatcaagcagaagctgattgatgagctggagaacagccagaggcggctgcagaccctgaagcaccagtatgaggagaagctgatcctgctgcagaacaagatccgggacacccagctggagcgggacagagtgctgcagaacctgagcaccatggagtgctacacagaggagaaggccaacaagatcaaggctgactatgagaagaggctgcgggagatgaacagagacctgcagaagctgcaggccgcccagaaggagcacgcccggctgctgaagaaccagagccgctatgagcgggagctgaagaagctgcaggccgaggtggccgagatgaagaaggccaaggtggccctgatgaagcagatgagggaggagcagcagaggcggcggctggtggagaccaagaggaaccgggagatcgcccagctgaagaaggagcagaggcggcaggagttccagatccgggccctggagagccagaagaggcagcaggagatggtgctgcggaggaagacccaggaggtgtctgccctgcggcggctggccaagcccatgtctgagcgggtggccggccgggccggcctgaagccacccatgctggacagcggggctgaggtgtctgccagcaccaccagcagcgaggccgagagcggggcccggtctgtgagcagcatcgtgcggcagtggaacaggaagatcaaccacttcctgggggaccacccagcccccaccgtgaatggcaccaggcctgccaggaagaagttccagaagaagggggccagccagagcttcagcaaggccgcccggctgaagtggcagagcctggagcggcgcatcatcgacatcgtgatgcagaggatgaccatcgtgaacctggaggccgacatggagcggctcatcaagaagcgggaggagctgttcctgctgcaggaggccctgcggaggaagcgggagcggctgcaggccgagagccctgaggaggagaagggcctgcaggagctggccgaggagattgaggtgctggccgccaacatcgactacatcaatgatggcatcacagactgccaggccaccatcgtgcagctggaggagaccaaggaggagctggacagcacagacacctctgtggtgatcagcagctgcagcctggccgaggcccggctgctgctggacaacttcctgaaggccagcattgacaagggcctgcaggtggcccagaaggaggcccagatccggctgctggagggccgcctgcggcagacagacatggccggcagcagccagaaccacctgctgctggatgccctgcgggagaaggccgaggcccaccctgagctgcaggccctgatctacaacgtgcagcaggagaatggctacgccagcacagatgaggagatcagcgagttcagcgagggcagcttcagccagagcttcaccatgaagggcagcaccagccatgatgacttcaagttcaagtctgagcccaagctgagcgcccagatgaaggctgtgtctgcagaatgtctgggcccccccctggacatcagcaccaagaacatcaccaagagcctggccagcctggtggagatcaaggaggatggagtgggcttctctgtgcgggacccctactacagagacagagtgtccaggacagtgtccctgcccacccggggcagcaccttcccccggcagagccgggccacagagaccagccccctgaccaggaggaagagctatgaccggggccagcccatccgcagcacagatgtgggcttcaccccacccagcagcccccccacccggcccagaaatgacagaaatgtgttcagccggctgaccagcaaccagagccagggcagcgccctggacaagggcatcatcagccctgtgggcggggccaagggggccaggacagcccccctgcagtgtgtgtccatggccgagggccacaccaagcccatcctgtgcctggatgccacagatgagctgctcttcaccggcagcaaggacaggagctgcaagatgtggaacctggtgacaggccaggagattgctgccctgaagggccaccccaacaacgtggtgtccatcaagtactgcagccacagcggcctggtgttttctgtgtccaccagctacatcaaggtgtgggacatccgggacagcgccaagtgcatccgcaccctgaccagcagcggccaggtgatctctggagatgcctgtgccgccaccagcacccgggccatcaccagcgcccagggcgagcaccagatcaaccagatcgccctgagccccagcggcaccatgctgtatgctgccagcggaaatgctgtgcgcatctgggagctgagccgcttccagcctgtgggcaagctgaccggccacatcggccctgtgatgtgcctgactgtgacccagacagccagccagcacgacctggtggtgacaggcagcaaggaccactacgtgaagatgtttgagctgggggagtgtgtgacaggcaccatcggccccacccacaactttgagcccccccactatgatggcattgaatgtctggccatccagggcgacatcctcttcagcggcagccgggacaatggcatcaagaagtgggacctggaccagcaggagctgatccagcagatccccaatgcccacaaggactgggtgtgtgccctggccttcatccctggccggcccatgctgctgagcgcctgcagagctggggtcatcaaggtgtggaatgtggacaacttcacccccatcggggagatcaagggccatgacagccccatcaatgccatctgcaccaatgccaagcacatcttcaccgccagcagtgactgccgggtgaagctgtggaactacgtgcccggcctgaccccctgcctgcccaggagagtgctggccatcaagggccgggccaccaccctgccctag

SEQ ID NO: 157041 - DNA, 4833 bp, synthetic construct
  misc_feature 1..4833: note = Description of Artificial Sequence: Synthetic coding sequence
  source 1..4833: mol_type = other DNA
atggccggccagggcgactgctgcgtgaaggtggccgtgcgcatccggccccagctgagcaaggagaagattgagggctgccacatctgcacctctgtgaccccaggagagccccaggtgctgctgggcaaggacaaggccttcacctatgactttgtgtttgacctggacacctggcaggagcagatctacagcacctgtgtgtccaagctgattgagggctgctttgagggctacaatgccaccgtgctggcctacggccagacaggagctgggaagacctacaccatgggcactggatttgacatggccaccagcgaggaggagcagggcatcatcccccgggccatcgcccacctgtttggaggcattgctgagaggaagagaagagcccaggagcagggcgtggccggccctgagttcaaggtgtctgcccagttcctggagctgtacaatgaggagatcctggacctgtttgacagcacccgggaccctgacaccaggcaccggcgcagcaacatcaagatccatgaagatgccaatggaggcatctacaccactggagtgaccagccgcctcatccacagccaggaggagctgatccagtgcctgaagcagggcgccctgagcaggaccacagccagcacccagatgaatgtgcagagcagccgcagccacgccatcttcaccatccacctgtgccagatgaggatgtgcacccagcctgacctggtgaatgaggccgtgacaggcctgcctgatggcaccccacccagcagtgaatatgagaccctgacagccaagttccactttgtggacctggccggcagcgagcggctgaagaggactggagccaccggggagcgggccaaggagggcatcagcatcaactgtggcctgctggccctgggcaatgtcatcagcgccctgggggaccagagcaagaaggtggtgcacgtgccctacagagacagcaagctgacccggctgctgcaggacagcctgggcggcaacagccagaccatcatgattgcctgtgtgagccccagcgaccgggacttcatggagaccctgaacaccctgaagtatgccaacagagccaggaacatcaagaacaaggtggtggtgaaccaggacaagaccagccagcagatcagcgccctgcgggcagagatcgcccggctgcagatggagctgatggagtacaaggccggcaagagggtgattggagaagatggagctgagggctacagcgacctcttcagagaaaatgccatgctgcagaaggaaaatggagccctgcggctgcgggtgaaggccatgcaggaggccattgatgccatcaacaacagagtgacccagctgatgagccaggaggccaacctgctgctggccaaggctggagatggaaatgaggccatcggggccctgatccagaactacatccgggagattgaggagctgcggaccaagctgctggagagcgaggccatgaatgaaagcctgcggcgcagcctgagccgggccagcgcccggagcccctacagcctgggcgccagccctgctgccccagccttcggcggcagccctgccagctccatggaggatgccagcgaggtgatccggcgggccaagcaggacctggagcggctgaagaagaaggaggtgcggcagaggaggaagagccctgagaaggaggccttcaagaagagggccaagctgcagcaggagaacagcgaggagacagatgaaaatgaagctgaggaggaggaggaggagagagatgaaagtggctgtgaggaggaggagggccgggaggatgaagatgaggacagcggcagcgaggagagcctggtggacagcgacagcgaccctgaggagaaggaggtgaacttccaggccgacctggccgacctgacctgtgaaattgagatcaagcagaagctgattgatgagctggagaacagccagaggcggctgcagaccctgaagcaccagtatgaggagaagctgatcctgctgcagaacaagatccgggacacccagctggagcgggacagagtgctgcagaacctgagcaccatggagtgctacacagaggagaaggccaacaagatcaaggctgactatgagaagaggctgcgggagatgaacagagacctgcagaagctgcaggccgcccagaaggagcacgcccggctgctgaagaaccagagccgctatgagcgggagctgaagaagctgcaggccgaggtggccgagatgaagaaggccaaggtggccctgatgaagcagatgagggaggagcagcagaggcggcggctggtggagaccaagaggaaccgggagatcgcccagctgaagaaggagcagaggcggcaggagttccagatccgggccctggagagccagaagaggcagcaggagatggtgctgcggaggaagacccaggaggtgtctgccctgcggcggctggccaagcccatgtctgagcgggtggccggccgggccggcctgaagccacccatgctggacagcggggctgaggtgtctgccagcaccaccagcagcgaggccgagagcggggcccggtctgtgagcagcatcgtgcggcagtggaacaggaagatcaaccacttcctgggggaccacccagcccccaccgtgaatggcaccaggcctgccaggaagaagttccagaagaagggggccagccagagcttcagcaaggccgcccggctgaagtggcagagcctggagcggcgcatcatcgacatcgtgatgcagaggatgaccatcgtgaacctggaggccgacatggagcggctcatcaagaagcgggaggagctgttcctgctgcaggaggccctgcggaggaagcgggagcggctgcaggccgagagccctgaggaggagaagggcctgcaggagctggccgaggagattgaggtgctggccgccaacatcgactacatcaatgatggcatcacagactgccaggccaccatcgtgcagctggaggagaccaaggaggagctggacagcacagacacctctgtggtgatcagcagctgcagcctggccgaggcccggctgctgctggacaacttcctgaaggccagcattgacaagggcctgcaggtggcccagaaggaggcccagatccggctgctggagggccgcctgcggcagacagacatggccggcagcagccagaaccacctgctgctggatgccctgcgggagaaggccgaggcccaccctgagctgcaggccctgatctacaacgtgcagcaggagaatggctacgccagcacagatgaggagatcagcgagttcagcgagggcagcttcagccagagcttcaccatgaagggcagcaccagccatgatgacttcaagttcaagtctgagcccaagctgagcgcccagatgaaggctgtgtctgcagaatgtctgggcccccccctggacatcagcaccaagaacatcaccaagagcctggccagcctggtggagatcaaggaggatggagtgggcttctctgtgcgggacccctactacagagacagagtgtccaggacagtgtccctgcccacccggggcagcaccttcccccggcagagccgggccacagagaccagccccctgaccaggaggaagagctatgaccggggccagcccatccgcagcacagatgtgggcttcaccccacccagcagcccccccacccggcccagaaatgacagaaatgtgttcagccggctgaccagcaaccagagccagggcagcgccctggacaagggcatcatcagccctgtgggcggggccaagggggccaggacagcccccctgcagtgtgtgtccatggccgagggccacaccaagcccatcctgtgcctggatgccacagatgagctgctcttcaccggcagcaaggacaggagctgcaagatgtggaacctggtgacaggccaggagattgctgccctgaagggccaccccaacaacgtggtgtccatcaagtactgcagccacagcggcctggtgttttctgtgtccaccagctacatcaaggtgtgggacatccgggacagcgccaagtgcatccgcaccctgaccagcagcggccaggtgatctctggagatgcctgtgccgccaccagcacccgggccatcaccagcgcccagggcgagcaccagatcaaccagatcgccctgagccccagcggcaccatgctgtatgctgccagcggaaatgctgtgcgcatctgggagctgagccgcttccagcctgtgggcaagctgaccggccacatcggccctgtgatgtgcctgactgtgacccagacagccagccagcacgacctggtggtgacaggcagcaaggaccactacgtgaagatgtttgagctgggggagtgtgtgacaggcaccatcggccccacccacaactttgagcccccccactatgatggcattgaatgtctggccatccagggcgacatcctcttcagcggcagccgggacaatggcatcaagaagtgggacctggaccagcaggagctgatccagcagatccccaatgcccacaaggactgggtgtgtgccctggccttcatccctggccggcccatgctgctgagcgcctgcagagctggggtcatcaaggtgtggaatgtggacaacttcacccccatcggggagatcaagggccatgacagccccatcaatgccatctgcaccaatgccaagcacatcttcaccgccagcagtgacctgactgtgaagttctggagcgtgcggcggctgccccacagcggccccccatag

SEQ ID NO: 157042 - DNA, 4914 bp, synthetic construct
  misc_feature 1..4914: note = Description of Artificial Sequence: Synthetic coding sequence
  source 1..4914: mol_type = other DNA
atggccggccagggcgactgctgcgtgaaggtggccgtgcgcatccggccccagctgagcaaggagaagattgagggctgccacatctgcacctctgtgaccccaggagagccccaggtgctgctgggcaaggacaaggccttcacctatgactttgtgtttgacctggacacctggcaggagcagatctacagcacctgtgtgtccaagctgattgagggctgctttgagggctacaatgccaccgtgctggcctacggccagacaggagctgggaagacctacaccatgggcactggatttgacatggccaccagcgaggaggagcagggcatcatcccccgggccatcgcccacctgtttggaggcattgctgagaggaagagaagagcccaggagcagggcgtggccggccctgagttcaaggtgtctgcccagttcctggagctgtacaatgaggagatcctggacctgtttgacagcacccgggaccctgacaccaggcaccggcgcagcaacatcaagatccatgaagatgccaatggaggcatctacaccactggagtgaccagccgcctcatccacagccaggaggagctgatccagtgcctgaagcagggcgccctgagcaggaccacagccagcacccagatgaatgtgcagagcagccgcagccacgccatcttcaccatccacctgtgccagatgaggatgtgcacccagcctgacctggtgaatgaggccgtgacaggcctgcctgatggcaccccacccagcagtgaatatgagaccctgacagccaagttccactttgtggacctggccggcagcgagcggctgaagaggactggagccaccggggagcgggccaaggagggcatcagcatcaactgtggcctgctggccctgggcaatgtcatcagcgccctgggggaccagagcaagaaggtggtgcacgtgccctacagagacagcaagctgacccggctgctgcaggacagcctgggcggcaacagccagaccatcatgattgcctgtgtgagccccagcgaccgggacttcatggagaccctgaacaccctgaagtatgccaacagagccaggaacatcaagaacaaggtggtggtgaaccaggacaagaccagccagcagatcagcgccctgcgggcagagatcgcccggctgcagatggagctgatggagtacaaggccggcaagagggtgattggagaagatggagctgagggctacagcgacctcttcagagaaaatgccatgctgcagaaggaaaatggagccctgcggctgcgggtgaaggccatgcaggaggccattgatgccatcaacaacagagtgacccagctgatgagccaggaggccaacctgctgctggccaaggctggagatggaaatgaggccatcggggccctgatccagaactacatccgggagattgaggagctgcggaccaagctgctggagagcgaggccatgaatgaaagcctgcggcgcagcctgagccgggccagcgcccggagcccctacagcctgggcgccagccctgctgccccagccttcggcggcagccctgccagctccatggaggatgccagcgaggtgatccggcgggccaagcaggacctggagcggctgaagaagaaggaggtgcggcagaggaggaagagccctgagaaggaggccttcaagaagagggccaagctgcagcaggagaacagcgaggagacagatgaaaatgaagctgaggaggaggaggaggagagagatgaaagtggctgtgaggaggaggagggccgggaggatgaagatgaggacagcggcagcgaggagagcctggtggacagcgacagcgaccctgaggagaaggaggtgaacttccaggccgacctggccgacctgacctgtgaaattgagatcaagcagaagctgattgatgagctggagaacagccagaggcggctgcagaccctgaagcaccagtatgaggagaagctgatcctgctgcagaacaagatccgggacacccagctggagcgggacagagtgctgcagaacctgagcaccatggagtgctacacagaggagaaggccaacaagatcaaggctgactatgagaagaggctgcgggagatgaacagagacctgcagaagctgcaggccgcccagaaggagcacgcccggctgctgaagaaccagagccgctatgagcgggagctgaagaagctgcaggccgaggtggccgagatgaagaaggccaaggtggccctgatgaagcagatgagggaggagcagcagaggcggcggctggtggagaccaagaggaaccgggagatcgcccagctgaagaaggagcagaggcggcaggagttccagatccgggccctggagagccagaagaggcagcaggagatggtgctgcggaggaagacccaggaggtgtctgccctgcggcggctggccaagcccatgtctgagcgggtggccggccgggccggcctgaagccacccatgctggacagcggggctgaggtgtctgccagcaccaccagcagcgaggccgagagcggggcccggtctgtgagcagcatcgtgcggcagtggaacaggaagatcaaccacttcctgggggaccacccagcccccaccgtgaatggcaccaggcctgccaggaagaagttccagaagaagggggccagccagagcttcagcaaggccgcccggctgaagtggcagagcctggagcggcgcatcatcgacatcgtgatgcagaggatgaccatcgtgaacctggaggccgacatggagcggctcatcaagaagcgggaggagctgttcctgctgcaggaggccctgcggaggaagcgggagcggctgcaggccgagagccctgaggaggagaagggcctgcaggagctggccgaggagattgaggtgctggccgccaacatcgactacatcaatgatggcatcacagactgccaggccaccatcgtgcagctggaggagaccaaggaggagctggacagcacagacacctctgtggtgatcagcagctgcagcctggccgaggcccggctgctgctggacaacttcctgaaggccagcattgacaagggcctgcaggtggcccagaaggaggcccagatccggctgctggagggccgcctgcggcagacagacatggccggcagcagccagaaccacctgctgctggatgccctgcgggagaaggccgaggcccaccctgagctgcaggccctgatctacaacgtgcagcaggagaatggctacgccagcacagatgaggagatcagcgagttcagcgagggcagcttcagccagagcttcaccatgaagggcagcaccagccatgatgacttcaagttcaagtctgagcccaagctgagcgcccagatgaaggctgtgtctgcagaatgtctgggcccccccctggacatcagcaccaagaacatcaccaagagcctggccagcctggtggagatcaaggaggatggagtgggcttctctgtgcgggacccctactacagagacagagtgtccaggacagtgtccctgcccacccggggcagcaccttcccccggcagagccgggccacagagaccagccccctgaccaggaggaagagctatgaccggggccagcccatccgcagcacagatgtgggcttcaccccacccagcagcccccccacccggcccagaaatgacagaaatgtgttcagccggctgaccagcaaccagagccagggcagcgccctggacaagagtgatgacagcgacagcagcctgtctgaggtgctgcggggcatcatcagccctgtgggcggggccaagggggccaggacagcccccctgcagtgtgtgtccatggccgagggccacaccaagcccatcctgtgcctggatgccacagatgagctgctcttcaccggcagcaaggacaggagctgcaagatgtggaacctggtgacaggccaggagattgctgccctgaagggccaccccaacaacgtggtgtccatcaagtactgcagccacagcggcctggtgttttctgtgtccaccagctacatcaaggtgtgggacatccgggacagcgccaagtgcatccgcaccctgaccagcagcggccaggtgatctctggagatgcctgtgccgccaccagcacccgggccatcaccagcgcccagggcgagcaccagatcaaccagatcgccctgagccccagcggcaccatgctgtatgctgccagcggaaatgctgtgcgcatctgggagctgagccgcttccagcctgtgggcaagctgaccggccacatcggccctgtgatgtgcctgactgtgacccagacagccagccagcacgacctggtggtgacaggcagcaaggaccactacgtgaagatgtttgagctgggagaatgtgtgacaggcaccatcggccccacccacaactttgagcccccccactatgatggcatcgagtgcctggccatccagggcgacatcctcttcagcggcagccgggacaatggcatcaagaagtgggacctggaccagcaggagctgatccagcagatccccaatgcccacaaggactgggtgtgtgccctggccttcatccctggccggcccatgctgctgagcgcctgccgggccggggtcatcaaggtgtggaatgtggacaacttcacccccatcggggagatcaagggccatgacagccccatcaatgccatctgcaccaatgccaagcacatcttcaccgccagcagtgactgccgggtgaagctgtggaactacgtgcccggcctgaccccctgcctgccccggcgggtgctggccatcaagggccgggccaccaccctgccctag

SEQ ID NO: 157043 - DNA, 4872 bp, synthetic construct
  misc_feature 1..4872: note = Description of Artificial Sequence: Synthetic coding sequence
  source 1..4872: mol_type = other DNA
atggccggccagggcgactgctgcgtgaaggtggccgtgcgcatccggccccagctgagcaaggagaagattgagggctgccacatctgcacctctgtgaccccaggagagccccaggtgctgctgggcaaggacaaggccttcacctatgactttgtgtttgacctggacacctggcaggagcagatctacagcacctgtgtgtccaagctgattgagggctgctttgagggctacaatgccaccgtgctggcctacggccagacaggagctgggaagacctacaccatgggcactggatttgacatggccaccagcgaggaggagcagggcatcatcccccgggccatcgcccacctgtttggaggcattgctgagaggaagagaagagcccaggagcagggcgtggccggccctgagttcaaggtgtctgcccagttcctggagctgtacaatgaggagatcctggacctgtttgacagcacccgggaccctgacaccaggcaccggcgcagcaacatcaagatccatgaagatgccaatggaggcatctacaccactggagtgaccagccgcctcatccacagccaggaggagctgatccagtgcctgaagcagggcgccctgagcaggaccacagccagcacccagatgaatgtgcagagcagccgcagccacgccatcttcaccatccacctgtgccagatgaggatgtgcacccagcctgacctggtgaatgaggccgtgacaggcctgcctgatggcaccccacccagcagtgaatatgagaccctgacagccaagttccactttgtggacctggccggcagcgagcggctgaagaggactggagccaccggggagcgggccaaggagggcatcagcatcaactgtggcctgctggccctgggcaatgtcatcagcgccctgggggaccagagcaagaaggtggtgcacgtgccctacagagacagcaagctgacccggctgctgcaggacagcctgggcggcaacagccagaccatcatgattgcctgtgtgagccccagcgaccgggacttcatggagaccctgaacaccctgaagtatgccaacagagccaggaacatcaagaacaaggtggtggtgaaccaggacaagaccagccagcagatcagcgccctgcgggcagagatcgcccggctgcagatggagctgatggagtacaaggccggcaagagggtgattggagaagatggagctgagggctacagcgacctcttcagagaaaatgccatgctgcagaaggaaaatggagccctgcggctgcgggtgaaggccatgcaggaggccattgatgccatcaacaacagagtgacccagctgatgagccaggaggccaacctgctgctggccaaggctggagatggaaatgaggccatcggggccctgatccagaactacatccgggagattgaggagctgcggaccaagctgctggagagcgaggccatgaatgaaagcctgcggcgcagcctgagccgggccagcgcccggagcccctacagcctgggcgccagccctgctgccccagccttcggcggcagccctgccagctccatggaggatgccagcgaggtgatccggcgggccaagcaggacctggagcggctgaagaagaaggaggtgcggcagaggaggaagagccctgagaaggaggccttcaagaagagggccaagctgcagcaggagaacagcgaggagacagatgaaaatgaagctgaggaggaggaggaggagagagatgaaagtggctgtgaggaggaggagggccgggaggatgaagatgaggacagcggcagcgaggagagcctggtggacagcgacagcgaccctgaggagaaggaggtgaacttccaggccgacctggccgacctgacctgtgaaattgagatcaagcagaagctgattgatgagctggagaacagccagaggcggctgcagaccctgaagcaccagtatgaggagaagctgatcctgctgcagaacaagatccgggacacccagctggagcgggacagagtgctgcagaacctgagcaccatggagtgctacacagaggagaaggccaacaagatcaaggctgactatgagaagaggctgcgggagatgaacagagacctgcagaagctgcaggccgcccagaaggagcacgcccggctgctgaagaaccagagccgctatgagcgggagctgaagaagctgcaggccgaggtggccgagatgaagaaggccaaggtggccctgatgaagcagatgagggaggagcagcagaggcggcggctggtggagaccaagaggaaccgggagatcgcccagctgaagaaggagcagaggcggcaggagttccagatccgggccctggagagccagaagaggcagcaggagatggtgctgcggaggaagacccaggaggtgtctgccctgcggcggctggccaagcccatgtctgagcgggtggccggccgggccggcctgaagccacccatgctggacagcggggctgaggtgtctgccagcaccaccagcagcgaggccgagagcggggcccggtctgtgagcagcatcgtgcggcagtggaacaggaagatcaaccacttcctgggggaccacccagcccccaccgtgaatggcaccaggcctgccaggaagaagttccagaagaagggggccagccagagcttcagcaaggccgcccggctgaagtggcagagcctggagcggcgcatcatcgacatcgtgatgcagaggatgaccatcgtgaacctggaggccgacatggagcggctcatcaagaagcgggaggagctgttcctgctgcaggaggccctgcggaggaagcgggagcggctgcaggccgagagccctgaggaggagaagggcctgcaggagctggccgaggagattgaggtgctggccgccaacatcgactacatcaatgatggcatcacagactgccaggccaccatcgtgcagctggaggagaccaaggaggagctggacagcacagacacctctgtggtgatcagcagctgcagcctggccgaggcccggctgctgctggacaacttcctgaaggccagcattgacaagggcctgcaggtggcccagaaggaggcccagatccggctgctggagggccgcctgcggcagacagacatggccggcagcagccagaaccacctgctgctggatgccctgcgggagaaggccgaggcccaccctgagctgcaggccctgatctacaacgtgcagcaggagaatggctacgccagcacagatgaggagatcagcgagttcagcgagggcagcttcagccagagcttcaccatgaagggcagcaccagccatgatgacttcaagttcaagtctgagcccaagctgagcgcccagatgaaggctgtgtctgcagaatgtctgggcccccccctggacatcagcaccaagaacatcaccaagagcctggccagcctggtggagatcaaggaggatggagtgggcttctctgtgcgggacccctactacagagacagagtgtccaggacagtgtccctgcccacccggggcagcaccttcccccggcagagccgggccacagagaccagccccctgaccaggaggaagagctatgaccggggccagcccatccgcagcacagatgtgggcttcaccccacccagcagcccccccacccggcccagaaatgacagaaatgtgttcagccggctgaccagcaaccagagccagggcagcgccctggacaagagtgatgacagcgacagcagcctgtctgaggtgctgcggggcatcatcagccctgtgggcggggccaagggggccaggacagcccccctgcagtgtgtgtccatggccgagggccacaccaagcccatcctgtgcctggatgccacagatgagctgctcttcaccggcagcaaggacaggagctgcaagatgtggaacctggtgacaggccaggagattgctgccctgaagggccaccccaacaacgtggtgtccatcaagtactgcagccacagcggcctggtgttttctgtgtccaccagctacatcaaggtgtgggacatccgggacagcgccaagtgcatccgcaccctgaccagcagcggccaggtgatctctggagatgcctgtgccgccaccagcacccgggccatcaccagcgcccagggcgagcaccagatcaaccagatcgccctgagccccagcggcaccatgctgtatgctgccagcggaaatgctgtgcgcatctgggagctgagccgcttccagcctgtgggcaagctgaccggccacatcggccctgtgatgtgcctgactgtgacccagacagccagccagcacgacctggtggtgacaggcagcaaggaccactacgtgaagatgtttgagctgggagaatgtgtgacaggcaccatcggccccacccacaactttgagcccccccactatgatggcatcgagtgcctggccatccagggcgacatcctcttcagcggcagccgggacaatggcatcaagaagtgggacctggaccagcaggagctgatccagcagatccccaatgcccacaaggactgggtgtgtgccctggccttcatccctggccggcccatgctgctgagcgcctgccgggccggggtcatcaaggtgtggaatgtggacaacttcacccccatcggggagatcaagggccatgacagccccatcaatgccatctgcaccaatgccaagcacatcttcaccgccagcagtgacctgactgtgaagttctggagcgtgcggcggctgccccacagcggccccccatag

SEQ ID NO: 157044 - DNA, 5007 bp, synthetic construct
  misc_feature 1..5007: note = Description of Artificial Sequence: Synthetic coding sequence
  source 1..5007: mol_type = other DNA
atggccggccagggcgactgctgcgtgaaggtggccgtgcgcatccggccccagctgagcaaggagaagattgagggctgccacatctgcacctctgtgaccccaggagagccccaggtgctgctgggcaaggacaaggccttcacctatgactttgtgtttgacctggacacctggcaggagcagatctacagcacctgtgtgtccaagctgattgagggctgctttgagggctacaatgccaccgtgctggcctacggccagacaggagctgggaagacctacaccatgggcactggatttgacatggccaccagcgaggaggagcagggcatcatcccccgggccatcgcccacctgtttggaggcattgctgagaggaagagaagagcccaggagcagggcgtggccggccctgagttcaaggtgtctgcccagttcctggagctgtacaatgaggagatcctggacctgtttgacagcacccgggaccctgacaccaggcaccggcgcagcaacatcaagatccatgaagatgccaatggaggcatctacaccactggagtgaccagccgcctcatccacagccaggaggagctgatccagtgcctgaagcagggcgccctgagcaggaccacagccagcacccagatgaatgtgcagagcagccgcagccacgccatcttcaccatccacctgtgccagatgaggatgtgcacccagcctgacctggtgaatgaggccgtgacaggcctgcctgatggcaccccacccagcagtgaatatgagaccctgacagccaagttccactttgtggacctggccggcagcgagcggctgaagaggactggagccaccggggagcgggccaaggagggcatcagcatcaactgtggcctgctggccctgggcaatgtcatcagcgccctgggggaccagagcaagaaggtggtgcacgtgccctacagagacagcaagctgacccggctgctgcaggacagcctgggcggcaacagccagaccatcatgattgcctgtgtgagccccagcgaccgggacttcatggagaccctgaacaccctgaagtatgccaacagagccaggaacatcaagaacaaggtggtggtgaaccaggacaagaccagccagcagatcagcgccctgcgggcagagatcgcccggctgcagatggagctgatggagtacaaggccggcaagagggtgattggagaagatggagctgagggctacagcgacctcttcagagaaaatgccatgctgcagaaggaaaatggagccctgcggctgcgggtgaaggccatgcaggaggccattgatgccatcaacaacagagtgacccagctgatgagccaggaggccaacctgctgctggccaaggctggagatggaaatgaggccatcggggccctgatccagaactacatccgggagattgaggagctgcggaccaagctgctggagagcgaggccatgaatgaaagcctgcggcgcagcctgagccgggccagcgcccggagcccctacagcctgggcgccagccctgctgccccagccttcggcggcagccctgccagctccatggaggatgccagcgaggtgatccggcgggccaagcaggacctggagcggctgaagaagaaggaggtgcggcagaggaggaagagccctgagaaggaggccttcaagaagagggccaagctgcagcaggagaacagcgaggagacagatgaaaatgaagctgaggaggaggaggaggagagagatgaaagtggctgtgaggaggaggagggccgggaggatgaagatgaggacagcggcagcgaggagagcctggtggacagcgacagcgaccctgaggagaaggaggtgaacttccaggccgacctggccgacctgacctgtgaaattgagatcaagcagaagctgattgatgagctggagaacagccagaggcggctgcagaccctgaagcaccagtatgaggagaagctgatcctgctgcagaacaagatccgggacacccagctggagcgggacagagtgctgcagaacctgagcaccatggagtgctacacagaggagaaggccaacaagatcaaggctgactatgagaagaggctgcgggagatgaacagagacctgcagaagctgcaggccgcccagaaggagcacgcccggctgctgaagaaccagagccgctatgagcgggagctgaagaagctgcaggccgaggtggccgagatgaagaaggccaaggtggccctgatgaagcagatgagggaggagcagcagaggcggcggctggtggagaccaagaggaaccgggagatcgcccagctgaagaaggagcagaggcggcaggagttccagatccgggccctggagagccagaagaggcagcaggagatggtgctgcggaggaagacccaggaggtgtctgccctgcggcggctggccaagcccatgtctgagcgggtggccggccgggccggcctgaagccacccatgctggacagcggggctgaggtgtctgccagcaccaccagcagcgaggccgagagcggggcccggtctgtgagcagcatcgtgcggcagtggaacaggaagatcaaccacttcctgggggaccacccagcccccaccgtgaatggcaccaggcctgccaggaagaagttccagaagaagggggccagccagagcttcagcaaggccgcccggctgaagtggcagagcctggagcggcgcatcatcgacatcgtgatgcagaggatgaccatcgtgaacctggaggccgacatggagcggctcatcaagaagcgggaggagctgttcctgctgcaggaggccctgcggaggaagcgggagcggctgcaggccgagagccctgaggaggagaagggcctgcaggagctggccgaggagattgaggtgctggccgccaacatcgactacatcaatgatggcatcacagactgccaggccaccatcgtgcagctggaggagaccaaggaggagctggacagcacagacacctctgtggtgatcagcagctgcagcctggccgaggcccggctgctgctggacaacttcctgaaggccagcattgacaagggcctgcaggtggcccagaaggaggcccagatccggctgctggagggccgcctgcggcagacagacatggccggcagcagccagaaccacctgctgctggatgccctgcgggagaaggccgaggcccaccctgagctgcaggccctgatctacaacgtgcagcaggagaatggctacgccagcacagatgaggagatcagcgagttcagcgagggcagcttcagccagagcttcaccatgaagggcagcaccagccatgatgacttcaagttcaagtctgagcccaagctgagcgcccagatgaaggctgtgtctgcagaatgtctgggcccccccctggacatcagcaccaagaacatcaccaagagcctggccagcctggtggagatcaaggaggatggagtgggcttctctgtgcgggacccctactacagagacagagtgtccaggacagtgtccctgcccacccggggcagcaccttcccccggcagagccgggccacagagaccagccccctgaccaggaggaagagctatgaccggggccagcccatccgcagcacagatgtgggcttcaccccacccagcagcccccccacccggcccagaaatgacagaaatgtgttcagccggctgaccagcaaccagagccagggcagcgccctggacaagagtgatgacagcgacagcagcctgtctgaggtgctgcggggcatcatcagccctgtgggcggggccaagggggccaggacagcccccctgcagtgtgtgtccatggccgagggccacaccaagcccatcctgtgcctggatgccacagatgagctgctcttcaccggcagcaaggacaggagctgcaagatgtggaacctggtgacaggccaggagattgctgccctgaagggccaccccaacaacgtggtgtccatcaagtactgcagccacagcggcctggtgttttctgtgtccaccagctacatcaaggtgtgggacatccgggacagcgccaagtgcatccgcaccctgaccagcagcggccaggtgatctctggagatgcctgtgccgccaccagcacccgggccatcaccagcgcccagggcgagcaccagatcaaccagatcgccctgagccccagcggcaccatgctgtatgctgccagcggaaatgctgtgcgcatctgggagctgagccgcttccagcctgtgggcaagctgaccggccacatcggccctgtgatgtgcctgactgtgacccagacagccagccagcacgacctggtggtgacaggcagcaaggaccactacgtgaagatgtttgagctgggagaatgtgtgacaggcaccatcggccccacccacaactttgagcccccccactatgatggcatcgagtgcctggccatccagggcgacatcctcttcagcggcagccgggacaatggcatcaagaagtgggacctggaccagcaggagctgatccagcagatccccaatgcccacaaggactgggtgtgtgccctggccttcatccctggccggcccatgctgctgagcgcctgccgggccggggtcatcaaggtgtggaatgtggacaacttcacccccatcggggagatcaagggccatgacagccccatcaatgccatctgcaccaatgccaagcacatcttcaccgccagcagtgactgccgggtgaagctgtggaactacgtgcccggcctgaccccctgcctgccccggcgggtgctggccatcaagggccgggccaccacctgcccagaccccccccagctgagcctgagccccctgtccttcttccccagcttcctgttccccctcttcccccactttgacctgagctgcttcctgacctag

SEQ ID NO: 157045 - DNA, 1998 bp, synthetic construct
  misc_feature 1..1998: note = Description of Artificial Sequence: Synthetic coding sequence
  source 1..1998: mol_type = other DNA
atggctgctgggggcagcacccagcagaggagaagagagatggccgccgccagcgctgctgccatctctggagctggccgctgccgcctgagcaagattggagccaccaggaggcctcctccagcccgggtgcgggtggccgtgcggctgcggccctttgtggatggaacagctggggccagtgaccccccctgtgtgcggggcatggacagctgcagcctggagatcgccaactggaggaaccaccaggagaccctgaagtaccagtttgatgccttctacggggagaggagcacccagcaggacatctatgccggctctgtgcagcccatcctgcggcacctgctggagggccagaatgcctctgtgctggcctacggccccactggagctgggaagacccacaccatgctgggcagccctgagcagcccggggtcatcccccgggccctgatggacctgctgcagctgacccgggaggagggcgctgagggccggccctgggccctgtctgtgaccatgagctacctggagatctaccaggagaaggtgctggacctgctggaccctgccagcggggacctggtgatccgggaggactgccggggcaacatcctgatccctggcctgagccagaagcccatcagcagctttgctgactttgagcggcacttcctgcctgccagcaggaacagaacagtgggcgccacccggctgaaccagaggagcagccgcagccatgctgtgctgctggtgaaggtggaccagcgggagcggctggcccccttccggcagcgggagggcaagctgtacctgattgacctggccggcagcgaggacaacagaagaacaggcaacaagggcctgcggctgaaggagagcggggccatcaacaccagcctgtttgtgctgggcaaggtggtggatgccctgaaccagggcctgccccgggtgccctacagagacagcaagctgacccggctgctgcaggacagcctgggcggcagcgcccacagcatcctgattgccaacatcgcccctgagcggcgcttctacctggacacagtgtctgccctgaactttgctgcccggagcaaggaggtgatcaaccggcccttcaccaatgaaagcctgcagccccacgccctgggccctgtgaagctgagccagaaggagctgctgggccccccagaggccaagagggcccggggccctgaggaggaggagatcggcagccctgagcccatggccgccccagccagcgccagccagaagctgagccccctgcagaagctgagctccatggaccctgccatgctggagcggctgctgagcctggaccggctgctggccagccagggcagccagggcgcccccctgctgagcacccccaagcgggagaggatggtgctgatgaagacagtggaggagaaggacctggagattgaaaggctgaagaccaagcagaaggagctggaggccaagatgctggcccagaaggccgaggagaaggagaaccactgccccaccatgctgcggcccctgagccacaggacagtgactggagccaagcccctgaagaaggctgtggtgatgcccctgcagctgatccaggagcaggccgccagccccaatgctgagatccacatcctgaagaacaagggcaggaagaggaagctggagagcctggatgccctggagcctgaggagaaggccgaggactgctgggagctgcagatcagccctgagctgctggcccacggccggcagaagatcctggacctgctgaatgaaggcagcgcccgggacctgcggagcctgcagagaattggccccaagaaggcccagctgattgtgggctggagggagctgcacggccccttcagccaggtggaggacctggagcgggtggagggcatcaccgggaagcagatggagagcttcctgaaggccaacatcctgggcctggccgccggccagagatgtggggccagctag

SEQ ID NO: 157046 - DNA, 219 bp, synthetic construct
  misc_feature 1..219: note = Description of Artificial Sequence: Synthetic coding sequence
  source 1..219: mol_type = other DNA
atgctggcccagaaggccgaggagaaggagaaccactgccccaccatgctgcggcccctgagccacaggacagtgactggagccaagcccctgaagaaggctgtggtgatgcccctgcagctgatccaggagcaggccgccagccccaatgctgagatccacatcctgaagaacaagggcaggaagaggaagggggccaacatcaccaccggctactag

SEQ ID NO: 157047 - DNA, 1794 bp, synthetic construct
  misc_feature 1..1794: note = Description of Artificial Sequence: Synthetic coding sequence
  source 1..1794: mol_type = other DNA
atggacagctgcagcctggagatcgccaactggaggaaccaccaggagaccctgaagtaccagtttgatgccttctacggggagaggagcacccagcaggacatctatgccggctctgtgcagcccatcctgcggcacctgctggagggccagaatgcctctgtgctggcctacggccccactggagctgggaagacccacaccatgctgggcagccctgagcagcccggggtcatcccccgggccctgatggacctgctgcagctgacccgggaggagggcgctgagggccggccctgggccctgtctgtgaccatgagctacctggagatctaccaggagaaggtgctggacctgctggaccctgccagcggggacctggtgatccgggaggactgccggggcaacatcctgatccctggcctgagccagaagcccatcagcagctttgctgactttgagcggcacttcctgcctgccagcaggaacagaacagtgggcgccacccggctgaaccagaggagcagccgcagccatgctgtgctgctggtgaaggtggaccagcgggagcggctggcccccttccggcagcgggagggcaagctgtacctgattgacctggccggcagcgaggacaacagaagaacaggcaacaagggcctgcggctgaaggagagcggggccatcaacaccagcctgtttgtgctgggcaaggtggtggatgccctgaaccagggcctgccccgggtgccctacagagacagcaagctgacccggctgctgcaggacagcctgggcggcagcgcccacagcatcctgattgccaacatcgcccctgagcggcgcttctacctggacacagtgtctgccctgaactttgctgcccggagcaaggaggtgatcaaccggcccttcaccaatgaaagcctgcagccccacgccctgggccctgtgaagctgagccagaaggagctgctgggccccccagaggccaagagggcccggggccctgaggaggaggagatcggcagccctgagcccatggccgccccagccagcgccagccagaagctgagccccctgcagaagctgagctccatggaccctgccatgctggagcggctgctgagcctggaccggctgctggccagccagggcagccagggcgcccccctgctgagcacccccaagcgggagaggatggtgctgatgaagacagtggaggagaaggacctggagattgaaaggctgaagaccaagcagaaggagctggaggccaagatgctggcccagaaggccgaggagaaggagaaccactgccccaccatgctgcggcccctgagccacaggacagtgactggagccaagcccctgaagaaggctgtggtgatgcccctgcagctgatccaggagcaggccgccagccccaatgctgagatccacatcctgaagaacaagggcaggaagaggaagctggagagcctggatgccctggagcctgaggagaaggccgaggactgctgggagctgcagatcagccctgagctgctggcccacggccggcagaagatcctggacctgctgaatgaaggcagcgcccgggacctgcggagcctgcagagaattggccccaagaaggcccagctgattgtgggctggagggagctgcacggccccttcagccaggtggaggacctggagcgggtggagggcatcaccgggaagcagatggagagcttcctgaaggccaacatcctgggcctggccgccggccagagatgtggggccagctag

SEQ ID NO: 157048 - DNA, 1794 bp, synthetic construct; identical to SEQ ID NO: 157047
  misc_feature 1..1794: note = Description of Artificial Sequence: Synthetic coding sequence
  source 1..1794: mol_type = other DNA

SEQ ID NO: 157049 - DNA, 2883 bp, synthetic construct
  misc_feature 1..2883: note = Description of Artificial Sequence: Synthetic coding sequence
  source 1..2883: mol_type = other DNA
atgaagagcgcccgggccaagacccccaggaagcccaccgtgaagaagggcagccagaccaacctgaaggaccctgtgggcgtgtactgccgggtgcggcccctgggcttcccagaccaggagtgctgcatcgaggtgatcaacaacaccaccgtgcagctgcacaccccagagggctaccgcctgaacagaaatggagactacaaggagacccagtacagcttcaagcaggtgtttggcacccacaccacccagaaggagctgtttgatgtggtggccaaccccctggtgaatgacctgatccacggcaagaatggcctgctcttcacctatggagtgacaggcagcggcaagacccacaccatgacaggcagccctggagagggcggcctgctgccccgctgcctggacatgatcttcaacagcatcggcagcttccaggccaagagatatgtgttcaagagcaatgacaggaacagcatggacatccagtgtgaggtggatgccctgctggagcggcagaagcgggaggccatgcccaaccccaagaccagcagcagcaagaggcaggtggaccctgagtttgctgacatgatcaccgtgcaggagttctgcaaggccgaggaggtggatgaggacagcgtgtatggagtgtttgtgtcctacatcgagatctacaacaactacatctatgacctgctggaggaggtgccctttgaccccatcaagcccaagccaccccagagcaagctgctgcgggaggacaagaaccacaacatgtatgtggccggctgcacagaggtggaggtgaagagcacagaggaggcctttgaggtgttctggaggggccagaagaagagaagaattgccaacacccacctgaaccgggagagcagccgcagccacagcgtcttcaacatcaagctggtgcaggcccccctggatgctgatggagacaacgtgctgcaggagaaggagcagatcaccatcagccagctgagcctggtggacctggccggcagcgagaggaccaacagaaccagggctgagggcaaccggctgcgggaggccggcaacatcaaccagagcctgatgaccctgcggacctgcatggatgtgctgcgggagaaccagatgtatggcaccaacaagatggtgccctacagagacagcaagctgacccacctgttcaagaactactttgatggagagggcaaggtgaggatgattgtgtgtgtgaaccccaaggccgaggactatgaggagaacctgcaggtgatgagatttgctgaggtgacccaggaggtggaggtggcccggcctgtggacaaggccatctgtggcctgaccccaggaagacgctacagaaaccagccccggggccctgtgggcaatgagcccctggtgacagatgtggtgctgcagagcttcccccccctgcccagctgtgagatcctggacatcaatgatgagcagaccctgcccaggctcatcgaggccctggagaagaggcacaacctgcggcagatgatgattgatgagttcaacaagcagagcaatgccttcaaggccctgctgcaggagtttgacaatgctgtgctgagcaaagaaaaccacatgcagggcaagctgaatgagaaggagaagatgatcagcggccagaagctggagattgaaaggctggagaagaagaacaagaccctggagtacaagattgagatcctggagaagaccaccaccatctatgaggaggacaagaggaacctgcagcaggagctggagacccagaaccagaagctgcagaggcagttcagtgacaagaggcggctggaggcccggctgcagggcatggtgacagagaccaccatgaagtgggagaaggaatgtgaaagaagagtggccgccaagcagctggagatgcagaacaagctgtgggtgaaggatgagaagctgaagcagctgaaggccatcgtgacagagcccaagacagagaagccagagcggcccagccgggagcgggaccgggagaaggtgacccagaggtctgtgagccccagccctgtgcccctgagcagcaactacatcgcccagatcagcaatggccagcagctgatgagccagccccagctgcaccggcgcagcaacagctgcagcagcatctctgtggccagctgcatcagcgagtgggagcagaagatccccacctacaacacccccctgaaggtgaccagcatcgcccggcggcggcagcaggagcccggccagagcaagacctgcatcgtgtctgacagaagaagaggcatgtactggacagagggccgggaggtggtgcccaccttcagaaatgaaattgaaattgaggaggaccactgcggccgcctgctcttccagcctgaccagaatgccccacccatccggctgcggcaccggcgcagccgctctgctggggaccgctgggtggaccacaagccagccagcaacatgcagacagagaccgtgatgcagccccacgtgccccacgccatcaccgtgtctgtggccaatgagaaggccctggccaagtgtgagaagtacatgctgacccaccaggagctggccagtgatggagaaattgagaccaagctgatcaagggggacatctacaagacccggggcggcggccagagcgtgcagttcacagacatcgagaccctgaagcaggagagccccaacggcagcaggaagagaagaagcagcacagtggccccagcccagccagatggagctgagagcgagtggacagatgtggagacccgctgcagcgtggccgtggagatgagagctggcagccagctgggccctggctaccagcaccacgcccagcccaagaggaagaagccctag

SEQ ID NO: 157050 - DNA, 2022 bp, synthetic construct
  misc_feature 1..2022: note = Description of Artificial Sequence: Synthetic coding sequence
  source 1..2022: mol_type = other DNA
atgatcaccgtgcaggagttctgcaaggccgaggaggtggatgaagattctgtgtatggagtgtttgtgtcctacatcgagatctacaacaactacatctatgacctgctggaggaggtgccctttgaccccatcaagcccaagtggaacagctgcagcacccccatgaggaacacagactttgtgcccccccagagcaagctgctgcgggaggacaagaaccacaacatgtatgtggccggctgcacagaggtggaggtgaagagcacagaggaggcctttgaggtgttctggaggggccagaagaagaggcgcatcgccaacacccacctgaaccgggagagcagccgcagccacagcgtcttcaacatcaagctggtgcaggcccccctggatgctgatggagacaacgtgctgcaggagaaggagcagatcaccatcagccagctgagcctggtggacctggccggcagcgagaggaccaacagaaccagggctgagggcaaccggctgcgggaggccggcaacatcaaccagagcctgatgaccctgcggacctgcatggatgtgctgcgggagaaccagatgtatggcaccaacaagatggtgccctacagagacagcaagctgacccacctgttcaagaactactttgatggagagggcaaggtgaggatgattgtgtgtgtgaaccccaaggcagaagattatgaggagaacctgcaggtgatgagatttgctgaggtgacccaggaggtggaggtggcccggcctgtggacaaggccatctgtggcctgaccccaggccgccgctacagaaaccagccccggggccctgtgggcaatgagcccctggtgacagatgtggtgctgcagagcttcccccccctgcccagctgtgagatcctggacatcaatgatgagcagaccctgccccggctgattgaggccctggagaagaggcacaacctgcggcagatgatgattgatgagttcaacaagcagagcaatgccttcaaggccctgctgcaggagtttgacaatgctgtgctgagcaaggagaaccacatgcagggcaagctgaatgagaaggagaagatgatcagcggccagaagctggagattgagcggctggagaagaagaacaagaccctggagtacaagattgagatcctggagaagaccaccaccatctatgaggaggacaagaggaacctgcagcaggagctggagacccagaaccagaagctgcagaggcagttcagtgacaagaggcggctggaggcccggctgcagggcatggtgacagagaccaccatgaagtgggagaaggaatgtgagcggcgggtggccgccaagcagctggagatgcagaacaagctgtgggtgaaggatgagaagctgaagcagctgaaggccatcgtgacagagcccaagacagagaagccagagcggcccagccgggagcgggaccgggagaaggtgacccagaggtctgtgagccccagccctgtgcccctgctcttccagcctgaccagaatgccccacccatccggctgcggcacagaagaagccgctctgctggggaccgctgggtggaccacaagccagccagcaacatgcagacagaaacagtgatgcagccccacgtgccccacgccatcaccgtgtctgtggccaatgagaaggccctggccaagtgtgagaagtacatgctgacccaccaggagctggccagtgatggagaaattgagaccaagctgatcaagggggacatctacaagacccggggcggcggccagagcgtgcagttcacagacatcgagaccctgaagcaggagagccccaacggcagcaggaagaggaggagcagcacagtggccccagcccagccagatggagctgagagcgagtggacagatgtggagacccgctgcagcgtggccgtggagatgagagctggcagccagctgggccctggctaccagcaccacgcccagcccaagaggaagaagccctag

SEQ ID NO: 157051 - DNA, 2022 bp, synthetic construct; identical to SEQ ID NO: 157050
  misc_feature 1..2022: note = Description of Artificial Sequence: Synthetic coding sequence
  source 1..2022: mol_type = other DNA

SEQ ID NO: 157052 - DNA, 2571 bp, synthetic construct
  misc_feature 1..2571: note = Description of Artificial Sequence: Synthetic coding sequence
  source 1..2571: mol_type = other DNA
atgaagagcgcccgggccaagacccccaggaagcccaccgtgaagaagggcagccagaccaacctgaaggaccctgtgggcgtgtactgccgggtgcggcccctgggcttcccagaccaggagtgctgcatcgaggtgatcaacaacaccaccgtgcagctgcacaccccagagggctaccgcctgaacagaaatggagactacaaggagacccagtacagcttcaagcaggtgtttggcacccacaccacccagaaggagctgtttgatgtggtggccaaccccctggtgaatgacctgatccacggcaagaatggcctgctcttcacctatggagtgacaggcagcggcaagacccacaccatgacaggcagccctggagagggcggcctgctgccccgctgcctggacatgatcttcaacagcatcggcagcttccaggccaagagatatgtgttcaagagcaatgacaggaacagcatggacatccagtgtgaggtggatgccctgctggagcggcagaagcgggaggccatgcccaaccccaagaccagcagcagcaagaggcaggtggaccctgagtttgctgacatgatcaccgtgcaggagttctgcaaggccgaggaggtggatgaggacagcgtgtatggagtgtttgtgtcctacatcgagatctacaacaactacatctatgacctgctggaggaggtgccctttgaccccatcaagcccaagccaccccagagcaagctgctgcgggaggacaagaaccacaacatgtatgtggccggctgcacagaggtggaggtgaagagcacagaggaggcctttgaggtgttctggaggggccagaagaagagaagaattgccaacacccacctgaaccgggagagcagccgcagccacagcgtcttcaacatcaagctggtgcaggcccccctggatgctgatggagacaacgtgctgcaggagaaggagcagatcaccatcagccagctgagcctggtggacctggccggcagcgagaggaccaacagaaccagggctgagggcaaccggctgcgggaggccggcaacatcaaccagagcctgatgaccctgcggacctgcatggatgtgctgcgggagaaccagatgtatggcaccaacaagatggtgccctacagagacagcaagctgacccacctgttcaagaactactttgatggagagggcaaggtgaggatgattgtgtgtgtgaaccccaaggccgaggactatgaggagaacctgcaggtgatgagatttgctgaggtgacccaggaggtggaggtggcccggcctgtggacaaggccatctgtggcctgaccccaggaagacgctacagaaaccagccccggggccctgtgggcaatgagcccctggtgacagatgtggtgctgcagagcttcccccccctgcccagctgtgagatcctggacatcaatgatgagcagaccctgcccaggctcatcgaggccctggagaagaggcacaacctgcggcagatgatgattgatgagttcaacaagcagagcaatgccttcaaggccctgctgcaggagtttgacaatgctgtgctgagcaaagaaaaccacatgcagggcaagctgaatgagaaggagaagatgatcagcggccagaagctggagattgaaaggctggagaagaagaacaagaccctggagtacaagattgagatcctggagaagaccaccaccatctatgaggaggacaagaggaacctgcagcaggagctggagacccagaaccagaagctgcagaggcagttcagtgacaagaggcggctggaggcccggctgcagggcatggtgacagagaccaccatgaagtgggagaaggaatgtgaaagaagagtggccgccaagcagctggagatgcagaacaagctgtgggtgaaggatgagaagctgaagcagctgaaggccatcgtgacagagcccaagacagagaagccagagcggcccagccgggagcgggaccgggagaaggtgacccagaggtctgtgagccccagccctgtgcccctgctcttccagcctgaccagaatgccccacccatccggctgcggcaccggcgcagccgctctgctggggaccgctgggtggaccacaagccagccagcaacatgcagacagagaccgtgatgcagccccacgtgccccacgccatcaccgtgtctgtggccaatgagaaggccctggccaagtgtgagaagtacatgctgacccaccaggagctggccagtgatggagaaattgagaccaagctgatcaagggggacatctacaagacccggggcggcggccagagcgtgcagttcacagacatcgagaccctgaagcaggagagccccaacggcagcaggaagagaagaagcagcacagtggccccagcccagccagatggagctgagagcgagtggacagatgtggagacccgctgcagcgtggccgtggagatgagagctggcagccagctgggccctggctaccagcaccacgcccagcccaagaggaagaagccctag

SEQ ID NO: 157053 - DNA, 2520 bp, synthetic construct
  misc_feature 1..2520: note = Description of Artificial Sequence: Synthetic coding sequence
  source 1..2520: mol_type = other DNA
atgacaggcagccctggagagggcggcctgctgccccgctgcctggacatgatcttcaacagcatcggcagcttccaggccaagcgctacgtgttcaagagcaatgacagaaattccatggacatccagtgtgaggtggatgccctgctggagcggcagaagcgggaggccatgcccaaccccaagaccagcagcagcaagaggcaggtggaccctgagtttgctgacatgatcaccgtgcaggagttctgcaaggccgaggaggtggatgaagattctgtgtatggagtgtttgtgtcctacatcgagatctacaacaactacatctatgacctgctggaggaggtgccctttgaccccatcaagcccaagccaccccagagcaagctgctgcgggaggacaagaaccacaacatgtatgtggccggctgcacagaggtggaggtgaagagcacagaggaggcctttgaggtgttctggaggggccagaagaagaggcgcatcgccaacacccacctgaaccgggagagcagccgcagccacagcgtcttcaacatcaagctggtgcaggcccccctggatgctgatggagacaacgtgctgcaggagaaggagcagatcaccatcagccagctgagcctggtggacctggccggcagcgagaggaccaacagaaccagggctgagggcaaccggctgcgggaggccggcaacatcaaccagagcctgatgaccctgcggacctgcatggatgtgctgcgggagaaccagatgtatggcaccaacaagatggtgccctacagagacagcaagctgacccacctgttcaagaactactttgatggagagggcaaggtgaggatgattgtgtgtgtgaaccccaaggcagaagattatgaggagaacctgcaggtgatgagatttgctgaggtgacccaggaggtggaggtggcccggcctgtggacaaggccatctgtggcctgaccccaggccgccgctacagaaaccagccccggggccctgtgggcaatgagcccctggtgacagatgtggtgctgcagagcttcccccccctgcccagctgtgagatcctggacatcaatgatgagcagaccctgccccggctgattgaggccctggagaagaggcacaacctgcggcagatgatgattgatgagttcaacaagcagagcaatgccttcaaggccctgctgcaggagtttgacaatgctgtgctgagcaaggagaaccacatgcagggcaagctgaatgagaaggagaagatgatcagcggccagaagctggagattgagcggctggagaagaagaacaagaccctggagtacaagattgagatcctggagaagaccaccaccatctatgaggaggacaagaggaacctgcagcaggagctggagacccagaaccagaagctgcagaggcagttcagtgacaagaggcggctggaggcccggctgcagggcatggtgacagagaccaccatgaagtgggagaaggaatgtgagcggcgggtggccgccaagcagctggagatgcagaacaagctgtgggtgaaggatgagaagctgaagcagctgaaggccatcgtgacagagcccaagacagagaagccagagcggcccagccgggagcgggaccgggagaaggtgacccagaggtctgtgagccccagccctgtgcccctgagcagcaactacatcgcccagatcagcaatggccagcagctgatgagccagccccagctgcacagaagaagcaacagctgcagcagcatctctgtggccagctgcatcagcgagtgggagcagaagatccccacctacaacacccccctgaaggtgaccagcatcgcccggcggcggcagcaggagcccggccagagcaagacctgcatcgtgtctgacagaagaagaggcatgtactggacagagggccgggaggtggtgcccaccttcagaaatgaaattgaaattgaggaggaccactgcggccgcctgctcttccagcctgaccagaatgccccacccatccggctgcggcacagaagaagccgctctgctggggaccgctgggtggaccacaagccagccagcaacatgcagacagaaacagtgatgcagccccacgtgccccacgccatcaccgtgtctgtggccaatgagaaggccctggccaagtgtgagaagtacatgctgacccaccaggagctggccagtgatggagaaattgagaccaagctgatcaagggggacatctacaagacccggggcggcggccagagcgtgcagttcacagacatcgagaccctgaagcaggagagccccaacggcagcaggaagaggaggagcagcacagtggccccagcccagccagatggagctgagagcgagtggacagatgtggagacccgctgcagcgtggccgtggagatgagagctggcagccagctgggccctggctaccagcaccacgcccagcccaagaggaagaagccctag

SEQ ID NO: 157054 - DNA, 3705 bp, synthetic construct
  misc_feature 1..3705: note = Description of Artificial Sequence: Synthetic coding sequence
  source 1..3705: mol_type = other DNA
atggcctcctggctgtatgaatgtctgtgtgaggccgagctggcccagtactacagccacttcaccgccctgggcctgcagaagattgatgagctggccaagatcaccatgaaggactacagcaagctgggcgtgcatgacatgaatgacaggaagaggctcttccagctgatcaagatcatcaagatcatgcaggaggaggacaaggctgtgtccatccctgagcggcacctgcagaccagcagcctgcgcatcaagagccaggagctgcggagcggcccccggcggcagctgaactttgacagccctgctgacaacaaggacagaaatgccagcaatgatggctttgagatgtgcagcctgagtgacttcagcgccaatgagcagaagagcacctacctgaaggtgctggagcacatgctgcctgatgacagccagtaccacaccaagacaggcatcctgaatgccacagctggggacagctatgtgcagacagagatcagcaccagcctcttcagccccaactacctgagcgccatcctgggggactgtgacatccccatcatccagaggatcagccacgtgtctggctacaactacggcatcccccacagctgcatccggcagaacaccagcgagaagcagaacccctggacagagatggagaagatccgggtgtgtgtgaggaagaggcccctgggcatgagggaggtgagaagaggagagatcaacatcatcaccgtggaggacaaggagaccctgctggtgcatgagaagaaggaggccgtggacctgacccagtacatcctgcaggtgatcctgaagggcagcaaggagaggagcactggagccactggagtgaatgctgacagcagccgcagccacgccgtcatccagatccagatcaaggacagcgccaagaggaccttcggccgcatctccttcatcgacctggccggcagcgagagagctgctgatgcccgggacagcgaccggcagaccaagatggagggcgctgagatcaaccagagcctgctggccctgaaggagtgcatccgggccctggaccaggagcacacccacacccccttccggcagagcaagctgacccaggtgctgaaggacagcttcatcggaaatgccaagacctgcatgattgccaacatcagccccagccacgtggccacagagcacaccctgaacaccctgcgctatgctgacagagtgaaggagctgaagaagggcatcaagtgctgcacctctgtgaccagcaggaacagaacatctggcaacagcagccccaagaggatccagagcagccctggggccctgtctgaggacaagtgcagccccaagaaggtgaagctgggcttccagcagagcctgactgtggccgcccctggcagcacccggggcaaggtgcaccccctgaccagccacccccccaacatccccttcaccagcgcccccaaggtgtctgggaagagaggaggcagccggggcagccccagccaggagtgggtgatccacgccagccctgtgaagggcaccgtgcgcagcggccacgtggccaagaagaagccagaggagagcgcccccctgtgcagcgagaagaacaggatgggcaacaagacagtgctgggctgggagagccgggccagcggccctggagagggcctggtgcggggcaagctgagcaccaagtgcaagaaggtgcagacagtgcagcctgtgcagaagcagctggtgtcccgggtggagctgagctttggaaatgcccaccacagagctgagtacagccaggacagccagaggggcaccccagcccggcctgccagcgaggcctggaccaacatccccccccaccagaaggagcgggaggagcacctgcgcttctaccaccagcagttccagcagccccccctgctgcagcagaagctgaagtaccagcccctgaagaggagcctgcggcagtacagacctcctgagggccagctgaccaatgagaccccacccctcttccacagctacagtgaaaatcatgatggagcccaggtggaggagctggatgacagcgacttcagcgaggacagcttcagccacatcagcagccagagggccaccaagcagaggaacaccctggagaacagcgaggacagcttcttcctgcaccagacctggggccagggccctgagaagcaggtggccgagcggcagcagagcctcttcagcagccccaggactggagacaagaaggacctgaccaagtcctgggtggacagccgggaccccatcaaccaccggcgggccgccctggaccacagctgcagccccagcaagggccctgtggactggagccgggagaacagcaccagcagcggccccagcccccgggacagcctggccgagaagccctactgcagccaggtggacttcatctaccggcaggagcggggcggcggcagcagctttgacctgaggaaggatgccagccagagcgaggtgtctggagaaaatgaaggcaacctgcccagccctgaggaggatggcttcaccatcagcctgagccacgtggccgtgcccggcagcccagaccagagggacacagtgaccacccccctgcgggaggtgtctgcagatggccccatccaggtgaccagcacagtgaagaatggacatgctgtgcctggagaggacccccggggccagctgggcacccacgccgagtatgccagcggcctgatgagccccctgaccatgagcctgctggagaacccagacaatgaaggcagcccccccagcgagcagctggtgcaggatggagccacccacagcctggtggccgagagcactggaggccctgtggtgagccacacagtgcccagcggggaccaggaggccgccctgcctgtgtcctctgccaccaggcacctgtggctgagcagcagccccccagacaacaagccaggaggagacctgcctgccctgagccccagccccatccggcagcaccctgctgacaagctgcccagccgggaggccgacctgggggaggcctgccagagccgggagaccgtgctcttcagccatgagcacatgggcagcgagcagtatgatgctgatgctgaggagaccggcctggatggctcctggggcttccctgggaagcccttcaccaccatccacatgggcgtgccccacagcggccccaccctgacccccaggacaggcagcagtgatgtggccgaccagctgtgggcccaggagaggaagcaccccacccggctgggctggcaggagtttggcctgagcacagaccccatcaagctgccctgcaacagtgaaaatgtgacctggctgaagccccggcccatcagccgctgcctggcccggcccagcagccccctggtgcccagctgcagccccaagacagctggcaccctgcggcagcccaccctggagcaggcccagcaggtggtgatccgggcccaccaggagcagctggatgagatggccgagctgggcttcaaggaggagaccctgatgagccagctggccagcaatgactttgaagattttgtgacccagctggatgagatcatggtgctgaagagcaagtgcatccagagcctgcggagccagctgcagctgtacctgacctgccacggccccacagctgcccctgagggcaccgtgcccagctag

SEQ ID NO: 157055 - DNA, 4107 bp, synthetic construct
  misc_feature 1..4107: note = Description of Artificial Sequence: Synthetic coding sequence
  source 1..4107: mol_type = other DNA
atggcctcctggctgtatgaatgtctgtgtgaggccgagctggcccagtactacagccacttcaccgccctgggcctgcagaagattgatgagctggccaagatcaccatgaaggactacagcaagctgggcgtgcatgacatgaatgacaggaagaggctcttccagctgatcaagatcatcaagatcatgcaggaggaggacaaggctgtgtccatccctgagcggcacctgcagaccagcagcctgcgcatcaagagccaggagctgcggagcggcccccggcggcagctgaactttgacagccctgctgacaacaaggacagaaatgccagcaatgatggctttgagatgtgcagcctgagtgacttcagcgccaatgagcagaagagcacctacctgaaggtgctggagcacatgctgcctgatgacagccagtaccacaccaagacaggcatcctgaatgccacagctggggacagctatgtgcagacagagatcagcaccagcctcttcagccccaactacctgagcgccatcctgggggactgtgacatccccatcatccagaggatcagccacgtgtctggctacaactacggcatcccccacagctgcatccggcagaacaccagcgagaagcagaacccctggacagagatggagaagatccgggtgtgtgtgaggaagaggcccctgggcatgagggaggtgagaagaggagagatcaacatcatcaccgtggaggacaaggagaccctgctggtgcatgagaagaaggaggccgtggacctgacccagtacatcctgcagcacgtgttctactttgatgaggtgtttggagaggcctgcaccaaccaggatgtgtacatgaagaccacccaccccctcatccagcacatcttcaatggaggaaatgccacctgctttgcctacggccagacaggagctgggaagacctacaccatgattggcacccatgagaaccctggcctgtatgccctggccgccaaggacatcttccggcagctggaggtgtcccagcccaggaagcacctgtttgtgtggatctccttctatgagatctactgcggccagctgtatgacctgctgaacagaaggaagaggctgtttgcccgggaggacagcaagcacatggtgcagatcgtgggcctgcaggagctgcaggtggacagcgtggagctgctgctggaggtgatcctgaagggcagcaaggagaggagcactggagccactggagtgaatgctgacagcagccgcagccacgccgtcatccagatccagatcaaggacagcgccaagaggaccttcggccgcatctccttcatcgacctggccggcagcgagagagctgctgatgcccgggacagcgaccggcagaccaagatggagggcgctgagatcaaccagagcctgctggccctgaaggagtgcatccgggccctggaccaggagcacacccacacccccttccggcagagcaagctgacccaggtgctgaaggacagcttcatcggaaatgccaagacctgcatgattgccaacatcagccccagccacgtggccacagagcacaccctgaacaccctgcgctatgctgacagagtgaaggagctgaagaagggcatcaagtgctgcacctctgtgaccagcaggaacagaacatctggcaacagcagccccaagaggatccagagcagccctggggccctgtctgaggacaagtgcagccccaagaaggtgaagctgggcttccagcagagcctgactgtggccgcccctggcagcacccggggcaaggtgcaccccctgaccagccacccccccaacatccccttcaccagcgcccccaaggtgtctgggaagagaggaggcagccggggcagccccagccaggagtgggtgatccacgccagccctgtgaagggcaccgtgcgcagcggccacgtggccaagaagaagccagaggagagcgcccccctgtgcagcgagaagaacaggatgggcaacaagacagtgctgggctgggagagccgggccagcggccctggagagggcctggtgcggggcaagctgagcaccaagtgcaagaaggtgcagacagtgcagcctgtgcagaagcagctggtgtcccgggtggagctgagctttggaaatgcccaccacagagctgagtacagccaggacagccagaggggcaccccagcccggcctgccagcgaggcctggaccaacatccccccccaccagaaggagcgggaggagcacctgcgcttctaccaccagcagttccagcagccccccctgctgcagcagaagctgaagtaccagcccctgaagaggagcctgcggcagtacagacctcctgagggccagctgaccaatgagaccccacccctcttccacagctacagtgaaaatcatgatggagcccaggtggaggagctggatgacagcgacttcagcgaggacagcttcagccacatcagcagccagagggccaccaagcagaggaacaccctggagaacagcgaggacagcttcttcctgcaccagacctggggccagggccctgagaagcaggtggccgagcggcagcagagcctcttcagcagccccaggactggagacaagaaggacctgaccaagtcctgggtggacagccgggaccccatcaaccaccggcgggccgccctggaccacagctgcagccccagcaagggccctgtggactggagccgggagaacagcaccagcagcggccccagcccccgggacagcctggccgagaagccctactgcagccaggtggacttcatctaccggcaggagcggggcggcggcagcagctttgacctgaggaaggatgccagccagagcgaggtgtctggagaaaatgaaggcaacctgcccagccctgaggaggatggcttcaccatcagcctgagccacgtggccgtgcccggcagcccagaccagagggacacagtgaccacccccctgcgggaggtgtctgcagatggccccatccaggtgaccagcacagtgaagaatggacatgctgtgcctggagaggacccccggggccagctgggcacccacgccgagtatgccagcggcctgatgagccccctgaccatgagcctgctggagaacccagacaatgaaggcagcccccccagcgagcagctggtgcaggatggagccacccacagcctggtggccgagagcactggaggccctgtggtgagccacacagtgcccagcggggaccaggaggccgccctgcctgtgtcctctgccaccaggcacctgtggctgagcagcagccccccagacaacaagccaggaggagacctgcctgccctgagccccagccccatccggcagcaccctgctgacaagctgcccagccgggaggccgacctgggggaggcctgccagagccgggagaccgtgctcttcagccatgagcacatgggcagcgagcagtatgatgctgatgctgaggagaccggcctggatggctcctggggcttccctgggaagcccttcaccaccatccacatgggcgtgccccacagcggccccaccctgacccccaggacaggcagcagtgatgtggccgaccagctgtgggcccaggagaggaagcaccccacccggctgggctggcaggagtttggcctgagcacagaccccatcaagctgccctgcaacagtgaaaatgtgacctggctgaagccccggcccatcagccgctgcctggcccggcccagcagccccctggtgcccagctgcagccccaagacagctggcaccctgcggcagcccaccctggagcaggcccagcaggtggtgatccgggcccaccaggagcagctggatgagatggccgagctgggcttcaaggaggagaccctgatgagccagctggccagcaatgactttgaagattttgtgacccagctggatgagatcatggtgctgaagagcaagtgcatccagagcctgcggagccagctgcagctgtacctgacctgccacggccccacagctgcccctgagggcaccgtgcccagctag

SEQ ID NO: 157056 - DNA, 4107 bp, synthetic construct; identical to SEQ ID NO: 157055
  misc_feature 1..4107: note = Description of Artificial Sequence: Synthetic coding sequence
  source 1..4107: mol_type = other DNA

SEQ ID NO: 157057 - DNA, 3477 bp, synthetic construct
  misc_feature 1..3477: note = Description of Artificial Sequence: Synthetic coding sequence
  source 1..3477: mol_type = other DNA
atggcctcctggctgtatgaatgtctgtgtgaggccgagctggcccagtactacagccacttcaccgccctgggcctgcagaagattgatgagctggccaagatcaccatgaaggactacagcaagctgggcgtgcatgacatgaatgacaggaagaggctcttccagctgatcaagatcatcaagatcatgcaggaggaggacaaggctgtgtccatccctgagcggcacctgcagaccagcagcctgcgcatcaagagccaggagctgcggagcggcccccggcggcagctgaactttgacagccctgctgacaacaaggacagaaatgccagcaatgatggctttgagatgtgcagcctgagtgacttcagcgccaatgagcagaagagcacctacctgaaggtgctggagcacatgctgcctgatgacagccagtaccacaccaagacaggcatcctgaatgccacagctggggacagctatgtgcagacagagatcagcaccagcctcttcagccccaactacctgagcgccatcctgggggactgtgacatccccatcatccagaggatcagccacgtgtctggctacaactacggcatcccccacagctgcatccggcagaacaccagcgagaagcagaacccctggacagagatggagaagatccgggtgtgtgtgaggaagaggcccctgggcatgagggaggtgagaagaggagagatcaacatcatcaccgtggaggacaaggagaccctgctggtgcatgagaagaaggaggccgtggacctgacccagtacatcctgcagcacgtgttctactttgatgaggtgtttggagaggcctgcaccaaccaggatgtgtacatgaagaccacccaccccctcatccagcacatcttcaatggaggaaatgccacctgctttgcctacggccagacaggagctgggaagacctacaccatgattggcacccatgagaaccctggcctgtatgccctggccgccaaggacatcttccggcagctggaggtgtcccagcccaggaagcacctgtttgtgtggatctccttctatgagatctactgcggccagctgtatgacctgctgaacagaaggaagaggctgtttgcccgggaggacagcaagcacatggtgcagatcgtgggcctgcaggagctgcaggtggacagcgtggagctgctgctggaggtgatcctgaagggcagcaaggagaggagcactggagccactggagtgaatgctgacagcagccgcagccacgccgtcatccagatccagatcaaggacagcgccaagaggaccttcggccgcatctccttcatcgacctggccggcagcgagagagctgctgatgcccgggacagcgaccggcagaccaagatggagggcgctgagatcaaccagagcctgctggccctgaaggagtgcatccgggccctggaccaggagcacacccacacccccttccggcagagcaagctgacccaggtgctgaaggacagcttcatcggaaatgccaagacctgcatgattgccaacatcagccccagccacgtggccacagagcacaccctgaacaccctgcgctatgctgacagagtgaaggagctgaagaagggcatcaagtgctgcacctctgtgaccagcaggaacagaacatctggcaacagcagccccaagaggatccagagcagccctggggccctgtctgaggacaagtgcagccccaagaaggtgaagctgggcttccagcagagcctgactgtggccgcccctggcagcacccggggcaaggtgcaccccctgaccagccacccccccaacatccccttcaccagcgcccccaaggtgtctgggaagagaggaggcagccggggcagccccagccaggagtgggtgatccacgccagccctgtgaagggcaccgtgcgcagcggccacgtggccaagaagaagccagaggagagcgcccccctgtgcagcgagaagaacaggatgggcaacaagacagtgctgggctgggagagccgggccagcggccctggagagggcctggtgcggggcaagctgagcaccaagtgcaagaaggtgcagacagtgcagcctgtgcagaagcagctggtgtcccgggtggagctgagctttggaaatgcccaccacagagctgagtacagccaggacagccagaggggcaccccagcccggcctgccagcgaggcctggaccaacatccccccccaccagaaggagcgggaggagcacctgcgcttctaccaccagcagttccagcagccccccctgctgcagcagaagctgaagtaccagcccctgaagaggagcctgcggcagtacagacctcctgagggccagctgaccaatgagaccccacccctcttccacagctacagtgaaaatcatgatggagcccaggtggaggagctggatgacagcgacttcagcgaggacagcttcagccacatcagcagccagagggccaccaagcagaggaacaccctggagaacagcgaggacagcttcttcctgcaccagacctggggccagggccctgagaagcaggtggccgagcggcagcagagcctcttcagcagccccaggactggagacaagaaggacctgaccaagtcctgggtggacagccgggaccccatcaaccaccggcgggccgccctggaccacagctgcagccccagcaagggccctgtggactggagccgggagaacagcaccagcagcggccccagcccccgggacagcctggccgagaagccctactgcagccaggtggacttcatctaccggcaggagcggggcggcggcagcagctttgacctgaggaaggatgccagccagagcgaggtgtctggagaaaatgaaggcaacctgcccagccctgaggaggatggcttcaccatcagcctgagccacgtggccgtgcccggcagcccagaccagagggacacagtgaccacccccctgcgggaggtgtctgcagatggccccatccaggtgaccagcacagtgaagaatggacatgctgtgcctggagaggacccccggggccagctgggcacccacgccgagtatgccagcggcctgatgagccccctgaccatgagcctgctggagaacccagacaatgaaggcagcccccccagcgagcagctggtgcaggatggagccacccacagcctggtggccgagagcactggaggccctgtggtgagccacacagtgcccagcggggaccaggaggccgccctgcctgtgtcctctgccaccaggcacctgtggctgagcagcagccccccagacaacaagccaggaggagacctgcctgccctgggccctggagagaagaccagctacaaggcctggctggccggcgtgtggtttgtgcaccggccccaccaggtggccctgcagcagtag

SEQ ID NO: 157058 - DNA, 999 bp, synthetic construct
  misc_feature 1..999: note = Description of Artificial Sequence: Synthetic coding sequence
  source 1..999: mol_type = other DNA
atgacctggaccagcggccagctgcagcgggagaagcaggcccggcccggcagcggggctgtgctggccttcccagatgacaaggacctgcgggtgtatggccctgctgagagccagagcgctgtgtttggagatgtgtgccccctgctgaccagcctgctggatggctacaacgtgtgtgtgatggcctacggccagacaggcagcggcaagagctacaccatgctgggccgccacagtgatgatggccctgtgctgcccctggacccccagagcgacctgggcatcatcccccgggtggccgaggagctgttccgcctcatcctggagaacaccagccgcagccccaaggtggaggtgtccatcgtggaggtgtacaacaatgacatctttgacctgctggccaaggacagcattgctgctgtgtctggagtgaagcgggaggtggtgacagccaaggatggccgcacagaggtggccctgctggccagcgaggccgtgggcagcgccagcaagctgatggagctggtgcacggcggcctgcagctgcgggccaagcaccccaccctggtgcatgctgacagcagccgcagccacctgatcatcaccgtgaccctgaccacagccagctgcagcgacagcacagctgaccaggcctgcagcgccaccctgccccgggagcagacagaagctggccgggccggccgcagccggcgggccagccagggcgccctggccccccagctggtgcccggcaacccagctggccacgccgagcaggtgcaggcccggctgcagctggtggacagcgctggctctgaatgtgtgggcggagatgccaagctgctggtgatcctgtgcatcagccccagccagaggcacctggcccagaccctgcagggcctgggcttcggcatccgggcccggcaggtgcagaggggccctgccaggaagaagccacccagcagccagacagagggcaagagaagaccagactag

SEQ ID NO: 157059 - DNA, 1155 bp, synthetic construct
  misc_feature 1..1155: note = Description of Artificial Sequence: Synthetic coding sequence
  source 1..1155: mol_type = other DNA
atgacctggaccagcggccagctgcagcgggagaagcaggcccggcccggcagcggggctgtgctggccttcccagatgacaaggacctgcgggtgtatggccctgctgagagccagagcgctgtgtttggagatgtgtgccccctgctgaccagcctgctggatggctacaacgtgtgtgtgatggcctacggccagacaggcagcggcaagagctacaccatgctgggccgccacagtgatgatggccctgtgctgcccctggacccccagagcgacctgggcatcatcccccgggtggccgaggagctgttccgcctcatcctggagaacaccagccgcagccccaaggtggaggtgtccatcgtggaggtgtacaacaatgacatctttgacctgctggccaaggacagcattgctgctgtgtctggagtgaagcgggaggtggtgacagccaaggatggccgcacagaggtggccctgctggccagcgaggccgtgggcagcgccagcaagctgatggagctggtgcacggcggcctgcagctgcgggccaagcaccccaccctggtgcatgctgacagcagccgcagccacctgatcatcaccgtgaccctgaccacagccagctgcagcgacagcacagctgaccaggcctgcagcgccaccctgccccgggagcagacagaagctggccgggccggccgcagccggcgggccagccagggcgccctggccccccagctggtgcccggcaacccagctggccacgccgagcaggtgcaggcccggctgcagctggtggacagcgctggctctgaatgtgtgggcgtgtctggagtgacaggcctggccctgcgggagatggcctgcatcagccgcagcctggccgccctggccggcgtgctgggcgccctgctggagcaccggggccacgccccctacagaaacagccggctgacccacctgctgcaggactgcctgggcggagatgccaagctgctggtgatcctgtgcatcagccccagccagaggcacctggcccagaccctgcagggcctgggcttcggcatccgggcccggcaggtgcagaggggccctgccaggaagaagccacccagcagccagacagagggcaagagaagaccagactag

SEQ ID NO: 157060 - DNA, 1155 bp, synthetic construct; identical to SEQ ID NO: 157059
  misc_feature 1..1155: note = Description of Artificial Sequence: Synthetic coding sequence
  source 1..1155: mol_type = other DNA

SEQ ID NO: 157061 - DNA, 5649 bp, synthetic construct
  misc_feature 1..5649: note = Description of Artificial Sequence: Synthetic coding sequence
  source 1..5649: mol_type = other DNA
atggtgggccggggcgtgcccctgtgtgccgcccagcctgctgtggccgagggcggccctgcccgggagcccccacccctgctggaggtgagccccaggaagaggctgcctgctggccctgaccaggacccctgtggcagcaggcctgcccctgagggcgctggggccggccctgagcagggccacagcgctgggggcggcggctggtgccgccactgccacaccaagctggtggagctgaagaggcaggcctggaagctggtgtctggccctggcaccaccctgcgggacccctgcctgagcgccctgctgctggacaagctgcctgcccctggggccctgcctgcctgcaggcctgaggccgagcggcgctgtgatgtgtgtgccacccacctgcagcagctgacccgggaggccatgcacctgctgcaggccccagccagccatgaggacctggatgccccccacggcggccccagcctggccccacccagcaccaccaccagcagccgggacaccccaggccctgctggccctgctggccggcagcccggccgggccggccctgacaggaccaagggcctggcctggagccctggccccagcgtgcaggtgtctgtggccccagctggcctgggcggggccctgagcacagtgaccatccaggcccagcagtgcctggagggcatgtggagcgtgtcccgggtgaacagcttcctgcccccagcctgcctggccgaggccgctgtggccgctgtggccgtggccgacacagtgagagaatgtcctcctgtggccggcccagatggcctgagcaaggcctggggccggggcggcgtgtgcaccagcgccctggtgacccccaccccaggctctgtgggcggcagcacaggccccagcgctgctgccagcttcttcatccgggccatgcagaagctgagcctggccagcaagaggaagaagccccaccccccacctcctccagccacccggggcaccagcacctaccccacagacttctctggagtgctgcagctgtggcccccaccagccccaccctgcctgctgcgggccgccagcaagaccaaggacaaccctggcagcatcggcaaggtgaaggtgatgctgcgcatctggccagcccagggcgcccagaggtctgctgaggccatgtccttcctgaaggtggaccccaggaagaagcaggtgatcctgtatgaccctgctgctggccccccaggcagcgctggccccaggagagctgccacagctgctgtgcccaagatgtttgcctttgatgctgtgttcccccaggacagcgagcaggccgaggtgtgcagcggcaccgtggctgatgtgctgcagagcgtggtgtctggagcagatggctgcatcttctcctttggccacatgagcctgggcaagagctacaccatgattggcaaggacagcagcccccagagcctgggcatcgtgccctgtgccatctcctggctgttccggctgattgaggagcggcgggagaggacaggcacccgcttctctgtgcgggtgtctgctgtggaggtgtgtggccgggaccagagcctgcgggacctgctggccgaggtggcccctggcagcctgcaggacacccagagccctggggtgtacctgcgggaggaccctgtgtgtggggcccagctgcagaaccagagcgagctgcgggcccccacagctgagaaggccgccttctacctggatgctgccctggccgcccggagcaccagccgggccggctgtggggaggatgcccggcgcagcagccacatgctgttcaccctgcacgtgtaccagtacaggatggagaagtgtggccggggcggcatgtctgggggccgcagccggctgcacctgattgacctgggcagctgtgaggccgccgccggccgggccggggaggccgccggcggccccctgtgcctgagcctgagcgccctgggcagcgtcatcctggccctggtgaatggagccaagcacgtgccctacagagaccaccggctgaccatgctgctgcgggagagcctggccacagctggctgcaggaccaccatgattgcccacgtgtctgatgccccagcccagcacgccgagaccctgagcacagtgcagctggccgcccgcatccaccggctgcggaggaagaaggccaagtatgccagcagcagcagtggaggagagagcagctgtgaggagggccgggcccggcggcccccccacctgcggcccttccaccccaggacagtggccctggaccctgacaggaccccaccctgcctgcccggggaccctgactacagcagcagcagcgagcagagctgtgacaccgtcatctacgtgggccctggaggagctgccctgagtgaccgggagctgacagacaatgaaggacctccagactttgtgcccatcatcccagccctgagccgccaccggcccagcaagggccccagagatgctgaccacttccgctgcagcacctttgctgagctgcaggagcggctggagtgcatggatggaaatgaaggccccagcggcggccctgggggcacagatggagcccaggccagccctgcccggggcggcaggaagcccagccccccagaggccgccagccccaggaaggctgtgggcacccccatggccgccagcaccccccggggcagcagcggccctgacacccaccagggcaccccagagccctgcaaggccatcgtgtggggagaccagcgggaggacagcagcgcctggccagagctgctggtgcctgagaaggctgctgtgtctgggggcagaagacccctgcccagccctgcccctcctccaccccagctgctggaggcctgccgggcccctgaggagcccggcggcggcggcacagatggagtggcccggaccccacctgtgggcatgagcggccaggtggccggcagccccatgctgcccggggccacctgcccccggctggccgccggcagccgctgcccagagcggggcctgctgaccaccaccgtgaccctgcagaggcctgtggagctgaatggagaagatgagctggtgttcaccgtggtggaggagctgagcctgggcgccctggccggggccggccggcccaccagcctggccagctttgacagcgactgcagcctgcgggccctggccagcggcagcaggcctgtgtccatcatcagcagcatcaatgatgaatttgatgcctacaccagccaggcccctgagggcggccccctggagggcgccgcctgggccggcagcagccacggcagcagcatcagctcctggctgtctgaggtgtctgtgtgcacagctgacagccgggaccccaccccccagccccgcttctccccagacagcctggccggcctggaccccggcggccccccagccctggatggcagcctgggagatggcagcagcggcttcctgggccctgacagaccagacagccctggccccacctggggcccctgccctggagaggtggccgctgtggcccccagccggcccggccgggagccccaggccggccccagccgctgggccagcgctgcccagaccatccacagcagcctgcccaggaagcccaggacagccagcgccaccaccagggtgggctgtgcccggctgggccagagccccccaggccggggcggcctgtttgaggacccctggctgctgcgggtgggagaatgtgacacccaggccgccagcgctggccgggcccccagccccaccctgggcagcccccggctgcctgaggcccaggtgatgctggcctgtgcccagagggtggtggatggctgtgaggtggccgcccgggccgcccggcggcctgaggccgtggcccgcatcccccccctgcggcggggggccaccaccctgggcgtgaccaccccagctgtgtcctggggagatgcccccacagaggtggtggcctgcagcggcagcctgaaggccagccccaccagcaagaagggcctggcccccaaggccggcttcctgccccggcccagcggggccgcccccccagccccacccaccaggaagagcagcctggagcagaggagcagccctgccagcgcccctcctcatgctgtgaacccagcccgggtgggcgctgctgctgtgctgcggggggaggaggagccccggcccagcagcagagctgaccacagcgtgccccgggccaccagcagcctgaaggcccgggccagcaaggtggaggccgcccaccggctggccggccacgccagcctggagagatatgagggcctggcccacagcagcagcaagggccgggaggcccctggccggccccccagggctgtgcccaagctgggcgtgccccccagcagccccacccacggccctgccccagcctgccgcagcggggccgccaaggctgtgggcgcccccaagccccctgtgggcggcggcaagggccggggcctggtggccggcggcagccgggccctgggccccagcgtgaagctgagcacagcctctgtgacaggccgcagccctgggggccctgtggccggcccccgggccgccccccgggccggccccagcgtgggcgccaaggccggccggggcaccgtgatgggcaccaagcaggccctgcgggccgcccacagccgggtgcatgagctgagcgccagcggggcccctggccggggcggcagctcctggggcagcgctgacagcgacagcggccatgacagcggcgtgaatgtgggggaggagcggcccccaactggacctgccctgcccagcccctacagcaaggtgacagccccccggcggccccagcgctacagcagcggccacggcagtgacaacagctctgtgctgagcggggagctgcccccagccatgggccgcacagccctcttccaccacagcggcggcagcagcggctatgagagcctgcggcgggacagcgaggccaccggcagcgccagcagcgccccagacagcatgtctgagagcggggccgccagccctggggcccggaccaggagcctgaagagccccaagaagagggccaccggcctgcagaggcggcggctcatcccagcccccctgcctgacaccacagccctgggcaggaagcccagcctgcccggccagtgggtggacctgcccccacccctggccggcagcctgaaggagccctttgagatcaaggtgtatgaaattgatgatgtggagcggctgcagaggccccggcccaccccccgggaggcccccacccagggcctggcctgtgtgtccacccggctgcggctggccgagcggcggcagcagaggctgcgggaggtgcaggccaagcacaagcacctgtgtgaggagctggccgagacccagggccgcctgatgctggagcccggccgctggctggagcagtttgaggtggaccctgagctggagcctgagagcgctgagtacctggccgccctggagcgggccacagctgccctggagcagtgtgtgaacctgtgcaaggcccacgtgatgatggtgacctgctttgacatctctgtggccgccagcgctgccatccctggcccccaggaggtggatgtgtag

SEQ ID NO: 157062 - DNA, 5184 bp, synthetic construct
  misc_feature 1..5184: note = Description of Artificial Sequence: Synthetic coding sequence
  source 1..5184: mol_type = other DNA
atgatgatggactggaaggctgtggccgcccagaagctgaacctgagcagcaagaagaagaagcaccggcccagcaccagcagcgctgctgagccccccctgtttgccaccagcttcagcggcatcctgcagaccagccccccaccagccccaccctgcctgctgcgggctgtgaacaaggtgaaggacaccccaggcctgggcaaggtgaaggtgatgctgcgcatctgcagcaccctggcccgggacaccagcgagagcagcagcttcctgaaggtggaccccaggaagaagcagatcaccctgtatgaccccctgacctgtggcggccagaatgccttccagaagaggggcaaccaggtgccccccaagatgtttgcctttgatgctgtgttcccccaggatgccagccaggccgaggtgtgtgccggcaccgtggccgaggtgatccagagcgtggtgaatggagcagatggctgtgtgttctgcttcggccacgccaagctgggcaagagctacaccatgattggcaaggatgacagcatgcagaacctgggcatcatcccctgtgccatctcctggctgttcaagctgatcaatgaaaggaaggagaagacaggagcccgcttctctgtgcgggtgtctgctgtggaggtgtggggcaaggaggagaacctgcgggacctgctgtctgaggtggccaccggcagcctgcaggacggccagagccctggggtgtacctgtgtgaggaccccatctgtggcacccagctgcagaaccagagcgagctgcgggcccccacagctgagaaggccgccttcttcctggatgctgccatcgccagcagaagaagccaccagcaggactgtgatgaagatgaccacaggaacagccacgtgttcttcaccctgcacatctaccagtacaggatggagaagagcggcaagggcggcatgtctgggggccgcagccggctgcacctgattgacctgggcagctgtgtgaaggccctgagcaagaaccgggagggcggcagcggcctgtgcctgagcctgagcgccctgggcaatgtcatcctggccctggtgaatggcagcaagcacatcccctacaaggagagcaagctggccatgctgctgcgggagagcctgggcaacatgaactgcaggaccaccatgattgcccacatctctgctgctgtgggcagctatgcagagaccctgagcaccatccagatcgccagccgggtgctgaggatgaagaagaagaagaccaagtacaccagcagcagcagcggcggggagagcagctgtgaggagggccgcatgaggcggcccacccagctgcggcccttccacacccgggccaccgtggaccctgacttccccatcgcccacctgagcagtgaccctgactacagcagcagcagcgagcagagctgtgacaccgtcatctacatcggccccaacggcacagccctgagtgacaaggagctgacagacaatgaaggacctccagactttgtgcccatcgtgcctgccctgcagaagaccaggggggacagcaggcctgctgaggccggggaggccgccgccggcaagtctgagcgggactgcctgaagtgcaacacctttgctgagctgcaggagcggctggactgcattgatggcagcgaggagcccagcagcttcccctttgaggagctgcctgcccagtttggacctgagcaggccagccggggcccccggctgagccaggccgccggggccagccccctgtctgagagtgacaaggaggacaatggaagtgagggccagctgaccaaccgggagggccctgagctgcctgccagcaagatgcagaggagccacagccctgtgcctgctgctgccccagcccacagccccagccctgccagccccaggtctgtgcccggcagcagcagccagcacagcgccagccccctggtgcagagccccagcctgcagagcagccgggagagcctgaacagctgtggctttgtggagggcaagccccggcccatgggcagcccccggctgggcatcgccagcctgagcaagaccagcgagtacaagccacccagcagccccagccagcgctgcaaggtgtacacccagaagggcgtgctgcccagccctgcccccctgccccccagcagcaaggacagcggcgtggccagccgggagagcctgctgcagcctgaggtgaggaccccacctgtgggcatgagcccccaggtgctgaagaagtccatgtctgctggcagcgagggcttccctgagacccctgtggatgatgagcagcaggccgccaccccatctgagagcaagaaggagatcctgagcaccaccatggtgacagtgcagcagcccctggagctgaatggagaagatgagctggtgttcaccctggtggaggagctgaccatcagcggcgtgctggacagcggccggcccaccagcatcatctccttcaacagcgactgcagcgcccgggccctggccagcggcagcaggcctgtgtccatcatcagcagcatcagcgaggacctggagtgctacagcagcacagcccctgtgtctgaggtgtccatcacccagttcctgcccctgcccaagatgagcctggatgagaaggcccaggatgctggcagcagaagaagcagcatcagctcctggctgtctgagatgtctgctggcagcgagggggagcagagctgccacagcttcatcgcccagacctgctttggacatggagaggccatggccgagcctgtggccagcgagtttgtgagcagcctgcagaacacagctgtggtgtgccgggagaagcccaaggccagcccagacaacctgctgatcctgtctgagatgggagatgacagcttcaacaaggccgcccccatcaagggctgcaagatcagcacagtgtccaaggccatggtgaccatcagcaacacagccaacctgagcagctgtgagggctacatccccatgaagaccaacatcaccgtgtacccctgcatcgccatgagccccaggaacatccaggagcctgaggcccccacagccacccccaaggccggccccaccctggcccagagccgggagagcaaagaaaattctgccaagaaggagatgaagtttgaggacccctggctgaagcgggaggaggaggtgaagaaggagacagcccaccccaatgaggagggcatgatgagatgtgaaacagccaccggccccagcaatgctgagaccagggctgagcaggagcaggacggcaagcccagccctggggaccggctgagcagcagcagtggagaggtgtctgccagccctgtgacagacaacttccggcgggtggtggatggctgtgagatggccctgcccggcctggccacccagagccctgtgcaccccaacaagtctgtgaagagcagcagcctgccccgggccttccagaaggccagccggcaggaggagccagacagcctgagctactactgtgccgctgagaccaatggagtgggcgccgccagcggcaccccacccagcaaggccaccctggagggcaaggtggccagccccaagcactgtgtgctggcccggcccaagggcaccccacccctgccccctgtgaggaagagcagcctggaccagaagaacagagccagcccccagcacagcgccagcggcagcggcaccagcagccccctgaaccagcctgctgccttccctgctggcctgcctgatgagcccagcggcaagaccaaggatgccagcagcagcagcaagctgttcagcgccaagctggagcagctggccagccgcagcaacagcctgggccgggccaccgtgagccactatgaatgtctgagcctggagcgggcagagagcctgagctctgtgagcagccggctgcacgccggcaaggatggcaccatgcccagggctggccgcagcctgggccgctctgctggcaccagcccccccagcagcggggccagccccaaggccggccagagcaagatctctgctgtgtcccggctgctgctggccagcccccgggcccggggccccagcgccagcaccaccaagaccctgtccttcagcaccaagagcctgccccaggccgtgggccagggcagcagcagccccccaggcggcaagcacaccccctggagcacccagagcctgagcaggaacagaagcagcggcctggccagcaagctgcccctgcgggctgtgtctggccgcatcagcgagctgctgcagggcggggccggggcccggggcctgcagctgcgggccggccctgaggccgaggcccggggcggggccctggctgaagatgagcctgctgctgcccacctgctgcccagcccctacagcaagatcaccccaccaagaagaccccaccgctgcagcagcggccacggcagtgacaacagctctgtgctgtctggagagctgcccccagccatgggcaagacagccctcttctaccacagcggcggcagcagcggctatgaatctgtgatgagggacagcgaggccactggaagtgccagcagcgcccaggacagcaccagcgagaacagcagctctgtgggcggccgctgccgcagcctgaagacccccaagaagaggagcaaccctggcagccagaggagaagactcatcccagccctgagcctggacaccagcagccctgtgaggaagccacccaacagcactggagtgcgctgggtggatggccccctgcggagcagcccccggggcctgggggagccctttgagatcaaggtgtatgaaattgatgatgtggagcggctgcagaggcggcggggcggggccagcaaggaggccatgtgcttcaatgccaagctgaagatcctggagcaccggcagcagagaattgctgaggtgcgggccaagtatgagtggctgatgaaggagctggaggccaccaagcagtacctgatgctggaccccaacaagtggctgtctgaatttgacctggagcaggtgtgggagctggacagcctggagtacctggaggccctggagtgtgtgacagagcggctggagagccgggtgaacttctgcaaggcccacctgatgatgatcacctgctttgacatcaccagcagaagaagatag

SEQ ID NO: 157063 - DNA, 6327 bp, synthetic construct
  misc_feature 1..6327: note = Description of Artificial Sequence: Synthetic coding sequence
  source 1..6327: mol_type = other DNA
atgaacagcgtggccggcaacaaggagcggctggccgtgtccacccggggcaagaagtatggagtgaatgaggtgtgcagccccaccaagccagctgcccccttcagccctgagagctggtacaggaaggcctatgaggagagccgggccggcagccggcccaccccagagggcgccggcagcgccctgggcagcagcggcacccccagccctggcagcggcaccagcagccccagcagcttcaccggcagccctggccctgccagccctggcatcggcaccagcagccctggcagcctgggcggcagccctggcttcggcaccggcagccctggcagcggcagcggcggcggcagcagccctggcagtgaccggggcgtgtggtgtgagaactgcaatgcccggctggtggagctgaagaggcaggccctgcggctgctgctgcccggccccttccctgggaaggaccctgccttctctgctgtgattcatgacaagctgcaggtgcccaacaccatcaggaaggcctggaatgaccgggacaacagatgtgacatctgtgccacccacctgaaccagctgaagcaggaggccatccagatggtgctgaccctggagcaggccgccggcagcgagcactatgatgccagcccctgcagccccccacccctgagcaacatccccaccctggtgggcagcagacatgtgggcggcctgcagcagccccgggactgggcctttgtgcctgccccctgtgccaccagcaactacacaggctttgccaacaagcacggcagcaagcccagcagcctgggcgtgtccaatggagctgagaagaagagcggcagccccacccaccaggccaaggtgtccctgcagatggccaccagccccagcaatggaaacatcctgaacagcgtggccatccaggcccaccagtacctggatggcacctggagcctgagcaggaccaatggagtgaccctgtacccctaccagatcagccagctgatgacagagagcagccgggagggcctgacagaagctgtgctgaaccgctacaatgctgacaagcccagcgcctgcagcgtgcctgccagccagggcagctgtgtggccagcgagaccagcacaggcacctctgtggccgccagcttctttgcccgggccgcccagaagctgaacctgagcagcaagaagaagaagcaccggcccagcaccagcagcgctgctgagccccccctgtttgccaccagcttcagcggcatcctgcagaccagccccccaccagccccaccctgcctgctgcgggctgtgaacaaggtgaaggacaccccaggcctgggcaaggtgaaggtgatgctgcgcatctgcagcaccctggcccgggacaccagcgagagcagcagcttcctgaaggtggaccccaggaagaagcagatcaccctgtatgaccccctgacctgtggcggccagaatgccttccagaagaggggcaaccaggtgccccccaagatgtttgcctttgatgctgtgttcccccaggatgccagccaggccgaggtgtgtgccggcaccgtggccgaggtgatccagagcgtggtgaatggagcagatggctgtgtgttctgctttggacatgccaagctgggcaagagctacaccatgattggcaaggatgacagcatgcagaacctgggcatcatcccctgtgccatctcctggctgttcaagctgatcaatgaaaggaaggagaagacaggagcccgcttctctgtgcgggtgtctgctgtggaggtgtggggcaaggaggagaacctgcgggacctgctgtctgaggtggccaccggcagcctgcaggacggccagagccctggggtgtacctgtgtgaggaccccatctgtggcacccagctgcagaaccagagcgagctgcgggcccccacagctgagaaggccgccttcttcctggatgctgccatcgccagccgccgcagccaccagcaggactgtgatgaagatgaccacaggaacagccacgtgttcttcaccctgcacatctaccagtacaggatggagaagtctggaaaaggaggcatgtctgggggccgcagccggctgcacctgattgacctgggcagctgtgtgaaggccctgagcaagaaccgggagggcggcagcggcctgtgcctgagcctgagcgccctgggcaatgtcatcctggccctggtgaatggcagcaagcacatcccctacaaggagagcaagctggccatgctgctgcgggagagcctgggcaacatgaactgcaggaccaccatgattgcccacatctctgctgctgtgggcagctatgcagagaccctgagcaccatccagatcgccagccgggtgctgaggatgaagaagaagaagaccaagtacaccagcagcagcagtggaggagagagcagctgtgaggagggccgcatgagaagacccacccagctgcggcccttccacacccgggccaccgtggaccctgacttccccatcgcccacctgagcagtgaccctgactacagcagcagcagcgagcagagctgtgacaccgtcatctacatcggccccaatggaacagccctgagtgacaaggagctgacagacaatgaaggccccccagactttgtgcccatcgtgcctgccctgcagaagaccaggggggacagcaggcctgctgaggccggggaggccgctgctgggaagtctgagcgggactgcctgaagtgcaacacctttgctgagctgcaggagcggctggactgcattgatggcagcgaggagcccagcagcttcccctttgaggagctgcctgcccagtttggacctgagcaggccagccggggcccccggctgagccaggccgccggggccagccccctgtctgagagtgacaaggaggacaatggcagcgagggccagctgaccaaccgggagggccctgagctgcctgccagcaagatgcagaggagccacagccctgtgcctgctgctgccccagcccacagccccagccctgccagccccaggtctgtgcccggcagcagcagccagcacagcgccagccccctggtgcagagccccagcctgcagagcagccgggagagcctgaacagctgtggctttgtggagggcaagccccggcccatgggcagcccccggctgggcatcgccagcctgagcaagaccagcgagtacaagccacccagcagccccagccagcgctgcaaggtgtacacccagaagggcgtgctgcccagccctgcccccctgccccccagcagcaaggacagcggcgtggccagccgggagagcctgctgcagcctgaggtgaggaccccacctgtgggcatgagcccccaggtgctgaagaagtccatgtctgctggcagcgagggcttccctgagacccctgtggatgatgagcagcaggccgccacccccagcgagagcaagaaggagatcctgagcaccaccatggtgacagtgcagcagcccctggagctgaatggagaagatgagctggtgttcaccctggtggaggagctgaccatctctggagtgctggacagcggccggcccaccagcatcatctccttcaacagcgactgcagcgcccgggccctggccagcggcagcaggcctgtgtccatcatcagcagcatcagcgaggacctggagtgctacagcagcacagcccctgtgtctgaggtgtccatcacccagttcctgcccctgcccaagatgagcctggatgagaaggcccaggatgctggcagccgccgcagcagcatcagctcctggctgtctgagatgtctgctggcagcgagggggagcagagctgccacagcttcatcgcccagacctgcttcggccacggggaggccatggccgagcctgtggccagcgagtttgtgagcagcctgcagaacacagctgtggtgtgccgggagaagcccaaggccagcccagacaacctgctgatcctgtctgagatgggagatgacagcttcaacaaggccgcccccatcaagggctgcaagatcagcacagtgtccaaggccatggtgaccatcagcaacacagccaacctgagcagctgtgagggctacatccccatgaagaccaacatcaccgtgtacccctgcatcgccatgagccccaggaacatccaggagcctgaggcccccacagccacccccaaggccggccccaccctggcccagagccgggagagcaaggagaacagcgccaagaaggagatgaagtttgaggacccctggctgaagcgggaggaggaggtgaagaaggagacagcccaccccaatgaggagggcatgatgagatgtgaaacagccaccggccccagcaatgctgagaccagggctgagcaggagcaggacggcaagcccagccctggggaccggctgagcagcagcagcggggaggtgtctgccagccctgtgacagacaacttcagaagagtggtggatggctgtgagatggccctgcccggcctggccacccagagccctgtgcaccccaacaagtctgtgaagagcagcagcctgccccgggccttccagaaggccagccggcaggaggagccagacagcctgagctactactgtgccgctgagaccaacggggtgggcgccgccagcggcaccccacccagcaaggccaccctggagggcaaggtggccagccccaagcactgtgtgctggcccggcccaagggcaccccacccctgccccctgtgaggaagagcagcctggaccagaagaacagagccagcccccagcacagcgccagcggcagcggcaccagcagccccctgaaccagcctgctgccttccctgctggcctgcctgatgagcccagcggcaagaccaaggatgccagcagcagcagcaagctgttcagcgccaagctggagcagctggccagccgcagcaacagcctgggccgggccaccgtgagccactatgagtgcctgagcctggagagagctgagagcctgagctctgtgagcagccggctgcatgctgggaaggatggcaccatgccccgggccggccgcagcctgggccgctctgctggcaccagcccccccagcagcggggccagccccaaggccggccagagcaagatctctgctgtgtcccggctgctgctggccagcccccgggcccggggccccagcgccagcaccaccaagaccctgtccttcagcaccaagagcctgccccaggccgtgggccagggcagcagcagccccccaggcggcaagcacaccccctggagcacccagagcctgagcaggaacagaagcagcggcctggccagcaagctgcccctgcgggctgtgtctggccgcatcagcgagctgctgcagggcggggccggggcccggggcctgcagctgcgggccggccctgaggccgaggcccggggcggggccctggccgaggatgagcctgctgctgcccacctgctgcccagcccctacagcaagatcaccccaccccggcggccccaccgctgcagcagcggccacggcagtgacaacagctctgtgctgagcggggagctgcccccagccatgggcaagacagccctcttctaccacagcggcggcagcagcggctatgagagcgtgatgagggacagcgaggccaccggcagcgccagcagcgcccaggacagcaccagcgagaacagcagctctgtgggcggccgctgccgcagcctgaagacccccaagaagaggagcaaccctggcagccagaggcggcggctcatcccagccctgagcctggacaccagcagccctgtgaggaagccacccaacagcactggagtgcgctgggtggatggccccctgcggagcagcccccggggcctgggggagccctttgagatcaaggtgtatgaaattgatgatgtggagcggctgcagaggagaagaggaggagccagcaaggaggccatgtgcttcaatgccaagctgaagatcctggagcaccggcagcagagaattgctgaggtgcgggccaagtatgagtggctgatgaaggagctggaggccaccaagcagtacctgatgctggaccccaacaagtggctgtctgaatttgacctggagcaggtgtgggagctggacagcctggagtacctggaggccctggagtgtgtgacagagcggctggagagccgggtgaacttctgcaaggcccacctgatgatgatcacctgctttgacatcaccagcagaagaagatag

SEQ ID NO: 157064 - DNA, 5175 bp, synthetic construct
  misc_feature 1..5175: note = Description of Artificial Sequence: Synthetic coding sequence
  source 1..5175: mol_type = other DNA
gactggaagaccaaggccgcccagaagctgaacctgagcagcaagaagaagaagcaccggcccagcaccagcagcgctgctgagccccccctgtttgccaccagcttcagcggcatcctgcagaccagccccccaccagccccaccctgcctgctgcgggctgtgaacaaggtgaaggacaccccaggcctgggcaaggtgaaggtgatgctgcgcatctgcagcaccctggcccgggacaccagcgagagcagcagcttcctgaaggtggaccccaggaagaagcagatcaccctgtatgaccccctgacctgtggcggccagaatgccttccagaagaggggcaaccaggtgccccccaagatgtttgcctttgatgctgtgttcccccaggatgccagccaggccgaggtgtgtgccggcaccgtggccgaggtgatccagagcgtggtgaatggagcagatggctgtgtgttctgctttggacatgccaagctgggcaagagctacaccatgattggcaaggatgacagcatgcagaacctgggcatcatcccctgtgccatctcctggctgttcaagctgatcaatgaaaggaaggagaagacaggagcccgcttctctgtgcgggtgtctgctgtggaggtgtggggcaaggaggagaacctgcgggacctgctgtctgaggtggccaccggcagcctgcaggacggccagagccctggggtgtacctgtgtgaggaccccatctgtggcacccagctgcagaaccagagcgagctgcgggcccccacagctgagaaggccgccttcttcctggatgctgccatcgccagccgccgcagccaccagcaggactgtgatgaagatgaccacaggaacagccacgtgttcttcaccctgcacatctaccagtacaggatggagaagtctggaaaaggaggcatgtctgggggccgcagccggctgcacctgattgacctgggcagctgtgtgaaggccctgagcaagaaccgggagggcggcagcggcctgtgcctgagcctgagcgccctgggcaatgtcatcctggccctggtgaatggcagcaagcacatcccctacaaggagagcaagctggccatgctgctgcgggagagcctgggcaacatgaactgcaggaccaccatgattgcccacatctctgctgctgtgggcagctatgcagagaccctgagcaccatccagatcgccagccgggtgctgaggatgaagaagaagaagaccaagtacaccagcagcagcagtggaggagagagcagctgtgaggagggccgcatgagaagacccacccagctgcggcccttccacacccgggccaccgtggaccctgacttccccatcgcccacctgagcagtgaccctgactacagcagcagcagcgagcagagctgtgacaccgtcatctacatcggccccaatggaacagccctgagtgacaaggagctgacagacaatgaaggccccccagactttgtgcccatcgtgcctgccctgcagaagaccaggggggacagcaggcctgctgaggccggggaggccgctgctgggaagtctgagcgggactgcctgaagtgcaacacctttgctgagctgcaggagcggctggactgcattgatggcagcgaggagcccagcagcttcccctttgaggagctgcctgcccagtttggacctgagcaggccagccggggcccccggctgagccaggccgccggggccagccccctgtctgagagtgacaaggaggacaatggcagcgagggccagctgaccaaccgggagggccctgagctgcctgccagcaagatgcagaggagccacagccctgtgcctgctgctgccccagcccacagccccagccctgccagccccaggtctgtgcccggcagcagcagccagcacagcgccagccccctggtgcagagccccagcctgcagagcagccgggagagcctgaacagctgtggctttgtggagggcaagccccggcccatgggcagcccccggctgggcatcgccagcctgagcaagaccagcgagtacaagccacccagcagccccagccagcgctgcaaggtgtacacccagaagggcgtgctgcccagccctgcccccctgccccccagcagcaaggacagcggcgtggccagccgggagagcctgctgcagcctgaggtgaggaccccacctgtgggcatgagcccccaggtgctgaagaagtccatgtctgctggcagcgagggcttccctgagacccctgtggatgatgagcagcaggccgccacccccagcgagagcaagaaggagatcctgagcaccaccatggtgacagtgcagcagcccctggagctgaatggagaagatgagctggtgttcaccctggtggaggagctgaccatctctggagtgctggacagcggccggcccaccagcatcatctccttcaacagcgactgcagcgcccgggccctggccagcggcagcaggcctgtgtccatcatcagcagcatcagcgaggacctggagtgctacagcagcacagcccctgtgtctgaggtgtccatcacccagttcctgcccctgcccaagatgagcctggatgagaaggcccaggatgctggcagccgccgcagcagcatcagctcctggctgtctgagatgtctgctggcagcgagggggagcagagctgccacagcttcatcgcccagacctgcttcggccacggggaggccatggccgagcctgtggccagcgagtttgtgagcagcctgcagaacacagctgtggtgtgccgggagaagcccaaggccagcccagacaacctgctgatcctgtctgagatgggagatgacagcttcaacaaggccgcccccatcaagggctgcaagatcagcacagtgtccaaggccatggtgaccatcagcaacacagccaacctgagcagctgtgagggctacatccccatgaagaccaacatcaccgtgtacccctgcatcgccatgagccccaggaacatccaggagcctgaggcccccacagccacccccaaggccggccccaccctggcccagagccgggagagcaaggagaacagcgccaagaaggagatgaagtttgaggacccctggctgaagcgggaggaggaggtgaagaaggagacagcccaccccaatgaggagggcatgatgagatgtgaaacagccaccggccccagcaatgctgagaccagggctgagcaggagcaggacggcaagcccagccctggggaccggctgagcagcagcagcggggaggtgtctgccagccctgtgacagacaacttcagaagagtggtggatggctgtgagatggccctgcccggcctggccacccagagccctgtgcaccccaacaagtctgtgaagagcagcagcctgccccgggccttccagaaggccagccggcaggaggagccagacagcctgagctactactgtgccgctgagaccaacggggtgggcgccgccagcggcaccccacccagcaaggccaccctggagggcaaggtggccagccccaagcactgtgtgctggcccggcccaagggcaccccacccctgccccctgtgaggaagagcagcctggaccagaagaacagagccagcccccagcacagcgccagcggcagcggcaccagcagccccctgaaccagcctgctgccttccctgctggcctgcctgatgagcccagcggcaagaccaaggatgccagcagcagcagcaagctgttcagcgccaagctggagcagctggccagccgcagcaacagcctgggccgggccaccgtgagccactatgagtgcctgagcctggagagagctgagagcctgagctctgtgagcagccggctgcatgctgggaaggatggcaccatgccccgggccggccgcagcctgggccgctctgctggcaccagcccccccagcagcggggccagccccaaggccggccagagcaagatctctgctgtgtcccggctgctgctggccagcccccgggcccggggccccagcgccagcaccaccaagaccctgtccttcagcaccaagagcctgccccaggccgtgggccagggcagcagcagccccccaggcggcaagcacaccccctggagcacccagagcctgagcaggaacagaagcagcggcctggccagcaagctgcccctgcgggctgtgtctggccgcatcagcgagctgctgcagggcggggccggggcccggggcctgcagctgcgggccggccctgaggccgaggcccggggcggggccctggccgaggatgagcctgctgctgcccacctgctgcccagcccctacagcaagatcaccccaccccggcggccccaccgctgcagcagcggccacggcagtgacaacagctctgtgctgagcggggagctgcccccagccatgggcaagacagccctcttctaccacagcggcggcagcagcggctatgagagcgtgatgagggacagcgaggccaccggcagcgccagcagcgcccaggacagcaccagcgagaacagcagctctgtgggcggccgctgccgcagcctgaagacccccaagaagaggagcaaccctggcagccagaggcggcggctcatcccagccctgagcctggacaccagcagccctgtgaggaagccacccaacagcactggagtgcgctgggtggatggccccctgcggagcagcccccggggcctgggggagccctttgagatcaaggtgtatgaaattgatgatgtggagcggctgcagaggagaagaggaggagccagcaaggaggccatgtgcttcaatgccaagctgaagatcctggagcaccggcagcagagaattgctgaggtgcgggccaagtatgagtggctgatgaaggagctggaggccaccaagcagtacctgatgctggaccccaacaagtggctgtctgaatttgacctggagcaggtgtgggagctggacagcctggagtacctggaggccctggagtgtgtgacagagcggctggagagccgggtgaacttctgcaaggcccacctgatgatgatcacctgctttgacatcaccagcagaagaagatag

SEQ ID NO: 157065 - DNA, 2016 bp, synthetic construct
  misc_feature 1..2016: note = Description of Artificial Sequence: Synthetic coding sequence
  source 1..2016: mol_type = other DNA
atgattgactttgatgatgtggccgccatcaaccctgagctgctgcagctgctgcccctgcaccccaaggacaacctgcccctgcaggagaatgtgaccatccagaagcagaagagaagatctgtgaacagcaagatcccagcccccaaggagagcctgcggagccgcagcaccaggatgagcacagtgtctgagctgcgcatcacagcccaggagaatgacatggaggtggagctgcctgctgctgccaacagcaggaagcagttctctgtgcccccagcccccacccggcccagctgcccagctgtggccgagatccccctgaggatggtgtctgaggagatggaggagcaggtgcacagcatccggggcagcagcagcgccaaccctgtgaacagcgtgcggaggaagagctgcctggtgaaggaggtggagaagatgaagaacaagcgggaggagaagaaggcccagaacagcgagatgaggatgaagagggcccaggagtatgacagcagcttccccaactgggagtttgccaggatgatcaaggagttccgggccaccctggagtgccaccccctgaccatgacagaccccatcgaggagcaccgcatctgtgtgtgtgtgaggaagaggcccctgaacaagcaggagctggccaagaaggagattgatgtgatcagcatccccagcaagtgcctgctgctggtgcatgagcccaagctgaaggtggacctgaccaagtacctggagaaccaggccttctgctttgattttgcctttgatgaaacagccagcaatgaggtggtgtaccgcttcaccgcccggcccctggtgcagaccatctttgaaggaggcaaggccacctgctttgcctacggccagacaggcagcggcaagacccacaccatgggcggggacctgagcggcaaggcccagaatgccagcaagggcatctatgccatggccagcagagatgtgttcctgctgaagaaccagccctgctacaggaagctgggcctggaggtgtatgtgaccttctttgagatctacaacgggaagctgtttgacctgctgaacaagaaggccaagctgcgggtgctggaggatggcaagcagcaggtgcaggtggtgggcctgcaggagcacctggtgaacagcgcagatgatgtgatcaagatgattgacatgggcagcgcctgcaggaccagcggccagacctttgccaacagcaacagcagccgcagccacgcctgcttccagatcatcctgcgggccaagggccgcatgcacggcaagttcagcctggtggacctggccggaaatgaaagaggagctgacaccagcagcgctgaccggcagaccaggatggagggcgctgagatcaacaagagcctgctggccctgaaggagtgcatccgggccctgggccagaacaaggcccacacccccttccgggagagcaagctgacccaggtgctgcgggacagcttcatcggggagaacagcaggacctgcatgattgccaccatcagccctggcatcagcagctgtgagtacaccctgaacaccctgcgctatgctgacagagtgaaggagctgagcccccacagcggccccagcggggagcagctgatccagatggagacagaggagatggaggcctgcagcaatggagccctgatccctggcaacctgagcaaggaggaggaggagctgagcagccagatgagcagcttcaatgaggccatgacccagatccgggagctggaggagaaggccatggaggagctgaaggagatcatccagcagggccctgactggctggagctgtctgagatgacagagcagcctgactatgacctggagacctttgtgaacaaggccgagagcgccctggcccagcaggccaagcacttcagcgccctgagagatgtgatcaaggccctgcggctggccatgcagctggaggagcaggccagccggcagatcagcagcaagaagaggccccagtag

SEQ ID NO: 157066 - DNA, 2055 bp, synthetic construct
  misc_feature 1..2055: note = Description of Artificial Sequence: Synthetic coding sequence
  source 1..2055: mol_type = other DNA
atggccatggacagcagcctgcaggcccggctcttccctggcctggccatcaagatccagaggagcaatggcctcatccacagcgccaacgtgaggacagtgaacctggagaagagctgtgtgtctgtggagtgggccgagggcggggccaccaagggcaaggagattgactttgatgatgtggccgccatcaaccctgagctgctgcagctgctgcccctgcaccccaaggacaacctgcccctgcaggagaatgtgaccatccagaagcagaagagaagatctgtgaacagcaagatcccagcccccaaggagagcctgcggagccgcagcaccaggatgagcacagtgtctgagctgcgcatcacagcccaggagaatgacatggaggtggagctgcctgctgctgccaacagcaggaagcagttctctgtgcccctgcggaggaagagctgcctggtgaaggaggtggagaagatgaagaacaagcgggaggagaagaaggcccagaacagcgagatgaggatgaagagggcccaggagtatgacagcagcttccccaactgggagtttgccaggatgatcaaggagttccgggccaccctggagtgccaccccctgaccatgacagaccccatcgaggagcaccgcatctgtgtgtgtgtgaggaagaggcccctgaacaagcaggagctggccaagaaggagattgatgtgatcagcatccccagcaagtgcctgctgctggtgcatgagcccaagctgaaggtggacctgaccaagtacctggagaaccaggccttctgctttgattttgcctttgatgaaacagccagcaatgaggtggtgtaccgcttcaccgcccggcccctggtgcagaccatctttgagggcggcaaggccacctgctttgcctacggccagacaggcagcggcaagacccacaccatgggcggggacctgagcggcaaggcccagaatgccagcaagggcatctatgccatggccagcagagatgtgttcctgctgaagaaccagccctgctacaggaagctgggcctggaggtgtatgtgaccttctttgagatctacaacgggaagctgtttgacctgctgaacaagaaggccaagctgcgggtgctggaggatggcaagcagcaggtgcaggtggtgggcctgcaggagcacctggtgaacagcgcagatgatgtgatcaagatgattgacatgggcagcgcctgcaggaccagcggccagacctttgccaacagcaacagcagccgcagccacgcctgcttccagatcatcctgcgggccaagggccgcatgcacggcaagttcagcctggtggacctggccggaaatgaaagaggagctgacaccagcagcgctgaccggcagaccaggatggagggcgctgagatcaacaagagcctgctggccctgaaggagtgcatccgggccctgggccagaacaaggcccacacccccttccgggagagcaagctgacccaggtgctgcgggacagcttcatcggggagaacagcaggacctgcatgattgccaccatcagccctggcatcagcagctgtgagtacaccctgaacaccctgcgctatgctgacagagtgaaggagctgagcccccacagcggccccagcggggagcagctgatccagatggagacagaggagatggaggcctgcagcaatggagccctgatccctggcaacctgagcaaggaggaggaggagctgagcagccagatgagcagcttcaatgaggccatgacccagatccgggagctggaggagaaggccatggaggagctgaaggagatcatccagcagggccctgactggctggagctgtctgagatgacagagcagcctgactatgacctggagacctttgtgaacaaggccgagagcgccctggcccagcaggccaagcacttcagcgccctgagagatgtgatcaaggccctgcggctggccatgcagctggaggagcaggccagccggcagatcagcagcaagaagaggccccagtag

SEQ ID NO: 157067 - DNA, 1839 bp, synthetic construct
  misc_feature 1..1839: note = Description of Artificial Sequence: Synthetic coding sequence
  source 1..1839: mol_type = other DNA
atgagcacagtgtctgagctgcgcatcacagcccaggagaatgacatggaggtggagctgcctgctgctgccaacagcaggaagcagttctctgtgcccccagcccccacccggcccagctgcccagctgtggccgagatccccctgaggatggtgtctgaggagatggaggagcaggtgcacagcatccggggcagcagcagcgccaaccctgtgaacagcgtgcggaggaagagctgcctggtgaaggaggtggagaagatgaagaacaagcgggaggagaagaaggcccagaacagcgagatgaggatgaagagggcccaggagtatgacagcagcttccccaactgggagtttgccaggatgatcaaggagttccgggccaccctggagtgccaccccctgaccatgacagaccccatcgaggagcaccgcatctgtgtgtgtgtgaggaagaggcccctgaacaagcaggagctggccaagaaggagattgatgtgatcagcatccccagcaagtgcctgctgctggtgcatgagcccaagctgaaggtggacctgaccaagtacctggagaaccaggccttctgctttgattttgcctttgatgaaacagccagcaatgaggtggtgtaccgcttcaccgcccggcccctggtgcagaccatctttgagggcggcaaggccacctgctttgcctacggccagacaggcagcggcaagacccacaccatgggcggggacctgagcggcaaggcccagaatgccagcaagggcatctatgccatggccagcagagatgtgttcctgctgaagaaccagccctgctacaggaagctgggcctggaggtgtatgtgaccttctttgagatctacaacgggaagctgtttgacctgctgaacaagaaggccaagctgcgggtgctggaggatggcaagcagcaggtgcaggtggtgggcctgcaggagcacctggtgaacagcgcagatgatgtgatcaagatgattgacatgggcagcgcctgcaggaccagcggccagacctttgccaacagcaacagcagccgcagccacgcctgcttccagatcatcctgcgggccaagggccgcatgcacggcaagttcagcctggtggacctggccggaaatgaaagaggagctgacaccagcagcgctgaccggcagaccaggatggagggcgctgagatcaacaagagcctgctggccctgaaggagtgcatccgggccctgggccagaacaaggcccacacccccttccgggagagcaagctgacccaggtgctgcgggacagcttcatcggggagaacagcaggacctgcatgattgccaccatcagccctggcatcagcagctgtgagtacaccctgaacaccctgcgctatgctgacagagtgaaggagctgagcccccacagcggccccagcggggagcagctgatccagatggagacagaggagatggaggcctgcagcaatggagccctgatccctggcaacctgagcaaggaggaggaggagctgagcagccagatgagcagcttcaatgaggccatgacccagatccgggagctggaggagaaggccatggaggagctgaaggagatcatccagcagggccctgactggctggagctgtctgagatgacagagcagcctgactatgacctggagacctttgtgaacaaggccgagagcgccctggcccagcaggccaagcacttcagcgccctgagagatgtgatcaaggccctgcggctggccatgcagctggaggagcaggccagccggcagatcagcagcaagaagaggccccagtag

SEQ ID NO: 157068 - DNA, 2178 bp, synthetic construct
  misc_feature 1..2178: note = Description of Artificial Sequence: Synthetic coding sequence
  source 1..2178: mol_type = other DNA
atggccatggacagcagcctgcaggcccggctcttccctggcctggccatcaagatccagaggagcaatggcctcatccacagcgccaacgtgaggacagtgaacctggagaagagctgtgtgtctgtggagtgggccgagggcggggccaccaagggcaaggagattgactttgatgatgtggccgccatcaaccctgagctgctgcagctgctgcccctgcaccccaaggacaacctgcccctgcaggagaatgtgaccatccagaagcagaagagaagatctgtgaacagcaagatcccagcccccaaggagagcctgcggagccgcagcaccaggatgagcacagtgtctgagctgcgcatcacagcccaggagaatgacatggaggtggagctgcctgctgctgccaacagcaggaagcagttctctgtgcccccagcccccacccggcccagctgcccagctgtggccgagatccccctgaggatggtgtctgaggagatggaggagcaggtgcacagcatccggggcagcagcagcgccaaccctgtgaacagcgtgcggaggaagagctgcctggtgaaggaggtggagaagatgaagaacaagcgggaggagaagaaggcccagaacagcgagatgaggatgaagagggcccaggagtatgacagcagcttccccaactgggagtttgccaggatgatcaaggagttccgggccaccctggagtgccaccccctgaccatgacagaccccatcgaggagcaccgcatctgtgtgtgtgtgaggaagaggcccctgaacaagcaggagctggccaagaaggagattgatgtgatcagcatccccagcaagtgcctgctgctggtgcatgagcccaagctgaaggtggacctgaccaagtacctggagaaccaggccttctgctttgattttgcctttgatgaaacagccagcaatgaggtggtgtaccgcttcaccgcccggcccctggtgcagaccatctttgaaggaggcaaggccacctgctttgcctacggccagacaggcagcggcaagacccacaccatgggcggggacctgagcggcaaggcccagaatgccagcaagggcatctatgccatggccagcagagatgtgttcctgctgaagaaccagccctgctacaggaagctgggcctggaggtgtatgtgaccttctttgagatctacaacgggaagctgtttgacctgctgaacaagaaggccaagctgcgggtgctggaggatggcaagcagcaggtgcaggtggtgggcctgcaggagcacctggtgaacagcgcagatgatgtgatcaagatgattgacatgggcagcgcctgcaggaccagcggccagacctttgccaacagcaacagcagccgcagccacgcctgcttccagatcatcctgcgggccaagggccgcatgcacggcaagttcagcctggtggacctggccggaaatgaaagaggagctgacaccagcagcgctgaccggcagaccaggatggagggcgctgagatcaacaagagcctgctggccctgaaggagtgcatccgggccctgggccagaacaaggcccacacccccttccgggagagcaagctgacccaggtgctgcgggacagcttcatcggggagaacagcaggacctgcatgattgccaccatcagccctggcatcagcagctgtgagtacaccctgaacaccctgcgctatgctgacagagtgaaggagctgagcccccacagcggccccagcggggagcagctgatccagatggagacagaggagatggaggcctgcagcaatggagccctgatccctggcaacctgagcaaggaggaggaggagctgagcagccagatgagcagcttcaatgaggccatgacccagatccgggagctggaggagaaggccatggaggagctgaaggagatcatccagcagggccctgactggctggagctgtctgagatgacagagcagcctgactatgacctggagacctttgtgaacaaggccgagagcgccctggcccagcaggccaagcacttcagcgccctgagagatgtgatcaaggccctgcggctggccatgcagctggaggagcaggccagccggcagatcagcagcaagaagaggccccagtag

SEQ ID NO: 157069 - DNA, 324 bp, synthetic construct
  misc_feature 1..324: note = Description of Artificial Sequence: Synthetic coding sequence
  source 1..324: mol_type = other DNA
tgaaaagaatgcatccgggccctgggccagaacaaggcccacacccccttccgggagagcaagctgacccaggtgctgcgggacagcttcatcggggagaacagcaggacctgcatgattgccaccatcagccctggcatcagcagctgtgagtacaccctgaacaccctgcgctatgctgaccggcagggctgccacagcatccccctggagccccaggccagcaagccaggccgctgccacatccccctgctgagcaaggaggaggaggagctgagcagccagatgagcagcttcaatgaggccatgacccagatcagatag

SEQ ID NO: 157070 - DNA, 1011 bp, synthetic construct
  misc_feature 1..1011: note = Description of Artificial Sequence: Synthetic coding sequence
  source 1..1011: mol_type = other DNA
atggccatggacagcagcctgcaggcccggctcttccctggcctggccatcaagatccagaggagcaatggcctcatccacagcgccaacgtgaggacagtgaacctggagaagagctgtgtgtctgtggagtgggccgagggcggggccaccaagggcaaggagattgactttgatgatgtggccgccatcaaccctgagctgctgcagctgctgcccctgcaccccaaggacaacctgcccctgcaggagaatgtgaccatccagaagcagaagagaagatctgtgaacagcaagatcccagcccccaaggagagcctgcggagccgcagcaccaggatgagcacagtgtctgagctgcgcatcacagcccaggagaatgacatggaggtggagctgcctgctgctgccaacagcaggaagcagttctctgtgcccctgcggaggaagagctgcctggtgaaggaggtggagaagatgaagaacaagcgggaggagaagaaggcccagaacagcgagatgaggatgaagagggcccaggagtatgacagcagcttccccaactgggagtttgccaggatgatcaaggagttccgggccaccctggagtgccaccccctgaccatgacagaccccatcgaggagcaccgcatctgtgtgtgtgtgaggaagaggcccctgaacaagcaggagctggccaagaaggagattgatgtgatcagcatccccagcaagtgcctgctgctggtgcatgagcccaagctgaaggtggacctgaccaagtacctggagaaccaggccttctgctttgattttgcctttgatgaaacagccagcaatgaggtggtgtaccgcttcaccgcccggcccctggtgcagaccatctttgagggcggcaaggccacctgctttgcctacggccagacaggcagcggcaagacccacaccatgggcggggacctgagcggcaaggcccagaatgccagcaagggcatctatgccatggcctag

SEQ ID NO: 157071 - DNA, 864 bp, synthetic construct
  misc_feature 1..864: note = Description of Artificial Sequence: Synthetic coding sequence
  source 1..864: mol_type = other DNA
atggtgcgcagcggcgtgcccaggagccggggcctggtgtctggcctcatccacagcgccaacgtgaggacagtgaacctggagaagagctgtgtgtctgtggagtgggccgagggcggggccaccaagggcaaggagattgactttgatgatgtggccgccatcaaccctgagctgctgcagctgctgcccctgcaccccaaggacaacctgcccctgcaggagaatgtgaccatccagaagcagaagagaagatctgtgaacagcaagatcccagcccccaaggagagcctgcggagccgcagcaccaggatgagcacagtgtctgagctgcgcatcacagcccaggagaatgacatggaggtggagctgcctgctgctgccaacagcaggaagcagttctctgtgcccccagcccccacccggcccagctgcccagctgtggccgagatccccctgaggatggtgtctgaggagatggaggagcaggtgcacagcatccggggcagcagcagcgccaaccctgtgaacagcgtgcggaggaagagctgcctggtgaaggaggtggagaagatgaagaacaagcgggaggagaagaaggcccagaacagcgagatgaggatgaagagggcccaggagtatgacagcagcttccccaactgggagtttgccaggatgatcaaggagttccgggccaccctggagtgccaccccctgaccatgacagaccccatcgaggagcaccgcatctgtgtgtgtgtgaggaagaggcccctgaacaagcaggagctggccaagaaggagattgatgtgatcagcatccccagcaagtgcctgctgctggtgcatgagcccaagctgtag

SEQ ID NO: 157072 - DNA, 2244 bp, synthetic construct
  misc_feature 1..2244: note = Description of Artificial Sequence: Synthetic coding sequence
  source 1..2244: mol_type = other DNA
atgagcaagctgaagagcagcgagagcgtgcgggtggtggtgcgctgccggcccatgaatggcaaggagaaggccgccagctatgacaaggtggtggatgtggatgtgaagctgggccaggtgtctgtgaagaaccccaagggcacagcccacgagatgcccaagaccttcacctttgatgctgtgtatgactggaatgccaagcagtttgagctgtatgatgagaccttccggcccctggtggacagcgtgctgcagggcttcaacggcaccatctttgcctacggccagacaggcaccgggaagacctacaccatggagggcatccggggggaccctgagaagaggggcgtcatccccaacagctttgaccacatcttcacccacatcagccgcagccagaaccagcagtacctggtgcgggccagctacctggagatctaccaggaggagatccgggacctgctgagcaaggaccagaccaagaggctggagctgaaggagaggccagacaccggggtgtatgtgaaggacctgagcagctttgtgaccaagtctgtgaaggagattgagcacgtgatgaatgtgggcaaccagaacagatctgtgggcgccaccaacatgaatgagcacagcagccgcagccacgccatctttgtgatcaccatcgagtgcagcgaggtgggcctggatggagagaaccacatccgggtgggcaagctgaacctggtggacctggccggcagcgagcggcaggccaagacaggagcccagggcgagcggctgaaggaggccaccaagatcaacctgagcctgagcgccctgggcaatgtcatcagcgccctggtggatggcaagagcacccacatcccctacagagacagcaagctgacccggctgctgcaggacagcctgggcggcaatgccaagacagtgatggtggccaacgtgggccctgccagctacaacgtggaggagaccctgaccaccctgcgctatgccaacagagccaagaacatcaagaacaagccccgggtgaatgaagaccccaaggatgccctgctgcgggagttccaggaggagatcgcccggctgaaggcccagctggagaagaggagcatcggccgcaggaagagaagagagaagagaagagagggcggcggcagcggcggcggcggggaggaggaggaggaggagggggaggagggggaggaggagggagatgacaaggatgactactggagggagcagcaggagaagctggagattgagaagagggccatcgtggaggaccacagcctggtggccgaggagaagatgaggctgctgaaggagaaggagaagaagatggaggacctgcggcgggagaaggatgctgctgagatgctgggcgccaagatcaaggccatggagagcaagctgctggtgggcggcaagaacatcgtggaccacaccaatgagcagcagaagatcctggagcagaagaggcaggagattgctgagcagaagaggcgggagcgggagatccagcagcagatggagagcagagatgaggagaccctggagctgaaggagacctacagcagcctgcagcaggaggtggacatcaagaccaagaagctgaagaagctgttcagcaagctgcaggccgtgaaggccgagatccatgacctgcaggaggagcacatcaaggagcggcaggagctggagcagacccagaatgagctgacccgggagctgaagctgaagcacctgatcatcgagaacttcatccccctggaggagaagagcaagatcatgaacagagccttctttgatgaggaggaggaccactggaagctgcaccccatcacccggctggagaaccagcagatgatgaagaggcctgtgtctgctgtgggctacaagaggcccctgagccagcacgccaggatgtccatgatgatccggcctgaggcccgctacagagctgagaacatcgtgctgctggagctggacatgcccagcaggaccacccgggactatgagggccctgccatcgcccccaaggtgcaggccgccctggatgctgccctgcaggatgaagatgagatccaggtggatgccagcagctttgagagcacagccaacaagaagagcaaggcccggcccaagagcggcaggaagagcggcagcagcagcagcagcagcggcaccccagccagccagctgtacccccagagccggggcctggtgcccaagtag

SEQ ID NO: 157073 - DNA, 1122 bp, synthetic construct
  misc_feature 1..1122: note = Description of Artificial Sequence: Synthetic coding sequence
  source 1..1122: mol_type = other DNA
atggtggccaacgtgggccctgccagctacaacgtggaggagaccctgaccaccctgcgctatgccaacagagccaagaacatcaagaacaagccccgggtgaatgaagaccccaaggatgccctgctgcgggagttccaggaggagatcgcccggctgaaggcccagctggagaagaggagcattgaggagaagatgaggctgctgaaggagaaggagaagaagatggaggacctgcggcgggagaaggatgctgctgagatgctgggcgccaagatcaaggccatggagagcaagctgctggtgggcggcaagaacatcgtggaccacaccaatgagcagcagaagatcctggagcagaagaggcaggagattgctgagcagaagaggcgggagcgggagatccagcagcagatggagagcagagatgaggagaccctggagctgaaggagacctacagcagcctgcagcaggaggtggacatcaagaccaagaagctgaagaagctgttcagcaagctgcaggccgtgaaggccgagatccatgacctgcaggaggagcacatcaaggagcggcaggagctggagcagacccagaatgagctgacccgggagctgaagctgaagcacctgatcatcgagaacttcatccccctggaggagaagagcaagatcatgaacagagccttctttgatgaggaggaggaccactggaagctgcaccccatcacccggctggagaaccagcagatgatgaagaggcctgtgtctgctgtgggctacaagaggcccctgagccagcacgccaggatgtccatgatgatccggcctgaggcccgctacagagctgagaacatcgtgctgctggagctggacatgcccagcaggaccacccgggactatgagggccctgccatcgcccccaaggtgcaggccgccctggatgctgccctgcaggatgaagatgagatccaggtggatgccagcagctttgagagcacagccaacaagaagagcaaggcccggcccaagagcggcaggaagagcggcagcagcagcagcagcagcggcaccccagccagccagctgtacccccagagccggggcctggtgcccaagtag

SEQ ID NO: 157074 - DNA, 2382 bp, synthetic construct
  misc_feature 1..2382: note = Description of Artificial Sequence: Synthetic coding sequence
  source 1..2382: mol_type = other DNA
atggccagcaagaccaaggccagcgaggccctgaaggtggtggcccgctgccggcccctgagcaggaaggaggaggccgccggccacgagcagatcctgaccatggatgtgaagctgggccaggtgaccctgaggaaccccagggctgcccctggagagctgcccaagaccttcacctttgatgctgtgtatgatgccagcagcaagcaggccgacctgtatgatgaaacagtgcggcccctgattgacagcgtgctgcagggcttcaacggcaccgtgtttgcctacggccagacaggaacaggcaagacctacaccatgcagggcacctgggtggagcctgagctgcggggcgtcatccccaatgcctttgagcacatcttcacccacatcagccgcagccagaaccagcagtacctggtgcgggccagctacctggagatctaccaggaggagatccgggacctgctgagcaaggagcccgggaagaggctggagctgaaggaaaatcctgagactggagtgtacatcaaggacctgagcagctttgtgaccaagaatgtgaaggagattgaacatgtgatgaacctgggcaaccagaccagggctgtgggcagcacccacatgaatgaggtgagcagccgcagccacgccatcttcatcatcaccgtggagtgcagcgagcggggcagtgatggccaggaccacatccgggtgggcaagctgaacctggtggacctggccggcagcgagcggcagaacaaggccggccccaacacagctggaggagctgccacccccagcagcggcggcggcggcggcggcggcggcagcggcggcggggccggcggggagcggcccaaggaggccagcaagatcaacctgagcctgagcgccctgggcaatgtgattgctgccctggccggcaacagaagcacccacatcccctacagagacagcaagctgacccggctgctgcaggacagcctgggcggcaatgccaagaccatcatggtggccaccctgggccctgccagccacagctatgatgagagcctgagcaccctgcgctttgccaacagagccaagaacatcaagaacaagccccaggtgaatgaagaccccaaggacaccctgctgcgggagttccaggaggagatcgcccggctgaaggcccagctggagaagaggggcatgctgggcaagaggcccaggaggaagagcagcaggaggaagaaggctgtgtctgcccctcctggctacccagagggccctgtgattgaggcctgggtggccgaggaggaggatgacaacaacaacaaccaccggcccccccagcccatcctggagagcgccctggagaagaacatggagaactacctgcaggagcagaaggagcggctggaggaggagaaggccgccatccaggatgacaggagcctggtgtctgaggagaagcagaagctgctggaggagaaggagaagatgctggaggacctgcggcgggagcagcaggccacagagctgctggccgccaagtacaaggccatggagagcaagctgctgattggaggcaggaacatcatggaccacaccaatgagcagcagaagatgctggagctgaagaggcaggagattgctgagcagaagagaagagagcgggagatgcagcaggagatgatgctgagagatgaggagaccatggagctgcggggcacctacaccagcctgcagcaggaggtggaggtgaagaccaagaagctgaagaagctgtatgccaagctgcaggccgtgaaggccgagatccaggaccagcatgatgagtacatccgggtgcggcaggacctggaggaggcccagaatgagcagacccgggagctgaagctgaagtacctgatcatcgagaacttcatccccccagaggagaagaacaagatcatgaacagactcttcctggactgtgaggaggagcagtggaagttccagcccctggtgcctgctggggtgagcagcagccagatgaagaagaggcccaccagcgctgtgggctacaagaggcccatcagccagtatgcccgggtggccatggccatgggcagccacccccgctacagagctgagaacatcatgttcctggagctggatgtgagccccccagctgtgtttgagatggagttcagccatgaccaggagcaggacccccgggccctgcacatggagcggctgatgaggctggacagcttcctggagcggcccagcaccagcaaggtgaggaagagccgctcctggtgccagagcccccagaggcccccacccagcaccacccacgccagcctggccagcgccagcctgcggcctgccaccgtggccgaccacgagtag

SEQ ID NO: 157075 - DNA, 2382 bp, synthetic construct; identical to SEQ ID NO: 157074
  misc_feature 1..2382: note = Description of Artificial Sequence: Synthetic coding sequence
  source 1..2382: mol_type = other DNA

SEQ ID NO: 157076 - DNA, 1800 bp, synthetic construct
  misc_feature 1..1800: note = Description of Artificial Sequence: Synthetic coding sequence
  source 1..1800: mol_type = other DNA
atgaacctgggcaaccagaccagggctgtgggcagcacccacatgaatgaggtgagcagccgcagccacgccatcttcatcatcaccgtggagtgcagcgagcggggcagtgatggccaggaccacatccgggtgggcaagctgaacctggtggacctggccggcagcgagcggcagaacaaggccggccccaacacagctggaggagctgccacccccagcagcggcggcggcggcggcggcggcggcagcggcggcggggccggcggggagcggcccaaggaggccagcaagatcaacctgagcctgagcgccctgggcaatgtgattgctgccctggccggcaacagaagcacccacatcccctacagagacagcaagctgacccggctgctgcaggacagcctgggcggcaatgccaagaccatcatggtggccaccctgggccctgccagccacagctatgatgagagcctgagcaccctgcgctttgccaacagagccaagaacatcaagaacaagccccaggtgaatgaagaccccaaggacaccctgctgcgggagttccaggaggagatcgcccggctgaaggcccagctggagaagaggggcatgctgggcaagaggcccaggaggaagagcagcaggaggaagaaggctgtgtctgcccctcctggctacccagagggccctgtgattgaggcctgggtggccgaggaggaggatgacaacaacaacaaccaccggcccccccagcccatcctggagagcgccctggagaagaacatggagaactacctgcaggagcagaaggagcggctggaggaggagaaggccgccatccaggatgacaggagcctggtgtctgaggagaagcagaagctgctggaggagaaggagaagatgctggaggacctgcggcgggagcagcaggccacagagctgctggccgccaagtacaaggccatggagagcaagctgctgattggaggcaggaacatcatggaccacaccaatgagcagcagaagatgctggagctgaagaggcaggagattgctgagcagaagagaagagagcgggagatgcagcaggagatgatgctgagagatgaggagaccatggagctgcggggcacctacaccagcctgcagcaggaggtggaggtgaagaccaagaagctgaagaagctgtatgccaagctgcaggccgtgaaggccgagatccaggaccagcatgatgagtacatccgggtgcggcaggacctggaggaggcccagaatgagcagacccgggagctgaagctgaagtacctgatcatcgagaacttcatccccccagaggagaagaacaagatcatgaacagactcttcctggactgtgaggaggagcagtggaagttccagcccctggtgcctgctggggtgagcagcagccagatgaagaagaggcccaccagcgctgtgggctacaagaggcccatcagccagtatgcccgggtggccatggccatgggcagccacccccgctacagagctgagaacatcatgttcctggagctggatgtgagccccccagctgtgtttgagatggagttcagccatgaccaggagcaggacccccgggccctgcacatggagcggctgatgaggctggacagcttcctggagcggcccagcaccagcaaggtgaggaagagccgctcctggtgccagagcccccagaggcccccacccagcaccacccacgccagcctggccagcgccagcctgcggcctgccaccgtggccgaccacgagtag

SEQ ID NO: 157077 - DNA, 3384 bp, synthetic construct
  misc_feature 1..3384: note = Description of Artificial Sequence: Synthetic coding sequence
  source 1..3384: mol_type = other DNA
atgaaggaggaggtgaagggcatccctgtgcgggtggccctgcgctgccggcccctggtgcccaaggagatcagcgagggctgccagatgtgcctgagctttgtgcctggagagccccaggtggtggtgggcacagacaagagcttcacctatgactttgtgtttgaccccagcacagagcaggaggaggtgttcaacacagctgtggcccccctcatcaagggcgtcttcaagggctacaatgccaccgtgctggcctacggccagacaggcagcggcaagacctacagcatgggcggggcctacacagctgagcaggagaatgagcccaccgtgggcgtcatccccagggtcatccagctgctcttcaaggagattgacaagaagagtgactttgagttcaccctgaaggtgtcctacctggagatctacaatgaggagatcctggacctgctgtgccccagccgggagaaggcccagatcaacatccgggaggaccccaaggagggcatcaagatcgtgggcctgacagagaagacagtgctggtggccctggacacagtgtcctgcctggagcagggcaacaacagcaggacagtggccagcacagccatgaacagccagagcagccgcagccacgccatcttcaccatcagcctggagcagaggaagaagagtgacaagaacagcagcttccgcagcaagctgcacctggtggacctggccggcagcgagcggcagaagaagaccaaggccgagggggaccggctgaaggagggcatcaacatcaacagaggcctgctgtgcctgggcaatgtcatcagcgccctgggagatgacaagaagggcggctttgtgccctacagagacagcaagctgacccggctgctgcaggacagcctgggcggcaacagccacaccctgatgattgcctgtgtgtccccagctgacagcaacctggaggagaccctgaacaccctgcgctatgctgaccgggccaggaagatcaagaacaagcccatcgtgaacatcgacccccagacagctgagctgaaccacctgaagcagcaggtgcagcagctgcaggtgctgctgctgcaggcccatggaggcaccctgcccggcagcatcaccgtggagcccagcgagaacctgcagagcctgatggagaagaaccagagcctggtggaggagaatgagaagctgagccggggcctgtctgaggccgccggccagacagcccagatgctggagcgcatcatcctgacagagcaggccaatgagaagatgaatgccaagctggaggagctgcggcagcacgccgcctgcaagctggacctgcagaagctggtggagaccctggaggaccaggagctgaaggaaaatgtggagatcatctgcaacctgcagcagctgatcacccagctgagtgatgagaccgtggcctgcatggccgccgccatcgacacagctgtggagcaggaggcccaggtggagaccagccctgagaccagccgcagcagtgatgccttcaccacccagcacgccctgcggcaggcccagatgagcaaggagctggtggagctgaacaaggccctggccctgaaggaggccctggccaggaagatgacccagaatgacagccagctgcagcccatccagtaccagtaccaggacaacatcaaggagctggagctggaggtgatcaacctgcagaaggagaaggaggagctggtgctggagctgcagacagccaagaaggatgccaaccaggccaagctgtctgaaagaagaaggaagaggctgcaggagctggagggccagattgctgacctgaagaagaagctgaatgagcagagcaagctgctgaagctgaaggagagcacagagaggacagtgtccaagctgaaccaggagatccgcatgatgaagaaccagagggtgcagctgatgaggcagatgaaggaggatgctgagaagttccggcagtggaagcagaagaaggacaaggaggtgatccagctgaaggagcgggacaggaagaggcagtatgagctgctgaagctggagaggaacttccagaagcagagcaatgtgctgcggaggaagacagaggaggccgctgctgccaacaagaggctgaaggatgccctgcagaagcagcgggaggtggccgacaagaggaaggagacccagagccggggcatggagggcacagctgcccgggtgaagaactggctgggcaatgaaattgaggtgatggtgtccacagaggaggccaagaggcacctgaatgacctgctggaggacaggaagatcctggcccaggatgtggcccagctgaaggagaagaaggagagcggagaaaatcctccacccaagctgcggcggaggaccttcagcctgacagaggtgcggggccaggtgtctgagagtgaagattccatcaccaagcagatcgagagcctggagacagagatggagttccgcagcgcccagattgctgacctgcagcagaagctgctggatgctgagagtgaagatcggcccaagcagcgctgggagaacatcgccaccatcctggaggccaagtgtgccctgaagtacctgattggagagctggtgagcagcaagatccaggtgtccaagctggagagcagcctgaagcagagcaagaccagctgtgccgacatgcagaagatgctgtttgaggagaggaaccactttgctgagattgaaacagagctgcaggccgagctggtgaggatggagcagcagcaccaggagaaggtgctgtacctgctgagccagctgcagcagagccagatggccgagaagcagctggaggagagcgtgtctgagaaggagcagcagctgctgagcaccctgaagtgccaggatgaggagctggagaagatgagggaggtgtgtgagcagaaccagcagctgctgcgggagaatgagatcatcaagcagaagctgaccctgctgcaggtggccagccggcagaagcacctgcccaaggacaccctgctgagcccagacagcagctttgaatatgtgccccccaagcccaagcccagccgggtgaaggagaagttcctggagcagagcatggacatcgaggacctgaagtactgcagcgagcacagcgtgaatgaacatgaagatggagatggagatgatgatgaaggagatgatgaggagtggaagcccaccaagctggtgaaggtgtccaggaagaacatccagggcgtgctgctgctgacccctgtgatcagcgccctgtgggaggccgaggcccggggcctgctggaggcccggagcagcaggcctgcctgggccacctggagggaccctgtgtccaccaagcccaagaactag

SEQ ID NO: 157078 - DNA, 3699 bp, synthetic construct
  misc_feature 1..3699: note = Description of Artificial Sequence: Synthetic coding sequence
  source 1..3699: mol_type = other DNA
atgaaggaggaggtgaagggcatccctgtgcgggtggccctgcgctgccggcccctggtgcccaaggagatcagcgagggctgccagatgtgcctgagctttgtgcctggagagccccaggtggtggtgggcacagacaagagcttcacctatgactttgtgtttgaccccagcacagagcaggaggaggtgttcaacacagctgtggcccccctcatcaagggcgtcttcaagggctacaatgccaccgtgctggcctacggccagacaggcagcggcaagacctacagcatgggcggggcctacacagctgagcaggagaatgagcccaccgtgggcgtcatccccagggtcatccagctgctcttcaaggagattgacaagaagagtgactttgagttcaccctgaaggtgtcctacctggagatctacaatgaggagatcctggacctgctgtgccccagccgggagaaggcccagatcaacatccgggaggaccccaaggagggcatcaagatcgtgggcctgacagagaagacagtgctggtggccctggacacagtgtcctgcctggagcagggcaacaacagcaggacagtggccagcacagccatgaacagccagagcagccgcagccacgccatcttcaccatcagcctggagcagaggaagaagagtgacaagaacagcagcttccgcagcaagctgcacctggtggacctggccggcagcgagcggcagaagaagaccaaggccgagggggaccggctgaaggagggcatcaacatcaacagaggcctgctgtgcctgggcaatgtcatcagcgccctgggagatgacaagaagggcggctttgtgccctacagagacagcaagctgacccggctgctgcaggacagcctgggcggcaacagccacaccctgatgattgcctgtgtgtccccagctgacagcaacctggaggagaccctgaacaccctgcgctatgctgaccgggccaggaagatcaagaacaagcccatcgtgaacatcgacccccagacagctgagctgaaccacctgaagcagcaggtgcagcagctgcaggtgctgctgctgcaggcccatggaggcaccctgcccggcagcatcaccgtggagcccagcgagaacctgcagagcctgatggagaagaaccagagcctggtggaggagaatgagaagctgagccggggcctgtctgaggccgccggccagacagcccagatgctggagcgcatcatcctgacagagcaggccaatgagaagatgaatgccaagctggaggagctgcggcagcacgccgcctgcaagctggacctgcagaagctggtggagaccctggaggaccaggagctgaaggaaaatgtggagatcatctgcaacctgcagcagctgatcacccagctgagtgatgagaccgtggcctgcatggccgccgccatcgacacagctgtggagcaggaggcccaggtggagaccagccctgagaccagccgcagcagtgatgccttcaccacccagcacgccctgcggcaggcccagatgagcaaggagctggtggagctgaacaaggccctggccctgaaggaggccctggccaggaagatgacccagaatgacagccagctgcagcccatccagtaccagtaccaggacaacatcaaggagctggagctggaggtgatcaacctgcagaaggagaaggaggagctggtgctggagctgcagacagccaagaaggatgccaaccaggccaagctgtctgaaagaagaaggaagaggctgcaggagctggagggccagattgctgacctgaagaagaagctgaatgagcagagcaagctgctgaagctgaaggagagcacagagaggacagtgtccaagctgaaccaggagatccgcatgatgaagaaccagagggtgcagctgatgaggcagatgaaggaggatgctgagaagttccggcagtggaagcagaagaaggacaaggaggtgatccagctgaaggagcgggacaggaagaggcagtatgagctgctgaagctggagaggaacttccagaagcagagcaatgtgctgcggaggaagacagaggaggccgctgctgccaacaagaggctgaaggatgccctgcagaagcagcgggaggtggccgacaagaggaaggagacccagagccggggcatggagggcacagctgcccgggtgaagaactggctgggcaatgaaattgaggtgatggtgtccacagaggaggccaagaggcacctgaatgacctgctggaggacaggaagatcctggcccaggatgtggcccagctgaaggagaagaaggagagcggagaaaatcctccacccaagctgcggcggaggaccttcagcctgacagaggtgcggggccaggtgtctgagagtgaagattccatcaccaagcagatcgagagcctggagacagagatggagttccgcagcgcccagattgctgacctgcagcagaagctgctggatgctgagagtgaagatcggcccaagcagcgctgggagaacatcgccaccatcctggaggccaagtgtgccctgaagtacctgattggagagctggtgagcagcaagatccaggtgtccaagctggagagcagcctgaagcagagcaagaccagctgtgccgacatgcagaagatgctgtttgaggagaggaaccactttgctgagattgaaacagagctgcaggccgagctggtgaggatggagcagcagcaccaggagaaggtgctgtacctgctgagccagctgcagcagagccagatggccgagaagcagctggaggagagcgtgtctgagaaggagcagcagctgctgagcaccctgaagtgccaggatgaggagctggagaagatgagggaggtgtgtgagcagaaccagcagctgctgcgggagaatgagatcatcaagcagaagctgaccctgctgcaggtggccagccggcagaagcacctgcccaaggacaccctgctgagcccagacagcagctttgaatatgtgccccccaagcccaagcccagccgggtgaaggagaagttcctggagcagagcatggacatcgaggacctgaagtactgcagcgagcacagcgtgaatgaacatgaagatggagatggagatgatgatgaaggagatgatgaggagtggaagcccaccaagctggtgaaggtgtccaggaagaacatccagggctgcagctgcaagggctggtgtggcaacaagcagtgtggctgcaggaagcagaagagtgactgtggggtggactgctgctgtgaccccaccaagtgcaggaaccggcagcagggcaaggacagcctgggcaccgtggagaggacccaggacagcgagggcagcttcaagctggaggaccccacagaggtgaccccaggcctgtccttcttcaaccctgtgtgtgccacccccaacagcaagatcctgaaggagatgtgtgatgtggagcaggtgctgagcaagaagaccccaccagcccccagcccctttgacctgcctgagctgaagcacgtggccacagagtaccaggagaacaaggcccctgggaagaagaagaagagggccctggccagcaacaccagcttcttcagcggctgcagccccatcgaggaggaggcccactag

SEQ ID NO: 157079 - DNA, 1605 bp, synthetic construct
  misc_feature 1..1605: note = Description of Artificial Sequence: Synthetic coding sequence
  source 1..1605: mol_type = other DNA
atgtgcagtgatgtgaagcgggaggccgctgctgccaacaagaggctgaaggatgccctgcagaagcagcgggaggtggccgacaagaggaaggagacccagagccggggcatggagggcacagctgcccgggtgaagaactggctgggcaatgaaattgaggtgatggtgtccacagaggaggccaagaggcacctgaatgacctgctggaggacaggaagatcctggcccaggatgtggcccagctgaaggagaagaaggagagcggagaaaatcctccacccaagctgcggcggaggaccttcagcctgacagaggtgcggggccaggtgtctgagagtgaagattccatcaccaagcagatcgagagcctggagacagagatggagttccgcagcgcccagattgctgacctgcagcagaagctgctggatgctgagagtgaagatcggcccaagcagcgctgggagaacatcgccaccatcctggaggccaagtgtgccctgaagtacctgattggagagctggtgagcagcaagatccaggtgtccaagctggagagcagcctgaagcagagcaagaccagctgtgccgacatgcagaagatgctgtttgaggagaggaaccactttgctgagattgaaacagagctgcaggccgagctggtgaggatggagcagcagcaccaggagaaggtgctgtacctgctgagccagctgcagcagagccagatggccgagaagcagctggaggagagcgtgtctgagaaggagcagcagctgctgagcaccctgaagtgccaggatgaggagctggagaagatgagggaggtgtgtgagcagaaccagcagctgctgcgggagaatgagatcatcaagcagaagctgaccctgctgcaggtggccagccggcagaagcacctgcccaaggacaccctgctgagcccagacagcagctttgaatatgtgccccccaagcccaagcccagccgggtgaaggagaagttcctggagcagagcatggacatcgaggacctgaagtactgcagcgagcacagcgtgaatgaacatgaagatggagatggagatgatgatgaaggagatgatgaggagtggaagcccaccaagctggtgaaggtgtccaggaagaacatccagggctgcagctgcaagggctggtgtggcaacaagcagtgtggctgcaggaagcagaagagtgactgtggggtggactgctgctgtgaccccaccaagtgcaggaaccggcagcagggcaaggacagcctgggcaccgtggagaggacccaggacagcgagggcagcttcaagctggaggaccccacagaggtgaccccaggcctgtccttcttcaaccctgtgtgtgccacccccaacagcaagatcctgaaggagatgtgtgatgtggagcaggtgctgagcaagaagaccccaccagcccccagcccctttgacctgcctgagctgaagcacgtggccacagagtaccaggagaacaaggcccctgggaagaagaagaagagggccctggccagcaacaccagcttcttcagcggctgcagccccatcgaggaggaggcccactag

SEQ ID NO: 157080 - DNA, 3705 bp, synthetic construct
  misc_feature 1..3705: note = Description of Artificial Sequence: Synthetic coding sequence
  source 1..3705: mol_type = other DNA
atgaaggaggaggtgaagggcatccctgtgcgggtggccctgcgctgccggcccctggtgcccaaggagatcagcgagggctgccagatgtgcctgagctttgtgcctggagagacccaggtggtggtgggcacagacaagagcttcacctatgactttgtgtttgacccctgcacagagcaggaggaggtgttcaacaaggctgtggcccccctcatcaagggcatcttcaagggctacaatgccaccgtgctggcctacggccagacaggcagcggcaagacctacagcatgggcggggcctacacagctgagcaggagaatgagcccaccgtgggcatcatccccagggtcatccagctgctcttcaaggagattgacaagaagagtgactttgagttcaccctgaaggtgtcctacctggagatctacaatgaggagatcctggacctgctgtgccccagccgggagaaggcccagatcaacatccgggaggaccccaaggagggcatcaagatcgtgggcctgacagagaagacagtgctggtggccctggacacagtgtcctgcctggagcagggcaacaacagcaggacagtggccagcacagccatgaacagccagagcagccgcagccacgccatcttcaccatcagcattgagcagaggaagaagagtgacaagaactgcagcttccgcagcaagctgcacctggtggacctggccggcagcgagcggcagaagaagaccaaggccgagggggaccggctgaaggagggcatcaacatcaacagaggcctgctgtgcctgggcaatgtcatcagcgccctgggagatgacaagaagggcagctttgtgccctacagagacagcaagctgacccggctgctgcaggacagcctgggcggcaacagccacaccctgatgattgcctgtgtgtccccagctgacagcaacctggaggagaccctgagcaccctgcgctatgctgaccgggccaggaagatcaagaacaagcccatcgtgaacatcgacccccacacagctgagctgaaccacctgaagcagcaggtgcagcagctgcaggtgctgctgctgcaggcccatggaggcaccctgcccggcagcatcaatgctgagcccagcgagaacctgcagagcctgatggagaagaaccagagcctggtggaggagaatgagaagctgagccgctgcctgagcaaggccgccggccagacagcccagatgctggagcgcatcatcctgacagagcaggtgaatgagaagctgaatgccaagctggaggagctgcggcagcacgtggcctgcaagctggacctgcagaagctggtggagaccctggaggaccaggagctgaaggaaaatgtggagatcatctgcaacctgcagcagctgatcacccagctgagtgatgagaccgtggcctgcacagctgctgccatcgacacagctgtggaggaggaggcccaggtggagaccagccctgagaccagccgcagcagtgatgccttcaccacccagcacgccctgcaccaggcccagatgagcaaggaggtggtggagctgaacaatgccctggccctgaaggaggccctggtgaggaagatgacccagaatgacaaccagctgcagcccatccagttccagtaccaggacaacatcaagaacctggagctggaggtgatcaacctgcagaaggagaaggaggagctggtgcgggagctgcagacagccaagaagaatgtgaaccaggccaagctgtctgagcaccgccacaagctgctgcaggagctggagggccagattgctgacctgaagaagaagctgaatgagcagagcaagctgctgaagctgaaggagagcacagagaggacagtgtccaagctgaaccaggagatctggatgatgaagaaccagagggtgcagctgatgaggcagatgaaggaggatgctgagaagttccggcagtggaagcagaagaaggacaaggaggtgatccagctgaaggagcgggacaggaagaggcagtatgagctgctgaagctggagaggaacttccagaagcagagctctgtgctgcggaggaagacagaggaggccgctgctgccaacaagaggctgaaggatgccctgcagaagcagcgggaggtgacagacaagaggaaggagacccagagccacggcaaggagggcattgctgcccgggtgaggaactggctgggcaatgaaattgaggtgatggtgtccacagaggaggccaagaggcacctgaatgacctgctggaggacaggaagatcctggcccaggatgtggtgcagctgaaggagaagaaggagagcagagaaaatcctccacccaagctgaggaagtgcaccttcagcctgtctgaggtgcacggccaggtgctggagagcgaggactgcatcaccaagcagatcgagagcctggagacagagatggagctgcggagcgcccagattgctgacctgcagcagaagctgctggatgctgagagtgaagatcggcccaagcagtgctgggagaacatcgccaccatcctggaggccaagtgtgccctgaagtacctgattggagagctggtgagcagcaagatccacgtgaccaagctggagaacagcctgcggcagagcaaggccagctgtgccgacatgcagaagatgctgtttgaggagcagaaccacttcagcgagattgaaacagagctgcaggccgagctggtgaggatggagcagcagcaccaggagaaggtgctgtacctggtgtcccagctgcaggagagccagatggccgagaagcagctggagaagagcgccagcgagaaggagcagcagctggtgtccaccctgcagtgccaggatgaggagctggagaagatgagggaggtgtgtgagcagaaccagcagctgctgcaggagaatgagatcatcaagcagaagctgatcctgctgcaggtggccagccggcagaagcacctgcccaatgacaccctgctgagcccagacagcagctttgagtacatcccccccaagcccaagcccagccgggtgaaggagaagttcctggagcagagcatggacatcgaggacctgaagtactgcagcgagcacagcgtgaatgaacatgaagatggagatggagatggagacagtgatgaaggagatgatgaggagtggaagcccaccaagctggtgaaggtgtccaggaagaacatccagggctgcagctgcaagggctggtgtggcaacaagcagtgtggctgcaggaagcagaagagtgactgtggggtggactgcagctgtgaccccaccaagtgcaggaaccggcagcagggcaaggacagcctgggcaccgtggagcagacccaggacagcgagggcagcttcaagctggaggaccccacagaggtgaccccaggcctgtccttcttcaaccctgtgtgtgccacccccaacagcaagatcctgaaggagatgtgtgacatggagcaggtgctgagcaagaagacagccccagcccccagcccctttgacctgcctgagagcaagcatggagccacagagtaccagcagaacaagcccccaggcaagaagaagaagagggccctggccagcaacaccagcttcttcagcggctgcagccccatcgaggaggaggcccactag

SEQ ID NO: 157081 - DNA, 3099 bp, synthetic construct
  misc_feature 1..3099: note = Description of Artificial Sequence: Synthetic coding sequence
  source 1..3099: mol_type = other DNA
atggccgagaccaacaatgaatgttccatcaaggtgctgtgccgcttccggcccctgaaccaggccgagatcctgcggggggacaagttcatccccatcttccagggagatgattctgtggtgattggaggcaagccctacgtgtttgacagagtcttcccccccaacaccacccaggagcaggtgtaccacgcctgtgccatgcagatcgtgaaggatgtgctggccggctacaacggcaccatctttgcctacggccagaccagcagcggcaagacccacaccatggagggcaagctgcatgacccccagctgatgggcatcatcccccgcatcgcccgggacatcttcaaccacatctacagcatggatgagaacctggagttccacatcaaggtgtcctactttgagatctacctggacaagatccgggacctgctggatgtgaccaagaccaacctgtctgtgcatgaggacaagaacagagtgccctttgtgaagggctgcacagaaagatttgtgagcagccctgaggagatcctggatgtgattgatgagggcaagagcaacagacatgtggccgtgaccaacatgaatgagcacagcagccgcagccacagcatcttcctgatcaacatcaagcaggagaacatggagacagagcagaagctgagcggcaagctgtacctggtggacctggccggcagcgagaaggtgtccaagacaggagctgagggcgctgtgctggatgaggccaagaacatcaacaagagcctgagcgccctgggcaatgtcatcagcgccctggccgagggcaccaagagctatgtgccctacagagacagcaagatgacccgcatcctgcaggacagcctgggcggcaactgcaggaccaccatgttcatctgctgcagccccagcagctacaatgatgctgagaccaagagcaccctgatgtttggccagagggccaagaccatcaagaacacagcctctgtgaacctggagctgacagctgagcagtggaagaagaagtatgagaaggagaaggagaagaccaaggcccagaaggagaccatcgccaagctggaggccgagctgagccgctggagaaatggagaaaatgtgcctgagacagagcggctggccggggaggaggccgccctgggcgctgagctgtgtgaggagacccctgtgaatgacaacagcagcatcgtggtgagaattgcccctgaggagcggcagaagtatgaggaggagatccggcggctgtacaagcagctggatgacaaggatgatgagatcaaccagcagagccagctgattgagaagctgaagcagcagatgctggaccaggaggagctgctggtgtccaccaggggggacaatgagaaggtgcagcgggagctgagccacctgcagagtgaaaatgatgctgccaaggatgaggtgaaggaggtgctgcaggccctggaggagctggccgtgaactatgaccagaagagccaggaggtggaggagaagagccagcagaaccagctgctggtggatgagctgagccagaaggtggccaccatgctgagcctggagagcgagctgcagaggctgcaggaggtgtctggccaccagaggaagagaattgctgaggtgctgaatggcctgatgaaggacctgtctgagttcagcgtcatcgtgggcaatggagagatcaagctgcctgtggagatcagcggggccatcgaggaggagttcaccgtggcccggctgtacatcagcaagatcaagtctgaggtgaagtctgtggtgaagcgctgccggcagctggagaacctgcaggtggagtgccacaggaagatggaggtgacaggccgggagctgagcagctgccagctgctgatcagccagcacgaggccaagatccgcagcctgacagagtacatgcagagcgtggagctgaagaagaggcacctggaggagagctatgacagcctgagtgatgagctggccaagctgcaggcccaggagaccgtgcatgaggtggccctgaaggacaaggagccagacacccaggatgctgatgaggtgaagaaggccctggagctgcagatggagagccaccgggaggcccaccaccggcagctggcccggctgagagatgagatcaatgagaagcagaagaccattgatgagctgaaggacctgaaccagaagctgcagctggagctggagaagctgcaggccgactatgagaagctgaagtctgaggagcacgagaagagcaccaagctgcaggagctgaccttcctgtatgaaagacatgagcagagcaagcaggacctgaagggcctggaggagaccgtggcccgggagctgcagaccctgcacaacctgaggaagctgtttgtgcaggatgtgaccaccagggtgaagaagtctgctgagatggagcctgaggacagcggcggcatccacagccagaagcagaagatctccttcctggagaacaacctggagcagctgaccaaggtgcacaagcagctggtgcgggacaatgctgacctgcgctgtgagctgcccaagctggagaagaggctgcgggccacagctgagcgggtgaaggccctggagggcgccctgaaggaggccaaggagggcgccatgaaggacaagaggcgctaccagcaggaggtggaccgcatcaaggaggccgtgcgctacaagagcagcggcaagaggggccacagcgcccagatcgccaagcctgtgcggcccggccactacccagccagcagccccaccaacccctacggcaccaggagccctgagtgcatctcctacaccaacagcctcttccagaactaccagaacctgtacctgcaggccacccccagcagcaccagtgacatgtactttgccaacagctgcaccagcagcggggccaccagcagcggcggccccctggccagctaccagaaggccaacatggacaatggaaatgccacagacatcaatgacaacagaagtgacctgccctgtggctatgaagctgaggaccaggccaagctgttccccctgcaccaggagacagctgccagctag

SEQ ID NO: 157082 - DNA, 381 bp, synthetic construct
  misc_feature 1..381: note = Description of Artificial Sequence: Synthetic coding sequence
  source 1..381: mol_type = other DNA
aagagcagcggcaagaggggccacagcgcccagatcgccaagcctgtgcggcccggccactacccagccagcagccccaccaacccctacggcaccaggagccctgagtgcatctcctacaccaacagcctcttccagaactaccagaacctgtacctgcaggccacccccagcagcaccagtgacatgtactttgccaacagctgcaccagcagcggggccaccagcagcggcggccccctggccagctaccagaaggccaacatggacaatggaaatgccacagacatcaatgacaacagaagtgacctgccctgtggctatgaagctgaggaccaggccaagctgttccccctgcaccaggagacagctgccagctag

SEQ ID NO: 157083 - DNA, 2892 bp, synthetic construct
  misc_feature 1..2892: note = Description of Artificial Sequence: Synthetic coding sequence
  source 1..2892: mol_type = other DNA
atggctgacctggccgagtgcaacatcaaggtgatgtgccgcttccggcccctgaatgaaagtgaggtgaacagaggagacaagtacatcgccaagttccagggcgaggacacagtggtgattgccagcaagccctatgcctttgacagagtcttccagagcagcaccagccaggagcaggtgtacaatgactgtgccaagaagatcgtgaaggatgtgctggagggctacaacggcaccatctttgcctacggccagaccagcagcggcaagacccacaccatggagggcaagctgcatgaccctgagggcatgggcatcatccccagaattgtgcaggacatcttcaactacatctacagcatggatgagaacctggagttccacatcaaggtgtcctactttgagatctacctggacaagatccgggacctgctggatgtgtccaagaccaacctgtctgtgcatgaggacaagaacagagtgccctacgtgaagggctgcacagaaagatttgtgtgcagcccagatgaggtgatggacaccattgatgagggcaagagcaacagacatgtggccgtgaccaacatgaatgagcacagcagccgcagccacagcatcttcctgatcaacgtgaagcaggagaacacccagacagagcagaagctgagcggcaagctgtacctggtggacctggccggcagcgagaaggtgtccaagacaggagctgagggcgctgtgctggatgaggccaagaacatcaacaagagcctgagcgccctgggcaatgtcatcagcgccctggccgagggcagcacctacgtgccctacagagacagcaagatgacccgcatcctgcaggacagcctgggcggcaactgcaggaccaccatcgtcatctgctgcagccccagcagctacaatgaaagtgagaccaagagcaccctgctgtttggccagagggccaagaccatcaagaacacagtgtgtgtgaatgtggagctgacagctgagcagtggaagaagaagtatgagaaggagaaggagaagaacaagatcctgaggaacaccatccagtggctggagaatgagctgaaccgctggagaaatggagaaacagtgcccattgatgagcagtttgacaaggagaaggccaacctggaggccttcaccgtggacaaggacatcaccctgaccaatgacaagccagccacagccatcggggtcatcggcaacttcacagatgctgagaggaggaaatgtgaggaggagatcgccaagctgtacaagcagctggatgacaaggatgaggagatcaaccagcagagccagctggtggagaagctgaagacccagatgctggaccaggaggagctgctggccagcacccggcgggaccaggacaacatgcaggccgagctgaaccggctgcaggccgagaatgatgccagcaaggaggaggtgaaggaggtgctgcaggccctggaggagctggccgtgaactatgaccagaagagccaggaggtggaggacaagaccaaggagtatgagctgctgagtgatgagctgaaccagaagagcgccaccctggccagcattgatgctgagctgcagaagctgaaggagatgaccaaccaccagaagaagagagctgctgagatgatggccagcctgctgaaggacctggccgagattggaattgctgtgggcaacaatgatgtgaagcagcctgagggcaccggcatgattgatgaggagttcaccgtggcccggctgtacatcagcaagatgaagtctgaggtgaagaccatggtgaagcgctgcaagcagctggagagcacccagacagagagcaacaagaagatggaggagaatgagaaggagctggccgcctgccagctgcgcatcagccagcacgaggccaagatcaagagcctgacagagtacctgcagaatgtggagcagaagaagaggcagctggaggagagcgtggatgccctgtctgaggagctggtgcagctgcgggcccaggagaaggtgcatgagatggagaaggagcacctgaacaaggtgcagacagccaatgaggtgaagcaggccgtggagcagcagatccagagccaccgggagacccaccagaagcagatcagcagcctgagagatgaggtggaggccaaggccaagctgatcacagacctgcaggaccagaaccagaagatgatgctggagcaggagcggctgcgggtggagcacgagaagctgaaggccacagaccaggagaagagcaggaagctgcacgagctgactgtgatgcaggaccggcgggagcaggcccggcaggacctgaagggcctggaggagaccgtggccaaggagctgcagaccctgcacaacctgaggaagctgtttgtgcaggacctggccaccagggtgaagaagtctgctgagattgacagtgatgacaccggcggcagcgctgcccagaagcagaagatctccttcctggagaacaacctggagcagctgaccaaggtgcacaagcagctggtgcgggacaatgctgacctgcgctgtgagctgcccaagctggagaagaggctgcgggccacagctgagcgggtgaaggccctggagagcgccctgaaggaggccaaggaaaatgccagccgggacaggaagcgctaccagcaggaggtggaccgcatcaaggaggccgtgcgcagcaagaacatggcccggcggggccacagcgcccagatcgccaagcccatccggcccggccagcaccctgctgccagccccacccaccccagcgccatccggggcggcggggcctttgtgcagaacagccagcctgtggccgtgcggggcggcggcggcaagcaggtgtag

SEQ ID NO: 157084 - DNA, 2583 bp, synthetic construct
  misc_feature 1..2583: note = Description of Artificial Sequence: Synthetic coding sequence
  source 1..2583: mol_type = other DNA
gggaagctgcatgacccccagctgatgggcatcatccccagaattgcccatgacatctttgaccacatctacagcatggatgagaacctggagttccacatcaaggtgtcctactttgagatctacctggacaagatccgggacctgctggatgtgtccaagaccaacctggccgtgcatgaggacaagaacagagtgccctacgtgaagggctgcacagaaagatttgtgagcagccctgaggaggtgatggatgtgattgatgagggcaaggccaacagacatgtggccgtgaccaacatgaatgagcacagcagccgcagccacagcatcttcctgatcaacatcaagcaggagaatgtggagacagagaagaagctgagcggcaagctgtacctggtggacctggccggcagcgagaaggtgtccaagacaggagctgagggcgctgtgctggatgaggccaagaacatcaacaagagcctgagcgccctgggcaatgtcatcagcgccctggccgagggcaccaagacccacgtgccctacagagacagcaagatgacccgcatcctgcaggacagcctgggcggcaactgcaggaccaccatcgtcatctgctgcagccccagcgtcttcaatgaagctgagaccaagagcaccctgatgtttggccagagggccaagaccatcaagaacacagtgtctgtgaacctggagctgacagctgaggagtggaagaagaagtatgagaaggagaaggagaagaacaagaccctgaagaatgtcatccagcacctggagatggagctgaaccgctggagaaatggagaggccgtgcctgaagatgagcagatcagcgccaaggaccagaagaacctggagccctgtgacaacacccccatcatcgacaacatcgcccctgtggtggccggcatcagcacagaggagaaggagaagtatgatgaggagatcagcagcctgtaccggcagctggatgacaaggatgatgagatcaaccagcagagccagctggccgagaagctgaagcagcagatgctggaccaggatgagctgctggccagcacccggcgggactatgagaagatccaggaggagctgacccggctgcagattgaaaatgaggccgccaaggatgaggtgaaggaggtgctgcaggccctggaggagctggccgtgaactatgaccagaagagccaggaggtggaggacaagacccgggccaatgagcagctgacagatgagctggcccagaagaccaccaccctgaccaccacccagcgggagctgagccagctgcaggagctgagcaaccaccagaagaagagggccacagagatcctgaacctgctgctgaaggacctgggggagatcggcggcatcatcggcaccaatgatgtgaagaccctggctgatgtgaatggagtgattgaggaggagttcaccatggcccggctgtacatcagcaagatgaagtctgaggtgaagagcctggtgaacagaagcaagcagctggagagcgcccagatggacagcaacaggaagatgaatgccagcgagcgggagctggccgcctgccagctgctgatcagccagcacgaggccaagatcaagagcctgacagactacatgcagaacatggagcagaagaggcggcagctggaggagagccaggacagcctgtctgaggagctggccaagctgcgggcccaggagaagatgcatgaggtgtccttccaggacaaggagaaggagcacctgacccggctgcaggatgctgaggagatgaagaaggccctggagcagcagatggagagccaccgggaggcccaccagaagcagctgagccggctgagagatgaaattgaggagaagcagaagatcattgatgagatccgggacctgaaccagaagctgcagctggagcaggagaagctgagcagtgactacaacaagctgaagattgaggaccaggagcgggagatgaagctggagaagctgctgctgctgaatgacaagcgggagcaggcccgggaggacctgaagggcctggaggagaccgtgtcccgggagctgcagaccctgcacaacctgaggaagctgtttgtgcaggacctgaccaccagggtgaagaagtctgtggagctggacaatgatgatggcggcggcagcgctgcccagaagcagaagatctccttcctggagaacaacctggagcagctgaccaaggtgcacaagcagctggtgcgggacaatgctgacctgcgctgtgagctgcccaagctggagaagaggctgcgggccacagctgagcgggtgaaggccctggagagcgccctgaaggaggccaaggaaaatgccatgagggacaggaagcgctaccagcaggaggtggaccgcatcaaggaggccgtgcgggccaagaacatggcccggcgggcccacagcgcccagatcgccaagcccatccggcccggccactacccagccagcagccccacagctgtgcacgccatccggggcggcggcggcagcagcagcaacagcacccactaccagaagtag

SEQ ID NO: 157085 - DNA, 2178 bp, synthetic construct
  misc_feature 1..2178: note = Description of Artificial Sequence: Synthetic coding sequence
  source 1..2178: mol_type = other DNA
atggccacctacatccacgtgtccaagacaggagctgagggcgctgtgctggatgaggccaagaacatcaacaagagcctgagcgccctgggcaatgtcatcagcgccctggccgagggcaccaagacccacgtgccctacagagacagcaagatgacccgcatcctgcaggacagcctgggcggcaactgcaggaccaccatcgtcatctgctgcagccccagcgtcttcaatgaggccgagaccaagagcaccctgatgtttggccagagggccaagaccatcaagaacacagtgtctgtgaacctggagctgacagctgaggagtggaagaagaagtatgagaaggagaaggagaagaacaagaccctgaagaatgtcatccagcacctggagatggagctgaaccgctggagaaatggagaggccgtgcctgaagatgagcagatcagcgccaaggaccagaagaacctggagccctgtgacaacacccccatcatcgacaacatcgcccctgtggtggccggcatcagcacagaggagaaggagaagtatgatgaggagatcagcagcctgtaccggcagctggatgacaaggatgatgagatcaaccagcagagccagctggccgagaagctgaagcagcagatgctggaccaggatgagctgctggccagcacccggcgggactatgagaagatccaggaggagctgacccggctgcagattgaaaatgaagctgccaaggatgaggtgaaggaggtgctgcaggccctggaggagctggccgtgaactatgaccagaagagccaggaggtggaggacaagacccgggccaatgagcagctgacagatgagctggcccagaagaccaccaccctgaccaccacccagcgggagctgagccagctgcaggagctgagcaaccaccagaagaagagggccacagagatcctgaacctgctgctgaaggacctgggggagattggaggcatcatcggcaccaatgatgtgaagaccctggctgatgtgaatggagtcatcgaggaggagttcaccatggcccggctgtacatcagcaagatgaagtctgaggtgaagagcctggtgaacagaagcaagcagctggagagcgcccagatggacagcaacaggaagatgaatgccagcgagcgggagctggccgcctgccagctgctgatcagccagcacgaggccaagatcaagagcctgacagactacatgcagaacatggagcagaagaggcggcagctggaggagagccaggacagcctgtctgaggagctggccaagctgcgggcccaggagaagatgcatgaggtgtccttccaggacaaggagaaggagcacctgacccggctgcaggatgctgaggagatgaagaaggccctggagcagcagatggagagccaccgggaggcccaccagaagcagctgagccggctgagagatgaaattgaggagaagcagaagatcattgatgagatccgggacctgaaccagaagctgcagctggagcaggagaagctgagcagtgactacaacaagctgaagattgaggaccaggagcgggagatgaagctggagaagctgctgctgctgaatgacaagcgggagcaggcccgggaggacctgaagggcctggaggagaccgtgtcccgggagctgcagaccctgcacaacctgaggaagctgtttgtgcaggacctgaccaccagggtgaagaagtctgtggagctggacaatgatgatggcggcggcagcgctgcccagaagcagaagatctccttcctggagaacaacctggagcagctgaccaaggtgcacaagcagctggtgcgggacaatgctgacctgcgctgtgagctgcccaagctggagaagaggctgcgggccacagctgagcgggtgaaggccctggagagcgccctgaaggaggccaaggaaaatgccatgagggacaggaagcgctaccagcaggaggtggaccgcatcaaggaggccgtgcgggccaagaacatggcccggcgggcccacagcgcccagatcgccaagcccatccggcccggccactacccagccagcagccccacagctgtgcacgccatccggggcggcggcggcagcagcagcaacagcacccactaccagaagtag

SEQ ID NO: 157086 - DNA, 2589 bp, synthetic construct
  misc_feature 1..2589: note = Description of Artificial Sequence: Synthetic coding sequence
  source 1..2589: mol_type = other DNA
atgtggggcaagctgcatgacccccagctgatgggcatcatccccagaattgcccatgacatctttgaccacatctacagcatggatgagaacctggagttccacatcaaggtgtcctactttgagatctacctggacaagatccgggacctgctggatgtgtccaagaccaacctggccgtgcatgaggacaagaacagagtgccctacgtgaagggctgcacagaaagatttgtgagcagccctgaggaggtgatggatgtgattgatgagggcaaggccaacagacatgtggccgtgaccaacatgaatgagcacagcagccgcagccacagcatcttcctgatcaacatcaagcaggagaatgtggagacagagaagaagctgagcggcaagctgtacctggtggacctggccggcagcgagaaggtgtccaagacaggagctgagggcgctgtgctggatgaggccaagaacatcaacaagagcctgagcgccctgggcaatgtcatcagcgccctggccgagggcaccaagacccacgtgccctacagagacagcaagatgacccgcatcctgcaggacagcctgggcggcaactgcaggaccaccatcgtcatctgctgcagccccagcgtcttcaatgaagctgagaccaagagcaccctgatgtttggccagagggccaagaccatcaagaacacagtgtctgtgaacctggagctgacagctgaggagtggaagaagaagtatgagaaggagaaggagaagaacaagaccctgaagaatgtcatccagcacctggagatggagctgaaccgctggagaaatggagaggccgtgcctgaagatgagcagatcagcgccaaggaccagaagaacctggagccctgtgacaacacccccatcatcgacaacatcgcccctgtggtggccggcatcagcacagaggagaaggagaagtatgatgaggagatcagcagcctgtaccggcagctggatgacaaggatgatgagatcaaccagcagagccagctggccgagaagctgaagcagcagatgctggaccaggatgagctgctggccagcacccggcgggactatgagaagatccaggaggagctgacccggctgcagattgaaaatgaggccgccaaggatgaggtgaaggaggtgctgcaggccctggaggagctggccgtgaactatgaccagaagagccaggaggtggaggacaagacccgggccaatgagcagctgacagatgagctggcccagaagaccaccaccctgaccaccacccagcgggagctgagccagctgcaggagctgagcaaccaccagaagaagagggccacagagatcctgaacctgctgctgaaggacctgggggagatcggcggcatcatcggcaccaatgatgtgaagaccctggctgatgtgaatggagtgattgaggaggagttcaccatggcccggctgtacatcagcaagatgaagtctgaggtgaagagcctggtgaacagaagcaagcagctggagagcgcccagatggacagcaacaggaagatgaatgccagcgagcgggagctggccgcctgccagctgctgatcagccagcacgaggccaagatcaagagcctgacagactacatgcagaacatggagcagaagaggcggcagctggaggagagccaggacagcctgtctgaggagctggccaagctgcgggcccaggagaagatgcatgaggtgtccttccaggacaaggagaaggagcacctgacccggctgcaggatgctgaggagatgaagaaggccctggagcagcagatggagagccaccgggaggcccaccagaagcagctgagccggctgagagatgaaattgaggagaagcagaagatcattgatgagatccgggacctgaaccagaagctgcagctggagcaggagaagctgagcagtgactacaacaagctgaagattgaggaccaggagcgggagatgaagctggagaagctgctgctgctgaatgacaagcgggagcaggcccgggaggacctgaagggcctggaggagaccgtgtcccgggagctgcagaccctgcacaacctgaggaagctgtttgtgcaggacctgaccaccagggtgaagaagtctgtggagctggacaatgatgatggcggcggcagcgctgcccagaagcagaagatctccttcctggagaacaacctggagcagctgaccaaggtgcacaagcagctggtgcgggacaatgctgacctgcgctgtgagctgcccaagctggagaagaggctgcgggccacagctgagcgggtgaaggccctggagagcgccctgaaggaggccaaggaaaatgccatgagggacaggaagcgctaccagcaggaggtggaccgcatcaaggaggccgtgcgggccaagaacatggcccggcgggcccacagcgcccagatcgccaagcccatccggcccggccactacccagccagcagccccacagctgtgcacgccatccggggcggcggcggcagcagcagcaacagcacccactaccagaagtag

SEQ ID NO: 157087 - DNA, 2874 bp, synthetic construct
  misc_feature 1..2874: note = Description of Artificial Sequence: Synthetic coding sequence
  source 1..2874: mol_type = other DNA
atggctgaccctgctgagtgcagcatcaaggtgatgtgccgcttccggcccctgaatgaagctgagatcctgcggggggacaagttcatccccaagttcaagggagatgagaccgtggtgattggccagggcaagccctacgtgtttgacagagtgctgccccccaacaccacccaggagcaggtgtacaatgcctgtgccaagcagatcgtgaaggatgtgctggagggctacaacggcaccatctttgcctacggccagaccagcagcggcaagacccacaccatggagggcaagctgcatgacccccagctgatgggcatcatcccccgcatcgcccatgacatctttgaccacatctacagcatggatgagaacctggagttccacatcaaggtgtcctactttgagatctacctggacaagatccgggacctgctggatgtgtccaagaccaacctggccgtgcatgaggacaagaacagagtgccctacgtgaagggctgcacagaaagatttgtgagcagccctgaggaggtgatggatgtgattgatgagggcaaggccaacagacatgtggccgtgaccaacatgaatgagcacagcagccgcagccacagcatcttcctgatcaacatcaagcaggagaatgtggagacagagaagaagctgagcggcaagctgtacctggtggacctggccggcagcgagaaggtgtccaagacaggagctgagggcgctgtgctggatgaggccaagaacatcaacaagagcctgagcgccctgggcaatgtcatcagcgccctggccgagggcaccaagacccacgtgccctacagagacagcaagatgacccgcatcctgcaggacagcctgggcggcaactgcaggaccaccatcgtcatctgctgcagccccagcgtcttcaatgaggccgagaccaagagcaccctgatgtttggccagagggccaagaccatcaagaacacagtgtctgtgaacctggagctgacagctgaggagtggaagaagaagtatgagaaggagaaggagaagaacaagaccctgaagaatgtcatccagcacctggagatggagctgaaccgctggagaaatggagaggccgtgcctgaagatgagcagatcagcgccaaggaccagaagaacctggagccctgtgacaacacccccatcatcgacaacatcgcccctgtggtggccggcatcagcacagaggagaaggagaagtatgatgaggagatcagcagcctgtaccggcagctggatgacaaggatgatgagatcaaccagcagagccagctggccgagaagctgaagcagcagatgctggaccaggatgagctgctggccagcacccggcgggactatgagaagatccaggaggagctgacccggctgcagattgaaaatgaagctgccaaggatgaggtgaaggaggtgctgcaggccctggaggagctggccgtgaactatgaccagaagagccaggaggtggaggacaagacccgggccaatgagcagctgacagatgagctggcccagaagaccaccaccctgaccaccacccagcgggagctgagccagctgcaggagctgagcaaccaccagaagaagagggccacagagatcctgaacctgctgctgaaggacctgggggagattggaggcatcatcggcaccaatgatgtgaagaccctggctgatgtgaatggagtcatcgaggaggagttcaccatggcccggctgtacatcagcaagatgaagtctgaggtgaagagcctggtgaacagaagcaagcagctggagagcgcccagatggacagcaacaggaagatgaatgccagcgagcgggagctggccgcctgccagctgctgatcagccagcacgaggccaagatcaagagcctgacagactacatgcagaacatggagcagaagaggcggcagctggaggagagccaggacagcctgtctgaggagctggccaagctgcgggcccaggagaagatgcatgaggtgtccttccaggacaaggagaaggagcacctgacccggctgcaggatgctgaggagatgaagaaggccctggagcagcagatggagagccaccgggaggcccaccagaagcagctgagccggctgagagatgaaattgaggagaagcagaagatcattgatgagatccgggacctgaaccagaagctgcagctggagcaggagaagctgagcagtgactacaacaagctgaagattgaggaccaggagcgggagatgaagctggagaagctgctgctgctgaatgacaagcgggagcaggcccgggaggacctgaagggcctggaggagaccgtgtcccgggagctgcagaccctgcacaacctgaggaagctgtttgtgcaggacctgaccaccagggtgaagaagtctgtggagctggacaatgatgatggcggcggcagcgctgcccagaagcagaagatctccttcctggagaacaacctggagcagctgaccaaggtgcacaagcagctggtgcgggacaatgctgacctgcgctgtgagctgcccaagctggagaagaggctgcgggccacagctgagcgggtgaaggccctggagagcgccctgaaggaggccaaggaaaatgccatgagggacaggaagcgctaccagcaggaggtggaccgcatcaaggaggccgtgcgggccaagaacatggcccggcgggcccacagcgcccagatcgccaagcccatccggcccggccactacccagccagcagccccacagctgtgcacgccatccggggcggcggcggcagcagcagcaacagcacccactaccagaagtag

SEQ ID NO: 157088 - DNA, 219 bp, synthetic construct
  misc_feature 1..219: note = Description of Artificial Sequence: Synthetic coding sequence
  source 1..219: mol_type = other DNA
atggctgaccctgctgagtgcagcatcaaggtgatgtgccgcttccggcccctgaatgaagctgagatcctgcggggggacaagttcatccccaagttcaagggagatgagaccgtggtgattggccagggcaagccctacgtgtttgacagagtgctgccccccaacaccacccaggagcaggtgtacaatgcctgtgccaagcagatcgtgaagtag

SEQ ID NO: 157089 - DNA, 552 bp, synthetic construct
  misc_feature 1..552: note = Description of Artificial Sequence: Synthetic coding sequence
  source 1..552: mol_type = other DNA
atggagcagaggctggccgagttccgggccgccaggaagagagctggcctggccgcccagcccccagctgccagccagggcgcccagaccccaggagagaaggccgaggccgccgccaccctgaaggccgcccctggctggctgaagcgcttcctggtgtggaagcccaggcctgccagcgcccgggcccagcccggcctggtgcaggaggccgcccagccccagggcagcaccagcgagaccccctggaacacagccatccccctgcccagctgctgggaccagagcttcctgaccaacatcaccttcctgaaggtgctgctgtggctggtgctgctgggcctgtttgtggagctggagtttggcctggcctactttgtgctgagcctcttctactggatgtatgtgggcacccggggccctgaggagaagaaggagggggagaagagcgcctacagcgtcttcaaccctggctgtgaggccatccagggcaccctgacagctgagcagctggagcgggagctgcagctgcggcccctggccggccgctag

SEQ ID NO: 157090 - DNA, 2445 bp, synthetic construct
  misc_feature 1..2445: note = Description of Artificial Sequence: Synthetic coding sequence
  source 1..2445: mol_type = other DNA
atggtgaagcagaccatccagatctttgcccgggtgaagccccctgtgaggaagcaccagcagggcatctacagcattgatgaagatgagaagctgatccccagcctggagatcatcctgccccgggacctggctgatggctttgtgaacaacaagcgggagagctacaagttcaagttccagaggatctttgaccaggatgccaaccaggagaccgtgtttgaaaatattgccaagcctgtggccggctctgtgctggccggctacaacggcaccatctttgcctacggccagacaggcagcggcaagaccttcaccatcaccggcggcgctgagcgctacagcgaccggggcatcatccccaggaccctgagctacatctttgagcagctgcagaaggacagcagcaagatctacaccacccacatctcctacctggagatctacaatgaatgtggctatgacctgctggaccccaggcatgaggccagcagcctggaggacctgcccaaggtgaccatcctggaggaccctgaccagaacatccacctgaagaacctgaccctgcaccaggccaccacagaggaggaggccctgaacctgctcttcctgggggacaccaacaggatgattgctgagacccccatgaaccaggccagcaccaggagccactgcatcttcaccatccacctgagcagcaaggagcccggcagcgccaccgtgagacatgccaagctgcacctggtggacctggccggcagcgagcgggtggccaagacaggagtgggcggccacctgctgacagaggccaagtacatcaacctgagcctgcactacctggagcaggtgatcatcgccctgtctgagaagcacaggagccacatcccctacagaaacagcatgatgacctctgtgctgcgggacagcctgggcggcaactgcatgaccaccatgattgccaccctgagcctggagaagaggaacctggatgagagcatcagcacctgccgctttgcccagagggtggccctgatcaagaatgaagctgtgctgaatgaggagatcaacccccggctggtgatcaagaggctgcagaaggagatccaggagctgaaggatgagctggccatggtgactggagagcagaggacagaggccctgacagaggccgagctgctgcagctggagaagctgatcaccagcttcctggaggaccaggacagcgacagccggctggaggtgggcgctgacatgaggaaggtgcaccactgcttccaccacctgaagaagctgctgaatgacaagaagatcctggagaacaacacagtgtcctctgagagcaaggaccaggactgccaggagcccctgaaggaggaggagtacaggaagctgcgggacatcctgaagcagagggacaatgagatcaacatcctggtgaacatgctgaagaaggagaagaagaaggcccaggaggccctgcacctggccggcatggaccggcgggagttccggcagagccagagcccccccttccggctgggcaaccctgaggagggccagaggatgaggctgagcagcgcccccagccaggcccaggacttcagcatcctgggcaagaggagcagcctgctgcacaagaagattggcatgagggaggagatgagcctgggctgccaggaggcctttgagatcttcaagagggaccacgccgacagcgtgaccattgatgacaacaagcagatcctgaagcagcgcttcagcgaggccaaggccctgggggagagcatcaatgaggcccggagcaagattggccacctgaaggaggagatcacccagaggcacatccagcaggtggccctgggcatcagcgagaacatggctgtgcccctgatgccagaccagcaggaggagaagctgcggagccagctggaggaggagaagaggcgctacaagaccatgttcacccggctgaaggccctgaaggtggagattgagcacctgcagctgctgatggacaaggccaaggtgaagctgcagaaggagtttgaggtgtggtgggccgaggaggccaccaacctgcaggtgaacagccctgctgtgaacagcctggaccacaccaagcccttcctgcagaccagtgacagccagcacgagtggagccagctgctgagcaacaagagcagcggcggctgggaggtgcaggaccagggcaccggccgctttgatgtgtgtgatgtgaatgccaggaagatcctgcccagcccctgccccagcccccacagccagaagcagagcagcaccagcacccccctggaggacagcatccccaagaggcctgtgagcagcatccccctgaccggggacagccagacagacagcgacatcatcgccttcatcaaggcccggcagagcatcctgcagaagcagtgcctgggcagcaactag

SEQ ID NO: 157091 - DNA, 498 bp, synthetic construct
  misc_feature 1..498: note = Description of Artificial Sequence: Synthetic coding sequence
  source 1..498: mol_type = other DNA
atgattgctgagacccccatgaaccaggccagcaccaggagccactgcatcttcaccatccacctgagcagcaaggagcccggcagcgccaccgtgagacatgccaagctgcacctggtggacctggccggcagcgagcgggtggccaagacaggagtgggcggccacctgctgacagaggccaagtacatcaacctgagcctgcactacctggagcaggtgatcatcgccctgtctgagaagcacaggagccacatcccctacagaaattccatgatgacctctgtgctgcgggacagcctgggcggcaactgcatgaccaccatgattgccaccctgagcctggagaagaggaacctggatgagagcatcagcacctgccgctttgcccagagggtggccctgatcaagaatgaggccgtgctgaatgaggagatcaacccccggctgaaggcccccagcagcagtgatggagtgctcttctgcaggaaccagtag

SEQ ID NO: 157092 - DNA, 1962 bp, synthetic construct
  misc_feature 1..1962: note = Description of Artificial Sequence: Synthetic coding sequence
  source 1..1962: mol_type = other DNA
atggccagcagcctgtatgacctgaagaaggtgaccatcctggaggaccctgaccagaacatccacctgaagaacctgaccctgcaccaggccaccacagaggaggaggccctgaacctgctcttcctgggggacaccaacaggatgattgctgagacccccatgaaccaggccagcaccaggagccactgcatcttcaccatccacctgagcagcaaggagcccggcagcgccaccgtgagacatgccaagctgcacctggtggacctggccggcagcgagcgggtggccaagacaggagtgggcggccacctgctgacagaggccaagtacatcaacctgagcctgcactacctggagcaggtgatcatcgccctgtctgagaagcacaggagccacatcccctacagaaattccatgatgacctctgtgctgcgggacagcctgggcggcaactgcatgaccaccatgattgccaccctgagcctggagaagaggaacctggatgagagcatcagcacctgccgctttgcccagagggtggccctgatcaagaatgaggccgtgctgaatgaggagatcaacccccggctggtgatcaagaggctgcagaaggagatccaggagctgaaggatgagctggccatggtgactggagagcagaggacagaggccctgacagaagctgagctgctgcagctggagaagctgatcaccagcttcctggaggaccaggacagcgacagccggctggaggtgggcgctgacatgaggaaggtgcaccactgcttccaccacctgaagaagctgctgaatgacaagaagatcctggagaacaacacagtgagcagcgagagcaaggaccaggactgccaggagcccctgaaggaggaggagtacaggaagctgcgggacatcctgaagcagagggacaatgagatcaacatcctggtgaacatgctgaagaaggagaagaagaaggcccaggaggccctgcacctggccggcatggacagaagagagttccggcagagccagagcccccccttccggctgggcaaccctgaggagggccagaggatgaggctgagcagcgcccccagccaggcccaggacttcagcatcctgggcaagaggagcagcctgctgcacaagaagattggcatgagggaggagatgagcctgggctgccaggaggcctttgagatcttcaagagggaccatgctgacagcgtgaccattgatgacaacaagcagatcctgaagcagcgcttcagcgaggccaaggccctgggggagagcatcaatgaggcccggagcaagattggccacctgaaggaggagatcacccagaggcacatccagcaggtggccctgggcatcagcgagaacatggctgtgcccctgatgccagaccagcaggaggagaagctgcggagccagctggaggaggagaagaggcgctacaagaccatgttcacccggctgaaggccctgaaggtggagattgagcacctgcagctgctgatggacaaggccaaggtgaagctgcagaaggagtttgaggtgtggtgggccgaggaggccaccaacctgcaggtgaacagccctgctgtgaacagcctggaccacaccaagcccttcctgcagaccagtgacagccagcacgagtggagccagctgctgagcaacaagagcagcggcggctgggaggtgcaggaccagggcaccggccgctttgatgtgtgtgatgtgaatgccaggaagatcctgcccagcccctgccccagcccccacagccagaagcagagcagcaccagcacccccctggaggacagcatccccaagaggcctgtgagcagcatccccctgactggagacagccagacagacagcgacatcatcgccttcatcaaggcccggcagagcatcctgcagaagcagtgcctgggcagcaactag

SEQ ID NO: 157093 - DNA, 2394 bp, synthetic construct
  misc_feature 1..2394: note = Description of Artificial Sequence: Synthetic coding sequence
  source 1..2394: mol_type = other DNA
atggtgaagcagaccatccagatctttgcccgggtgaagccccctgtgaggaagcaccagcagggcatctacagcattgatgaagatgagaagctgatccccagcctggagatcatcctgccccgggacctggctgatggctttgtgaacaacaagcgggagagctacaagttcaagttccagaggatctttgaccaggatgccaaccaggagaccgtgtttgaaaatattgccaagcctgtggccggctctgtgctggccggctacaacggcaccatctttgcctacggccagacaggcagcggcaagaccttcaccatcaccggcggcgctgagcgctacagcgaccggggcatcatccccaggaccctgagctacatctttgagcagctgcagaaggacagcagcaagatctacaccacccacatctcctacctggagatctacaatgaatgtggctatgacctgctggaccccaggcatgaggccagcagcctggaggacctgcccaaggtgaccatcctggaggaccctgaccagaacatccacctgaagaacctgaccctgcaccaggccaccacagaggaggaggccctgaacctgctcttcctgggggacaccaacaggatgattgctgagacccccatgaaccaggccagcaccaggagccactgcatcttcaccatccacctgagcagcaaggagcccggcagcgccaccgtgagacatgccaagctgcacctggtggacctggccggcagcgagcgggtggccaagacaggagtgggcggccacctgctgacagaggccaagtacatcaacctgagcctgcactacctggagcaggtgatcatcgccctgtctgagaagcacaggagccacatcccctacagaaacagcatgatgacctctgtgctgcgggacagcctgggcggcaactgcatgaccaccatgattgccaccctgagcctggagaagaggaacctggatgagagcatcagcacctgccgctttgcccagagggtggccctgatcaagaatgaagctgtgctgaatgaggagatcaacccccggctggtgatcaagaggctgcagaaggagatccaggagctgaaggatgagctggccatggtgactggagagcagaggacagaggccctgacagaggccgagctgctgcagctggagaagctgatcaccagcttcctggaggaccaggacagcgacagccggctggaggtgggcgctgacatgaggaaggtgcaccactgcttccaccacctgaagaagctgctgaatgacaagaagatcctggagaacaacacagtgtcctctgagagcaaggaccaggactgccaggagcccctgaaggaggaggagtacaggaagctgcgggacatcctgaagcagagggacaatgagatcaacatcctggtgaacatgctgaagaaggagaagaagaaggcccaggaggccctgcacctggccggcatggaccggcgggagttccggcagagccagagcccccccttccggctgggcaaccctgaggagggccagaggatgaggctgagcagcgcccccagccaggcccaggacttcagcatcctgggcaagaggagcagcctgctgcacaagaagattggcatgagggaggagatgagcctgggctgccaggaggcctttgagatcttcaagagggaccacgccgacagcgtgaccattgatgacaacaagcagatcctgaagcagcgcttcagcgaggccaaggccctgggggagagcatcaatgaggcccggagcaagattggcatcagcgagaacatggctgtgcccctgatgccagaccagcaggaggagaagctgcggagccagctggaggaggagaagaggcgctacaagaccatgttcacccggctgaaggccctgaaggtggagattgagcacctgcagctgctgatggacaaggccaaggtgaagctgcagaaggagtttgaggtgtggtgggccgaggaggccaccaacctgcaggtgaacagccctgctgtgaacagcctggaccacaccaagcccttcctgcagaccagtgacagccagcacgagtggagccagctgctgagcaacaagagcagcggcggctgggaggtgcaggaccagggcaccggccgctttgatgtgtgtgatgtgaatgccaggaagatcctgcccagcccctgccccagcccccacagccagaagcagagcagcaccagcacccccctggaggacagcatccccaagaggcctgtgagcagcatccccctgactggagacagccagacagacagcgacatcatcgccttcatcaaggcccggcagagcatcctgcagaagcagtgcctgggcagcaactag

SEQ ID NO: 157094 - DNA, 2394 bp, synthetic construct
  misc_feature 1..2394: note = Description of Artificial Sequence: Synthetic coding sequence
  source 1..2394: mol_type = other DNA
atggtgaagcagaccatccagatctttgcccgggtgaagccccctgtgaggaagcaccagcagggcatctacagcattgatgaagatgagaagctgatccccagcctggagatcatcctgccccgggacctggctgatggctttgtgaacaacaagcgggagagctacaagttcaagttccagaggatctttgaccaggatgccaaccaggagaccgtgtttgaaaatattgccaagcctgtggccggctctgtgctggccggctacaacggcaccatctttgcctacggccagacaggcagcggcaagaccttcaccatcaccggcggcgctgagcgctacagcgaccggggcatcatccccaggaccctgagctacatctttgagcagctgcagaaggacagcagcaagatctacaccacccacatctcctacctggagatctacaatgaatgtggctatgacctgctggaccccaggcatgaggccagcagcctggaggacctgcccaaggtgaccatcctggaggaccctgaccagaacatccacctgaagaacctgaccctgcaccaggccaccacagaggaggaggccctgaacctgctcttcctgggggacaccaacaggatgattgctgagacccccatgaaccaggccagcaccaggagccactgcatcttcaccatccacctgagcagcaaggagcccggcagcgccaccgtgagacatgccaagctgcacctggtggacctggccggcagcgagcgggtggccaagacaggagtgggcggccacctgctgacagaggccaagtacatcaacctgagcctgcactacctggagcaggtgatcatcgccctgtctgagaagcacaggagccacatcccctacagaaacagcatgatgacctctgtgctgcgggacagcctgggcggcaactgcatgaccaccatgattgccaccctgagcctggagaagaggaacctggatgagagcatcagcacctgccgctttgcccagagggtggccctgatcaagaatgaagctgtgctgaatgaggagatcaacccccggctggtgatcaagaggctgcagaaggagatccaggagctgaaggatgagctggccatggtgactggagagcagaggacagaggccctgacagaggccgagctgctgcagctggagaagctgatcaccagcttcctggaggaccaggacagcgacagccggctggaggtgggcgctgacatgaggaaggtgcaccactgcttccaccacctgaagaagctgctgaatgacaagaagatcctggagaacaacacagtgtcctctgagagcaaggaccaggactgccaggagcccctgaaggaggaggagtacaggaagctgcgggacatcctgaagcagagggacaatgagatcaacatcctggtgaacatgctgaagaaggagaagaagaaggcccaggaggccctgcacctggccggcatggaccggcgggagttccggcagagccagagcccccccttccggctgggcaaccctgaggagggccagaggatgaggctgagcagcgcccccagccaggcccaggacttcagcatcctgggcaagaggagcagcctgctgcacaagaagattggcatgagggaggagatgagcctgggctgccaggaggcctttgagatcttcaagagggaccacgccgacagcgtgaccattgatgacaacaagcagatcctgaagcagcgcttcagcgaggccaaggccctgggggagagcatcaatgaggcccggagcaagattggccacctgaaggaggagatcacccagaggcacatccagcaggtggccctgggcatcagcgagaacatggctgtgcccctgatgccagaccagcaggaggagaagctgcggagccagctggaggaggagaagaggcgctacaagaccatgttcacccggctgaaggccctgaaggtggagattgagcacctgcagctgctgatggacaaggccaaggtgaagctgcagaaggagtttgaggtgtggtgggccgaggaggccaccaacctgcaggtgaacagccctgctgtgaacagcctggaccacaccaagcccttcctgcagaccagtgacagccagcacgagtggagccagctgctgagcaacaagagtgatgtgaatgccaggaagatcctgcccagcccctgccccagcccccacagccagaagcagagcagcaccagcacccccctggaggacagcatccccaagaggcctgtgagcagcatccccctgactggagacagccagacagacagcgacatcatcgccttcatcaaggcccggcagagcatcctgcagaagcagtgcctgggcagcaactag

SEQ ID NO: 157095 - DNA, 747 bp, synthetic construct
  misc_feature 1..747: note = Description of Artificial Sequence: Synthetic coding sequence
  source 1..747: mol_type = other DNA
atgagggaggagatgagcctgggctgccaggaggcctttgagatcttcaagagggaccatgctgacagcgtgaccattgatgacaacaagcagatcctgaagcagcgcttcagcgaggccaaggccctgggggagagcatcaatgaggcccggagcaagattggccacctgaaggaggagatcacccagaggcacatccagcaggtggccctgggcatcagcgagaacatggctgtgcccctgatgccagaccagcaggaggagaagctgcggagccagctggaggaggagaagaggcgctacaagaccatgttcacccggctgaaggccctgaaggtggagattgagcacctgcagctgctgatggacaaggccaaggtgaagctgcagaaggagtttgaggtgtggtgggccgaggaggccaccaacctgcaggtgaacagccctgctgtgaacagcctggaccacaccaagcccttcctgcagaccagtgacagccagcacgagtggagccagctgctgagcaacaagagtgatgtgaatgccaggaagatcctgcccagcccctgccccagcccccacagccagaagcagagcagcaccagcacccccctggaggacagcatccccaagaggcctgtgagcagcatccccctgaccggggacagccagacagacagcgacatcatcgccttcatcaaggcccggcagagcatcctgcagaagcagtgcctgggcagcaactag

SEQ ID NO: 157096 - DNA, 486 bp, synthetic construct
  misc_feature 1..486: note = Description of Artificial Sequence: Synthetic coding sequence
  source 1..486: mol_type = other DNA
acccccatgaaccaggccagcaccaggagccactgcatcttcaccatccacctgagcagcaaggagcccggcagcgccaccgtgagacatgccaagctgcacctggtggacctggccggcagcgagcgggtggccaagacaggagtgggcggccacctgctgacagaggccaagtacatcaacctgagcctgcactacctggagcaggtgatcatcgccctgtctgagaagcacaggagccacatcccctacagaaattccatgatgacctctgtgctgcgggacagcctgggcggcaactgcatgaccaccatgattgccaccctgagcctggagaagaggaacctggatgagagcatcagcacctgccgctttgcccagagggtggccctgatcaagaatgaggccgtgctgaatgaggagatcaacccccggctgaaggcccccagcagcagtgatggagtgctcttctgcaggaaccagtag

SEQ ID NO: 157097 - DNA, 2070 bp, synthetic construct
  misc_feature 1..2070: note = Description of Artificial Sequence: Synthetic coding sequence
  source 1..2070: mol_type = other DNA
tgaggagctgagcgctacagcgaccggggcatcatccccaggaccctgagctacatctttgagcagctgcagaaggacagcagcaagatctacaccacccacatctcctacctggagatctacaatgaatgtggctatgacctgctggaccccaggcatgaggccagcagcctggaggacctgcccaaggtgaccatcctggaggaccctgaccagaacatccacctgaagaacctgaccctgcaccaggccaccacagaggaggaggccctgaacctgctcttcctgggggacaccaacaggatgattgctgagacccccatgaaccaggccagcaccaggagccactgcatcttcaccatccacctgagcagcaaggagcccggcagcgccaccgtgagacatgccaagctgcacctggtggacctggccggcagcgagcgggtggccaagacaggagtgggcggccacctgctgacagaggccaagtacatcaacctgagcctgcactacctggagcaggtgatcatcgccctgtctgagaagcacaggagccacatcccctacagaaacagcatgatgacctctgtgctgcgggacagcctgggcggcaactgcatgaccaccatgattgccaccctgagcctggagaagaggaacctggatgagagcatcagcacctgccgctttgcccagagggtggccctgatcaagaatgaagctgtgctgaatgaggagatcaacccccggctggtgatcaagaggctgcagaaggagatccaggagctgaaggatgagctggccatggtgactggagagcagaggacagaggccctgacagaggccgagctgctgcagctggagaagctgatcaccagcttcctggaggaccaggacagcgacagccggctggaggtgggcgctgacatgaggaaggtgcaccactgcttccaccacctgaagaagctgctgaatgacaagaagatcctggagaacaacacagtgtcctctgagagcaaggaccaggactgccaggagcccctgaaggaggaggagtacaggaagctgcgggacatcctgaagcagagggacaatgagatcaacatcctggtgaacatgctgaagaaggagaagaagaaggcccaggaggccctgcacctggccggcatggaccggcgggagttccggcagagccagagcccccccttccggctgggcaaccctgaggagggccagaggatgaggctgagcagcgcccccagccaggcccaggacttcagcatcctgggcaagaggagcagcctgctgcacaagaagattggcatgagggaggagatgagcctgggctgccaggaggcctttgagatcttcaagagggaccacgccgacagcgtgaccattgatgacaacaagcagatcctgaagcagcgcttcagcgaggccaaggccctgggggagagcatcaatgaggcccggagcaagattggccacctgaaggaggagatcacccagaggcacatccagcaggtggccctgggcatcagcgagaacatggctgtgcccctgatgccagaccagcaggaggagaagctgcggagccagctggaggaggagaagaggcgctacaagaccatgttcacccggctgaaggccctgaaggtggagattgagcacctgcagctgctgatggacaaggccaaggtgaagctgcagaaggagtttgaggtgtggtgggccgaggaggccaccaacctgcaggtgaacagccctgctgtgaacagcctggaccacaccaagcccttcctgcagaccagtgacagccagcacgagtggagccagctgctgagcaacaagagtgatgtgaatgccaggaagatcctgcccagcccctgccccagcccccacagccagaagcagagcagcaccagcacccccctggaggacagcatccccaagaggcctgtgagcagcatccccctgactggagacagccagacagacagcgacatcatcgccttcatcaaggcccggcagagcatcctgcagaagcagtgcctgggcagcaactag

SEQ ID NO: 157098 - DNA, 2277 bp, synthetic construct
  misc_feature 1..2277: note = Description of Artificial Sequence: Synthetic coding sequence
  source 1..2277: mol_type = other DNA
atggtgaagcagaccatccagatctttgcccgggtgaagccccctgtgaggaagcaccagcagggcatctacagcattgatgaagatgagaagctgatccccagcctggagatcatcctgccccgggacctggctgatggctttgtgaacaacaagcgggagagctacaagttcaagttccagaggatctttgaccaggatgccaaccaggagaccgtgtttgaaaatattgccaagcctgtggccggctctgtgctggccggctacaacggcaccatctttgcctacggccagacaggcagcggcaagaccttcaccatcaccggcggcgctgagcgctacagcgaccggggcatcatccccaggaccctgagctacatctttgagcagctgcagaaggacagcagcaagatctacaccacccacatctcctacctggagatctacaatgaatgtggctatgacctgctggaccccaggcatgaggccagcagcctggaggacctgcccaaggtgaccatcctggaggaccctgaccagaacatccacctgaagaacctgaccctgcaccaggccaccacagaggaggaggccctgaacctgctcttcctgggggacaccaacaggatgattgctgagacccccatgaaccaggccagcaccaggagccactgcatcttcaccatccacctgagcagcaaggagcccggcagcgccaccgtgagacatgccaagctgcacctggtggacctggccggcagcgagcgggtggccaagacaggagtgggcggccacctgctgacagaggccaagtacatcaacctgagcctgcactacctggagcaggtgatcatcgccctgtctgagaagcacaggagccacatcccctacagaaacagcatgatgacctctgtgctgcgggacagcctgggcggcaactgcatgaccaccatgattgccaccctgagcctggagaagaggaacctggatgagagcatcagcacctgccgctttgcccagagggtggccctgatcaagaatgaagctgtgctgaatgaggagatcaacccccggctggtgatcaagaggctgcagaaggagatccaggagctgaaggatgagctggccatggtgactggagagcagaggacagaggccctgacagaggccgagctgctgcagctggagaagctgatcaccagcttcctggaggaccaggacagcgacagccggctggaggtgggcgctgacatgaggaaggtgcaccactgcttccaccacctgaagaagctgctgaatgacaagaagatcctggagaacaacacagtgtcctctgagagcaaggaccaggactgccaggagcccctgaaggaggaggagtacaggaagctgcgggacatcctgaagcagagggacaatgagatcagcatcctgtctgaggtgatgaagaagctgcccctgtcctggtttgagcggggcatgagggaggagatgagcctgggctgccaggaggcctttgagatcttcaagagggaccacgccgacagcgtgaccattgatgacaacaagcagatcctgaagcagcgcttcagcgaggccaaggccctgggggagagcatcaatgaggcccggagcaagattggccacctgaaggaggagatcacccagaggcacatccagcaggtggccctgggcatcagcgagaacatggctgtgcccctgatgccagaccagcaggaggagaagctgcggagccagctggaggaggagaagaggcgctacaagaccatgttcacccggctgaaggccctgaaggtggagattgagcacctgcagctgctgatggacaaggccaaggtgaagctgcagaaggagtttgaggtgtggtgggccgaggaggccaccaacctgcaggtgaacagccctgctgtgaacagcctggaccacaccaagcccttcctgcagaccagtgacagccagcacgagtggagccagctgctgagcaacaagagcagcggcggctgggaggtgcaggaccagggcaccggccgctttgatgtgtgtgatgtgaatgccaggaagatcctgcccagcccctgccccagcccccacagccagaagcagagcagcaccagcacccccctggaggacagcatccccaagaggcctgtgagcagcatccccctgaccggggacagccagacagacagcgacatcatcgccttcatcaaggcccggcagagcatcctgcagaagcagtgcctgggcagcaactag

SEQ ID NO: 157099 - DNA, 516 bp, synthetic construct
  misc_feature 1..516: note = Description of Artificial Sequence: Synthetic coding sequence
  source 1..516: mol_type = other DNA
atgagggaggagatgagcctgggctgccaggaggcctttgagatcttcaagagggaccatgctgacagcgtgaccattgatgacaacaagcagatcctgaagcagcgcttcagcgaggccaaggccctgggggagagcatcaatgaggcccggagcaagattggccacctgaaggaggagatcacccagaggcacatccagcaggtggccctgggcatcagcgagaacatggctgtgcccctgatgccagaccagcaggaggagaagctgcggagccagctggaggaggagaagaggcgctacaagaccatgttcacccggctgaaggccctgaaggtggagattgagcacctgcagctgctgatggacaaggccaaggtgaagctgcagaaggagtttgaggtgtggtgggccgaggaggccaccaacctgcaggtgaacagccctgctgtgaacagcctggaccacaccaagagcaagatcaaggccctggccgacagcatgagcggcctgtag

SEQ ID NO: 157100 - DNA, 882 bp, synthetic construct
  misc_feature 1..882: note = Description of Artificial Sequence: Synthetic coding sequence
  source 1..882: mol_type = other DNA
atgagggaggagatgagcctgggctgccaggaggcctttgagatcttcaagagggaccatgctgacagcgtgaccattgatgacaacaagcagatcctgaagcagcgcttcagcgaggccaaggccctgggggagagcatcaatgaggcccggagcaagattggccacctgaaggaggagatcacccagaggcacatccagcaggtggccctgggcatcagcgagaacatggctgtgcccctgatgccagaccagcaggaggagaagctgcggagccagctggaggaggagaagaggcgctacaagaccatgttcacccggctgaaggccctgaaggtggagattgagcacctgcagctgctgatggacaaggccaaggtgaagctgcagaaggagtttgaggtgtggtgggccgaggaggccaccaacctgcaggtgaacagccctgctgtgaacagcctggaccacaccaagcccttcctgcagaccagtgacagccagcacgagtggagccagctgctgagcaacaagagcagcggcggctgggaggtgcaggaccagggcaccggccgctttgatgtgtgtgatgtgaatgccaggaagatcctgcccagcccctgccccagcccccacagccagaagcagagcagcaccagcacccccctggaggacagcatccccaagaggcctgtgagcagcatccccctgactggagacagccagacagacagcgacatcatcgccttcatcaaggcccggcagagcatcctgcagaagcagtacctgcagctgctgtgcagcctcttccccaagtctgctgtgagcagcgcccaggccagcaccaacaggaagggcctgagtgatgtgctggtgaccaggtag

SEQ ID NO: 157101 - DNA, 4032 bp, synthetic construct
  misc_feature 1..4032: note = Description of Artificial Sequence: Synthetic coding sequence
  source 1..4032: mol_type = other DNA
atgggcctggaggcccagaggctgcctggagctgaggaggcccctgtgcgggtggccctgcgggtgcggcccctgctgcccaaggagctgctgcacggccaccagagctgcctgcaggtggagcccggcctgggccgggtgaccctgggccgggacagacacttcggcttccacgtggtgctggctgaagatgctggccaggaggccgtgtaccaggcctgtgtgcagcccctgctggaggccttctttgagggcttcaatgccaccgtgtttgcctacggccagacaggcagcggcaagacctacaccatgggagaggcctctgtggccagcctgctggaggatgagcagggcatcgtgccccgggccatggccgaggccttcaagctgattgatgaaaatgacctgctggactgcctggtgcacgtgtcctacctggaggtgtacaaggaggagttccgggacctgctggaggtgggcacagccagccgggacatccagctgcgggaggatgaaagaggaaatgtggtgctgtgtggggtgaaggaggtggatgtggagggcctggatgaggtgctgagcctgctggagatgggaaatgctgcccggcacactggagccacccacctgaaccacctgagcagccgcagccacacagtgttcaccgtgaccctggagcagaggggccgggcccccagccggctgcccaggcctgcccctggccagctgctggtgtccaagttccactttgtggacctggccggcagcgagcgggtgctgaagacaggcagcactggagagcggctgaaggagagcatccagatcaacagcagcctgctggccctgggcaatgtcatcagcgccctgggggacccccagaggcggggcagccacatcccctacagagacagcaagatcacccgcatcctgaaggacagcctgggcggcaatgccaagacagtgatgattgcctgtgtgagccccagcagcagtgactttgatgagaccctgaacaccctgaactatgccagccgggcccagaacatccggaacagagccaccgtgaactggaggcctgaggccgagcggcccccagaggagacagccagcggggcccggggccccccaagacacaggtctgagacccgcatcatccaccggggcagaagagcccctggccctgccacagccagcgctgctgctgccatgaggctgggcgcagaatgtgcccgctaccgggcctgcacagatgctgcctacagcctgctgcgggagctgcaggccgagcccggcctgcctggagctgctgccaggaaggtgcgggactggctgtgtgctgtggagggggagaggtctgccctgagcagcgccagcggccctgacagcggcatcgagagcgcctctgtggaggaccaggccgcccagggcgccggcggcaggaaggaggatgaaggagcccagcagctgctgaccctgcagaaccaggtggcccggctggaggaggagaacagagacttcctggccgccctggaggatgccatggagcagtacaagctgcagagcgaccggctgcgggagcagcaggaggagatggtggagctgcggctgcggctggagctggtgcggcccggctggggcggcccccggctgctgaatggcctgcccccaggcagctttgtgccccggccccacacagcccccctgggcggggcccacgcccacgtgctgggcatggtgcccccagcctgcctgcctggagatgaggtgggcagcgagcagagaggagagcaggtgaccaacggccgggaggccggggctgagctgctgacagaggtgaaccggctgggcagcggcagcagcgctgccagcgaggaggaggaggaggaggaggagccccccaggaggaccctgcacctgcggaggaaccgcatcagcaactgcagccagagagctggggcccggcccggcagcctgcctgagaggaagggccctgagctgtgcctggaggagctggatgctgccatccctggcagcagagctgtgggcggcagcaaggcccgggtgcaggcccggcaggtgcccccagccacagccagcgagtggaggctggcccaggcccagcagaagatccgggagctggccatcaacatccgcatgaaggaggagctgattggagagctggtgaggacaggcaaggccgcccaggccctgaaccggcagcacagccagaggatccgggagctggagcaggaggccgagcaggtgcgggcagagctgtctgagggccagaggcagctgcgggagctggagggcaaggagctgcaggatgctggggagaggagccggctgcaggagttcagaagaagagtggccgccgcccagagccaggtgcaggtgctgaaggagaagaagcaggccacagagcggctggtgtccctgagcgcccagagcgagaagaggctgcaggagctggagagaaatgtgcagctgatgaggcagcagcagggccagctgcagaggcggctgcgggaggagacagagcagaagaggcggctggaggccgagatgagcaagaggcagcaccgggtgaaggagctggagctgaagcatgagcagcagcagaagatcctgaagatcaagacagaggagattgctgccttccagaggaagagaagaagtggcagcaatggatctgtggtgtccctggagcagcagcagaagattgaggagcagaagaagtggctggaccaggagatggagaaggtgctgcagcagaggcgggccctggaggagctgggggaggagctgcacaagcgggaggccatcctggccaagaaggaggccctgatgcaggagaagacaggcctggagagcaagaggctgcggagcagccaggccctgaatgaagatattgtgcgggtgagcagccggctggagcacctggagaaggagctgtctgagaagagcggccagctgcggcagggcagcgcccagagccagcagcagatccggggggagattgacagcctgcggcaggagaaggacagcctgctgaagcagaggctggagattgatggcaagctgcggcagggcagcctgctgagccctgaggaggagaggaccctcttccagctggatgaggccatcgaggccctggatgctgccatcgagtacaagaatgaggccatcacctgccggcagagggtgctgcgggccagcgccagcctgctgagccagtgtgagatgaacctgatggccaagctgagctacctgagcagcagcgagacccgggccctgctgtgcaagtactttgacaaggtggtgaccctgcgggaggagcagcaccagcagcagatcgccttcagcgagctggagatgcagctggaggagcagcagaggctggtgtactggctggaggtggccctggagcggcagaggctggagatggaccggcagctgaccctgcagcagaaggagcacgagcagaacatgcagctgctgctgcagcagagccgggaccacctgggggagggcctggccgacagccggcggcagtatgaggcccgcatccaggccctggagaaggagctgggccgctacatgtggatcaaccaggagctgaagcagaagctgggcggcgtgaatgctgtgggccacagccggggcggggagaagaggagcctgtgcagcgagggccggcaggcccctggaaatgaagatgagctgcacctggcccctgagctgctgtggctgagccccctgacagaaggagcccccaggacccgggaggagacccgggacctggtgcacgcccccctgcccctgacctggaagaggagcagcctgtgtggggaggagcagggcagccctgaggagctgcggcagcgggaggccgctgagcccctggtgggccgggtgctgcctgtgggggaggccggcctgccctggaactttggccccctgagcaagccccggcgggagctgcggcgggccagccctggcatgattgatgtgaggaagaaccccctgtag

SEQ ID NO: 157102 - DNA, 2022 bp, synthetic construct
  misc_feature 1..2022: note = Description of Artificial Sequence: Synthetic coding sequence
  source 1..2022: mol_type = other DNA
atggacccccagaggagccccctgctggaggtgaagggcaacatcgagctgaagaggcccctcatcaaggcccccagccagctgcccctgagcggcagccggctgaagagaagaccagaccagatggaggatggcctggagcctgagaagaagaggacccggggcctgggcgccaccaccaagatcaccaccagccacccccgggtgcccagcctgaccaccgtgccccagacccagggccagaccacagcccagaaggtgtccaagaagacaggcccccgctgcagcacagccatcgccaccggcctgaagaaccagaagcctgtgcctgctgtgcctgtgcagaagagcggcaccagcggcgtgccccccatggccggcggcaagaagcccagcaagaggcctgcctgggacctgaagggccagctgtgtgacctgaatgctgagctgaagcgctgccgggagaggacccagaccctggaccaggagaaccagcagctgcaggaccagctgagagatgcccagcagcaggtgaaggccctgggcacagagaggaccaccctggagggccacctggccaaggtgcaggcccaggccgagcagggccagcaggagctgaagaacctgcgggcctgtgtgctggagctggaggagcggctgagcacccaggagggcctggtgcaggagctgcagaagaagcaggtggagctgcaggaggagcggcggggcctgatgagccagctggaggagaaggagcggcggctgcagaccagcgaggccgccctgagcagcagccaggccgaggtggccagcctgcggcaggagaccgtggcccaggccgccctgctgacagagcgggaggagcggctgcacggcctggagatggagcggcggcggctgcacaaccagctgcaggagctgaagggcaacatccgggtcttctgccgggtgcggcctgtgctgcccggggagcccaccccacctcctggcctgctgctcttccccagcggccctgggggccccagcgacccccccacccggctgagcctgagcagaagtgatgagcggcggggcaccctgagcggggccccagccccacccaccaggcatgacttctcctttgacagagtcttccccccaggcagcggccaggatgaggtgtttgaggagatcgccatgctggtgcagagcgccctggatggctaccctgtgtgcatctttgcctacggccagacaggcagcggcaagaccttcaccatggagggcggccctggaggagacccccagctggagggcctcatcccccgggccctgcggcacctgttctctgtggcccaggagctgagcggccagggctggacctacagctttgtggccagctatgtggagatctacaatgagaccgtgcgggacctgctggccaccggcaccaggaagggccagggcggggagtgtgagatccggcgggccggccctggcagcgaggagctgactgtgaccaatgcccgctacgtgcctgtgtcctgtgagaaggaggtggatgccctgctgcacctggcccggcagaacagagctgtggccaggacagcccagaatgaaagaagcagccgcagccacagcgtcttccagctgcagatctctggagagcacagcagccggggcctgcagtgtggggcccccctgagcctggtggacctggccggcagcgagcggctggaccccggcctggccctgggccctggagagcgggagcggctgcgggagacccaggccatcaacagcagcctgagcaccctgggcctggtgatcatggccctgagcaacaaggagagccacgtgccctacagaaacagcaagctgacctacctgctgcagaacagcctgggcggcagcgccaagatgctgatgtttgtgaacatcagccccctggaggagaatgtgtctgagagcctgaacagcctgcgctttgccagcaaggtgaaccagtgtgtgattggaacagcccaggccaacaggaagtag

SEQ ID NO: 157103 - DNA, 612 bp, synthetic construct
  misc_feature 1..612: note = Description of Artificial Sequence: Synthetic coding sequence
  source 1..612: mol_type = other DNA
atggacccccagaggagccccctgctggaggtgaagggcaacatcgagctgaagaggcccctcatcaaggcccccagccagctgcccctgagcggcagccggctgaagagaagaccagaccagatggaggatggcctggagcctgagaagaagaggacccggggcctgggcgccaccaccaagatcaccaccagccacccccgggtgcccagcctgaccaccgtgccccagacccagggccagaccaccggccccagcagccaccccctgccctggcagtgccaccaccagcccttcctggtgacagaccccggcggccgctcctggggccctggccagaagtggcaccggctgcacctgtggtgcaccagcgcccagaaggtgtccaagaagacaggcccccgctgcagcacagccatcgccaccggcctgaagaaccagaagcctgtgcctgctgtgcctgtgcagaagagcggcaccagcggcgtgccccccatggccggcggcaagaagcccagcaagaggcctgcctgggacctgaagggccagctgtgtgacctgaatgctgagctgaagcgctgccgggagaggacccagaccctggaccagtag

SEQ ID NO: 157104 - DNA, 612 bp, synthetic construct
  misc_feature 1..612: note = Description of Artificial Sequence: Synthetic coding sequence
  source 1..612: mol_type = other DNA
atggacccccagaggagccccctgctggaggtgaagggcaacatcgagctgaagaggcccctcatcaaggcccccagccagctgcccctgagcggcagccggctgaagagaagaccagaccagatggaggatggcctggagcctgagaagaagaggacccggggcctgggcgccaccaccaagatcaccaccagccacccccgggtgcccagcctgaccaccgtgccccagacccagggccagaccaccggccccagcagccaccccctgccctggcagtgccaccaccagcccttcctggagacagaccccggcggccgctcctggggccctggccagaagtggcaccggctgcacctgtggtgcaccagcgcccagaaggtgtccaagaagacaggcccccgctgcagcacagccatcgccaccggcctgaagaaccagaagcctgtgcctgctgtgcctgtgcagaagagcggcaccagcggcgtgccccccatggccggcggcaagaagcccagcaagaggcctgcctgggacctgaagggccagctgtgtgacctgaatgctgagctgaagcgctgccgggagaggacccagaccctggaccagtag

SEQ ID NO: 157105 - DNA, 2022 bp, synthetic construct; identical to SEQ ID NO: 157102
  misc_feature 1..2022: note = Description of Artificial Sequence: Synthetic coding sequence
  source 1..2022: mol_type = other DNA

SEQ ID NO: 157106 - DNA, 2022 bp, synthetic construct; identical to SEQ ID NO: 157102
  misc_feature 1..2022: note = Description of Artificial Sequence: Synthetic coding sequence
  source 1..2022: mol_type = other DNA

SEQ ID NO: 157107 - DNA, 612 bp, synthetic construct; identical to SEQ ID NO: 157104
  misc_feature 1..612: note = Description of Artificial Sequence: Synthetic coding sequence
  source 1..612: mol_type = other DNA

SEQ ID NO: 157108 - DNA, 2502 bp, synthetic construct
  misc_feature 1..2502: note = Description of Artificial Sequence: Synthetic coding sequence
  source 1..2502: mol_type = other DNA
atggtgcccagcaggaggacctggaacctgggcgccacccccagcctgcggggcctgtggagggtgggccgggcccctgagcctgagcccggcatggcccggcctgccccagccccagccagccctgctgcccggcccttcccccacacaggccctggccgcctgaggacaggccggggcaaggacacccctgtgtgtggagatgaggacagcagcgcccggtctgctgcccggcctgccctggcccagtgccgggccctgtctgtggactgggccggccctggcagcccccacggcctgtacctgaccctgcaggtggagcacctgaaggagaagctgatcagccaggcccaggaggtgtcccggctgcggtctgagctgggcggcacagacctggagaagcaccgggacctgctgatggtggagaatgaaaggctgcggcaggagatgagaagatgtgaggccgagctgcaggagctgcggaccaagccagctggcccctgccccggctgtgagcacagccaggagagcgcccagctgcgggacaagctgagccagctgcagctggagatggccgagagcaagggcatgctgtctgagctgaacctggaggtgcagcagaagacagaccggctggccgaggtggagctgcggctgaaggactgcctggccgagaaggcccaggaggaggagcggctgagccggcggctgcgggacagccatgagaccatcgccagcctgcgggcccagagcccccctgtgaagtatgtgatcaagacagtggaggtggagagcagcaagaccaagcaggccctgtctgagagccaggccaggaaccagcacctgcaggagcaggtggccatgcagaggcaggtgctgaaggagatggagcagcagctgcagagcagccaccagctgacagcccggctgcgggcccagatcgccatgtatgaaagtgagctggagcgggcccacggccagatgctggaggagatgcagagcctggaggaggacaagaacagagccatcgaggaggcctttgcccgggcccaggtggagatgaaggctgtgcatgagaacctggccggcgtgaggaccaacctgctgaccctgcagcctgccctgcggaccctgaccaatgactacaacggcctgaagaggcaggtgcggggcttccccctgctgctgcaggaggccctgcggtctgtgaaggccgagatcggccaggccatcgaggaggtgaacagcaacaaccaggagctgctgaggaagtaccgccgggagctgcagctgaggaagaagtgccacaatgagctggtgcggctgaagggcaacatccgggtgattgcccgggtgcggcctgtgaccaaggaggatggagagggccctgaggccaccaatgctgtgacctttgatgctgatgatgacagcatcatccacctgctgcacaagggcaagcctgtgtcctttgagctggacaaggtgttcagcccccaggccagccagcaggatgtgttccaggaggtgcaggccctggtgaccagctgcattgatggcttcaacgtgtgcatctttgcctacggccagacaggagctgggaagacctacaccatggagggcacagcagaaaatcctggcatcaaccagagggccctgcagctgctcttcagcgaggtgcaggagaaggccagtgactgggagtacaccatcaccgtgtctgctgctgagatctacaatgaggtgctgcgggacctgctgggcaaggagccccaggagaagctggagatccggctgtgcccagatggcagcggccagctgtatgtgcccggcctgacagagttccaggtgcagagcgtggatgacatcaacaaggtgtttgaatttggccacaccaacagaaccacagagttcaccaacctgaatgagcacagcagccgcagccacgccctgctgattgtgacagtgcggggcgtggactgcagcacaggcctgcggaccaccgggaagctgaacctggtggacctggccggcagcgagcgggtgggcaagagcggggctgagggcagccggctgcgggaggcccagcacatcaacaagagcctgagcgccctgggagatgtgattgctgccctgcggagccggcagggccacgtgcccttcaggaacagcaagctgacctacctgctgcaggacagcctgagcggggacagcaagaccctgatggtggtgcaggtgtcccctgtggagaagaacaccagcgagaccctgtacagcctgaagtttgctgagcgggtgcgctctgtggagctgggccctggcctgcggcgggcagagctgggctcctggagcagccaggagcacctggagtgggagcccgcctgccagaccccccagcccagcgcccgggcccacagcgcccccagcagcggcaccagcagcaggcctggcagcatccggaggaagctgcagcccagcggcaagagccggcccctgcctgtgtag

SEQ ID NO: 157109 - DNA, 2064 bp, synthetic construct
  misc_feature 1..2064: note = Description of Artificial Sequence: Synthetic coding sequence
  source 1..2064: mol_type = other DNA
atggtggagaatgaaaggctgcggcaggagatgaggcgctgtgaggccgagctgcaggagctgcggaccaagccagctggcccctgccccggctgtgagcacagccaggagagcgcccagctgcgggacaagctgagccagctgcagctggagatggccgagagcaagggcatgctgtctgagctgaacctggaggtgcagcagaagacagaccggctggccgaggtggagctgcggctgaaggactgcctggccgagaaggcccaggaggaggagcggctgagccggcggctgcgggacagccatgagaccatcgccagcctgcgggcccagagcccccctgtgaagtatgtgatcaagacagtggaggtggagagcagcaagaccaagcaggccctgtctgagagccaggccaggaaccagcacctgcaggagcaggtggccatgcagaggcaggtgctgaaggagatggagcagcagctgcagagcagccaccagctgacagcccggctgcgggcccagatcgccatgtatgagagcgagctggagcgggcccacggccagatgctggaggagatgcagagcctggaggaggacaagaacagagccatcgaggaggcctttgcccgggcccaggtggagatgaaggctgtgcatgagaacctggccggcgtgaggaccaacctgctgaccctgcagcctgccctgcggaccctgaccaatgactacaacggcctgaagaggcaggtgcggggcttccccctgctgctgcaggaggccctgcggtctgtgaaggccgagatcggccaggccatcgaggaggtgaacagcaacaaccaggagctgctgaggaagtacagaagagagctgcagctgaggaagaagtgccacaatgagctggtgcggctgaagggcaacatccgggtcatcgcccgggtgcggcctgtgaccaaggaggatggagagggccctgaggccaccaatgctgtgacctttgatgctgatgatgacagcatcatccacctgctgcacaagggcaagcctgtgtcctttgagctggacaaggtgttcagcccccaggccagccagcaggatgtgttccaggaggtgcaggccctggtgaccagctgcattgatggcttcaacgtgtgcatctttgcctacggccagacaggagctgggaagacctacaccatggagggcacagctgagaaccctggcatcaaccagagggccctgcagctgctcttcagcgaggtgcaggagaaggccagtgactgggagtacaccatcaccgtgtctgctgctgagatctacaatgaggtgctgcgggacctgctgggcaaggagccccaggagaagctggagatccggctgtgcccagatggcagcggccagctgtatgtgcccggcctgacagagttccaggtgcagagcgtggatgacatcaacaaggtgtttgaatttggccacaccaacagaaccacagagttcaccaacctgaatgagcacagcagccgcagccacgccctgctgattgtgacagtgcggggcgtggactgcagcacaggcctgcggaccaccgggaagctgaacctggtggacctggccggcagcgagcgggtgggcaagtctggagctgagggcagccggctgcgggaggcccagcacatcaacaagagcctgagcgccctgggagatgtgattgctgccctgcggagccggcagggccacgtgcccttcaggaacagcaagctgacctacctgctgcaggacagcctgagcggggacagcaagaccctgatggtggtgcaggtgtcccctgtggagaagaacaccagcgagaccctgtacagcctgaagtttgctgagcgggtgcgctctgtggagctgggccctggcctgcggcgggcagagctgggctcctggagcagccaggagcacctggagtgggagcccgcctgccagaccccccagcccagcgcccgggcccacagcgcccccagcagcggcaccagcagccggcccggcagcatccggaggaagctgcagcccagcgcctag

SEQ ID NO: 157110 - DNA, 2481 bp, synthetic construct
  misc_feature 1..2481: note = Description of Artificial Sequence: Synthetic coding sequence
  source 1..2481: mol_type = other DNA
atggtgcccagcaggaggacctggaacctgggcgccacccccagcctgcggggcctgtggagggtgggccgggcccctgagcctgagcccggcatggcccggcctgccccagccccagccagccctgctgcccggcccttcccccacacaggccctggccgcctgaggacaggccggggcaaggacacccctgtgtgtggagatgaggacagcagcgcccggtctgctgcccggcctgccctggcccagtgccgggccctgtctgtggactgggccggccctggcagcccccacggcctgtacctgaccctgcaggtggagcacctgaaggagaagctgatcagccaggcccaggaggtgtcccggctgcggtctgagctgggcggcacagacctggagaagcaccgggacctgctgatggtggagaatgaaaggctgcggcaggagatgagaagatgtgaggccgagctgcaggagctgcggaccaagccagctggcccctgccccggctgtgagcacagccaggagagcgcccagctgcgggacaagctgagccagctgcagctggagatggccgagagcaagggcatgctgtctgagctgaacctggaggtgcagcagaagacagaccggctggccgaggtggagctgcggctgaaggactgcctggccgagaaggcccaggaggaggagcggctgagccggcggctgcgggacagccatgagaccatcgccagcctgcgggcccagagcccccctgtgaagtatgtgatcaagacagtggaggtggagagcagcaagaccaagcaggccctgtctgagagccaggccaggaaccagcacctgcaggagcaggtggccatgcagaggcaggtgctgaaggagatggagcagcagctgcagagcagccaccagctgacagcccggctgcgggcccagatcgccatgtatgaaagtgagctggagcgggcccacggccagatgctggaggagatgcagagcctggaggaggacaagaacagagccatcgaggaggcctttgcccgggcccaggtggagatgaaggctgtgcatgagaacctggccggcgtgaggaccaacctgctgaccctgcagcctgccctgcggaccctgaccaatgactacaacggcctgaagaggcaggtgcggggcttccccctgctgctgcaggaggccctgcggtctgtgaaggccgagatcggccaggccatcgaggaggtgaacagcaacaaccaggagctgctgaggaagtaccgccgggagctgcagctgaggaagaagtgccacaatgagctggtgcggctgaagggcaacatccgggtgattgcccgggtgcggcctgtgaccaaggaggatggagagggccctgaggccaccaatgctgtgacctttgatgctgatgatgacagcatcatccacctgctgcacaagggcaagcctgtgtcctttgagctggacaaggtgttcagcccccaggccagccagcaggatgtgttccaggaggtgcaggccctggtgaccagctgcattgatggcttcaacgtgtgcatctttgcctacggccagacaggagctgggaagacctacaccatggagggcacagcagaaaatcctggcatcaaccagagggccctgcagctgctcttcagcgaggtgcaggagaaggccagtgactgggagtacaccatcaccgtgtctgctgctgagatctacaatgaggtgctgcgggacctgctgggcaaggagccccaggagaagctggagatccggctgtgcccagatggcagcggccagctgtatgtgcccggcctgacagagttccaggtgcagagcgtggatgacatcaacaaggtgtttgaatttggccacaccaacagaaccacagagttcaccaacctgaatgagcacagcagccgcagccacgccctgctgattgtgacagtgcggggcgtggactgcagcacaggcctgcggaccaccgggaagctgaacctggtggacctggccggcagcgagcgggtgggcaagagcggggctgagggcagccggctgcgggaggcccagcacatcaacaagagcctgagcgccctgggagatgtgattgctgccctgcggagccggcagggccacgtgcccttcaggaacagcaagctgacctacctgctgcaggacagcctgagcggggacagcaagaccctgatggtggtgcaggtgtcccctgtggagaagaacaccagcgagaccctgtacagcctgaagtttgctgagcgggtgcgctctgtggagctgggccctggcctgcggcgggcagagctgggctcctggagcagccaggagcacctggagtgggagcccgcctgccagaccccccagcccagcgcccgggcccacagcgcccccagcagcggcaccagcagcaggcctggcagcatccggaggaagctgcagcccagcgcctag

SEQ ID NO: 157111 - DNA, 2307 bp, synthetic construct
  misc_feature 1..2307: note = Description of Artificial Sequence: Synthetic coding sequence
  source 1..2307: mol_type = other DNA
atggtgctgaggatggtggaggccatgagccagctgcaggatgagaagacccagctgcaggaggagctggtggtgctgcaggagcggctggccctgcgggacagcgaccagcaggccaccagcacccagctgcagaaccaggtggagcacctgaaggagaagctgatcagccaggcccaggaggtgtcccggctgcggtctgagctgggcggcacagacctggagaagcaccgggacctgctgatggtggagaatgaaaggctgcggcaggagatgagaagatgtgaggccgagctgcaggagctgcggaccaagccagctggcccctgccccggctgtgagcacagccaggagagcgcccagctgcgggacaagctgagccagctgcagctggagatggccgagagcaagggcatgctgtctgagctgaacctggaggtgcagcagaagacagaccggctggccgaggtggagctgcggctgaaggactgcctggccgagaaggcccaggaggaggagcggctgagccggcggctgcgggacagccatgagaccatcgccagcctgcgggcccagagcccccctgtgaagtatgtgatcaagacagtggaggtggagagcagcaagaccaagcaggccctgtctgagagccaggccaggaaccagcacctgcaggagcaggtggccatgcagaggcaggtgctgaaggagatggagcagcagctgcagagcagccaccagctgacagcccggctgcgggcccagatcgccatgtatgaaagtgagctggagcgggcccacggccagatgctggaggagatgcagagcctggaggaggacaagaacagagccatcgaggaggcctttgcccgggcccaggtggagatgaaggctgtgcatgagaacctggccggcgtgaggaccaacctgctgaccctgcagcctgccctgcggaccctgaccaatgactacaacggcctgaagaggcaggtgcggggcttccccctgctgctgcaggaggccctgcggtctgtgaaggccgagatcggccaggccatcgaggaggtgaacagcaacaaccaggagctgctgaggaagtaccgccgggagctgcagctgaggaagaagtgccacaatgagctggtgcggctgaagggcaacatccgggtgattgcccgggtgcggcctgtgaccaaggaggatggagagggccctgaggccaccaatgctgtgacctttgatgctgatgatgacagcatcatccacctgctgcacaagggcaagcctgtgtcctttgagctggacaaggtgttcagcccccaggccagccagcaggatgtgttccaggaggtgcaggccctggtgaccagctgcattgatggcttcaacgtgtgcatctttgcctacggccagacaggagctgggaagacctacaccatggagggcacagcagaaaatcctggcatcaaccagagggccctgcagctgctcttcagcgaggtgcaggagaaggccagtgactgggagtacaccatcaccgtgtctgctgctgagatctacaatgaggtgctgcgggacctgctgggcaaggagccccaggagaagctggagatccggctgtgcccagatggcagcggccagctgtatgtgcccggcctgacagagttccaggtgcagagcgtggatgacatcaacaaggtgtttgaatttggccacaccaacagaaccacagagttcaccaacctgaatgagcacagcagccgcagccacgccctgctgattgtgacagtgcggggcgtggactgcagcacaggcctgcggaccaccgggaagctgaacctggtggacctggccggcagcgagcgggtgggcaagagcggggctgagggcagccggctgcgggaggcccagcacatcaacaagagcctgagcgccctgggagatgtgattgctgccctgcggagccggcagggccacgtgcccttcaggaacagcaagctgacctacctgctgcaggacagcctgagcggggacagcaagaccctgatggtggtgcaggtgtcccctgtggagaagaacaccagcgagaccctgtacagcctgaagtttgctgagcgggtgcgctctgtggagctgggccctggcctgcggcgggcagagctgggctcctggagcagccaggagcacctggagtgggagcccgcctgccagaccccccagcccagcgcccgggcccacagcgcccccagcagcggcaccagcagcaggcctggcagcatccggaggaagctgcagcccagcgcctag

SEQ ID NO: 157112 - DNA, 2175 bp, synthetic construct
  misc_feature 1..2175: note = Description of Artificial Sequence: Synthetic coding sequence
  source 1..2175: mol_type = other DNA
atgatcaaggtggagcacctgaaggagaagctgatcagccaggcccaggaggtgtcccggctgcggtctgagctgggcggcacagacctggagaagcaccgggacctgctgatggtggagaatgaaaggctgcggcaggagatgagaagatgtgaggccgagctgcaggagctgcggaccaagccagctggcccctgccccggctgtgagcacagccaggagagcgcccagctgcgggacaagctgagccagctgcagctggagatggccgagagcaagggcatgctgtctgagctgaacctggaggtgcagcagaagacagaccggctggccgaggtggagctgcggctgaaggactgcctggccgagaaggcccaggaggaggagcggctgagccggcggctgcgggacagccatgagaccatcgccagcctgcgggcccagagcccccctgtgaagtatgtgatcaagacagtggaggtggagagcagcaagaccaagcaggccctgtctgagagccaggccaggaaccagcacctgcaggagcaggtggccatgcagaggcaggtgctgaaggagatggagcagcagctgcagagcagccaccagctgacagcccggctgcgggcccagatcgccatgtatgaaagtgagctggagcgggcccacggccagatgctggaggagatgcagagcctggaggaggacaagaacagagccatcgaggaggcctttgcccgggcccaggtggagatgaaggctgtgcatgagaacctggccggcgtgaggaccaacctgctgaccctgcagcctgccctgcggaccctgaccaatgactacaacggcctgaagaggcaggtgcggggcttccccctgctgctgcaggaggccctgcggtctgtgaaggccgagatcggccaggccatcgaggaggtgaacagcaacaaccaggagctgctgaggaagtaccgccgggagctgcagctgaggaagaagtgccacaatgagctggtgcggctgaagggcaacatccgggtgattgcccgggtgcggcctgtgaccaaggaggatggagagggccctgaggccaccaatgctgtgacctttgatgctgatgatgacagcatcatccacctgctgcacaagggcaagcctgtgtcctttgagctggacaaggtgttcagcccccaggccagccagcaggatgtgttccaggaggtgcaggccctggtgaccagctgcattgatggcttcaacgtgtgcatctttgcctacggccagacaggagctgggaagacctacaccatggagggcacagcagaaaatcctggcatcaaccagagggccctgcagctgctcttcagcgaggtgcaggagaaggccagtgactgggagtacaccatcaccgtgtctgctgctgagatctacaatgaggtgctgcgggacctgctgggcaaggagccccaggagaagctggagatccggctgtgcccagatggcagcggccagctgtatgtgcccggcctgacagagttccaggtgcagagcgtggatgacatcaacaaggtgtttgaatttggccacaccaacagaaccacagagttcaccaacctgaatgagcacagcagccgcagccacgccctgctgattgtgacagtgcggggcgtggactgcagcacaggcctgcggaccaccgggaagctgaacctggtggacctggccggcagcgagcgggtgggcaagagcggggctgagggcagccggctgcgggaggcccagcacatcaacaagagcctgagcgccctgggagatgtgattgctgccctgcggagccggcagggccacgtgcccttcaggaacagcaagctgacctacctgctgcaggacagcctgagcggggacagcaagaccctgatggtggtgcaggtgtcccctgtggagaagaacaccagcgagaccctgtacagcctgaagtttgctgagcgggtgcgctctgtggagctgggccctggcctgcggcgggcagagctgggctcctggagcagccaggagcacctggagtgggagcccgcctgccagaccccccagcccagcgcccgggcccacagcgcccccagcagcggcaccagcagcaggcctggcagcatccggaggaagctgcagcccagcgcctag

SEQ ID NO: 157113 - DNA, 2547 bp, synthetic construct
  misc_feature 1..2547: note = Description of Artificial Sequence: Synthetic coding sequence
  source 1..2547: mol_type = other DNA
atgtgtgccagcgcctgcaaggacacagctgcctggtgcccagaggaggccgctgagccccaggccatggtgcccagcaggaggacctggaacctgggcgccacccccagcctgcggggcctgtggagggtgggccgggcccctgagcctgagcccggcatggcccggcctgccccagccccagccagccctgctgcccggcccttcccccacacaggccctggccgcctgaggacaggccggggcaaggacacccctgtgtgtggagatgaggacagcagcgcccggtctgctgcccggcctgccctggcccagtgccgggccctgtctgtggactgggccggccctggcagcccccacggcctgtacctgaccctgcaggtggagcacctgaaggagaagctgatcagccaggcccaggaggtgtcccggctgcggtctgagctgggcggcacagacctggagaagcaccgggacctgctgatggtggagaatgaaaggctgcggcaggagatgagaagatgtgaggccgagctgcaggagctgcggaccaagccagctggcccctgccccggctgtgagcacagccaggagagcgcccagctgcgggacaagctgagccagctgcagctggagatggccgagagcaagggcatgctgtctgagctgaacctggaggtgcagcagaagacagaccggctggccgaggtggagctgcggctgaaggactgcctggccgagaaggcccaggaggaggagcggctgagccggcggctgcgggacagccatgagaccatcgccagcctgcgggcccagagcccccctgtgaagtatgtgatcaagacagtggaggtggagagcagcaagaccaagcaggccctgtctgagagccaggccaggaaccagcacctgcaggagcaggtggccatgcagaggcaggtgctgaaggagatggagcagcagctgcagagcagccaccagctgacagcccggctgcgggcccagatcgccatgtatgaaagtgagctggagcgggcccacggccagatgctggaggagatgcagagcctggaggaggacaagaacagagccatcgaggaggcctttgcccgggcccaggtggagatgaaggctgtgcatgagaacctggccggcgtgaggaccaacctgctgaccctgcagcctgccctgcggaccctgaccaatgactacaacggcctgaagaggcaggtgcggggcttccccctgctgctgcaggaggccctgcggtctgtgaaggccgagatcggccaggccatcgaggaggtgaacagcaacaaccaggagctgctgaggaagtaccgccgggagctgcagctgaggaagaagtgccacaatgagctggtgcggctgaagggcaacatccgggtgattgcccgggtgcggcctgtgaccaaggaggatggagagggccctgaggccaccaatgctgtgacctttgatgctgatgatgacagcatcatccacctgctgcacaagggcaagcctgtgtcctttgagctggacaaggtgttcagcccccaggccagccagcaggatgtgttccaggaggtgcaggccctggtgaccagctgcattgatggcttcaacgtgtgcatctttgcctacggccagacaggagctgggaagacctacaccatggagggcacagcagaaaatcctggcatcaaccagagggccctgcagctgctcttcagcgaggtgcaggagaaggccagtgactgggagtacaccatcaccgtgtctgctgctgagatctacaatgaggtgctgcgggacctgctgggcaaggagccccaggagaagctggagatccggctgtgcccagatggcagcggccagctgtatgtgcccggcctgacagagttccaggtgcagagcgtggatgacatcaacaaggtgtttgaatttggccacaccaacagaaccacagagttcaccaacctgaatgagcacagcagccgcagccacgccctgctgattgtgacagtgcggggcgtggactgcagcacaggcctgcggaccaccgggaagctgaacctggtggacctggccggcagcgagcgggtgggcaagagcggggctgagggcagccggctgcgggaggcccagcacatcaacaagagcctgagcgccctgggagatgtgattgctgccctgcggagccggcagggccacgtgcccttcaggaacagcaagctgacctacctgctgcaggacagcctgagcggggacagcaagaccctgatggtggtgcaggtgtcccctgtggagaagaacaccagcgagaccctgtacagcctgaagtttgctgagcgggtgcgctctgtggagctgggccctggcctgcggcgggcagagctgggctcctggagcagccaggagcacctggagtgggagcccgcctgccagaccccccagcccagcgcccgggcccacagcgcccccagcagcggcaccagcagcaggcctggcagcatccggaggaagctgcagcccagcgcctag

SEQ ID NO: 157114 - DNA, 2055 bp, synthetic construct
  misc_feature 1..2055: note = Description of Artificial Sequence: Synthetic coding sequence
  source 1..2055: mol_type = other DNA
atggtggagaatgaaaggctgcggcaggagatgaggcgctgtgaggccgagctgcaggagctgcggaccaagccagctggcccctgccccggctgtgagcacagccaggagagcgcccagctgcgggacaagctgagccagctgcagctggagatggccgagagcaagggcatgctgtctgagctgaacctggaggtgcagcagaagacagaccggctggccgaggtggagctgcggctgaaggactgcctggccgagaaggcccaggaggaggagcggctgagccggcggctgcgggacagccatgagaccatcgccagcctgcgggcccagagcccccctgtgaagtatgtgatcaagacagtggaggtggagagcagcaagaccaagcaggccctgtctgagagccaggccaggaaccagcacctgcaggagcaggtggccatgcagaggcaggtgctgaaggagatggagcagcagctgcagagcagccaccagctgacagcccggctgcgggcccagatcgccatgtatgagagcgagctggagcgggcccacggccagatgctggaggagatgcagagcctggaggaggacaagaacagagccatcgaggaggcctttgcccgggcccaggtggagatgaaggctgtgcatgagaacctggccggcgtgaggaccaacctgctgaccctgcagcctgccctgcggaccctgaccaatgactacaacggcctgaagaggcaggtgcggggcttccccctgctgctgcaggaggccctgcggtctgtgaaggccgagatcggccaggccatcgaggaggtgaacagcaacaaccaggagctgctgaggaagtacagaagagagctgcagctgaggaagaagtgccacaatgagctggtgcggctgaagggcaacatccgggtcatcgcccgggtgcggcctgtgaccaaggaggatggagagggccctgaggccaccaatgctgtgacctttgatgctgatgatgacagcatcatccacctgctgcacaagggcaagcctgtgtcctttgagctggacaaggtgttcagcccccaggccagccagcaggatgaggtgcaggccctggtgaccagctgcattgatggcttcaacgtgtgcatctttgcctacggccagacaggagctgggaagacctacaccatggagggcacagcagaaaatcctggcatcaaccagagggccctgcagctgctcttcagcgaggtgcaggagaaggccagtgactgggagtacaccatcaccgtgtctgctgctgagatctacaatgaggtgctgcgggacctgctgggcaaggagccccaggagaagctggagatccggctgtgcccagatggcagcggccagctgtatgtgcccggcctgacagagttccaggtgcagagcgtggatgacatcaacaaggtgtttgaatttggccacaccaacagaaccacagagttcaccaacctgaatgagcacagcagccgcagccacgccctgctgattgtgacagtgcggggcgtggactgcagcacaggcctgcggaccaccgggaagctgaacctggtggacctggccggcagcgagcgggtgggcaagagcggggctgagggcagccggctgcgggaggcccagcacatcaacaagagcctgagcgccctgggagatgtgattgctgccctgcggagccggcagggccacgtgcccttcaggaacagcaagctgacctacctgctgcaggacagcctgagcggggacagcaagaccctgatggtggtgcaggtgtcccctgtggagaagaacaccagcgagaccctgtacagcctgaagtttgctgagcgggtgcgctctgtggagctgggccctggcctgcggcgggcagagctgggctcctggagcagccaggagcacctggagtgggagcccgcctgccagaccccccagcccagcgcccgggcccacagcgcccccagcagcggcaccagcagcaggcctggcagcatccggaggaagctgcagcccagcgcctag

SEQ ID NO: 157115 - DNA, 1914 bp, synthetic construct
  misc_feature 1..1914: note = Description of Artificial Sequence: Synthetic coding sequence
  source 1..1914: mol_type = other DNA
atgtatgacaacatgagcaccatggtgtacatcaaggaggacaagctggagaagctgacccaggatgagatcatcagcaagaccaagcaggtgatccagggcctggaggccctgaagaatgagcacaacagcatcctgcagagcctgctggagaccctgaagtgcctgaagaaggatgatgagagcaacctggtggaggagaagagcaacatgatcaggaagagcctggagatgctggagctgggcctgtctgaggcccaggtgatgatggccctgagcaaccacctgaatgctgtggagagcgagaagcagaagctgcgggcccaggtgcggcggctgtgccaggagaaccagtggctgagagatgagctggccaacacccagcagaagctgcagaagtctgagcagagcgtggcccagctggaggaggagaagaagcacctggagttcatgaaccagctgaagaagtatgatgatgacatcagccccagcgaggacaaggacacagacagcaccaaggagcccctggatgacctcttccccaatgatgaagatgatcctggccagggcatccagcagcagcacagcagcgctgctgctgctgcccagcagggcggctatgagatcccagcccggctgcggaccctgcacaacctggtgatccagtatgccagccagggccgctatgaggtggccgtgcccctgtgcaagcaggccctggaggacctggagaagaccagcggccatgaccacccagatgtggccaccatgctgaacatcctggccctggtgtacagagaccagaacaagtacaaggatgctgccaacctgctgaatgatgccctggccatccgggagaagaccctgggcaaggaccaccctgctgtggccgccaccctgaacaacctggccgtgctgtatggcaagaggggcaagtacaaggaggccgagcccctgtgcaagagggccctggagatccgggagaaggtgctgggcaaggaccacccagatgtggccaagcagctgaacaacctggccctgctgtgccagaaccagggcaagtatgaggaggtggagtactactaccagagggccctggagatctaccagaccaagctgggcccagatgaccccaacgtggccaagaccaagaacaacctggccagctgctacctgaagcagggcaagttcaagcaggccgagaccctgtacaaggagatcctgacccgggcccacgagcgggagtttggatctgtggatgatgagaacaagcccatctggatgcacgccgaggagcgggaggagtgcaagggcaagcagaaggatggcaccagctttggagaatatggaggctggtacaaggcctgcaaggtggacagccccaccgtgaccaccaccctgaagaacctgggcgccctgtaccgccggcagggcaagtttgaggccgctgagaccctggaggaggccgccatgaggagcaggaagcagggcctggacaacgtgcacaagcagagggtggccgaggtgctgaatgaccctgagaacatggagaagagaagaagccgggagagcctgaatgtggatgtggtgaagtatgagagcggcccagatggaggagaggaggtgtccatgtctgtggagtggaatggagatggcaccggcagcctgaagaggagcggcagcttcagcaagctgcgggccagcatccgccgcagcagcgagaagctggtgaggaagctgaagggcggcagcagccgggagagcgagcccaagaaccctggcatgaagagggccagcagcctgaatgtgctgaatgtgggcggcaaggctgctgaggaccgcttccaggagaggaacaactgcctggccgacagccgggccctgagcgccagccacacagacctggcccactag

SEQ ID NO: 157116 - DNA, 1920 bp, synthetic construct
  misc_feature 1..1920: note = Description of Artificial Sequence: Synthetic coding sequence
  source 1..1920: mol_type = other DNA
atgtatgacaacatgagcaccatggtgtacatcaaggaggacaagctggagaagctgacccaggatgagatcatcagcaagaccaagcaggtgatccagggcctggaggccctgaagaatgagcacaacagcatcctgcagagcctgctggagaccctgaagtgcctgaagaaggatgatgagagcaacctggtggaggagaagagcaacatgatcaggaagagcctggagatgctggagctgggcctgtctgaggcccaggtgatgatggccctgagcaaccacctgaatgctgtggagagcgagaagcagaagctgcgggcccaggtgcggcggctgtgccaggagaaccagtggctgagagatgagctggccaacacccagcagaagctgcagaagtctgagcagagcgtggcccagctggaggaggagaagaagcacctggagttcatgaaccagctgaagaagtatgatgatgacatcagccccagcgaggacaaggacacagacagcaccaaggagcccctggatgacctcttccccaatgatgaagatgatcctggccagggcatccagcagcagcacagcagcgctgctgctgctgcccagcagggcggctatgagatcccagcccggctgcggaccctgcacaacctggtgatccagtatgccagccagggccgctatgaggtggccgtgcccctgtgcaagcaggccctggaggacctggagaagaccagcggccatgaccacccagatgtggccaccatgctgaacatcctggccctggtgtacagagaccagaacaagtacaaggatgctgccaacctgctgaatgatgccctggccatccgggagaagaccctgggcaaggaccaccctgctgtggccgccaccctgaacaacctggccgtgctgtatggcaagaggggcaagtacaaggaggccgagcccctgtgcaagagggccctggagatccgggagaaggtgctgggcaaggaccacccagatgtggccaagcagctgaacaacctggccctgctgtgccagaaccagggcaagtatgaggaggtggagtactactaccagagggccctggagatctaccagaccaagctgggcccagatgaccccaacgtggccaagaccaagaacaacctggccagctgctacctgaagcagggcaagttcaagcaggccgagaccctgtacaaggagatcctgacccgggcccacgagcgggagtttggatctgtggatgatgagaacaagcccatctggatgcacgccgaggagcgggaggagtgcaagggcaagcagaaggatggcaccagctttggagaatatggaggctggtacaaggcctgcaaggtggacagccccaccgtgaccaccaccctgaagaacctgggcgccctgtaccgccggcagggcaagtttgaggccgctgagaccctggaggaggccgccatgaggagcaggaagcagggcctggacaacgtgcacaagcagagggtggccgaggtgctgaatgaccctgagaacatggagaagagaagaagccgggagagcctgaatgtggatgtggtgaagtatgagagcggcccagatggaggagaggaggtgtccatgtctgtggagtggaatggagatggcaccggcagcctgaagaggagcggcagcttcagcaagctgcgggccagcatccgccgcagcagcgagaagctggtgaggaagctgaagggcggcagcagccgggagagcgagcccaagaaccctggcatgaagagggccagcagcctgaatgtgctgaatgtgggcggcaaggctgctgaggaccgcttccagggcgtgtctggccgggccagcttctgtgggaagaggcagcagcagcagtggccaggccgccgccacaggtag

SEQ ID NO: 157117 - DNA, 1887 bp, synthetic construct
  misc_feature 1..1887: note = Description of Artificial Sequence: Synthetic coding sequence
  source 1..1887: mol_type = other DNA
atgtatgacaacatgagcaccatggtgtacatcaaggaggacaagctggagaagctgacccaggatgagatcatcagcaagaccaagcaggtgatccagggcctggaggccctgaagaatgagcacaacagcatcctgcagagcctgctggagaccctgaagtgcctgaagaaggatgatgagagcaacctggtggaggagaagagcaacatgatcaggaagagcctggagatgctggagctgggcctgtctgaggcccaggtgatgatggccctgagcaaccacctgaatgctgtggagagcgagaagcagaagctgcgggcccaggtgcggcggctgtgccaggagaaccagtggctgagagatgagctggccaacacccagcagaagctgcagaagtctgagcagagcgtggcccagctggaggaggagaagaagcacctggagttcatgaaccagctgaagaagtatgatgatgacatcagccccagcgaggacaaggacacagacagcaccaaggagcccctggatgacctcttccccaatgatgaagatgatcctggccagggcatccagcagcagcacagcagcgctgctgctgctgcccagcagggcggctatgagatcccagcccggctgcggaccctgcacaacctggtgatccagtatgccagccagggccgctatgaggtggccgtgcccctgtgcaagcaggccctggaggacctggagaagaccagcggccatgaccacccagatgtggccaccatgctgaacatcctggccctggtgtacagagaccagaacaagtacaaggatgctgccaacctgctgaatgatgccctggccatccgggagaagaccctgggcaaggaccaccctgctgtggccgccaccctgaacaacctggccgtgctgtatggcaagaggggcaagtacaaggaggccgagcccctgtgcaagagggccctggagatccgggagaaggtgctgggcaaggaccacccagatgtggccaagcagctgaacaacctggccctgctgtgccagaaccagggcaagtatgaggaggtggagtactactaccagagggccctggagatctaccagaccaagctgggcccagatgaccccaacgtggccaagaccaagaacaacctggccagctgctacctgaagcagggcaagttcaagcaggccgagaccctgtacaaggagatcctgacccgggcccacgagcgggagtttggatctgtggatgatgagaacaagcccatctggatgcacgccgaggagcgggaggagtgcaagggcaagcagaaggatggcaccagctttggagaatatggaggctggtacaaggcctgcaaggtggacagccccaccgtgaccaccaccctgaagaacctgggcgccctgtaccgccggcagggcaagtttgaggccgctgagaccctggaggaggccgccatgaggagcaggaagcagggcctggacaacgtgcacaagcagagggtggccgaggtgctgaatgaccctgagaacatggagaagagaagaagccgggagagcctgaatgtggatgtggtgaagtatgagagcggcccagatggaggagaagaagatggcaccggcagcctgaagaggagcggcagcttcagcaagctgcgggccagcatcagaagaagcagcgagaagctggtgaggaagctgaagggcggcagcagccgggagagcgagcccaagaaccctggcatgaagagggccagcagcctgaatgtgctgaatgtgggcggcaaggccgcagaagatcgcttccaggagaggaacaactgcctggccgacagccgggccctgagcgccagccacacagacctggcccactag

SEQ ID NO: 157118 - DNA, 1722 bp, synthetic construct
  misc_feature 1..1722: note = Description of Artificial Sequence: Synthetic coding sequence
  source 1..1722: mol_type = other DNA
atgtatgacaacatgagcaccatggtgtacatcaaggaggacaagctggagaagctgacccaggatgagatcatcagcaagaccaagcaggtgatccagggcctggaggccctgaagaatgagcacaacagcatcctgcagagcctgctggagaccctgaagtgcctgaagaaggatgatgagagcaacctggtggaggagaagagcaacatgatcaggaagagcctggagatgctggagctgggcctgtctgaggcccaggtgatgatggccctgagcaaccacctgaatgctgtggagagcgagaagcagaagctgcgggcccaggtgcggcggctgtgccaggagaaccagtggctgagagatgagctggccaacacccagcagaagctgcagaagtctgagcagagcgtggcccagctggaggaggagaagaagcacctggagttcatgaaccagctgaagaagtatgatgatgacatcagccccagcgaggacaaggacacagacagcaccaaggagcccctggatgacctcttccccaatgatgaagatgatcctggccagggcatccagcagcagcacagcagcgctgctgctgctgcccagcagggcggctatgagatcccagcccggctgcggaccctgcacaacctggtgatccagtatgccagccagggccgctatgaggtggccgtgcccctgtgcaagcaggccctggaggacctggagaagaccagcggccatgaccacccagatgtggccaccatgctgaacatcctggccctggtgtacagagaccagaacaagtacaaggatgctgccaacctgctgaatgatgccctggccatccgggagaagaccctgggcaaggaccaccctgctgtggccgccaccctgaacaacctggccgtgctgtatggcaagaggggcaagtacaaggaggccgagcccctgtgcaagagggccctggagatccgggagaaggtgctgggcaaggaccacccagatgtggccaagcagctgaacaacctggccctgctgtgccagaaccagggcaagtatgaggaggtggagtactactaccagagggccctggagatctaccagaccaagctgggcccagatgaccccaacgtggccaagaccaagaacaacctggccagctgctacctgaagcagggcaagttcaagcaggccgagaccctgtacaaggagatcctgacccgggcccacgagcgggagtttggatctgtggatgatgagaacaagcccatctggatgcacgccgaggagcgggaggagtgcaagggcaagcagaaggatggcaccagctttggagaatatggaggctggtacaaggcctgcaaggtggacagccccaccgtgaccaccaccctgaagaacctgggcgccctgtaccgccggcagggcaagtttgaggccgctgagaccctggaggaggccgccatgaggagcaggaagcagggcctggacaacgtgcacaagcagagggtggccgaggtgctgaatgaccctgagaacatggagaagagaagaagccgggagagcctgaatgtggatgtggtgaagtatgagagcggcccagatggaggagaggaggtgtccatgtctgtggagtggaatggaggagtgtctggccgggccagcttctgtgggaagaggcagcagcagcagtggccaggccgccgccacaggtag

SEQ ID NO: 157119 - DNA, 1731 bp, synthetic construct
  misc_feature 1..1731: note = Description of Artificial Sequence: Synthetic coding sequence
  source 1..1731: mol_type = other DNA
atgtatgacaacatgagcaccatggtgtacatcaaggaggacaagctggagaagctgacccaggatgagatcatcagcaagaccaagcaggtgatccagggcctggaggccctgaagaatgagcacaacagcatcctgcagagcctgctggagaccctgaagtgcctgaagaaggatgatgagagcaacctggtggaggagaagagcaacatgatcaggaagagcctggagatgctggagctgggcctgtctgaggcccaggtgatgatggccctgagcaaccacctgaatgctgtggagagcgagaagcagaagctgcgggcccaggtgcggcggctgtgccaggagaaccagtggctgagagatgagctggccaacacccagcagaagctgcagaagtctgagcagagcgtggcccagctggaggaggagaagaagcacctggagttcatgaaccagctgaagaagtatgatgatgacatcagccccagcgaggacaaggacacagacagcaccaaggagcccctggatgacctcttccccaatgatgaagatgatcctggccagggcatccagcagcagcacagcagcgctgctgctgctgcccagcagggcggctatgagatcccagcccggctgcggaccctgcacaacctggtgatccagtatgccagccagggccgctatgaggtggccgtgcccctgtgcaagcaggccctggaggacctggagaagaccagcggccatgaccacccagatgtggccaccatgctgaacatcctggccctggtgtacagagaccagaacaagtacaaggatgctgccaacctgctgaatgatgccctggccatccgggagaagaccctgggcaaggaccaccctgctgtggccgccaccctgaacaacctggccgtgctgtatggcaagaggggcaagtacaaggaggccgagcccctgtgcaagagggccctggagatccgggagaaggtgctgggcaaggaccacccagatgtggccaagcagctgaacaacctggccctgctgtgccagaaccagggcaagtatgaggaggtggagtactactaccagagggccctggagatctaccagaccaagctgggcccagatgaccccaacgtggccaagaccaagaacaacctggccagctgctacctgaagcagggcaagttcaagcaggccgagaccctgtacaaggagatcctgacccgggcccacgagcgggagtttggatctgtggatgatgagaacaagcccatctggatgcacgccgaggagcgggaggagtgcaagggcaagcagaaggatggcaccagctttggagaatatggaggctggtacaaggcctgcaaggtggacagccccaccgtgaccaccaccctgaagaacctgggcgccctgtaccgccggcagggcaagtttgaggccgctgagaccctggaggaggccgccatgaggagcaggaagcagaggagcatcagcgagatccccaagaagatcctgagcgccaacggcagcaaccacttccccctgcccggcagccagggcctggacaacgtgcacaagcagagggtggccgaggtgctgaatgaccctgagaacatggagaagaggaggagccgggagagcctgaatgtggatgtggtgaagtatgaaagtggcccagatggaggagaggagatgaggaagatgaagctgggcctggtgaactag

SEQ ID NO: 157120 - DNA, 1683 bp, synthetic construct
  misc_feature 1..1683: note = Description of Artificial Sequence: Synthetic coding sequence
  source 1..1683: mol_type = other DNA
atgtatgacaacatgagcaccatggtgtacatcaaggaggacaagctggagaagctgacccaggatgagatcatcagcaagaccaagcaggtgatccagggcctggaggccctgaagaatgagcacaacagcatcctgcagagcctgctggagaccctgaagtgcctgaagaaggatgatgagagcaacctggtggaggagaagagcaacatgatcaggaagagcctggagatgctggagctgggcctgtctgaggcccaggtgatgatggccctgagcaaccacctgaatgctgtggagagcgagaagcagaagctgcgggcccaggtgcggcggctgtgccaggagaaccagtggctgagagatgagctggccaacacccagcagaagctgcagaagtctgagcagagcgtggcccagctggaggaggagaagaagcacctggagttcatgaaccagctgaagaagtatgatgatgacatcagccccagcgaggacaaggacacagacagcaccaaggagcccctggatgacctcttccccaatgatgaagatgatcctggccagggcatccagcagcagcacagcagcgctgctgctgctgcccagcagggcggctatgagatcccagcccggctgcggaccctgcacaacctggtgatccagtatgccagccagggccgctatgaggtggccgtgcccctgtgcaagcaggccctggaggacctggagaagaccagcggccatgaccacccagatgtggccaccatgctgaacatcctggccctggtgtacagagaccagaacaagtacaaggatgctgccaacctgctgaatgatgccctggccatccgggagaagaccctgggcaaggaccaccctgctgtggccgccaccctgaacaacctggccgtgctgtatggcaagaggggcaagtacaaggaggccgagcccctgtgcaagagggccctggagatccgggagaaggtgctgggcaaggaccacccagatgtggccaagcagctgaacaacctggccctgctgtgccagaaccagggcaagtatgaggaggtggagtactactaccagagggccctggagatctaccagaccaagctgggcccagatgaccccaacgtggccaagaccaagaacaacctggccagctgctacctgaagcagggcaagttcaagcaggccgagaccctgtacaaggagatcctgacccgggcccacgagcgggagtttggatctgtggatgatgagaacaagcccatctggatgcacgccgaggagcgggaggagtgcaagggcaagcagaaggatggcaccagctttggagaatatggaggctggtacaaggcctgcaaggtggacagccccaccgtgaccaccaccctgaagaacctgggcgccctgtaccgccggcagggcaagtttgaggccgctgagaccctggaggaggccgccatgaggagcaggaagcagggcctggacaacgtgcacaagcagagggtggccgaggtgctgaatgaccctgagaacatggagaagagaagaagccgggagagcctgaatgtggatgtggtgaagtatgagagcggcccagatggaggagaggaggtgtccatgtctgtggagtggaatggcatgaggaagatgaagctgggcctggtgaactag

SEQ ID NO: 157121 - DNA, 1755 bp, synthetic construct
  misc_feature 1..1755: note = Description of Artificial Sequence: Synthetic coding sequence
  source 1..1755: mol_type = other DNA
atgtatgacaacatgagcaccatggtgtacatcaaggaggacaagctggagaagctgacccaggatgagatcatcagcaagaccaagcaggtgatccagggcctggaggccctgaagaatgagcacaacagcatcctgcagagcctgctggagaccctgaagtgcctgaagaaggatgatgagagcaacctggtggaggagaagagcaacatgatcaggaagagcctggagatgctggagctgggcctgtctgaggcccaggtgatgatggccctgagcaaccacctgaatgctgtggagagcgagaagcagaagctgcgggcccaggtgcggcggctgtgccaggagaaccagtggctgagagatgagctggccaacacccagcagaagctgcagaagtctgagcagagcgtggcccagctggaggaggagaagaagcacctggagttcatgaaccagctgaagaagtatgatgatgacatcagccccagcgaggacaaggacacagacagcaccaaggagcccctggatgacctcttccccaatgatgaagatgatcctggccagggcatccagcagcagcacagcagcgctgctgctgctgcccagcagggcggctatgagatcccagcccggctgcggaccctgcacaacctggtgatccagtatgccagccagggccgctatgaggtggccgtgcccctgtgcaagcaggccctggaggacctggagaagaccagcggccatgaccacccagatgtggccaccatgctgaacatcctggccctggtgtacagagaccagaacaagtacaaggatgctgccaacctgctgaatgatgccctggccatccgggagaagaccctgggcaaggaccaccctgctgtggccgccaccctgaacaacctggccgtgctgtatggcaagaggggcaagtacaaggaggccgagcccctgtgcaagagggccctggagatccgggagaaggtgctgggcaaggaccacccagatgtggccaagcagctgaacaacctggccctgctgtgccagaaccagggcaagtatgaggaggtggagtactactaccagagggccctggagatctaccagaccaagctgggcccagatgaccccaacgtggccaagaccaagaacaacctggccagctgctacctgaagcagggcaagttcaagcaggccgagaccctgtacaaggagatcctgacccgggcccacgagcgggagtttggatctgtggatgatgagaacaagcccatctggatgcacgccgaggagcgggaggagtgcaagggcaagcagaaggatggcaccagctttggagaatatggaggctggtacaaggcctgcaaggtggacagccccaccgtgaccaccaccctgaagaacctgggcgccctgtaccgccggcagggcaagtttgaggccgctgagaccctggaggaggccgccatgaggagcaggaagcagggcctggacaacgtgcacaagcagagggtggccgaggtgctgaatgaccctgagaacatggagaagagaagaagccgggagagcctgaatgtggatgtggtgaagtatgagagcggcccagatggaggagaggagatgaagagggccagcagcctgaatgtgctgaatgtgggcggcaaggccgcagaagatcgcttccaggagaggaacaactgcctggccgacagccgggccctgagcgccagccacacagacctggcccactag

SEQ ID NO: 157122 - DNA, 1857 bp, synthetic construct
  misc_feature 1..1857: note = Description of Artificial Sequence: Synthetic coding sequence
  source 1..1857: mol_type = other DNA
atgtatgacaacatgagcaccatggtgtacatcaaggaggacaagctggagaagctgacccaggatgagatcatcagcaagaccaagcaggtgatccagggcctggaggccctgaagaatgagcacaacagcatcctgcagagcctgctggagaccctgaagtgcctgaagaaggatgatgagagcaacctggtggaggagaagagcaacatgatcaggaagagcctggagatgctggagctgggcctgtctgaggcccaggtgatgatggccctgagcaaccacctgaatgctgtggagagcgagaagcagaagctgcgggcccaggtgcggcggctgtgccaggagaaccagtggctgagagatgagctggccaacacccagcagaagctgcagaagtctgagcagagcgtggcccagctggaggaggagaagaagcacctggagttcatgaaccagctgaagaagtatgatgatgacatcagccccagcgaggacaaggacacagacagcaccaaggagcccctggatgacctcttccccaatgatgaagatgatcctggccagggcatccagcagcagcacagcagcgctgctgctgctgcccagcagggcggctatgagatcccagcccggctgcggaccctgcacaacctggtgatccagtatgccagccagggccgctatgaggtggccgtgcccctgtgcaagcaggccctggaggacctggagaagaccagcggccatgaccacccagatgtggccaccatgctgaacatcctggccctggtgtacagagaccagaacaagtacaaggatgctgccaacctgctgaatgatgccctggccatccgggagaagaccctgggcaaggaccaccctgctgtggccgccaccctgaacaacctggccgtgctgtatggcaagaggggcaagtacaaggaggccgagcccctgtgcaagagggccctggagatccgggagaaggtgctgggcaaggaccacccagatgtggccaagcagctgaacaacctggccctgctgtgccagaaccagggcaagtatgaggaggtggagtactactaccagagggccctggagatctaccagaccaagctgggcccagatgaccccaacgtggccaagaccaagaacaacctggccagctgctacctgaagcagggcaagttcaagcaggccgagaccctgtacaaggagatcctgacccgggcccacgagcgggagtttggatctgtggatgatgagaacaagcccatctggatgcacgccgaggagcgggaggagtgcaagggcaagcagaaggatggcaccagctttggagaatatggaggctggtacaaggcctgcaaggtggacagccccaccgtgaccaccaccctgaagaacctgggcgccctgtaccgccggcagggcaagtttgaggccgctgagaccctggaggaggccgccatgaggagcaggaagcagggcctggacaacgtgcacaagcagagggtggccgaggtgctgaatgaccctgagaacatggagaagagaagaagccgggagagcctgaatgtggatgtggtgaagtatgagagcggcccagatggaggagaggaggtgtccatgtctgtggagtggaatggagatggcaccggcagcctgaagaggagcggcagcttcagcaagctgcgggccagcatccgccgcagcagcgagaagctggtgaggaagctgaagggcggcagcagccgggagagcgagcccaagaaccctggggccagcctggccgagcccctgtttgtggagaatgacagcagcagcagcggcctggaggatgccacagccaactag

SEQ ID NO: 157123 - DNA, 1683 bp, synthetic construct; identical to SEQ ID NO: 157120
  misc_feature 1..1683: note = Description of Artificial Sequence: Synthetic coding sequence
  source 1..1683: mol_type = other DNA

SEQ ID NO: 157124 - DNA, 396 bp, synthetic construct
  misc_feature 1..396: note = Description of Artificial Sequence: Synthetic coding sequence
  source 1..396: mol_type = other DNA
tgagaaaacaagcccatctggatgcacgccgaggagcgggaggagtgcaagggcaagcagaaggatggcaccagctttggagaatatggaggctggtacaaggcctgcaaggtggacagccccaccgtgaccaccaccctgaagaacctgggcgccctgtaccgccggcagggcaagtttgaggccgctgagaccctggaggaggccgccatgaggagcaggaagcagggcctggacaacgtgcacaagcagagggtggccgaggtgctgaatgaccctgagaacatggagaagagaagaagccgggagagcctgaatgtggatgtggtgaagtatgagagcggcccagatggaggagaggagatgaggaagatgaagctgggcctggtgaactag

SEQ ID NO: 157125 - DNA, 1893 bp, synthetic construct
  misc_feature 1..1893: note = Description of Artificial Sequence: Synthetic coding sequence
  source 1..1893: mol_type = other DNA
atgtatgacaacatgagcaccatggtgtacatcaaggaggacaagctggagaagctgacccaggatgagatcatcagcaagaccaagcaggtgatccagggcctggaggccctgaagaatgagcacaacagcatcctgcagagcctgctggagaccctgaagtgcctgaagaaggatgatgagagcaacctggtggaggagaagagcaacatgatcaggaagagcctggagatgctggagctgggcctgtctgaggcccaggtgatgatggccctgagcaaccacctgaatgctgtggagagcgagaagcagaagctgcgggcccaggtgcggcggctgtgccaggagaaccagtggctgagagatgagctggccaacacccagcagaagctgcagaagtctgagcagagcgtggcccagctggaggaggagaagaagcacctggagttcatgaaccagctgaagaagtatgatgatgacatcagccccagcgaggacaaggacacagacagcaccaaggagcccctggatgacctcttccccaatgatgaagatgatcctggccagggcatccagcagcagcacagcagcgctgctgctgctgcccagcagggcggctatgagatcccagcccggctgcggaccctgcacaacctggtgatccagtatgccagccagggccgctatgaggtggccgtgcccctgtgcaagcaggccctggaggacctggagaagaccagcggccatgaccacccagatgtggccaccatgctgaacatcctggccctggtgtacagagaccagaacaagtacaaggatgctgccaacctgctgaatgatgccctggccatccgggagaagaccctgggcaaggaccaccctgctgtggccgccaccctgaacaacctggccgtgctgtatggcaagaggggcaagtacaaggaggccgagcccctgtgcaagagggccctggagatccgggagaaggtgctgggcaaggaccacccagatgtggccaagcagctgaacaacctggccctgctgtgccagaaccagggcaagtatgaggaggtggagtactactaccagagggccctggagatctaccagaccaagctgggcccagatgaccccaacgtggccaagaccaagaacaacctggccagctgctacctgaagcagggcaagttcaagcaggccgagaccctgtacaaggagatcctgacccgggcccacgagcgggagtttggatctgtggatgatgagaacaagcccatctggatgcacgccgaggagcgggaggagtgcaagggcaagcagaaggatggcaccagctttggagaatatggaggctggtacaaggcctgcaaggtggacagccccaccgtgaccaccaccctgaagaacctgggcgccctgtaccgccggcagggcaagtttgaggccgctgagaccctggaggaggccgccatgaggagcaggaagcagggcctggacaacgtgcacaagcagagggtggccgaggtgctgaatgaccctgagaacatggagaagagaagaagccgggagagcctgaatgtggatgtggtgaagtatgagagcggcccagatggaggagaagaagatggcaccggcagcctgaagaggagcggcagcttcagcaagctgcgggccagcatcagaagaagcagcgagaagctggtgaggaagctgaagggcggcagcagccgggagagcgagcccaagaaccctggcatgaagagggccagcagcctgaatgtgctgaatgtgggcggcaaggccgcagaagatcgcttccagggcgtgtctggccgggccagcttctgtgggaagaggcagcagcagcagtggccaggaagaagacacaggtag

SEQ ID NO: 157126 - DNA, 453 bp, synthetic construct
  misc_feature 1..453: note = Description of Artificial Sequence: Synthetic coding sequence
  source 1..453: mol_type = other DNA
atgtatgacaacatgagcaccatggtgtacatcaaggaggacaagctggagaagctgacccaggatgagatcatcagcaagaccaagcaggtgatccagggcctggaggccctgaagaatgagcacaacagcatcctgcagagcctgctggagaccctgaagtgcctgaagaaggatgatgagagcaacctggtggaggagaagagcaacatgatcaggaagagcctggagatgctggagctgggcctgtctgaggcccaggtgatgatggccctgagcaaccacctgaatgctgtggagagcgagaagcagaagctgcgggcccaggtgcggcggctgtgccaggagaaccagtggctgagagatgagctggccaacacccagcagaagctgcagaagtctgagcagagcgtggcccagctggaggaggagaagaagcacctggagttctag

SEQ ID NO: 157127 - DNA, 1695 bp, synthetic construct
  misc_feature 1..1695: note = Description of Artificial Sequence: Synthetic coding sequence
  source 1..1695: mol_type = other DNA
atgtatgacaacatgagcaccatggtgtacatcaaggaggacaagctggagaagctgacccaggatgagatcatcagcaagaccaagcaggtgatccagggcctggaggccctgaagaatgagcacaacagcatcctgcagagcctgctggagaccctgaagtgcctgaagaaggatgatgagagcaacctggtggaggagaagagcaacatgatcaggaagagcctggagatgctggagctgggcctgtctgaggcccaggtgatgatggccctgagcaaccacctgaatgctgtggagagcgagaagcagaagctgcgggcccaggtgcggcggctgtgccaggagaaccagtggctgagagatgagctggccaacacccagcagaagctgcagaagtctgagcagagcgtggcccagctggaggaggagaagaagcacctggagttcatgaaccagctgaagaagtatgatgatgacatcagccccagcgaggacaaggacacagacagcaccaaggagcccctggatgacctcttccccaatgatgaagatgatcctggccagggcatccagcagcagcacagcagcgctgctgctgctgcccagcagggcggctatgagatcccagcccggctgcggaccctgcacaacctggtgatccagtatgccagccagggccgctatgaggtggccgtgcccctgtgcaagcaggccctggaggacctggagaagaccagcggccatgaccacccagatgtggccaccatgctgaacatcctggccctggtgtacagagaccagaacaagtacaaggatgctgccaacctgctgaatgatgccctggccatccgggagaagaccctgggcaaggaccaccctgctgtggccgccaccctgaacaacctggccgtgctgtatggcaagaggggcaagtacaaggaggccgagcccctgtgcaagagggccctggagatccgggagaaggtgctgggcaaggaccacccagatgtggccaagcagctgaacaacctggccctgctgtgccagaaccagggcaagtatgaggaggtggagtactactaccagagggccctggagatctaccagaccaagctgggcccagatgaccccaacgtggccaagaccaagaacaacctggccagctgctacctgaagcagggcaagttcaagcaggccgagaccctgtacaaggagatcctgacccgggcccacgagcgggagtttggatctgtggatgatgagaacaagcccatctggatgcacgccgaggagcgggaggagtgcaagggcaagcagaaggatggcaccagctttggagaatatggaggctggtacaaggcctgcaaggtggacagccccaccgtgaccaccaccctgaagaacctgggcgccctgtaccgccggcagggcaagtttgaggccgctgagaccctggaggaggccgccatgaggagcaggaagcagggcctggacaacgtgcacaagcagagggtggccgaggtgctgaatgaccctgagaacatggagaagagaagaagccgggagagcctgaatgtggatgtggtgaagtatgagagcggcccagatggaggagaggagggcgtgtctggccgggccagcttctgtgggaagaggcagcagcagcagtggccaggaagaagacacaggtag

SEQ ID NO: 157128 - DNA, 1869 bp, synthetic construct
  misc_feature 1..1869: note = Description of Artificial Sequence: Synthetic coding sequence
  source 1..1869: mol_type = other DNA
atggccatgatggtgttcccccgggaggagaagctgagccaggatgaaattgtgctgggcaccaaggctgtgatccagggcctggagaccctgcggggggagcaccgggccctgctggcccccctggtggcccctgaggccggggaggccgagcccggcagccaggagcgctgcatcctgctgcggcgcagcctggaggccatcgagctgggcctgggggaggcccaggtgatcctggccctgagcagccacctgggcgctgtggagagcgagaagcagaagctgcgggcccaggtgcggcggctggtgcaggagaaccagtggctgcgggaggagctggccggcacccagcagaagctgcagaggtctgagcaggccgtggcccagctggaggaggagaagcagcacctgctcttcatgagccagatcaggaagctggatgaagatgccagccccaatgaggagaagggagatgtgcccaaggacaccctggatgacctcttccccaatgaagatgagcagagccctgcccccagccctggaggaggagatgtgtctggccagcacggcggctatgagatcccagcccggctgcggaccctgcacaacctggtgatccagtatgccagccagggccgctatgaggtggccgtgcccctgtgcaagcaggccctggaggacctggagaagaccagcggccatgaccacccagatgtggccaccatgctgaacatcctggccctggtgtacagagaccagaacaagtacaaggaggccgcccacctgctgaatgatgccctggccatccgggagaagaccctgggcaaggaccaccctgctgtggccgccaccctgaacaacctggccgtgctgtatggcaagaggggcaagtacaaggaggccgagcccctgtgcaagagggccctggagatccgggagaaggtgctgggcaagttccacccagatgtggccaagcagctgagcaacctggccctgctgtgccagaaccagggcaaggccgaggaggtggagtactactaccgccgggccctggagatctatgccacccggctgggcccagatgaccccaacgtggccaagaccaagaacaacctggccagctgctacctgaagcagggcaagtaccaggatgctgagaccctgtacaaggagatcctgacccgggcccacgagaaggagtttggatctgtgaatggagacaacaagcccatctggatgcatgctgaggagcgggaggagagcaaggacaagagaagagacagcgccccctatggagaatatggctcctggtacaaggcctgcaaggtggacagccccaccgtgaacaccaccctgcggagcctgggcgccctgtaccgccggcagggcaagctggaggccgcccacaccctggaggactgtgccagcaggaacaggaagcagggcctggaccctgccagccagaccaaggtggtggagctgctgaaggatggcagcggcagaagaggagacagaagaagcagccgggacatggccggcggggccggccccaggtctgagagtgacctggaggatgtgggccccacagctgagtggaatggagatggcagcggcagcctgcggcgcagcggcagctttgggaagctgagagatgccctgcggcgcagcagcgagatgctggtgaagaagctgcagggcggcaccccccaggagccccccaaccccaggatgaagagggccagcagcctgaacttcctgaacaagtctgtggaggagcccacccagcccggcggcaccggcctgagtgacagcaggaccctgagcagcagctccatggacctgagccgccgcagcagcctggtgggctag

SEQ ID NO: 157129 - DNA, 1638 bp, synthetic construct
  misc_feature 1..1638: note = Description of Artificial Sequence: Synthetic coding sequence
  source 1..1638: mol_type = other DNA
atggccatgatggtgttcccccgggaggagaagctgagccaggatgaaattgtgctgggcaccaaggctgtgatccagggcctggagaccctgcggggggagcaccgggccctgctggcccccctggtggcccctgaggccggggaggccgagcccggcagccaggagcgctgcatcctgctgcggcgcagcctggaggccatcgagctgggcctgggggaggcccaggaggagaagggagatgtgcccaaggacaccctggatgacctcttccccaatgaagatgagcagagccctgcccccagccctggaggaggagatgtgtctggccagcacggcggctatgagatcccagcccggctgcggaccctgcacaacctggtgatccagtatgccagccagggccgctatgaggtggccgtgcccctgtgcaagcaggccctggaggacctggagaagaccagcggccatgaccacccagatgtggccaccatgctgaacatcctggccctggtgtacagagaccagaacaagtacaaggaggccgcccacctgctgaatgatgccctggccatccgggagaagaccctgggcaaggaccaccctgctgtggccgccaccctgaacaacctggccgtgctgtatggcaagaggggcaagtacaaggaggccgagcccctgtgcaagagggccctggagatccgggagaaggtgctgggcaagttccacccagatgtggccaagcagctgagcaacctggccctgctgtgccagaaccagggcaaggccgaggaggtggagtactactacagaagagccctggagatctatgccacccggctgggcccagatgaccccaacgtggccaagaccaagaacaacctggccagctgctacctgaagcagggcaagtaccaggatgctgagaccctgtacaaggagatcctgacccgggcccacgagaaggagtttggatctgtgaatggagacaacaagcccatctggatgcacgccgaggagcgggaggagagcaaggacaagaggcgggacagcgccccctacggggagtatggctcctggtacaaggcctgcaaggtggacagccccaccgtgaacaccaccctgcggagcctgggcgccctgtaccgccggcagggcaagctggaggccgcccacaccctggaggactgtgccagcaggaacaggaagcagggcctggaccctgccagccagaccaaggtggtggagctgctgaaggatggcagcggccggcggggggaccggcgcagcagccgggacatggccggcggggccggccccaggtctgagagtgacctggaggatgtgggccccacagctgagtggaatggagatggcagcggcagcctgcggcgcagcggcagctttgggaagctgagagatgccctgcggcgcagcagcgagatgctggtgaagaagctgcagggcggcaccccccaggagccccccaaccccaggatgaagagggccagcagcctgaacttcctgaacaagtctgtggaggagcccacccagcccggcggcaccggcctgagtgacagcaggaccctgagcagcagctccatggacctgagcagaagaagcagcctggtgggctag

SEQ ID NO: 157130 - DNA, 1869 bp, synthetic construct; identical to SEQ ID NO: 157128
  misc_feature 1..1869: note = Description of Artificial Sequence: Synthetic coding sequence
  source 1..1869: mol_type = other DNA

SEQ ID NO: 157131 - DNA, 1869 bp, synthetic construct; identical to SEQ ID NO: 157128
  misc_feature 1..1869: note = Description of Artificial Sequence: Synthetic coding sequence
  source 1..1869: mol_type = other DNA

SEQ ID NO: 157132 - DNA, 1638 bp, synthetic construct; identical to SEQ ID NO: 157129
  misc_feature 1..1638: note = Description of Artificial Sequence: Synthetic coding sequence
  source 1..1638: mol_type = other DNA

SEQ ID NO: 157133 - DNA, 501 bp, synthetic construct
  misc_feature 1..501: note = Description of Artificial Sequence: Synthetic coding sequence
  source 1..501: mol_type = other DNA
atggccatgatggtgttcccccgggaggagaagctgagccaggatgaaattgtgctgggcaccaaggctgtgatccagggcctggagaccctgcggggggagcaccgggccctgctggcccccctggtggcccctgaggccggggaggccgagcccggcagccaggagcgctgcatcctgctgcggcgcagcctggaggccatcgagctgggcctgggggaggcccaggtgatcctggccctgagcagccacctgggcgctgtggagagcgagaagcagaagctgcgggcccaggtgcggcggctggtgcaggagaaccagtggctgcgggaggagctggccggcacccagcagaagctgcagaggtctgagcaggccgtggcccagctggaggaggagaagcagcacctgctcttcatgagccagatcaggaagctggatgaagatgccagccccaatgaggagaagggagatgtgcccaaggacaccctggatgactag

SEQ ID NO: 157134 - DNA, 570 bp, synthetic construct
  misc_feature 1..570: note = Description of Artificial Sequence: Synthetic coding sequence
  source 1..570: mol_type = other DNA
atggccatgatggtgttcccccgggaggagaagctgagccaggatgaaattgtgctgggcaccaaggctgtgatccagggcctggagaccctgcggggggagcaccgggccctgctggcccccctggtggcccctgaggccggggaggccgagcccggcagccaggagcgctgcatcctgctgcggcgcagcctggaggccatcgagctgggcctgggggaggcccaggaggagaagggagatgtgcccaaggacaccctggatgacctcttccccaatgaagatgagcagagccctgcccccagccctggaggaggagatgtgtctggccagcacggcggctatgagatcccagcccggctgcggaccctgcacaacctggtgatccagtatgccagccagggccgctatgaggtggccgtgcccctgtgcaagcaggccctggaggacctggagaagaccagcggccatgaccacccagatgtggccaccatgctgaacatcctggccctggtgtacagagaccagaacaagtacaaggaggccgcccacctgctgaatgatgcctag

SEQ ID NO: 157135 - DNA, 516 bp, synthetic construct
  misc_feature 1..516: note = Description of Artificial Sequence: Synthetic coding sequence
  source 1..516: mol_type = other DNA
atggccatgatggtgttcccccgggaggagaagctgagccaggatgaaattgtgctgggcaccaaggctgtgatccagggcctggagaccctgcggggggagcaccgggccctgctggcccccctggtggcccctgaggccggggaggccgagcccggcagccaggagcgctgcatcctgctgcggcgcagcctggaggccatcgagctgggcctgggggaggcccaggtgatcctggccctgagcagccacctgggcgctgtggagagcgagaagcagaagctgcgggcccaggtgcggcggctggtgcaggagaaccagtggctgcgggaggagctggccggcacccagcagaagctgcagaggtctgagcaggccgtggcccagctggaggaggagaagcagcacctgctcttcatgagccagatcaggaagctggatgaagatgccagccccaatgaggagaagggagatgtgcccaaggacaccctggatgacctcttccccaatgaatag

SEQ ID NO: 157136 - DNA, 438 bp, synthetic construct
  misc_feature 1..438: note = Description of Artificial Sequence: Synthetic coding sequence
  source 1..438: mol_type = other DNA
atggccatgatggtgttcccccgggaggagaagctgagccaggatgaaattgtgctgggcaccaaggctgtgatccagggcctggagaccctgcggggggagcaccgggccctgctggcccccctggtggcccctgaggccggggaggccgagcccggcagccaggagcgctgcatcctgctgcggcgcagcctggaggccatcgagctgggcctgggggaggcccaggtgatcctggccctgagcagccacctgggcgctgtggagagcgagaagcagaagctgcgggcccaggtgcggcggctggtgcaggagaaccagtggctgcgggaggagctggccggcacccagcagaagctgcagaggtctgagcaggccgtggcccagctggaggaggagaagcagcacctgctcttcatgagccagatcaggaagtag

SEQ ID NO: 157137 - DNA, 318 bp, synthetic construct
  misc_feature 1..318: note = Description of Artificial Sequence: Synthetic coding sequence
  source 1..318: mol_type = other DNA
atggccatgatggtgttcccccgggaggagaagctgagccaggatgaaattgtgctgggcaccaaggctgtgatccagggcctggagaccctgcggggggagcaccgggccctgctggcccccctggtggcccctgaggccggggaggccgagcccggcagccaggagcgctgcatcctgctgcggcgcagcctggaggccatcgagctgggcctgggggaggcccaggtgatcctggccctgagcagccacctgggcgctgtggagagcgagaagcagaagctgcgggcccaggtgcggcggctggtgcaggagtag

SEQ ID NO: 157138 - DNA, 1515 bp, synthetic construct
  misc_feature 1..1515: note = Description of Artificial Sequence: Synthetic coding sequence
  source 1..1515: mol_type = other DNA
atgtctgtgcaggtggccgcccctggcagcgctggcctgggccctgagcggctgagccctgaggagctggtgcggcagacccggcaggtggtgcagggcctggaggccctgcgggcagagcaccacggcctggccggccacctggccgaggccctggccggccagggccctgctgctggcctggagatgctggaggagaagcagcaggtggtgagccacagcctggaggccatcgagctgggcctgggggaggcccaggtgctgctggccctgagcgcccacgtgggcgccctggaggccgagaagcagaggctgcggagccaggcccggcggctggcccaggagaatgtgtggctgcgggaggagctggaggagacccagaggcggctgcgggccagcgaggagagcgtggcccagctggaggaggagaagaggcacctggagttcctgggccagctgcggcagtatgaccccccagctgagagccagcagagcgagagccccccccggcgggacagcctggccagcctcttccccagcgaggaggaggagaggaagggccctgaggccgccggggctgctgctgcccagcagggcggctatgagatcccagcccggctgcggaccctgcacaacctggtgatccagtatgccggccagggccgctatgaggtggccgtgcccctgtgccggcaggccctggaggacctggagaggagcagcggccactgccacccagatgtggccaccatgctgaacatcctggccctggtgtacagagaccagaacaagtacaaggaggccacagacctgctgcatgatgccctgcagatccgggagcagaccctgggccctgagcaccctgctgtggccgccaccctgaacaacctggccgtgctgtatggcaagaggggccgctaccgggaggccgagcccctgtgccagagggccctggagatccgggagaaggtgctgggcgctgaccacccagatgtggccaagcagctgaacaacctggccctgctgtgccagaaccagggcaagtttgaagatgtggagcggcactacgcccgggccctgagcatctatgaggccctgggcggcccccatgaccccaacgtggccaagaccaagaacaacctggccagcgcctacctgaagcagaacaagtaccagcaggccgaggagctgtacaaggagatcctgcacaaggaggacctgcctgcccccctgggcgcccccaacacaggaacagctggagatgctgagcaggccctgcggcgcagcagcagcctgagcaagatccgggagagcatccggcggggcagcgagaagctggtgtcccggctgcggggggaggccgccgccggggctgctggcatgaagagggccatgagcctgaacaccctgaatgtggatgccccccgggcccctggcacccagttccccagctggcacctggacaaggcccccaggaccctgagcgccagcacccaggacctgagcccccactag

SEQ ID NO: 157139 - DNA, 1557 bp, synthetic construct
  misc_feature 1..1557: note = Description of Artificial Sequence: Synthetic coding sequence
  source 1..1557: mol_type = other DNA
atgatcccccagaccccccaccactgcagccctggagctgccatgtctgtgcaggtggccgcccctggcagcgctggcctgggccctgagcggctgagccctgaggagctggtgcggcagacccggcaggtggtgcagggcctggaggccctgcgggcagagcaccacggcctggccggccacctggccgaggccctggccggccagggccctgctgctggcctggagatgctggaggagaagcagcaggtggtgagccacagcctggaggccatcgagctgggcctgggggaggcccaggtgctgctggccctgagcgcccacgtgggcgccctggaggccgagaagcagaggctgcggagccaggcccggcggctggcccaggagaatgtgtggctgcgggaggagctggaggagacccagaggcggctgcgggccagcgaggagagcgtggcccagctggaggaggagaagaggcacctggagttcctgggccagctgcggcagtatgaccccccagctgagagccagcagagcgagagccccccccggcgggacagcctggccagcctcttccccagcgaggaggaggagaggaagggccctgaggccgccggggctgctgctgcccagcagggcggctatgagatcccagcccggctgcggaccctgcacaacctggtgatccagtatgccggccagggccgctatgaggtggccgtgcccctgtgccggcaggccctggaggacctggagaggagcagcggccactgccacccagatgtggccaccatgctgaacatcctggccctggtgtacagagaccagaacaagtacaaggaggccacagacctgctgcatgatgccctgcagatccgggagcagaccctgggccctgagcaccctgctgtggccgccaccctgaacaacctggccgtgctgtatggcaagaggggccgctaccgggaggccgagcccctgtgccagagggccctggagatccgggagaaggtgctgggcgctgaccacccagatgtggccaagcagctgaacaacctggccctgctgtgccagaaccagggcaagtttgaagatgtggagcggcactacgcccgggccctgagcatctatgaggccctgggcggcccccatgaccccaacgtggccaagaccaagaacaacctggccagcgcctacctgaagcagaacaagtaccagcaggccgaggagctgtacaaggagatcctgcacaaggaggacctgcctgcccccctgggcgcccccaacacaggaacagctggagatgctgagcaggccctgcggcgcagcagcagcctgagcaagatccgggagagcatccggcggggcagcgagaagctggtgtcccggctgcggggggaggccgccgccggggctgctggcatgaagagggccatgagcctgaacaccctgaatgtggatgccccccgggcccctggcacccagttccccagctggcacctggacaaggcccccaggaccctgagcgccagcacccaggacctgagcccccactag

SEQ ID NO: 157140 - DNA, 2379 bp, synthetic construct
  misc_feature 1..2379: note = Description of Artificial Sequence: Synthetic coding sequence
  source 1..2379: mol_type = other DNA
atgcagggagaagatgcccgctacctgaagaggaaggtgaagggcggcaacattgatgtgcaccccagcgagaaggccctgattgtgcactatgaggtggaggccaccatcctgggggagatgggagaccccatgctgggggagaggaaagaatgccagaagatcatccggctgaagagcctgaatgccaacacagacatcaccagcctggccaggaaggtggtggaggagtgcaagctgatccaccccagcaagctgaatgaggtggagcagctgctgtactacctgcagaacagaagagacagcctgagcggcaaggagaagaaggagaagagcagcaagcccaaggaccccccaccatttgagggcatggagattgatgaggtggccaacatcaatgacatggatgagtacatcgagctgctgtatgaggacatcccagacaaggtgcggggcagcgccctgatcctgcagctggccagaaatccagacaacctggaggagctgctgctgaatgaaacagccctgggcgccctggcccgggtgctgcgggaggactggaagcagagcgtggagctggccaccaacatcatctacatcttcttctgcttcagcagcttcagccagttccacggcctcatcacccactacaagattggagccctgtgcatgaacatcatcgaccacgagctgaagagacatgagctgtggcaggaggagctgagcaagaagaagaaggctgtggatgaggaccctgagaaccagaccctgaggaaggactatgagaagaccttcaagaagtaccagggcctggtggtgaagcaggagcagctgctgcgggtggccctgtacctgctgctgaacctggccgaggacaccaggacagagctgaagatgaggaacaagaacatcgtgcacatgctggtgaaggccctggaccgggacaactttgagctgctgatcctggtggtgtccttcctgaagaagctgagcatcttcatggagaacaagaatgacatggtggagatggacatcgtggagaagctggtgaagatgatcccctgtgaacatgaggacctgctgaacatcaccctgcggctgctgctgaacctgagctttgacaccggcctgaggaacaagatggtgcaggtgggcctgctgcccaagctgacagccctgctgggcaatgacaactacaagcagatcgccatgtgtgtgctgtaccacatctccatggatgaccgcttcaagtccatgtttgcctacacagactgcatcccccagctgatgaagatgctgtttgaatgttctgatgaaagaattgacctggagctgatctccttctgcatcaacctggccgccaacaagagaaatgtgcagctgatctgtgagggcaatggcctgaagatgctgatgaagagggccctgaagttcaaggaccccctgctgatgaagatgatccggaacatcagccagcatgatggccccaccaagaacctcttcatcgactatgtgggggacctggccgcccagatcagcaatgatgaggaggaggagtttgtgattgaatgtctgggcaccctggccaacctgaccatcccagacctggactgggagctggtgctgaaggagtacaagctggtgccctacctgaaggacaagctgaagccaggagctgctgaagatgacctggtgctggaggtggtgatcatgattggcaccgtgtccatggatgacagctgtgccgccctgctggccaagagcggcatcatcccagccctgattgagctgctgaatgcccagcaggaggatgatgaatttgtgtgccagatcatctacgtgttctaccagatggtgttccaccaggccaccagagatgtgatcatcaaggagacccaggccccagcctacctgattgacctgatgcatgacaagaacaatgagatcaggaaggtgtgtgacaacaccctggacatcatcgccgagtatgatgaggagtgggccaagaagatccagagcgagaagttccgctggcacaacagccagtggctggagatggtggagagccggcagatggatgaaagtgagcagtacctgtatggagatgacagaattgagccctacatccacgagggggacatcctggagaggccagacctcttctacaacagtgatggcctcatcgccagcgagggcgccatcagcccagacttcttcaatgactaccacctgcagaatggagatgtggtgggccagcacagcttccctggcagcctgggcatggatggcttcggccagcctgtgggcatcctgggccggcctgccacagcctacggcttccggccagatgagccctactactacggctacggcagctag

SEQ ID NO: 157141 - DNA, 2259 bp, synthetic construct
  misc_feature 1..2259: note = Description of Artificial Sequence: Synthetic coding sequence
  source 1..2259: mol_type = other DNA
atgggagaccccatgctgggggagaggaaagaatgccagaagatcatccggctgaagagcctgaatgccaacacagacatcaccagcctggccaggaaggtggtggaggagtgcaagctgatccaccccagcaagctgaatgaggtggagcagctgctgtactacctgcagaacagaagagacagcctgagcggcaaggagaagaaggagaagagcagcaagcccaaggaccccccaccatttgagggcatggagattgatgaggtggccaacatcaatgacatggatgagtacatcgagctgctgtatgaggacatcccagacaaggtgcggggcagcgccctgatcctgcagctggccagaaatccagacaacctggaggagctgctgctgaatgaaacagccctgggcgccctggcccgggtgctgcgggaggactggaagcagagcgtggagctggccaccaacatcatctacatcttcttctgcttcagcagcttcagccagttccacggcctcatcacccactacaagattggagccctgtgcatgaacatcatcgaccacgagctgaagagacatgagctgtggcaggaggagctgagcaagaagaagaaggctgtggatgaggaccctgagaaccagaccctgaggaaggactatgagaagaccttcaagaagtaccagggcctggtggtgaagcaggagcagctgctgcgggtggccctgtacctgctgctgaacctggccgaggacaccaggacagagctgaagatgaggaacaagaacatcgtgcacatgctggtgaaggccctggaccgggacaactttgagctgctgatcctggtggtgtccttcctgaagaagctgagcatcttcatggagaacaagaatgacatggtggagatggacatcgtggagaagctggtgaagatgatcccctgtgaacatgaggacctgctgaacatcaccctgcggctgctgctgaacctgagctttgacaccggcctgaggaacaagatggtgcaggtgggcctgctgcccaagctgacagccctgctgggcaatgacaactacaagcagatcgccatgtgtgtgctgtaccacatctccatggatgaccgcttcaagtccatgtttgcctacacagactgcatcccccagctgatgaagatgctgtttgaatgttctgatgaaagaattgacctggagctgatctccttctgcatcaacctggccgccaacaagagaaatgtgcagctgatctgtgagggcaatggcctgaagatgctgatgaagagggccctgaagttcaaggaccccctgctgatgaagatgatccggaacatcagccagcatgatggccccaccaagaacctcttcatcgactatgtgggggacctggccgcccagatcagcaatgatgaggaggaggagtttgtgattgaatgtctgggcaccctggccaacctgaccatcccagacctggactgggagctggtgctgaaggagtacaagctggtgccctacctgaaggacaagctgaagccaggagctgctgaagatgacctggtgctggaggtggtgatcatgattggcaccgtgtccatggatgacagctgtgccgccctgctggccaagagcggcatcatcccagccctgattgagctgctgaatgcccagcaggaggatgatgaatttgtgtgccagatcatctacgtgttctaccagatggtgttccaccaggccaccagagatgtgatcatcaaggagacccaggccccagcctacctgattgacctgatgcatgacaagaacaatgagatcaggaaggtgtgtgacaacaccctggacatcatcgccgagtatgatgaggagtgggccaagaagatccagagcgagaagttccgctggcacaacagccagtggctggagatggtggagagccggcagatggatgaaagtgagcagtacctgtatggagatgacagaattgagccctacatccacgagggggacatcctggagaggccagacctcttctacaacagtgatggcctcatcgccagcgagggcgccatcagcccagacttcttcaatgactaccacctgcagaatggagatgtggtgggccagcacagcttccctggcagcctgggcatggatggcttcggccagcctgtgggcatcctgggccggcctgccacagcctacggcttccggccagatgagccctactactacggctacggcagctag

SEQ ID NO: 157142 - DNA, 2247 bp, synthetic construct
  misc_feature 1..2247: note = Description of Artificial Sequence: Synthetic coding sequence
  source 1..2247: mol_type = other DNA
atgcagggagaagatgcccgctacctgaagagcatccggctgaagagcctgaatgccaacacagacatcaccagcctggccaggaaggtggtggaggagtgcaagctgatccaccccagcaagctgaatgaggtggagcagctgctgtactacctgcagaacagaagagacagcctgagcggcaaggagaagaaggagaagagcagcaagcccaaggaccccccaccatttgagggcatggagattgatgaggtggccaacatcaatgacatggatgagtacatcgagctgctgtatgaggacatcccagacaaggtgcggggcagcgccctgatcctgcagctggccagaaatccagacaacctggaggagctgctgctgaatgaaacagccctgggcgccctggcccgggtgctgcgggaggactggaagcagagcgtggagctggccaccaacatcatctacatcttcttctgcttcagcagcttcagccagttccacggcctcatcacccactacaagattggagccctgtgcatgaacatcatcgaccacgagctgaagagacatgagctgtggcaggaggagctgagcaagaagaagaaggctgtggatgaggaccctgagaaccagaccctgaggaaggactatgagaagaccttcaagaagtaccagggcctggtggtgaagcaggagcagctgctgcgggtggccctgtacctgctgctgaacctggccgaggacaccaggacagagctgaagatgaggaacaagaacatcgtgcacatgctggtgaaggccctggaccgggacaactttgagctgctgatcctggtggtgtccttcctgaagaagctgagcatcttcatggagaacaagaatgacatggtggagatggacatcgtggagaagctggtgaagatgatcccctgtgaacatgaggacctgctgaacatcaccctgcggctgctgctgaacctgagctttgacaccggcctgaggaacaagatggtgcaggtgggcctgctgcccaagctgacagccctgctgggcaatgacaactacaagcagatcgccatgtgtgtgctgtaccacatctccatggatgaccgcttcaagtccatgtttgcctacacagactgcatcccccagctgatgaagatgctgtttgaatgttctgatgaaagaattgacctggagctgatctccttctgcatcaacctggccgccaacaagagaaatgtgcagctgatctgtgagggcaatggcctgaagatgctgatgaagagggccctgaagttcaaggaccccctgctgatgaagatgatccggaacatcagccagcatgatggccccaccaagaacctcttcatcgactatgtgggggacctggccgcccagatcagcaatgatgaggaggaggagtttgtgattgaatgtctgggcaccctggccaacctgaccatcccagacctggactgggagctggtgctgaaggagtacaagctggtgccctacctgaaggacaagctgaagccaggagctgctgaagatgacctggtgctggaggtggtgatcatgattggcaccgtgtccatggatgacagctgtgccgccctgctggccaagagcggcatcatcccagccctgattgagctgctgaatgcccagcaggaggatgatgaatttgtgtgccagatcatctacgtgttctaccagatggtgttccaccaggccaccagagatgtgatcatcaaggagacccaggccccagcctacctgattgacctgatgcatgacaagaacaatgagatcaggaaggtgtgtgacaacaccctggacatcatcgccgagtatgatgaggagtgggccaagaagatccagagcgagaagttccgctggcacaacagccagtggctggagatggtggagagccggcagatggatgaaagtgagcagtacctgtatggagatgacagaattgagccctacatccacgagggggacatcctggagaggccagacctcttctacaacagtgatggcctcatcgccagcgagggcgccatcagcccagacttcttcaatgactaccacctgcagaatggagatgtggtgggccagcacagcttccctggcagcctgggcatggatggcttcggccagcctgtgggcatcctgggccggcctgccacagcctacggcttccggccagatgagccctactactacggctacggcagctag

SEQ ID NO: 157143 - DNA, 2145 bp, synthetic construct
  misc_feature 1..2145: note = Description of Artificial Sequence: Synthetic coding sequence
  source 1..2145: mol_type = other DNA
atgagcatcgccctgggcaacacctaccgccgcagcctgagtgacagcgagaccgtgtctgtgctgcaggccagcctgtgtgaggagaagaaggagaagagcagcaagcccaaggaccccccaccatttgagggcatggagattgatgaggtggccaacatcaatgacatggatgagtacatcgagctgctgtatgaggacatcccagacaaggtgcggggcagcgccctgatcctgcagctggccagaaatccagacaacctggaggagctgctgctgaatgaaacagccctgggcgccctggcccgggtgctgcgggaggactggaagcagagcgtggagctggccaccaacatcatctacatcttcttctgcttcagcagcttcagccagttccacggcctcatcacccactacaagattggagccctgtgcatgaacatcatcgaccacgagctgaagagacatgagctgtggcaggaggagctgagcaagaagaagaaggctgtggatgaggaccctgagaaccagaccctgaggaaggactatgagaagaccttcaagaagtaccagggcctggtggtgaagcaggagcagctgctgcgggtggccctgtacctgctgctgaacctggccgaggacaccaggacagagctgaagatgaggaacaagaacatcgtgcacatgctggtgaaggccctggaccgggacaactttgagctgctgatcctggtggtgtccttcctgaagaagctgagcatcttcatggagaacaagaatgacatggtggagatggacatcgtggagaagctggtgaagatgatcccctgtgaacatgaggacctgctgaacatcaccctgcggctgctgctgaacctgagctttgacaccggcctgaggaacaagatggtgcaggtgggcctgctgcccaagctgacagccctgctgggcaatgacaactacaagcagatcgccatgtgtgtgctgtaccacatctccatggatgaccgcttcaagtccatgtttgcctacacagactgcatcccccagctgatgaagatgctgtttgaatgttctgatgaaagaattgacctggagctgatctccttctgcatcaacctggccgccaacaagagaaatgtgcagctgatctgtgagggcaatggcctgaagatgctgatgaagagggccctgaagttcaaggaccccctgctgatgaagatgatccggaacatcagccagcatgatggccccaccaagaacctcttcatcgactatgtgggggacctggccgcccagatcagcaatgatgaggaggaggagtttgtgattgaatgtctgggcaccctggccaacctgaccatcccagacctggactgggagctggtgctgaaggagtacaagctggtgccctacctgaaggacaagctgaagccaggagctgctgaagatgacctggtgctggaggtggtgatcatgattggcaccgtgtccatggatgacagctgtgccgccctgctggccaagagcggcatcatcccagccctgattgagctgctgaatgcccagcaggaggatgatgaatttgtgtgccagatcatctacgtgttctaccagatggtgttccaccaggccaccagagatgtgatcatcaaggagacccaggccccagcctacctgattgacctgatgcatgacaagaacaatgagatcaggaaggtgtgtgacaacaccctggacatcatcgccgagtatgatgaggagtgggccaagaagatccagagcgagaagttccgctggcacaacagccagtggctggagatggtggagagccggcagatggatgaaagtgagcagtacctgtatggagatgacagaattgagccctacatccacgagggggacatcctggagaggccagacctcttctacaacagtgatggcctcatcgccagcgagggcgccatcagcccagacttcttcaatgactaccacctgcagaatggagatgtggtgggccagcacagcttccctggcagcctgggcatggatggcttcggccagcctgtgggcatcctgggccggcctgccacagcctacggcttccggccagatgagccctactactacggctacggcagctag

SEQ ID NO: 157144 - DNA, 1485 bp, synthetic construct
  misc_feature 1..1485: note = Description of Artificial Sequence: Synthetic coding sequence
  source 1..1485: mol_type = other DNA
atgaggaacaagaacatcgtgcacatgctggtgaaggccctggaccgggacaactttgagctgctgatcctggtggtgtccttcctgaagaagctgagcatcttcatggagaacaagaatgacatggtggagatggacatcgtggagaagctggtgaagatgatcccctgtgaacatgaggacctgctgaacatcaccctgcggctgctgctgaacctgagctttgacaccggcctgaggaacaagatggtgcaggtgggcctgctgcccaagctgacagccctgctgggcaatgacaactacaagcagatcgccatgtgtgtgctgtaccacatctccatggatgaccgcttcaagtccatgtttgcctacacagactgcatcccccagctgatgaagatgctgtttgaatgttctgatgaaagaattgacctggagctgatctccttctgcatcaacctggccgccaacaagagaaatgtgcagctgatctgtgagggcaatggcctgaagatgctgatgaagagggccctgaagttcaaggaccccctgctgatgaagatgatccggaacatcagccagcatgatggccccaccaagaacctcttcatcgactatgtgggggacctggccgcccagatcagcaatgatgaggaggaggagtttgtgattgaatgtctgggcaccctggccaacctgaccatcccagacctggactgggagctggtgctgaaggagtacaagctggtgccctacctgaaggacaagctgaagccaggagctgctgaagatgacctggtgctggaggtggtgatcatgattggcaccgtgtccatggatgacagctgtgccgccctgctggccaagagcggcatcatcccagccctgattgagctgctgaatgcccagcaggaggatgatgaatttgtgtgccagatcatctacgtgttctaccagatggtgttccaccaggccaccagagatgtgatcatcaaggagacccaggccccagcctacctgattgacctgatgcatgacaagaacaatgagatcaggaaggtgtgtgacaacaccctggacatcatcgccgagtatgatgaggagtgggccaagaagatccagagcgagaagttccgctggcacaacagccagtggctggagatggtggagagccggcagatggatgaaagtgagcagtacctgtatggagatgacagaattgagccctacatccacgagggggacatcctggagaggccagacctcttctacaacagtgatggcctcatcgccagcgagggcgccatcagcccagacttcttcaatgactaccacctgcagaatggagatgtggtgggccagcacagcttccctggcagcctgggcatggatggcttcggccagcctgtgggcatcctgggccggcctgccacagcctacggcttccggccagatgagccctactactacggctacggcagctag

SEQ ID NO: 157145 - DNA, 1935 bp, synthetic construct
  misc_feature 1..1935: note = Description of Artificial Sequence: Synthetic coding sequence
  source 1..1935: mol_type = other DNA
atgaagctgatcaccatcctcttcctgtgcagccggctgctgctgagcctgacccaggagagccagagcgaggagattgactgcaatgacaaggacctcttcaaggctgtggatgctgccctgaagaagtacaacagccagaaccagagcaacaaccagtttgtgctgtaccgcatcacagaggccaccaagacagtgggcagtgacaccttctacagcttcaagtatgagatcaaggagggggactgccctgtgcagagcggcaagacctggcaggactgtgagtacaaggatgctgccaaggccgccaccggggagtgcacagccaccgtgggcaagaggagcagcaccaagttctctgtggccacccagacctgccagatcaccccagctgagggccctgtggtgacagcccagtatgactgcctgggctgtgtgcaccccatcagcacccagagcccagacctggagcccatcctgcggcacggcatccagtacttcaacaacaacacccagcacagcagcctcttcatgctgaatgaggtgaagagggcccagaggcaggtggtggccggcctgaacttccgcatcacctacagcatcgtgcagaccaactgcagcaaagaaaacttcctgttcctgaccccagactgcaagagcctgtggaatggagacaccggggagtgcacagacaatgcctacatcgacatccagctgagaattgccagcttcagccagaactgtgacatctacccaggcaaggactttgtgcagccccccaccaagatctgtgtgggctgcccccgggacatccccaccaacagccctgagctggaggagaccctgacccacaccatcaccaagctgaatgctgagaacaatgccaccttctacttcaagattgacaacgtgaagaaggcccgggtgcaggtggtggccggcaagaagtacttcatcgactttgtggcccgggagaccacctgcagcaaggagagcaatgaggagctgacagagagctgtgagaccaagaagctgggccagagcctggactgcaatgctgaggtgtatgtggtgccctgggagaagaagatctaccccaccgtgaactgccagcccctgggcatgatcagcctgatgaagaggcctcctggcttcagccccttccgcagcagcagaattggagagatcaaggaggagaccaccgtgagccccccccacacctccatggccccagcccaggatgaggagcgggacagcggcaaggagcagggccacaccaggagacatgactggggccacgagaagcagaggaagcacaacctgggccacggccacaagcatgagcgggaccagggccacggccaccagaggggccacggcctgggccacggccacgagcagcagcacggcctgggccacggccacaagttcaagctggatgatgacctggagcaccagggcggccacgtgctggaccacggccacaagcacaagcacggccacggccacggcaagcacaagaacaagggcaagaagaatggcaagcacaacggctggaagacagagcacctggccagcagcagcgaggacagcaccaccccatctgcccagacccaggagaagacagagggccccacccccatccccagcctggccaagccaggagtgacagtgaccttcagtgacttccaggacagcgacctgattgccaccatgatgccacccatcagccctgcccccatccagagtgatgatgactggatcccagacatccagattgaccccaacggcctgtccttcaaccccatcagtgacttcccagacaccaccagccccaagtgccccggccggccctggaagtctgtgtctgagatcaaccccaccacccagatgaaggagagctactactttgacctgacagatggcctgtcctag

SEQ ID NO: 157146 - DNA, 1284 bp, synthetic construct
  misc_feature 1..1284: note = Description of Artificial Sequence: Synthetic coding sequence
  source 1..1284: mol_type = other DNA
atgaagctgatcaccatcctcttcctgtgcagccggctgctgctgagcctgacccaggagagccagagcgaggagattgactgcaatgacaaggacctcttcaaggctgtggatgctgccctgaagaagtacaacagccagaaccagagcaacaaccagtttgtgctgtaccgcatcacagaggccaccaagacagtgggcagtgacaccttctacagcttcaagtatgagatcaaggagggggactgccctgtgcagagcggcaagacctggcaggactgtgagtacaaggatgctgccaaggccgccaccggggagtgcacagccaccgtgggcaagaggagcagcaccaagttctctgtggccacccagacctgccagatcaccccagctgagggccctgtggtgacagcccagtatgactgcctgggctgtgtgcaccccatcagcacccagagcccagacctggagcccatcctgcggcacggcatccagtacttcaacaacaacacccagcacagcagcctcttcatgctgaatgaggtgaagagggcccagaggcaggtggtggccggcctgaacttccgcatcacctacagcatcgtgcagaccaactgcagcaaagaaaacttcctgttcctgaccccagactgcaagagcctgtggaatggagacaccggggagtgcacagacaatgcctacatcgacatccagctgagaattgccagcttcagccagaactgtgacatctacccaggcaaggactttgtgcagccccccaccaagatctgtgtgggctgcccccgggacatccccaccaacagccctgagctggaggagaccctgacccacaccatcaccaagctgaatgctgagaacaatgccaccttctacttcaagattgacaacgtgaagaaggcccgggtgcaggtggtggccggcaagaagtacttcatcgactttgtggcccgggagaccacctgcagcaaggagagcaatgaggagctgacagagagctgtgagaccaagaagctgggccagagcctggactgcaatgctgaggtgtatgtggtgccctgggagaagaagatctaccccaccgtgaactgccagcccctgggcatgatcagcctgatgaagaggcctcctggcttcagccccttccgcagcagcagaattggagagatcaaggaggagaccaccagccacctgcggagctgtgagtacaagggccggccccccaaggccggggctgagcccgccagcgagcgggaggtgtcctag

SEQ ID NO: 157147 - DNA, 1248 bp, synthetic construct
  misc_feature 1..1248: note = Description of Artificial Sequence: Synthetic coding sequence
  source 1..1248: mol_type = other DNA
atgaagctgagcctgacccaggagagccagagcgaggagattgactgcaatgacaaggacctcttcaaggctgtggatgctgccctgaagaagtacaacagccagaaccagagcaacaaccagtttgtgctgtaccgcatcacagaggccaccaagacagtgggcagtgacaccttctacagcttcaagtatgagatcaaggagggggactgccctgtgcagagcggcaagacctggcaggactgtgagtacaaggatgctgccaaggccgccaccggggagtgcacagccaccgtgggcaagaggagcagcaccaagttctctgtggccacccagacctgccagatcaccccagctgagggccctgtggtgacagcccagtatgactgcctgggctgtgtgcaccccatcagcacccagagcccagacctggagcccatcctgcggcacggcatccagtacttcaacaacaacacccagcacagcagcctcttcatgctgaatgaggtgaagagggcccagaggcaggtggtggccggcctgaacttccgcatcacctacagcatcgtgcagaccaactgcagcaaagaaaacttcctgttcctgaccccagactgcaagagcctgtggaatggagacaccggggagtgcacagacaatgcctacatcgacatccagctgagaattgccagcttcagccagaactgtgacatctacccaggcaaggactttgtgcagccccccaccaagatctgtgtgggctgcccccgggacatccccaccaacagccctgagctggaggagaccctgacccacaccatcaccaagctgaatgctgagaacaatgccaccttctacttcaagattgacaacgtgaagaaggcccgggtgcaggtggtggccggcaagaagtacttcatcgactttgtggcccgggagaccacctgcagcaaggagagcaatgaggagctgacagagagctgtgagaccaagaagctgggccagagcctggactgcaatgctgaggtgtatgtggtgccctgggagaagaagatctaccccaccgtgaactgccagcccctgggcatgatcagcctgatgaagaggcctcctggcttcagccccttccgcagcagcagaattggagagatcaaggaggagaccaccagccacctgcggagctgtgagtacaagggccggccccccaaggccggggctgagcccgccagcgagcgggaggtgtcctag

SEQ ID NO: 157148 - DNA, 1176 bp, synthetic construct
  misc_feature 1..1176: note = Description of Artificial Sequence: Synthetic coding sequence
  source 1..1176: mol_type = other DNA
atgaagctgatcaccatcctcttcctgtgcagccggctgctgctgagcctgacccaggagagccagagcgaggagattgactgcaatgacaaggacctcttcaaggctgtggatgctgccctgaagaagtacaacagccagaaccagagcaacaaccagtttgtgctgtaccgcatcacagaggccaccaagacagtgggcagtgacaccttctacagcttcaagtatgagatcaaggagggggactgccctgtgcagagcggcaagacctggcaggactgtgagtacaaggatgctgccaaggccgccaccggggagtgcacagccaccgtgggcaagaggagcagcaccaagttctctgtggccacccagacctgccagatcaccccagctgagggccctgtggtgacagcccagtatgactgcctgggctgtgtgcaccccatcagcacccagagcccagacctggagcccatcctgcggcacggcatccagtacttcaacaacaacacccagcacagcagcctcttcatgctgaatgaggtgaagagggcccagaggcaggacaccggggagtgcacagacaatgcctacatcgacatccagctgagaattgccagcttcagccagaactgtgacatctacccaggcaaggactttgtgcagccccccaccaagatctgtgtgggctgcccccgggacatccccaccaacagccctgagctggaggagaccctgacccacaccatcaccaagctgaatgctgagaacaatgccaccttctacttcaagattgacaacgtgaagaaggcccgggtgcaggtggtggccggcaagaagtacttcatcgactttgtggcccgggagaccacctgcagcaaggagagcaatgaggagctgacagagagctgtgagaccaagaagctgggccagagcctggactgcaatgctgaggtgtatgtggtgccctgggagaagaagatctaccccaccgtgaactgccagcccctgggcatgatcagcctgatgaagaggcctcctggcttcagccccttccgcagcagcagaattggagagatcaaggaggagaccaccagccacctgcggagctgtgagtacaagggccggccccccaaggccggggctgagcccgccagcgagcgggaggtgtcctag

SEQ ID NO: 157149 - DNA, 306 bp, synthetic construct
  misc_feature 1..306: note = Description of Artificial Sequence: Synthetic coding sequence
  source 1..306: mol_type = other DNA
atggacatccccatcagcagccgggacttccggggcctgcagctggcctgtgtggccctgggcctggtggccggcagcatcatcatcggcatctctgtgtccaaggctgctgctgccatgggcggcgtcttcatcggggctgctgtgctgggcagcctgcgcatccacccccaccctggagctgaccatggagagggccgcagcagcaccaatggaaacaaggagggcgcccggagcagcctgagcacagtgtccaggaccctggagaagctgaagccaggcaccagaggagctgaggagtgctag

SEQ ID NO: 157150 - DNA, 375 bp, synthetic construct
  misc_feature 1..375: note = Description of Artificial Sequence: Synthetic coding sequence
  source 1..375: mol_type = other DNA
atggacatccccatcagcagccgggacttccggggcctgcagctggcctgtgtggccctgggcctggtggccggcagcatcatcatcggcatctctgtgtccaaggctgctgctgccatgggcggcgtcttcatcggggctgctgtgctgggcctgctgatcctggcctaccccttcctgaaggcccgcttcaacctggaccacatcctgcccaccatcggcagcctgcgcatccacccccaccctggagctgaccacggggagggccgcagcagcaccaacggcaacaaggagggcgcccggagcagcctgagcacagtgtccaggaccctggagaagctgaagccaggcaccagaggagcagaagaatgttag

SEQ ID NO: 157151 - DNA, 3135 bp, synthetic construct
  misc_feature 1..3135: note = Description of Artificial Sequence: Synthetic coding sequence
  source 1..3135: mol_type = other DNA
atgaagccaggctgtgccgccggcagccctggaaatgagtggatcttcttcagcacagatgagatcaccacccgctacagaaacaccatgagcaatggaggcctgcagaggagcgtcatcctgagcgccctgatcctgctgcgggctgtgacaggcttctctggagatggccgggccatctggagcaagaaccccaacttcacccctgtgaatgaaagccagctgttcctgtatgacaccttccccaagaacttcttctggggcattggaactggagccctgcaggtggagggctcctggaagaaggatggcaagggccccagcatctgggaccacttcatccacacccacctgaagaatgtgagcagcaccaacggcagcagtgacagctacatcttcctggagaaggacctgagcgccctggacttcatcggcgtgtccttctaccagttcagcatctcctggcccaggctcttcccagatggcatcgtgacagtggccaatgccaagggcctgcagtactacagcaccctgctggatgccctggtgctgagaaatattgagcccatcgtgaccctgtaccactgggacctgcccctggccctgcaggagaagtatggaggctggaagaatgacaccatcatcgacatcttcaatgactatgccacctactgcttccagatgtttggagacagagtgaagtactggatcaccatccacaacccctacctggtggcctggcacggctacggcaccggcatgcacgcccctggagagaagggcaacctggccgctgtgtacacagtgggccacaacctgatcaaggcccacagcaaggtgtggcacaactacaacacccacttccggccccaccagaagggctggctgagcatcaccctgggcagccactggattgagcccaacagaagtgagaacaccatggacatcttcaagtgccagcagagcatggtgtctgtgctgggctggtttgccaaccccatccatggagatggagactacccagagggcatgaggaagaagctgttctctgtgctgcccatcttcagcgaggccgagaagcatgagatgaggggcacagctgacttctttgccttctcctttggccccaacaacttcaagcccctgaacaccatggccaagatgggccagaatgtgtccctgaacctgcgggaggccctgaactggatcaagctggagtacaacaacccccgcatcctgattgctgaaaatggctggttcacagacagccgggtgaagacagaggacaccacagccatctacatgatgaagaacttcctgagccaggtgctgcaggccatccggctggatgagatccgggtgtttggctacacagcctggagcctgctggatggctttgagtggcaggatgcctacaccatcagaagaggcctcttctacgtggacttcaacagcaagcagaaggagaggaagcccaagagcagcgcccactactacaagcagatcatcagagaaaatggcttcagcctgaaggagagcaccccagatgtgcagggccagttcccctgtgacttctcctggggcgtgacagagagcgtgctgaagccagagagcgtggccagcagcccccagttcagtgacccccacctgtatgtgtggaatgccaccggcaaccggctgctgcaccgggtggagggcgtgcggctgaagaccaggcctgcccagtgcacagactttgtgaacatcaagaagcagctggagatgctggccaggatgaaggtgacccactacagatttgccctggactgggcctctgtgctgcccactggaaacctgtctgctgtgaaccggcaggccctgcgctactaccgctgtgtggtgtctgagggcctgaagctgggcatcagcgccatggtgaccctgtactaccccacccacgcccacctgggcctgcctgagcccctgctgcacgcagatggctggctgaaccccagcacagctgaggccttccaggcctatgccggcctgtgcttccaggagctgggggacctggtgaagctgtggatcaccatcaatgagcccaaccggctgagtgacatctacaacagaagtggaaatgacacctatggagctgcccacaacctgctggtggcccacgccctggcctggaggctgtatgaccggcagttccggcccagccagagaggagctgtgtccctgagcctgcacgccgactgggccgagcccgccaacccctatgctgacagccactggagggctgctgagcgcttcctgcagtttgaaattgcctggtttgctgagcccctcttcaagacaggagactacccagctgccatgagggagtacatcgccagcaagcacagaagaggcctgagcagcagcgccctgccccggctgacagaagctgagcggcggctgctgaagggcaccgtggacttctgtgccctgaaccacttcaccaccaggtttgtgatgcatgagcagctggccggcagccgctatgacagcgaccgggacatccagttcctgcaggacatcacccggctgagcagccccacccggctggccgtcatcccctggggcgtgaggaagctgctgcgctgggtgagaagaaactacggggacatggacatctacatcacagccagcggcattgatgaccaggccctggaggatgaccggctgaggaagtactacctgggcaagtacctgcaggaggtgctgaaggcctacctgattgacaaggtgcgcatcaagggctactatgccttcaagctggccgaggagaagagcaagccccgcttcggcttcttcaccagtgacttcaaggccaagagcagcatccagttctacaacaaggtgatcagcagccggggcttcccctttgagaacagcagcagccgctgcagccagacccaggagaacacagagtgcaccgtgtgcctcttcctggtgcagaagaagcccctcatcttcctgggctgctgcttcttcagcaccctggtgctgctgctgagcatcgccatcttccagaggcagaagaggaggaagttctggaaggccaagaacctgcagcacatccccctgaagaagggcaagagggtggtgtcctag

SEQ ID NO: 157152 - DNA, 1389 bp, synthetic construct
  misc_feature 1..1389: note = Description of Artificial Sequence: Synthetic coding sequence
  source 1..1389: mol_type = other DNA
atgggcacccaggccctgcagggcttcctgttcctgctcttcctgcccctgctgcagcccaggggggccagcgctggcagcctgcacagccctggcctgtctgagtgcttccaggtgaatggagctgactaccggggccaccagaacagaacaggccccaggggggccggccggccctgcctcttctgggaccagacccagcagcacagctacagcagcgccagtgacccccacggccgctggggcctgggcgcccacaacttctgcaggaacccagatggagatgtgcagccctggtgctacgtggccgagacagaggagggcatctactggagatactgtgacatccccagctgccacatgcctggctacctgggctgctttgtggacagcggggcccccccagccctgagcggccccagcggcaccagcaccaagctgactgtgcaggtgtgcctgcgcttctgcaggatgaagggctaccagctggccggcgtggaggccggctacgcctgcttctgtggcagcgagagtgacctggcccggggccgcctggccccagccacagactgtgaccagatctgcttcggccaccctggccagctgtgtggaggagatggccgcctgggcgtgtatgaggtgtctgtgggcagctgccagggcaactggacagccccccagggcgtcatctacagcccagacttcccagatgaatatggccctgacaggaactgctcctgggccctgggccccccaggggccgccctggagctgaccttccggctgtttgagctggccgacccccgggaccggctggagctgagagatgctgccagcggcagcctgctgcgggcctttgatggagcccggcccccacccagcggccccctgcggctgggcacagctgccctgctgctgaccttcagaagtgatgcccggggccacgcccagggctttgccctgacctaccggggcctgcaggatgctgctgaagatcctgaggcccctgagggcagcgcccagaccccagctgcccccctggatggagccaacgtgtcctgcagccccaggcctggggcccctcctgctgccatcggggcccgggtcttcagcacagtgacagctgtgtctgtgctgctgctgctgctgctgggcctgctgcggcccctgcggcggcgcagctgcctgctggcccctggaaaaggacctccagccctgggcgccagccggggccccaggaggtcctgggccgtgtggtaccagcagccccggggcgtggccctgccctgcagccctggggacccccaggccgagggcagcgctgctggctaccggcccctgagcgccagcagccagagcagcctgcggagcctcatcagcgccctgtag

SEQ ID NO: 157153 - DNA, 1263 bp, synthetic construct
  misc_feature 1..1263: note = Description of Artificial Sequence: Synthetic coding sequence
  source 1..1263: mol_type = other DNA
atgggcacccaggccctgcagggcttcctgttcctgctcttcctgcccctgctgcagcccaggggggccagcgctggcagcctgcacagccctggcctgtctgagtgcttccaggtgaatggagctgactaccggggccaccagaacagaacaggccccaggggggccggccggccctgcctcttctgggaccagacccagcagcacagctacagcagcgccagtgacccccacggccgctggggcctgggcgcccacaacttctgcaggaacccagatggagatgtgcagccctggtgctacgtggccgagacagaggagggcatctactggagatactgtgacatccccagctgccacatgcctggctacctgggctgctttgtggacagcggggcccccccagccctgagcggccccagcggcaccagcaccaagctgactgtgcaggtgtgcctgcgcttctgcaggatgaagggctaccagctggccggcgtggaggccggctacgcctgcttctgtggcagcgagagtgacctggcccggggccgcctggccccagccacagactgtgaccagatctgcttcggccaccctggccagctgtgtggaggagatggccgcctgggcgtgtatgaggtgtctgtgggcagctgccagggcaactggacagccccccagggcgtcatctacagcccagacttcccagatgaatatggccctgacaggaactgctcctgggccctgggccccccaggggccgccctggagctgaccttccggctgtttgagctggccgacccccgggaccggctggagctgagagatgctgccagcggcagcctgctgcgggcctttgatggagcccggcccccacccagcggccccctgcggctgggcacagctgccctgctgctgaccttcagaagtgatgcccggggccacgcccagggctttgccctgacctaccggggcctgcaggatgctgctgaagatcctgaggcccctgagggcagcgcccagaccccagctgcccccctggatggagccaacgtgtcctgcagccccaggcctggggcccctcctgctgccatcggcggcgctgtgtgctggctgcgggagaagggcccccggcgctggggcctgcccggggcccctggagaggccggcctgtgtggcaccaacagccctgagggctggccctgcccagcccctcctggcaccccccggctgcgggtgctgccccgggccaccggcctgtag

SEQ ID NO: 157154 - DNA, 1272 bp, synthetic construct
  misc_feature 1..1272: note = Description of Artificial Sequence: Synthetic coding sequence
  source 1..1272: mol_type = other DNA
atgggcacccaggccctgcagggcttcctgttcctgctcttcctgcccctgctgcagcccaggggggccagcgctggcagcctgcacagccctggcctgtctgagtgcttccaggtgaatggagctgactaccggggccaccagaacagaacaggccccaggggggccggccggccctgcctcttctgggaccagacccagcagcacagctacagcagcgccagtgacccccacggccgctggggcctgggcgcccacaacttctgcaggaacccagatggagatgtgcagccctggtgctacgtggccgagacagaggagggcatctactggagatactgtgacatccccagctgccacatgcctggctacctgggctgctttgtggacagcggggcccccccagccctgagcggccccagcggcaccagcaccaagctgactgtgcaggtgtgcctgcgcttctgcaggatgaagggctaccagctgtgtggaggagatggccgcctgggcgtgtatgaggtgtctgtgggcagctgccagggcaactggacagccccccagggcgtcatctacagcccagacttcccagatgaatatggccctgacaggaactgctcctgggccctgggccccccaggagctgccctggagctgaccttccggctgtttgagctggccgacccccgggaccggctggagctgagagatgctgccagcggcagcctgctgcgggcctttgatggagcccggcccccaccttctggccccctgcggctgggcacagctgccctgctgctgaccttcagaagtgatgcccggggccacgcccagggctttgccctgacctaccggggcctgcaggatgctgctgaggaccctgaggcccctgagggcagcgcccagaccccagctgcccccctggatggagccaacgtgtcctgcagccccaggcctggggcccccccagctgccatcggggcccgggtcttcagcacagtgacagctgtgtctgtgctgctgctgctgctgctgggcctgctgcggcccctgcggcggcgcagctgcctgctggcccctgggaagggccccccagccctgggcgccagccggggcccccggcgctcctgggccgtgtggtaccagcagccccggggcgtggccctgccctgcagccctggggacccccaggccgagggcagcgctgctggctaccggcccctgagcgccagcagccagagcagcctgcggagcctcatcagcgccctgtag

SEQ ID NO: 157155 - DNA, 1146 bp, synthetic construct
  misc_feature 1..1146: note = Description of Artificial Sequence: Synthetic coding sequence
  source 1..1146: mol_type = other DNA
atgggcacccaggccctgcagggcttcctgttcctgctcttcctgcccctgctgcagcccaggggggccagcgctggcagcctgcacagccctggcctgtctgagtgcttccaggtgaatggagctgactaccggggccaccagaacagaacaggccccaggggggccggccggccctgcctcttctgggaccagacccagcagcacagctacagcagcgccagtgacccccacggccgctggggcctgggcgcccacaacttctgcaggaacccagatggagatgtgcagccctggtgctacgtggccgagacagaggagggcatctactggagatactgtgacatccccagctgccacatgcctggctacctgggctgctttgtggacagcggggcccccccagccctgagcggccccagcggcaccagcaccaagctgactgtgcaggtgtgcctgcgcttctgcaggatgaagggctaccagctgtgtggaggagatggccgcctgggcgtgtatgaggtgtctgtgggcagctgccagggcaactggacagccccccagggcgtcatctacagcccagacttcccagatgaatatggccctgacaggaactgctcctgggccctgggccccccaggagctgccctggagctgaccttccggctgtttgagctggccgacccccgggaccggctggagctgagagatgctgccagcggcagcctgctgcgggcctttgatggagcccggcccccaccttctggccccctgcggctgggcacagctgccctgctgctgaccttcagaagtgatgcccggggccacgcccagggctttgccctgacctaccggggcctgcaggatgctgctgaggaccctgaggcccctgagggcagcgcccagaccccagctgcccccctggatggagccaacgtgtcctgcagccccaggcctggggcccccccagctgccatcggcggcgctgtgtgctggctgcgggagaagggcccccggcgctggggcctgcccggggcccctggagaggccggcctgtgtggcaccaacagccctgagggctggccctgcccagcccctcctggcaccccccggctgcgggtgctgccccgggccaccggcctgtag

SEQ ID NO: 157156 - DNA, 2211 bp, synthetic construct
  misc_feature 1..2211: note = Description of Artificial Sequence: Synthetic coding sequence
  source 1..2211: mol_type = other DNA
atgggcaacccagaaaatattgaagatgcctacgtggccgtcatccggcccaagaacacagccagcctgaacagccgggagtaccgggccaagagctatgagatcctgctgcacgaggtgcccatcgagggccagaagaagaagaggaagaaggtgctgctggagaccaagctgcagggcaacagcgagatcacccagggcatcctggactatgtggtggagaccaccaagcccatcagccctgccaaccagggcatccggggcaagagggtggtgctgatgaagaagttccccctggatggagagaagatgggccgggaggccagcctcttcatcgtgcccagcgtggtgaaggacaacaccaagtacacctacaccccaggctgccccatcttctactgcctgcaggacatcatgagggtgtgcagcgagagcagcacccactttgccaccctgacagccaggatgctgattgccctggacaagtggctggatgaaagacatgcccagagccacttcatcccagccctcttccggcccagccccctggagcgcatcaagaccaacgtcatcaacccagcctatgccacagaaagtggccagacagagaacagcctgcacatgggctacagcgccctggagatcaagagcaagatgctggccctggagaaggctgacacctgcatctacaaccccctgtttggaagtgacctgcagtacaccaacagagtggacaaggtggtgatcaacccctacttcggcctgggcgccccagactacagcaagatccagatccccaagcaggagaagtggcagaggtccatgagctctgtgacagaggacaaggagcggcagtgggtggatgacttccccctgcacaggtctgcctgtgagggggacagcgagctgctgagccggctgctgtctgagcgcttctctgtgaaccagctggacagcgaccactgggcccccatccactacgcctgctggtacggcaaggtggaggccacccgcatcctgctggagaagggcaagtgcaaccccaacctgctgaatggccagctgagcagccccctgcactttgctgctgggggcggccacgccgagatcgtgcagatcctgctgaaccaccctgagacagacagacacatcacagaccagcagggccgcagccccctgaacatctgtgaggagaacaagcagaacaactgggaggaggccgccaagctgctgaaggaggccatcaacaagccctatgagaaggtgcgcatctacaggatggatggcagctacagatctgtggagctgaagcacggcaacaacaccaccgtgcagcagatcatggagggcatgaggctgagccaggagacccagcagtacttcaccatctggatctgcagcgagaacctgagcctgcagctgaagccctaccacaagcccctgcagcacgtgcgggactggccagagatcctggccgagctgaccaacctggacccccagcgggagaccccccagctgttcctgcggagagatgtgcggctgcccctggaggtggagaagcagatcgaggaccccctggccatcctgatcctgtttgatgaggcccgctacaacctgctgaagggcttctacacagccccagatgccaagctgatcaccctggccagcctgctgctgcagatcgtgtatggcaactatgagagcaagaagcacaagcagggcttcctgaatgaggagaacctgaagagcatcgtgcctgtgaccaagctgaagagcaaggccccccactggaccaaccgcatcctgcacgagtacaagaacctgagcaccagcgagggcgtgtccaaggagatgcaccacctgcagaggatgttcctgcagaactgctgggagatccccacctatggagctgccttcttcaccggccagatcttcaccaaggccagccccagcaaccacaaggtgattcctgtgtatgtgggcgtgaacatcaagggcctgcacctgctgaacatggagaccaaggccctgctgatcagcctgaagtatggctgcttcatgtggcagctgggggacacagacacctgcttccagatccacagcatggagaacaagatgtccttcatcgtgcacaccaagcaggccggcctggtggtgaagctgctgatgaagctgaatggccagctgatgcccacagagaggaacagctag

SEQ ID NO: 157157 - DNA, 3624 bp, synthetic construct
  misc_feature 1..3624: note = Description of Artificial Sequence: Synthetic coding sequence
  source 1..3624: mol_type = other DNA
atggacctgcacatgatgaactgtgagctgctggccacctgcagcgccctgggctacctggagggggacacctaccacaaggagccagactgcctggagagcgtgaaggacctgatccgctacctgcggcatgaagatgagaccagagatgtgcggcagcagctgggcgccgcccagatcctgcagagcgacctgctgcccatcctgacccagcaccaccaggacaagcccctgtttgatgctgtgatccggctgatggtgaacctgacccagcctgccctgctgtgctttggaaacctgcccaaggagcccagcttccgccaccacttcctgcaggtgctgacctacctgcaggcctacaaggaggcctttgccagcgagaaggccttcggcgtgctgtctgagaccctgtatgagctgctgcagctgggctgggaggagcggcaggaggaggacaacctgctgattgaaagaatcctgctgctggtgaggaacatcctgcacgtgcctgctgacctggaccaggagaagattgatgatgatgccagcgcccatgaccagctgctgtgggccatccacctgagcggcctggatgacctgctgctcttcctggccagcagcagcgctgaggagcagtggagcctgcacgtgctggagatcgtgtccctgatgttccgggaccagaaccctgagcagctggccggcgtgggccagggccgcctggcccaggagaggtctgctgactttgctgagctggaggtgctgcggcagcgggagatggccgagaagaagacccgggccctgcagaggggcaacagacacagcagatttggaggcagctacatcgtgcagggcctgaagagcattggagagcgggacctgatcttccacaagggcctgcacaacctgaggaactacagcagtgacctgggcaagcagcccaagaaggtgcccaagaggcggcaggccgcccgggagctgagcatccagaggagaagtgccctgaatgtgcggctcttcctgcgggacttctgcagcgagttcctggagaactgctacaaccggctgatgggctctgtgaaggaccacctgctgcgggagaaggcccagcagcatgatgagacctactacatgtgggccctggccttcttcatggccttcaacagagctgccagcttccggcccggcctggtgtctgagaccctgtctgtgaggaccttccacttcatcgagcagaacctgaccaactactatgagatgatgctgacagacaggaaggaggccgcctcctgggcccggaggatgcacctggccctgaaggcctaccaggagctgctggccaccgtgaatgagatggacatcagcccagatgaagctgtgcgggagagcagccgcatcatcaagaacaacatcttctacgtgatggagtaccgggagctgttcctggccctcttcaggaagtttgatgagcgctgccagcccaggagcttcctgcgggacctggtggagaccacccacctgttcctgaagatgctggagcgcttctgccgcagccggggcaacctggtggtgcagaacaagcagaagaagaggaggaagaagaagaagaaggtgctggaccaggccatcgtgtctggaaatgtgcccagcagccctgaggaggtggaggccgtgtggccagccctggccgagcagctgcagtgctgtgcccagaacagcgagctgtccatggattctgtggtgccctttgatgctgccagcgaggtgcctgtggaggagcagagagctgaggccatggtgcgcatccaggactgcctgctggccggccaggccccccaggccctgaccctgctgcggagcgcccgggaggtgtggccagaaggagatgtgtttggcagccaggacatcagccctgaggaggagatccagctgctgaagcagatcctgagcgcccccctgccccggcagcagggccctgaggagagaggagctgaggaggaggaggaggaggaggaggaggaggaggaggagctgcaggtggtgcaggtgtctgagaaggagttcaacttcctggactacctgaagagatttgcctgcagcacagtggtgcgggcctacgtgctgctgctgcggagctaccagcagaacagcgcccacaccaaccactgcatcgtgaagatgctgcaccggctggcccatgacctgaagatggaggccctgctcttccagctgtctgtgttctgcctcttcaaccggctgctgagtgaccctgctgctggggcctacaaggagctggtgacctttgccaagtacatcctgggcaagttctttgccctggccgctgtgaaccagaaggcctttgtggagctgctcttctggaagaacacagctgtggtgcgggagatgacagagggctacggcagcctggatgacaggagcagcagccggcgggcccccacctggagccctgaggaggaggcccacctgcgggagctgtacctggccaacaaggatgtggagggccaggatgtggtggaggccatcctggcccacctgaacacagtgcccaggaccaggaagcagatcatccaccacctggtgcagatgggcctggccgacagcgtgaaggacttccagaggaagggcacccacatcgtgctgtggacaggagaccaggagctggagctgcagaggctgtttgaggagttccgggacagtgatgatgtgctgggccacatcatgaagaacatcacagccaagaggagccgggcccgcatcgtggacaagctgctggccctgggcctggtggccgagcggcgggagctgtacaagaagaggcagaagaagctggccagcagcatcctgcccaatggagctgagagcctgaaggacttctgccaggaggacctggaggaggaggagaacctgcctgaagaagattctgaggaggaggaggagggcggcagcgaggccgagcaggtgcagggcagcctggtgctgagcaatgaaaacctgggccagagcctgcaccaggagggcttcagcatccccctgctgtggctgcagaactgcctgatccgggctgctgatgaccgggaggaggatggctgcagccaggccgtgcccctggtgcccctgacagaagaaaatgaggaggccatggagaatgagcagttccagcagctgctgaggaagctgggcgtgcggcccccagccagcggccaggagaccttctggaggatcccagccaagctgagccccacccagctgcggcgggccgccgccagcctgagccagcctgaggaggagcagaagctgcagcctgagctgcagcccaaggtgcctggagagcagggcagtgatgaggagcactgcaaggagcaccgggcccaggccctgcgggccctgctgctggcccacaagaagaaggccggcctggccagccctgaggaggaggatgctgtgggcaaggagcccctgaaggccgcccccaagaagaggcagctgctggacagtgatgaggagcaggaggaggatgagggcaggaacagagcccctgagctgggcgcccctggcatccagaagaagaagcgctaccagattgaagatgatgaagatgactag

SEQ ID NO: 157158 - DNA, 1539 bp, synthetic construct
  misc_feature 1..1539: note = Description of Artificial Sequence: Synthetic coding sequence
  source 1..1539: mol_type = other DNA
atgcacaccccagactttgctggcccagatgatgcccgggctgtggacatcatggacatctgtgagagcatcctggagaggaagagacatgacagcgagaggagcacctgcagcatcctggagcagacagacatggaggccgtggaggccctggtgtgcatgagctcctggggccagaggagccagaagggggacctgctgcgcatccggcccctgacccctgtgtctgacagcggagatgtgaccaccaccgtgcacatggatgctgccaccccagagctgcccaaggacttccacagcctgagcaccctgtgcatcaccccaccccagagcccagacctggtggagcccagcaccaggacccctgtgagcccccaggtgacagacagcaaggcctgcacagccacagatgtgctgcagagcagcgctgtggtggcccgggccctgagcggcggcgctgagcggggcctgctgggcctggagcctgtgcccagcagcccctgccgggccaagggcaccagcgtcatccgccacactggagagagccctgctgcctgcttccccaccatccagaccccagactgccgcctgagtgacagccgggagggggaggagcagctgctgggccactttgagaccctgcaggacacccacctgacagacagcctgctgagcaccaacctggtgtcctgccagccctgcctgcacaagagcggcggcctgctgctgacagacaagggccagcaggccggctggccaggagctgtgcagacctgcagccccaagaactatgaaaatgacctgcccaggaagaccacccccctcatctctgtgtctgtgcctgcccctcctgtgctgtgccagatgatccctgtgacaggccagagctccatgctgcctgccttcctgaagcccccaccccagctgtctgtgggcaccgtgcggcccatcctggcccaggccgccccagccccccagcctgtgtttgtgggccctgctgtgccccagggcgctgtgatgctggtgctgccccagggcgccctgcccccaccagccccctgtgccgccaacgtgatggctgctggcaacaccaagctgctgcccctggccccagcccctgtgttcatcaccagcagccagaactgtgtgccccaggtggacttcagcagaagaagaaactacgtgtgcagcttccctggctgcaggaagacctacttcaagagcagccacctgaaggcccacctgcggacccacactggagagaagcccttcaactgctcctgggatggctgtgacaagaagtttgcccggagtgatgagctgagccgccacaggaggacccacactggagagaagaagtttgtgtgccctgtgtgtgaccggcgcttcatgagaagtgaccacctgaccaagcacgcccggcggcacatgaccaccaagaagatccctggctggcaggccgaggtgggcaagctgaacagaattgccagcgctgagagccctggcagccccctggtgtccatgcctgccagcgcctag

SEQ ID NO: 157159 - DNA, 1488 bp, synthetic construct
  misc_feature 1..1488: note = Description of Artificial Sequence: Synthetic coding sequence
  source 1..1488: mol_type = other DNA
atggacatctgtgagagcatcctggagaggaagagacatgattctgagaggagcacctgcagcatcctggagcagacagacatggaggccgtggaggccctggtgtgcatgagctcctggggccagaggagccagaagggggacctgctgcgcatccggcccctgacccctgtgtctgattctggagatgtgaccaccaccgtgcacatggatgctgccaccccagagctgcccaaggacttccacagcctgagcaccctgtgcatcaccccaccccagagcccagacctggtggagcccagcaccaggacccctgtgagcccccaggtgacagacagcaaggcctgcacagccacagatgtgctgcagagcagcgctgtggtggcccgggccctgtctggaggagctgagcggggcctgctgggcctggagcctgtgcccagcagcccctgccgggccaagggcaccagcgtcatccgccacactggagagagccctgctgcctgcttccccaccatccagaccccagactgccgcctgagtgacagccgggagggggaggagcagctgctgggccactttgagaccctgcaggacacccacctgacagacagcctgctgagcaccaacctggtgtcctgccagccctgcctgcacaagagcggcggcctgctgctgacagacaagggccagcaggccggctggccaggagctgtgcagacctgcagccccaagaactatgaaaatgacctgcccaggaagaccacccccctcatctctgtgtctgtgcctgcccctcctgtgctgtgccagatgatccctgtgacaggccagagctccatgctgcctgccttcctgaagcccccaccccagctgtctgtgggcaccgtgcggcccatcctggcccaggccgccccagccccccagcctgtgtttgtgggccctgctgtgccccagggcgctgtgatgctggtgctgccccagggcgccctgcccccaccagccccctgtgccgccaacgtgatggccgccggcaacaccaagctgctgcccctggccccagcccctgtgttcatcaccagcagccagaactgtgtgccccaggtggacttcagcagaagaagaaattatgtgtgcagcttccctggctgcaggaagacctacttcaagagcagccacctgaaggcccacctgcggacccacactggagagaagcccttcaactgctcctgggatggctgtgacaagaagtttgcccggagtgatgagctgagccgccacaggaggacccacactggagagaagaagtttgtgtgccctgtgtgtgaccggcgcttcatgagaagtgaccacctgaccaagcacgcccggcggcacatgaccaccaagaagatccctggctggcaggccgaggtgggcaagctgaaccgcatcgccagcgctgagagccctggcagccccctggtgtccatgcctgccagcgcctag

SEQ ID NO: 157160 - DNA, 1488 bp, synthetic construct; identical to SEQ ID NO: 157159
  misc_feature 1..1488: note = Description of Artificial Sequence: Synthetic coding sequence
  source 1..1488: mol_type = other DNA

SEQ ID NO: 157161 - DNA, 1209 bp, synthetic construct
  misc_feature 1..1209: note = Description of Artificial Sequence: Synthetic coding sequence
  source 1..1209: mol_type = other DNA
atctctgtgcacctgatgaggaagcacgtgaagaacatcaacacctttgaaaataggatgctgatgctggatggcatgcctgctgtgcgggtgaagacagagctgctggagagcgagcagggcagccccaacgtgcacaactacccagacatggaggccgtgcccctgctgctgaacaacgtgaagggggagcccccagaggacagcctgtctgtggaccacttccagacccagacagagcctgtggacctgagcatcaacaaggcccggaccagccccacagctgtgagcagcagccctgtgtccatgacagccagcgccagcagccccagcagcaccagcaccagcagcagcagcagcagccggctggccagcagccccaccgtcatcacctctgtgtcctctgccagcagcagcagcacagtgctgaccccaggccccctggtggccagcgccagcggcgtgggcggccagcagttcctgcacatcatccaccctgtgccccccagcagccccatgaacctgcagagcaacaagctgagccacgtgcaccgcatccctgtggtggtgcagagcgtgcctgtggtgtacacagctgtgcgcagccctggaaatgtgaacaacaccatcgtggtgcccctgctggaggatggccggggccacggcaaggcccagatggacccccggggcctgagcccccggcagagcaagagtgacagtgatgatgatgacctgcccaacgtgaccctggacagcgtgaatgagaccggcagcacagccctgagcatcgcccgggctgtgcaggaggtgcaccccagccctgtgtcccgggtgcggggcaacaggatgaacaaccagaagttcccctgcagcatcagccccttcagcattgagagcacccggcggcagaggagaagtgagagcccagacagcaggaagaggcgcatccaccgctgtgactttgagggctgcaacaaggtgtacaccaagagcagccacctgaaggcccacaggaggacccacactggagagaagccctacaagtgcacctgggagggctgcacctggaagtttgcccggagtgatgagctgaccaggcactacaggaagcacactggagtgaagcccttcaagtgtgccgactgtgaccgctccttcagcagaagtgaccacctggccctgcacagaagaagacacatgctggtgtag

SEQ ID NO: 157162 - DNA, 1209 bp, synthetic construct
  misc_feature 1..1209: note = Description of Artificial Sequence: Synthetic coding sequence
  source 1..1209: mol_type = other DNA
atgaacatccacatgaagaggaagaccatcaagaacatcaacacctttgaaaataggatgctgatgctggatggcatgcctgctgtgcgggtgaagacagagctgctggagagcgagcagggcagccccaacgtgcacaactacccagacatggaggccgtgcccctgctgctgaacaacgtgaagggggagcccccagaggacagcctgtctgtggaccacttccagacccagacagagcctgtggacctgagcatcaacaaggcccggaccagccccacagctgtgagcagcagccctgtgtccatgacagccagcgccagcagccccagcagcaccagcaccagcagcagcagcagcagccggctggccagcagccccaccgtcatcacctctgtgtcctctgccagcagcagcagcacagtgctgaccccaggccccctggtggccagcgccagcggcgtgggcggccagcagttcctgcacatcatccaccctgtgccccccagcagccccatgaacctgcagagcaacaagctgagccacgtgcaccgcatccctgtggtggtgcagagcgtgcctgtggtgtacacagctgtgcgcagccctggaaatgtgaacaacaccatcgtggtgcccctgctggaggatggccggggccacggcaaggcccagatggacccccggggcctgagcccccggcagagcaagagtgacagtgatgatgatgacctgcccaacgtgaccctggacagcgtgaatgagaccggcagcacagccctgagcatcgcccgggctgtgcaggaggtgcaccccagccctgtgtcccgggtgcggggcaacaggatgaacaaccagaagttcccctgcagcatcagccccttcagcattgagagcacccggcggcagaggagaagtgagagcccagacagcaggaagaggcgcatccaccgctgtgactttgagggctgcaacaaggtgtacaccaagagcagccacctgaaggcccacaggaggacccacactggagagaagccctacaagtgcacctgggagggctgcacctggaagtttgcccggagtgatgagctgaccaggcactacaggaagcacactggagtgaagcccttcaagtgtgccgactgtgaccgctccttcagcagaagtgaccacctggccctgcacagaagaagacacatgctggtgtag

SEQ ID NO: 157163 - DNA, 1209 bp, synthetic construct; identical to SEQ ID NO: 157162
  misc_feature 1..1209: note = Description of Artificial Sequence: Synthetic coding sequence
  source 1..1209: mol_type = other DNA

SEQ ID NO: 157164 - DNA, 867 bp, synthetic construct
  misc_feature 1..867: note = Description of Artificial Sequence: Synthetic coding sequence
  source 1..867: mol_type = other DNA
atggctgctgctgcctacgtggaccactttgctgctgaatgtctggtgtccatgagcagcagagctgtggtgcacggcccccgggagggccctgagagcaggcctgagggcgctgctgtggccgccacccccaccctgccccgggtggaggagaggagagatggcaaggacagcgccagcctgtttgtggtggcccgcatcctggccgacctgaaccagcaggccccagccccagccccagctgagcggcgggagggcgccgccgccaggaaggcccggaccccctgccgcctgcccccaccagcccctgagcccaccagccctggagctgagggcgctgctgctgccccacccagccctgcctggagcgagcctgagcctgaggccggcctggagcctgagcgggagcccggccctgctggcagcggggagcccggcctgcggcagagggtgcggcggggccgcagcagagctgacctggagagcccccagaggaagcacaagtgccactacgccggctgtgagaaggtgtatggcaagagcagccacctgaaggcccacctgcggacccacactggagagcggccctttgcctgctcctggcaggactgcaacaagaagtttgcccggagtgatgagctggcccggcactaccgcacccacactggagagaagaagttcagctgccccatctgtgagaagcgcttcatgagaagtgaccacctgaccaagcacgccaggagacatgccaacttccaccctggcatgctgcagaggagaggaggcggcagcaggacaggcagcctgagtgactacagcagaagtgatgccagcagccccaccatcagccctgccagcagcccctag

SEQ ID NO: 157165 - DNA, 1251 bp, synthetic construct
  misc_feature 1..1251: note = Description of Artificial Sequence: Synthetic coding sequence
  source 1..1251: mol_type = other DNA
atggtggaccacctgctgcctgtggatgagaacttcagcagccccaagtgccctgtgggctacctgggggaccggctggtgggcagaagagcctaccacatgctgcccagccctgtgtctgaagatgacagtgatgccagcagcccctgcagctgcagcagcccagacagccaggccctgtgcagctgctacggcggcggcctgggcacagagagccaggacagcatcctggacttcctgctgagccaggccaccctgggcagcggcggcggcagcggcagcagcatcggggccagcagcggccctgtggcctggggcccctggaggagagctgctgcccctgtgaagggggagcacttctgcctgcctgagttccccctgggggaccctgatgatgtgccccggcccttccagcccaccctggaggagattgaggagttcctggaggagaacatggagcccggggtgaaggaggtgcctgagggcaacagcaaggacctggatgcctgcagccagctgtctgctggcccccacaagagccacctgcaccctggcagcagcggccgggagcgctgcagccccccacctgggggcgccagcgctggaggagcccagggccctgggggcggccccaccccagatggccccatccctgtgctgctgcagatccagcctgtgcctgtgaagcaggagagcggcaccggccctgccagccctggccaggccccagaaaatgtgaaggtggcccagctgctggtgaacatccagggccagacctttgccctggtgccccaggtggtgcccagcagcaacctgaacctgcccagcaagtttgtgagaattgcccctgtgcccatcgccgccaagcctgtgggcagcggccccctgggccctggccctgctggcctgctgatgggccagaagttccccaagaacccagctgctgagctgatcaagatgcacaagtgcaccttccctggctgcagcaagatgtacaccaagagcagccacctgaaggcccacctgcggcggcacactggagagaagccctttgcctgcacctggccaggctgcggctggaggttcagcagaagtgatgagctgagccgccaccggcgcagccacagcggcgtgaagccctaccagtgccctgtgtgtgagaagaagtttgcccggagtgaccacctgagcaagcacatcaaggtgcaccgcttccccaggagcagccgctctgtgcgctctgtgaactag

SEQ ID NO: 157166 - DNA, 1068 bp, synthetic construct
  misc_feature 1..1068: note = Description of Artificial Sequence: Synthetic coding sequence
  source 1..1068: mol_type = other DNA
atggccctgtctgagcccatcctgcccagcttcagcacctttgccagcccctgccgggagcggggcctgcaggagcgctggcccagggctgagcctgagagcggcggcacagatgatgacctgaacagcgtgctggacttcatcctgtccatgggcctggatggcctgggcgctgaggccgcccctgagcccccacctcctcctcctcctccagccttctactacccagagcccggggcccccccaccctacagcgccccagctgggggcctggtgtctgagctgctgcggcctgagctggatgcccccctgggccctgccctgcacggccgcttcctgctggcccctcctggccgcctggtgaaggccgagcccccagaggctgatggcggcggcggctacggctgtgcccctggcctgacccggggcccccggggcctgaagcgggagggcgcccctggccctgctgccagctgcatgaggggccctgggggccggcccccacctcctccagacaccccacccctgagcccagatggccctgcccggctgcctgcccctggcccccgggccagcttccccccaccatttggaggccctggctttggagcccctggccctggcctgcactacgcccccccagcccccccagccttcggcctgtttgatgatgctgctgctgctgctgctgccctgggcctggcccccccagctgcccggggcctgctgaccccaccagccagccccctggagctgctggaggccaagcccaagagaggaagaagatcctggcccaggaagaggacagccacccacacctgcagctatgccggctgcggcaagacctacaccaagagcagccacctgaaggcccacctgcggacccacactggagagaagccctaccactgcaactgggatggctgcggctggaagtttgcccggagtgatgagctgaccaggcactacaggaagcacacaggccaccggcccttccagtgccacctgtgtgaccgggccttcagcagaagtgaccacctggccctgcacatgaagaggcacatgtag

SEQ ID NO: 157167 - DNA, 234 bp, synthetic construct
  misc_feature 1..234: note = Description of Artificial Sequence: Synthetic coding sequence
  source 1..234: mol_type = other DNA
atggatgtgctgcccatgtgcagcatcttccaggagctgcagatcgtgcatgaaacaggctacttcagcgccctgcccagcctggaggagtactggcagcagacctgcctggagctggagcgctacctgcagagcgagccctgctacgtgtctgccagcgagatcaagtttgacagccaggagagcgtggaccagaaccactggctgggcaggaagagaagaaaccccaactag

SEQ ID NO: 157168 - DNA, 846 bp, synthetic construct
  misc_feature 1..846: note = Description of Artificial Sequence: Synthetic coding sequence
  source 1..846: mol_type = other DNA
atggatgtgctgcccatgtgcagcatcttccaggagctgcagatcgtgcatgaaacaggctacttcagcgccctgcccagcctggaggagtactggcagcagacctgcctggagctggagcgctacctgcagagcgagccctgctacgtgtctgccagcgagatcaagtttgacagccaggaggacctgtggaccaagatcatcctggcccgggagaagaaggaggagagcgagctgaagatcagcagcagccccccagaggacaccctcatcagccccagcttctgctacaacctggagaccaacagcctgaacagtgatgtgagcagcgagagcagtgacagcagcgaggagctgagccccacagccaagttcaccagtgaccccatcggggaggtgctggtgtcctctgggaagctgagcagctctgtgaccagcaccccacccagcagccctgagctgagccgggagcccagccagctgtggggctgtgtgcctggagagctgcccagccctgggaaggtgcgcagcggcaccagcggcaagccaggggacaagggaaatggagatgccagcccagatggaagaagaagagtgcaccgctgccacttcaacggctgcaggaaggtgtacaccaagagcagccacctgaaggcccaccagaggacccacacaggccagtgcccccggggccccaggagagctgctgctgggggccgccactgcatcgccccagccctggagggcgccggccctggctgcaccggctgcggccagggccggcagatcctgaccagcagtgatgtgttccaccagagcatccgctccttctggagcagcgagtag

SEQ ID NO: 157169 - DNA, 852 bp, synthetic construct
  misc_feature 1..852: note = Description of Artificial Sequence: Synthetic coding sequence
  source 1..852: mol_type = other DNA
atggatgtgctgcccatgtgcagcatcttccaggagctgcagatcgtgcatgaaacaggctacttcagcgccctgcccagcctggaggagtactggcagcagacctgcctggagctggagcgctacctgcagagcgagccctgctacgtgtctgccagcgagatcaagtttgacagccaggaggacctgtggaccaagatcatcctggcccgggagaagaaggaggagagcgagctgaagatcagcagcagccccccagaggacaccctcatcagccccagcttctgctacaacctggagaccaacagcctgaacagtgatgtgagcagcgagagcagtgacagcagcgaggagctgagccccacagccaagttcaccagtgaccccatcggggaggtgctggtgtcctctgggaagctgagcagctctgtgaccagcaccccacccagcagccctgagctgagccgggagcccagccagctgtggggctgtgtgcctggagagctgcccagccctgggaaggtgcgcagcggcaccagcggcaagccaggggacaagggaaatggagatgccagcccagatggaagaagaagagtgcaccgctgccacttcaacggctgcaggaaggtgtacaccaagagcagccacctgaaggcccaccagaggacccacactggagagaagccctaccgctgctcctgggagggctgtgagtggaggtttgcccggagtgatgagctgaccaggcacttcaggaagcacactggagccaagcccttcaagtgcagccactgtgaccgctgcttcagcagaagtgaccacctggccctgcacatgaagaggcacctgtag

SEQ ID NO: 157170 - DNA, 714 bp, synthetic construct
  misc_feature 1..714: note = Description of Artificial Sequence: Synthetic coding sequence
  source 1..714: mol_type = other DNA
atggatgtgctgcccatgtgcagcatcttccaggagctgcagatcgtgcatgaaacaggctacttcagcgccctgcccagcctggaggagtactggcagcagacctgcctggagctggagcgctacctgcagagcgagccctgctacgtgtctgccagcgagatcaagtttgacagccaggaggacctgtggaccaagatcatcctggcccgggagaagaaggaggagagcgagctgaagatcagcagcagccccccagaggacaccctcatcagccccagcttctgctacaacctggagaccaacagcctgaacagtgatgtgagcagcgagagcagtgacagcagcgaggagctgagccccacagccaagttcaccagtgaccccatcggggaggtgctggtgtcctctgggaagctgagcagctctgtgaccagcaccccacccagcagccctgagctgagccgggagcccagccagctgtggggctgtgtgcctggagagctgcccagccctgggaaggtgcgcagcggcaccagcggcaagccaggggacaagggaaatggagatgccagcccagatggaagaagaagagtgcaccgctgccacttcaacggctgcaggaaggtgtacaccaagagcagccacctgaaggcccaccagaggacccacactggagtcttccctggcctgaccacctggccctgcacctag

SEQ ID NO: 157171 - DNA, 909 bp, synthetic construct
  misc_feature 1..909: note = Description of Artificial Sequence: Synthetic coding sequence
  source 1..909: mol_type = other DNA
atggatgtgctggccagctacagcatcttccaggagctgcagctggtgcatgacaccggctacttcagcgccctgcccagcctggaggagacctggcagcagacctgcctggagctggagcgctacctgcagacagagccccggcgcatcagcgagaccttcggggaggacctggactgcttcctgcacgccagccccccaccctgcatcgaggagagcttccggcggctggaccccctgctgctgcctgtggaggccgccatctgtgagaagagcagcgctgtggacatcctgctgagccgggacaagctgctgtctgagacctgcctgagcctgcagcctgccagcagcagcctggacagctacacagctgtgaaccaggcccagctgaatgctgtgaccagcctgaccccacccagcagccctgagctgagccgccacctggtgaagaccagccagaccctgtctgctgtggatggcaccgtgaccctgaagctggtggccaagaaggccgccctgagctctgtgaaggtgggcggcgtggccacagctgctgctgctgtgacagctgctggagctgtgaagagcggccagagcgacagcgaccagggcggcctgggcgctgaggcctgcccagagaacaagaagagggtgcaccgctgccagttcaacggctgcaggaaggtgtacaccaagagcagccacctgaaggcccaccagaggacccacactggagagaagccctacaagtgctcctgggagggctgtgagtggaggtttgcccggagtgatgagctgaccaggcactacaggaagcacactggagccaagcccttcaagtgcaaccactgtgaccgctgcttcagcagaagtgaccacctggccctgcacatgaagaggcacatctag

SEQ ID NO: 157172 - DNA, 825 bp, synthetic construct
  misc_feature 1..825: note = Description of Artificial Sequence: Synthetic coding sequence
  source 1..825: mol_type = other DNA
atgttccccagctggcccacctgcctggagctggagcgctacctgcagacagagccccggcgcatcagcgagaccttcggggaggacctggactgcttcctgcacgccagccccccaccctgcatcgaggagagcttccggcggctggaccccctgctgctgcctgtggaggccgccatctgtgagaagagcagcgctgtggacatcctgctgagccgggacaagctgctgtctgagacctgcctgagcctgcagcctgccagcagcagcctggacagctacacagctgtgaaccaggcccagctgaatgctgtgaccagcctgaccccacccagcagccctgagctgagccgccacctggtgaagaccagccagaccctgtctgctgtggatggcaccgtgaccctgaagctggtggccaagaaggccgccctgagctctgtgaaggtgggcggcgtggccacagctgctgctgctgtgacagctgctggagctgtgaagagcggccagagcgacagcgaccagggcggcctgggcgctgaggcctgcccagagaacaagaagagggtgcaccgctgccagttcaacggctgcaggaaggtgtacaccaagagcagccacctgaaggcccaccagaggacccacactggagagaagccctacaagtgctcctgggagggctgtgagtggaggtttgcccggagtgatgagctgaccaggcactacaggaagcacactggagccaagcccttcaagtgcaaccactgtgaccgctgcttcagcagaagtgaccacctggccctgcacatgaagaggcacatctag

SEQ ID NO: 157173 - DNA, 810 bp, synthetic construct
  misc_feature 1..810: note = Description of Artificial Sequence: Synthetic coding sequence
  source 1..810: mol_type = other DNA
atgacctgcctggagctggagcgctacctgcagacagagccccggcgcatcagcgagacctttggagaggacctggactgcttcctgcacgccagccccccaccctgcatcgaggagagcttccggcggctggaccccctgctgctgcctgtggaggccgccatctgtgagaagagcagcgctgtggacatcctgctgagccgggacaagctgctgtctgagacctgcctgagcctgcagcctgccagcagcagcctggacagctacacagctgtgaaccaggcccagctgaatgctgtgaccagcctgaccccacccagcagccctgagctgagccgccacctggtgaagaccagccagaccctgtctgctgtggatggcaccgtgaccctgaagctggtggccaagaaggccgccctgagctctgtgaaggtgggcggcgtggccacagctgctgctgctgtgacagctgctggagctgtgaagagcggccagagcgacagcgaccagggcggcctgggcgctgaggcctgcccagagaacaagaagagggtgcaccgctgccagttcaacggctgcaggaaggtgtacaccaagagcagccacctgaaggcccaccagaggacccacactggagagaagccctacaagtgctcctgggagggctgtgagtggaggtttgcccggagtgatgagctgaccaggcactacaggaagcacactggagccaagcccttcaagtgcaaccactgtgaccgctgcttcagcagaagtgaccacctggccctgcacatgaagaggcacatctag

SEQ ID NO: 157174 - DNA, 339 bp, synthetic construct
  misc_feature 1..339: note = Description of Artificial Sequence: Synthetic coding sequence
  source 1..339: mol_type = other DNA
atggatgtgctggccagctacagcatcttccaggagctgcagctggtgcatgacaccggctacttcagcgccctgcccagcctggaggagacctggcagcagacctgcctggagctggagcgctacctgcagacagagccccggcgcatcagcgagaccttcggggaggacctggactgcttcctgcacgccagccccccaccctgcatcgaggagagcttccggcggctggaccccctgctgctgcctgtggaggccgccatctgtgagaagagcagcgctgtggacatcctgctgagccgggacaagctgctgtctgagacctgcctgagcctgtag

SEQ ID NO: 157175 - DNA, 183 bp, synthetic construct
  misc_feature 1..183: note = Description of Artificial Sequence: Synthetic coding sequence
  source 1..183: mol_type = other DNA
atggatgtgctggccagctacagcatcttccaggagctgcagctggtgcatgacaccggctacttcagcgccctgcccagcctggaggagacctggcagcagacctgcctggagctggagcgctacctgcagacagagccccggcgcatcagcgagaccttcggggaggacctggactgctag

SEQ ID NO: 157176 - DNA, 339 bp, synthetic construct
  misc_feature 1..339: note = Description of Artificial Sequence: Synthetic coding sequence
  source 1..339: mol_type = other DNA
atggatgtgctggccagctacagcatcttccaggagctgcagctggtgcatgacaccggctacttcagcgccctgcccagcctggaggagacctggcagcagacctgcctggagctggagcgctacctgcagacagagccccggcgcatcagcgagaccttcggggagaagccctacaagtgctcctgggagggctgtgagtggaggtttgcccggagtgatgagctgaccaggcactacaggaagcacactggagccaagcccttcaagtgcaaccactgtgaccgctgcttcagcagaagtgaccacctggccctgcacatgaagaggcacatctag

SEQ ID NO: 157177 - DNA, 774 bp, synthetic construct
  misc_feature 1..774: note = Description of Artificial Sequence: Synthetic coding sequence
  source 1..774: mol_type = other DNA
atggtggacatggacaagctgatcaacaacctggaggtgcagctgaacagcgagggcggctccatgcaggtgttcaagcaggtgacagcctctgtgaggaacagagatcctcctgagattgagtaccgcagcaacatgaccagccccaccctgctggatgccaaccccatggagaacccagccctcttcaatgacatcaagattgagcccccagaggagctgctggccagtgacttcagcctgccccaggtggagcctgtggacctgtccttccacaagcccaaggcccccctgcagcctgcctccatgctgcaggcccccatccggccccccaagccccagagcagcccccagaccctggtggtgtccaccagcaccagtgacatgagcaccagcgccaacatccccaccgtgctgaccccaggctctgtgctgaccagcagccagagcacaggcagccagcagatcctgcacgtgatccacaccatccccagcgtgtccctgcccaacaagatgggcggcctgaagaccatccctgtggtggtgcagagcctgcccatggtgtacaccaccctgcctgcagatggcggccctgctgccatcaccgtgcccctgattggaggagatggcaagaatgccggctctgtgaaggtggaccccacctccatgagccccctggagatccccagcgacagcgaggagagcaccattgaaagtggcagcagcgccctgcagagcctgcagggcctgcagcaggagcgggaggccctgtag

SEQ ID NO: 157178 - DNA, 1080 bp, synthetic construct
  misc_feature 1..1080: note = Description of Artificial Sequence: Synthetic coding sequence
  source 1..1080: mol_type = other DNA
atggtggacatggacaagctgatcaacaacctggaggtgcagctgaacagcgagggcggctccatgcaggtgttcaagcaggtgacagcctctgtgaggaacagagatcctcctgagattgagtaccgcagcaacatgaccagccccaccctgctggatgccaaccccatggagaacccagccctcttcaatgacatcaagattgagcccccagaggagctgctggccagtgacttcagcctgccccaggtggagcctgtggacctgtccttccacaagcccaaggcccccctgcagcctgcctccatgctgcaggcccccatccggccccccaagccccagagcagcccccagaccctggtggtgtccaccagcaccagtgacatgagcaccagcgccaacatccccaccgtgctgaccccaggctctgtgctgaccagcagccagagcacaggcagccagcagatcctgcacgtgatccacaccatccccagcgtgtccctgcccaacaagatgggcggcctgaagaccatccctgtggtggtgcagagcctgcccatggtgtacaccaccctgcctgcagatggcggccctgctgccatcaccgtgcccctgattggaggagatggcaagaatgccggctctgtgaaggtggaccccacctccatgagccccctggagatccccagcgacagcgaggagagcaccattgaaagtggcagcagcgccctgcagagcctgcagggcctgcagcaggagcctgctgccatggcccagatgcagggcgaggagagcctggacctgaagagaagacgcatccaccagtgtgactttgctggctgcagcaaggtgtacaccaagagcagccacctgaaggcccaccggcgcatccacactggagagaagccctacaagtgcacctgggatggctgctcctggaagtttgcccggagtgatgagctgaccaggcacttcaggaagcacacaggcatcaagcccttccgctgcacagactgcaacagaagcttcagcagaagtgaccacctgagcctgcacagaagaagacatgacaccatgtag

SEQ ID NO: 157179 - DNA, 771 bp, synthetic construct
  misc_feature 1..771: note = Description of Artificial Sequence: Synthetic coding sequence
  source 1..771: mol_type = other DNA
atgcagcctgccaaggaggtgaccaaggccagtgatggcagcctgctgggggacctgggccacacccccctgagcaagaaggagggcatcaagtggcagaggccccggctgagccggcaggccctgatgcgctgctgcctggtgaagtggatcctgagcagcacagccccccagggcagtgacagcagtgacagcgagctggagctgagcacagtgcgccaccagcctgagggcctggaccagctgcaggcccagaccaagttcaccaagaaggagctgcagagcctgtaccggggcttcaagaatgaatgtcccaccggcctggtggatgaggacaccttcaagctgatctatgcccagttcttcccccagggagatgccaccacctacgcccacttcctgttcaatgcctttgatgctgatggaaatggagccatccactttgaagattttgtggtgggcctgagcatcctgctgcggggcaccgtgcatgagaagctgaagtgggccttcaacctgtatgacatcaacaaggatggctacatcaccaaggaggagatgctggccatcatgaagagcatctatgacatgatgggccgccacacctaccccatcctgcgggaggatgccccagctgagcacgtggagcgcttctttgagaagatggacaggaaccaggatggagtggtgaccatcgaggagttcctggaggcctgccagaaggatgagaacatcatgagctccatgcagctgtttgaaaatgtcatctag

SEQ ID NO: 157180 - DNA, 705 bp, synthetic construct
  misc_feature 1..705: note = Description of Artificial Sequence: Synthetic coding sequence
  source 1..705: mol_type = other DNA
atgcagcccaggaaggaggtgaccaaggccagtgatggcagcctgctgggggacctgggccacacccccctgagcaagaaggagggcatcaagtggcagaggccccggctgagccggcaggccctgatgcgctgctgcctggtgaagtggatcctgagcagcacagccccccagggcagtgacagcagtgacagcgagctggagctgagcacagtgcgccaccagcctgagggcctggaccagctgcaggcccagaccaagttcaccaagaaggagctgcagagcctgtaccggggcttcaagaatggagatgccaccacctacgcccacttcctgttcaatgcctttgatgctgatggaaatggagccatccactttgaagattttgtggtgggcctgagcatcctgctgcggggcaccgtgcatgagaagctgaagtgggccttcaacctgtatgacatcaacaaggatggctacatcaccaaggaggagatgctggccatcatgaagagcatctatgacatgatgggccgccacacctaccccatcctgcgggaggatgccccagctgagcacgtggagcgcttctttgagaagatggacaggaaccaggatggagtggtgaccatcgaggagttcctggaggcctgccagaaggatgagaacatcatgagctccatgcagctgtttgaaaatgtcatctag

SEQ ID NO: 157181 - DNA, 693 bp, synthetic construct
  misc_feature 1..693: note = Description of Artificial Sequence: Synthetic coding sequence
  source 1..693: mol_type = other DNA
atgggcatccagggcatggagctgtgtgccatggctgtggtggtgctgctcttcatcgctgtgctgaagcagtttggcatcctggagcccatctccatggaggacagcagtgacagcgagctggagctgagcacagtgcgccaccagcctgagggcctggaccagctgcaggcccagaccaagttcaccaagaaggagctgcagagcctgtaccggggcttcaagaatgaatgtcccaccggcctggtggatgaggacaccttcaagctgatctatgcccagttcttcccccagggagatgccaccacctacgcccacttcctgttcaatgcctttgatgctgatggaaatggagccatccactttgaagattttgtggtgggcctgagcatcctgctgcggggcaccgtgcatgagaagctgaagtgggccttcaacctgtatgacatcaacaaggatggctacatcaccaaggaggagatgctggccatcatgaagagcatctatgacatgatgggccgccacacctaccccatcctgcgggaggatgccccagctgagcacgtggagcgcttctttgagaagatggacaggaaccaggatggagtggtgaccatcgaggagttcctggaggcctgccagaaggatgagaacatcatgagctccatgcagctgtttgaaaatgtcatctag

SEQ ID NO: 157182 - DNA, 567 bp, synthetic construct
  misc_feature 1..567: note = Description of Artificial Sequence: Synthetic coding sequence
  source 1..567: mol_type = other DNA
atggccaccgtgcgccacaggcctgaggccctggagctgctggaggcccagagcaagttcaccaagaaggagctgcagatcctgtaccggggcttcaagaatgaatgtcccagcggcgtggtgaatgaggagaccttcaaggagatctacagccagttcttcccccagggcgacagcaccacctacgcccacttcctgttcaatgcctttgacacagaccacaatggagctgtgtcctttgaggacttcatcaagggcctgagcatcctgctgcggggcaccgtgcaggagaagctgaactgggccttcaacctgtatgacatcaacaaggatggctacatcaccaaggaggagatgctggacatcatgaaggccatctatgacatgatgggcaagtgcacctaccctgtgctgaaggaggatgccccccggcagcacgtggagaccttcttccagaagatggacaagaacaaggatggagtggtgaccattgatgagttcatcgagagctgccagaaggatgagaacatcatgaggtccatgcagctgtttgaaaatgtcatctag

SEQ ID NO: 157183 - DNA, 678 bp, synthetic construct
  misc_feature 1..678: note = Description of Artificial Sequence: Synthetic coding sequence
  source 1..678: mol_type = other DNA
atgagcggctgcaggaagcgctgcaagcgggagatcctgaagtttgcccagtacctgctgcggctgctgaccggcagcctgcacacagattctgtggaggatgagctggagatggccaccgtgcgccacaggcctgaggccctggagctgctggaggcccagagcaagttcaccaagaaggagctgcagatcctgtaccggggcttcaagaatgaatgtccttctggagtggtgaatgaggagaccttcaaggagatctacagccagttcttcccccagggcgacagcaccacctacgcccacttcctgttcaatgcctttgacacagaccacaacggggctgtgtcctttgaggacttcatcaagggcctgagcatcctgctgcggggcaccgtgcaggagaagctgaactgggccttcaacctgtatgacatcaacaaggatggctacatcaccaaggaggagatgctggacatcatgaaggccatctatgacatgatgggcaagtgcacctaccctgtgctgaaggaggatgccccccggcagcacgtggagaccttcttccagaagatggacaagaacaaggatggagtggtgaccattgatgagttcatcgagagctgccagaaggatgagaacatcatgaggtccatgcagctgtttgaaaatgtcatctag

SEQ ID NO: 157184 - DNA, 690 bp, synthetic construct
  misc_feature 1..690: note = Description of Artificial Sequence: Synthetic coding sequence
  source 1..690: mol_type = other DNA
atgaacctggagggcctggagatgattgctgtgctgattgtgattgtgctgtttgtgaagctgctggagcagtttggcctcatcgaggccggcctggaggacagcgtggaggatgagctggagatggccaccgtgcgccacaggcctgaggccctggagctgctggaggcccagagcaagttcaccaagaaggagctgcagatcctgtaccggggcttcaagaatgaatgtccttctggagtggtgaatgaggagaccttcaaggagatctacagccagttcttcccccagggcgacagcaccacctacgcccacttcctgttcaatgcctttgacacagaccacaacggggctgtgtcctttgaggacttcatcaagggcctgagcatcctgctgcggggcaccgtgcaggagaagctgaactgggccttcaacctgtatgacatcaacaaggatggctacatcaccaaggaggagatgctggacatcatgaaggccatctatgacatgatgggcaagtgcacctaccctgtgctgaaggaggatgccccccggcagcacgtggagaccttcttccagaagatggacaagaacaaggatggagtggtgaccattgatgagttcatcgagagctgccagaaggatgagaacatcatgaggtccatgcagctgtttgaaaatgtcatctag

SEQ ID NO: 157185 - DNA, 753 bp, synthetic construct
  misc_feature 1..753: note = Description of Artificial Sequence: Synthetic coding sequence
  source 1..753: mol_type = other DNA
atgaatgtgcggcgggtggagagcatcagcgcccagctggaggaggccagcagcactggaggcttcctgtatgcccagaacagcaccaagaggagcatcaaggagcggctgatgaagctgctgccctgcagcgctgccaagaccagcagccctgccatccagaacagcgtggaggatgagctggagatggccaccgtgcgccacaggcctgaggccctggagctgctggaggcccagagcaagttcaccaagaaggagctgcagatcctgtaccggggcttcaagaatgaatgtcccagcggcgtggtgaatgaggagaccttcaaggagatctacagccagttcttcccccagggcgacagcaccacctacgcccacttcctgttcaatgcctttgacacagaccacaatggagctgtgtcctttgaggacttcatcaagggcctgagcatcctgctgcggggcaccgtgcaggagaagctgaactgggccttcaacctgtatgacatcaacaaggatggctacatcaccaaggaggagatgctggacatcatgaaggccatctatgacatgatgggcaagtgcacctaccctgtgctgaaggaggatgccccccggcagcacgtggagaccttcttccagaagatggacaagaacaaggatggagtggtgaccattgatgagttcatcgagagctgccagaaggatgagaacatcatgaggtccatgcagctgtttgaaaatgtcatctag

SEQ ID NO: 157186 - DNA, 567 bp, synthetic construct; identical to SEQ ID NO: 157182
  misc_feature 1..567: note = Description of Artificial Sequence: Synthetic coding sequence
  source 1..567: mol_type = other DNA

SEQ ID NO: 157187 - DNA, 651 bp, synthetic construct
  misc_feature 1..651: note = Description of Artificial Sequence: Synthetic coding sequence
  source 1..651: mol_type = other DNA
atgaatgtgcggcgggtggagagcatcagcgcccagctggaggaggccagcagcactggagacagcgtggaggatgagctggagatggccaccgtgcgccacaggcctgaggccctggagctgctggaggcccagagcaagttcaccaagaaggagctgcagatcctgtaccggggcttcaagaatgaatgtcccagcggcgtggtgaatgaggagaccttcaaggagatctacagccagttcttcccccagggcgacagcaccacctacgcccacttcctgttcaatgcctttgacacagaccacaatggagctgtgtcctttgaggacttcatcaagggcctgagcatcctgctgcggggcaccgtgcaggagaagctgaactgggccttcaacctgtatgacatcaacaaggatggctacatcaccaaggaggagatgctggacatcatgaaggccatctatgacatgatgggcaagtgcacctaccctgtgctgaaggaggatgccccccggcagcacgtggagaccttcttccagaagatggacaagaacaaggatggagtggtgaccattgatgagttcatcgagagctgccagaaggatgagaacatcatgaggtccatgcagctgtttgaaaatgtcatctag

SEQ ID NO: 157188 - DNA, 567 bp, synthetic construct; identical to SEQ ID NO: 157182
  misc_feature 1..567: note = Description of Artificial Sequence: Synthetic coding sequence
  source 1..567: mol_type = other DNA

SEQ ID NO: 157189 - DNA, 549 bp, synthetic construct
  misc_feature 1..549: note = Description of Artificial Sequence: Synthetic coding sequence
  source 1..549: mol_type = other DNA
tgaggcatgaatgccggctttgaggactgcctggtgtttgatgagctgatggacaagttcagcaatgacctgagcctgtgcctgcctgtgttcagccggctgcgcatcccagatgaccacgccatcagtgacctgtccatgtacaactacatcgagatgagggcccacgtgaacagctcctggttcatcttccagaagaacatggagcgcttcctgcacgccatcatgcccagcaccttcatccccctgtacaccatggtgaccttcagccgcatccgctaccatgaagctgtgcagcgctggcactggcagaagaaggtgatcaacaagggcctcttcttcctgggcagcctgattgccatcagcagcacctacctgctgatccactacatgagccccaggagcttcctgcggctgcggcggccctggaactggatcgcccacttcaggaacaccacctgcttccctgccaaggctgtggacagcctggagcagatcagcaacctgatcagccggctgctgagccacagcgagatcctgcagacctag

SEQ ID NO: 157190 - DNA, 1359 bp, synthetic construct
  misc_feature 1..1359: note = Description of Artificial Sequence: Synthetic coding sequence
  source 1..1359: mol_type = other DNA
atggacagcagcgtcatccagaggaagaaggtggccgtcatcggcggcggcctggtgggcagcctgcaggcctgcttcctggccaagaggaacttccagattgatgtgtatgaggcccgggaggacaccagggtggccaccttcacccggggccgcagcatcaacctggccctgagccaccggggccggcaggccctgaaggctgtgggcctggaggaccagatcgtgtcccagggcatccccatgagggccaggatgatccacagcctgagcggcaagaagagcgccatcccctacggcaccaagagccagtacatcctgtctgtgtcccgggagaacctgaacaaggacctgctgacagctgctgagaagtacccaaatgtgaagatgcacttcaaccaccggctgctgaagtgcaaccctgaggagggcatgatcaccgtgctgggcagtgacaaggtgcccaaggatgtgacctgtgacctgattgtgggctgtgatggagcctacagcacagtgcgcagccacctgatgaagaagcccaggtttgactacagccagcagtacatcccccacggctacatggagctgaccatcccccccaagaatggagactatgccatggagcccaactacctgcacatctggcccaggaacaccttcatgatgattgccctgcccaacatgaacaagagcttcacctgcaccctcttcatgccctttgaggagtttgagaagctgctgaccagcaatgatgtggtggacttcttccagaagtacttcccagatgccatccccctcatcggggagaagctgctggtgcaggacttcttcctgctgcctgcccagcccatgatctctgtgaagtgcagcagcttccacttcaagagccactgtgtgctgctgggagatgctgcccacgccatcgtgcccttcttcggccagggcatgaatgccggctttgaggactgcctggtgtttgatgagctgatggacaagttcagcaatgacctgagcctgtgcctgcctgtgttcagccggctgcgcatcccagatgaccacgccatcagtgacctgtccatgtacaactacatcgaggtgaccttcagccgcatccgctaccatgaagctgtgcagcgctggcactggcagaagaaggtgatcaacaagggcctcttcttcctgggcagcctgattgccatcagcagcacctacctgctgatccactacatgagccccaggagcttcctgcggctgcggcggccctggaactggatcgcccacttcaggaacaccacctgcttccctgccaaggctgtggacagcctggagcagatcagcaacctgatcagcaggtag

SEQ ID NO: 157191 - DNA, 1422 bp, synthetic construct
  misc_feature 1..1422: note = Description of Artificial Sequence: Synthetic coding sequence
  source 1..1422: mol_type = other DNA
atggacagcagcgtcatccagaggaagaaggtggccgtcatcggcggcggcctggtgggcagcctgcaggcctgcttcctggccaagaggaacttccagattgatgtgtatgaggcccgggaggacaccagggtggccaccttcacccggggccgcagcatcaacctggccctgagccaccggggccggcaggccctgaaggctgtgggcctggaggaccagatcgtgtcccagggcatccccatgagggccaggatgatccacagcctgagcggcaagaagagcgccatcccctacggcaccaagagccagtacatcctgtctgtgtcccgggagaacctgaacaaggacctgctgacagctgctgagaagtacccaaatgtgaagatgcacttcaaccaccggctgctgaagtgcaaccctgaggagggcatgatcaccgtgctgggcagtgacaaggtgcccaaggatgtgacctgtgacctgattgtgggctgtgatggagcctacagcacagtgcgcagccacctgatgaagaagcccaggtttgactacagccagcagtacatcccccacggctacatggagctgaccatcccccccaagaatggagactatgccatggagcccaactacctgcacatctggcccaggaacaccttcatgatgattgccctgcccaacatgaacaagagcttcacctgcaccctcttcatgccctttgaggagtttgagaagctgctgaccagcaatgatgtggtggacttcttccagaagtacttcccagatgccatccccctcatcggggagaagctgctggtgcaggacttcttcctgctgcctgcccagcccatgatctctgtgaagtgcagcagcttccacttcaagagccactgtgtgctgctgggagatgctgcccacgccatcgtgcccttcttcggccagggcatgaatgccggctttgaggactgcctggtgtttgatgagctgatggacaagttcagcaatgacctgagcctgtgcctgcctgtgttcagccggctgcgcatcccagatgaccacgccatcagtgacctgtccatgtacaactacatcgagaagaacatggagcgcttcctgcacgccatcatgcccagcaccttcatccccctgtacaccatggtgaccttcagccgcatccgctaccacgaggccgtgcagcgctggcactggcagaagaaggtgatcaacaagggcctcttcttcctgggcagcctcatcgccatcagcagcacctacctgctgatccactacatgagccccaggagcttcctgcggctgcggcggccctggaactggatcgcccacttcaggaacaccacctgcttccctgccaaggctgtggacagcctggagcagatcagcaacctgatcagcaggtag

SEQ ID NO: 157192 - DNA, 1461 bp, synthetic construct
  misc_feature 1..1461: note = Description of Artificial Sequence: Synthetic coding sequence
  source 1..1461: mol_type = other DNA
atggacagcagcgtcatccagaggaagaaggtggccgtcatcggcggcggcctggtgggcagcctgcaggcctgcttcctggccaagaggaacttccagattgatgtgtatgaggcccgggaggacaccagggtggccaccttcacccggggccgcagcatcaacctggccctgagccaccggggccggcaggccctgaaggctgtgggcctggaggaccagatcgtgtcccagggcatccccatgagggccaggatgatccacagcctgagcggcaagaagagcgccatcccctacggcaccaagagccagtacatcctgtctgtgtcccgggagaacctgaacaaggacctgctgacagctgctgagaagtacccaaatgtgaagatgcacttcaaccaccggctgctgaagtgcaaccctgaggagggcatgatcaccgtgctgggcagtgacaaggtgcccaaggatgtgacctgtgacctgattgtgggctgtgatggagcctacagcacagtgcgcagccacctgatgaagaagcccaggtttgactacagccagcagtacatcccccacggctacatggagctgaccatcccccccaagaatggagactatgccatggagcccaactacctgcacatctggcccaggaacaccttcatgatgattgccctgcccaacatgaacaagagcttcacctgcaccctcttcatgccctttgaggagtttgagaagctgctgaccagcaatgatgtggtggacttcttccagaagtacttcccagatgccatccccctcatcggggagaagctgctggtgcaggacttcttcctgctgcctgcccagcccatgatctctgtgaagtgcagcagcttccacttcaagagccactgtgtgctgctgggagatgctgcccacgccatcgtgcccttcttcggccagggcatgaatgccggctttgaggactgcctggtgtttgatgagctgatggacaagttcagcaatgacctgagcctgtgcctgcctgtgttcagccggctgcgcatcccagatgaccacgccatcagtgacctgtccatgtacaactacatcgagatgagggcccacgtgaacagctcctggttcatcttccagaagaacatggagcgcttcctgcacgccatcatgcccagcaccttcatccccctgtacaccatggtgaccttcagccgcatccgctaccatgaagctgtgcagcgctggcactggcagaagaaggtgatcaacaagggcctcttcttcctgggcagcctgattgccatcagcagcacctacctgctgatccactacatgagccccaggagcttcctgcggctgcggcggccctggaactggatcgcccacttcaggaacaccacctgcttccctgccaaggctgtggacagcctggagcagatcagcaacctgatcagcaggtag

SEQ ID NO: 157193 - DNA, 1689 bp, synthetic construct
  misc_feature 1..1689: note = Description of Artificial Sequence: Synthetic coding sequence
  source 1..1689: mol_type = other DNA
atggagctgaagaaggacatcaatgctgtgtccattgacatgctgctgattgtgcacagcgagaagagaagagctgcccagggcaccctgagtgaccagcaggccaaccccagcagcctgctgcagaggggcggcggcttccagggcgtgggcaatggagtgcggcgctggcagaagctggagggcaatgacttccacgagaacctggtggagaagcagcacccccagcagccccaggtgatcaccagctacaacagccagggcacccagctgactgtggaggtgcaccccagagatgccatgccccagctgctgaagaagttcagcctggccaagaggctgcagggcgacaagaatggaaacacccggccccggcagcccggcggcaaggatgcccacgcctacccctgggacaggagcagcctgaagtccatgagcctggacctgcagcagtttgagaagctggacatctatgccagccaggtgacagccaagagcggcctggatgagctggtgtctgacctgctgcaggaggcccacacagacctggagcgggtgcgggccatctggatctggatctgccaccacattgaatatgacattgctgctgcccaggagaaggaccggcaggccttcaagcccacagacatcctgcggacccagaagaccaactgtgatggctacgccggcctgtttgagaggatgtgccgcctggccggcgtgcagtgcatgacagtgcccggctacagcaaaggatttggctaccagacaggccagagcttcagcggggagtttgaccacgcctggaatgctgtgtacctggagggccgctggcacctggtggacagcacctggggcagcggcctggtggacaccatcaccagcaagttcaccttcctgtacaatgagttctacttcctgacccacccagccctcttcatcgaggaccacttcccagacaacaagaactggcagctgctgaagccaccccagagcctgcggcagtttgagaacaacatgtaccacaagtctgagttctacaacaagggcatgctgagcgcccaccctgagacctccatgatcagaacagtgaatggcaaggccaccgtgaccatcgagagctgtgcccccaccctcttcatgttcatgctgaatggcaagcaggagcacggcctgctgagcctgaggaagaatggcatgaagctggaggtgtacccacccaccatgggcacccacaagctgcagatctttgccaagggcaacagcgacatctacagctctgtgctggagtacaccctgaagtgcaactacgtggacatgggcgtgcagctgcctgctgagctgcaccagcctgtgggccccagctggttcagcgagcagatgggcatcatgaagcccagccacccagaccccatcatccacaccagtgatggccgctgcagcatctccttctctgtggaggagggcatcaacgtgctggccagcctgcatggagatgatggccccatcacagaggagacccagaggcgctacatcttccagctgcaccgggagaagcagacagagctgaaggtgcagctgccccacgccggcaagtttgccctgaaggaggtgtatgtgatggtgctggagaatgccaaccacaacttctacagctacatcctgaagtacaaggtgaatgcccagtag

SEQ ID NO: 157194 - DNA, 1986 bp, synthetic construct
  misc_feature 1..1986: note = Description of Artificial Sequence: Synthetic coding sequence
  source 1..1986: mol_type = other DNA
atggagctgaagaaggacatcaatgctgtgtccattgacatgctgctgattgtgcacagcgagaagagaagagctgcccagggcaccctgagtgaccagcaggccaaccccagcagcctgctgcagaggggcggcggcttccagggcgtgggcaatggagtgcggcgctggcagaagctggagggcaatgacttccacgagaacctggtggagaagcagcacccccagcagccccaggtgatcaccagctacaacagccagggcacccagctgactgtggaggtgcaccccagagatgccatgccccagctgctgaagaagttcagcctggccaagaggctgcagggcgacaagaatggaaacacccggccccggcagcccggcggcaaggatgcccacgcctacccctgggacaggagcagcctgaagtccatgagcctggacctgcagcagtttgagaagctggacatctatgccagccaggtgacagccaagagcggcctggatgagctggtgtctgacctgctgcaggaggcccacacagacctggagcgggtgcgggccatctggatctggatctgccaccacattgaatatgacattgctgctgcccaggagaaggaccggcaggccttcaagcccacagacatcctgcggacccagaagaccaactgtgatggctacgccggcctgtttgagaggatgtgccgcctggccggcgtgcagtgcatgacagtgcccggctacagcaaaggatttggctaccagacaggccagagcttcagcggggagtttgaccacgcctggaatgctgtgtacctggagggccgctggcacctggtggacagcacctggggcagcggcctggtggacaccatcaccagcaagttcaccttcctgtacaatgagttctacttcctgacccacccagccctcttcatcgaggaccacttcccagacaacaagaactggcagctgctgaagccaccccagagcctgcggcagtttgagaacaacatgtaccacaagtctgagttctacaacaagggcatgctgagcgcccaccctgagacctccatgatcagaacagtgaatggcaaggccaccgtgaccatcgagagctgtgcccccaccctcttcatgttcatgctgaatggcaagcaggagcacggcctgctgagcctgaggaagaatggcatgaagctggaggtgtacccacccaccatgggcacccacaagctgcagatctttgccaagggcaacagcgacatctacagctctgtgctggagtacaccctgaagtgcaactacgtggacatgggcgtgcagctgcctgctgagctgcaccagcctgtgggccccagctggttcagcgagcagatgggcatcatgaagcccagccacccagaccccatcatccacaccagtgatggccgctgcagcatctccttctctgtggaggagggcatcaacgtgctggccagcctgcatggagatgatggccccatcacagaggagacccagaggcgctacatcttccagctgcaccgggagaagcagacagagctgaaggtgcagctgccccacgccggcaagtttgccctgaagatctttgtgaagaagaggcaggagcccggcaactacatctttgtgttcaactacctggtgtgctgtgccaacaccaaggtgaactggcccatgtttcctgagagctttggaaactggggccaggacaatgagctgctggagcccctgagcggcgtgctgcctgccaacagaaatgtgcccttcaagctgaagctgcacggcatcgccaaggtgctggtgaagggccaggacacctggcccctgaccctgaaccacgagggctactgggagggcagctgcagcacagctggctgccaggaggtgtatgtgatggtgctggagaatgccaaccacaacttctacagctacatcctgaagtacaaggtgaatgcccagtag

SEQ ID NO: 157195 - DNA, 1173 bp, synthetic construct
  misc_feature 1..1173: note = Description of Artificial Sequence: Synthetic coding sequence
  source 1..1173: mol_type = other DNA
atgaagctggaggccgtggacaggatgaaccccagcctggtgtgtgtggcctctgtgacagatgtggtggacagccgcttcctggtgcactttgacaactgggatgacacctatgactactggtgtgaccccagcagcccctacatccaccctgtgggctggtgccagaagcagggcaagcccctgaccccaccccaggactacccagaccctgacaacttctgctgggagaagtacctggaggagactggagccagcgctgtgcccacctgggccttcaaggtgcggcccccccacagcttcctggtgaacatgaagctggaggccgtggacagaagaaatcctgccctgatccgggtggcctctgtggaggatgtggaggaccaccgcatcaagatccactttgatggctggagccacggctatgacttctggattgatgctgaccacccagacatccaccctgctggctggtgcagcaagacaggccaccccctgcagccccccctgggcccccgggagcccagcagcgccagccctgggggctgcccccccctgagctaccgcagcctgccccacaccaggaccagcaagtacagcttccaccacaggaaatgtcccaccccaggctgtgatggcagcggccacgtgacaggcaagttcaccgcccaccactgcctgagcggctgccccctggccgagaggaaccagagccggctgaaggccgagctgagtgacagcgaggccagcgccaggaagaagaacctgagcggcttcagccccaggaagaagcccaggcaccacggcagaattggccggccccccaagtacaggaagatcccccaggaggacttccagaccctgaccccagatgtggtgcaccagagcctcttcatgtctgccctgagcgcccacccagacaggagcctgtctgtgtgctgggagcagcactgcaagctgctgcccggggtggccggcatcagcgccagcacagtggccaagtggaccattgatgaggtgtttggatttgtgcagaccctgaccggctgtgaggaccaggcccggctcttcaaggatgaggtgcgctgcaagtgccgggtgggggacagagctggggtgacagtgctgaagacagctggcagccgctgccccccccagaggcacttctgctag

SEQ ID NO: 157196 - DNA, 2232 bp, synthetic construct
  misc_feature 1..2232: note = Description of Artificial Sequence: Synthetic coding sequence
  source 1..2232: mol_type = other DNA
atgagaagaagagagggccatggaacagattctgagatgggccagggccctgtgcgggagagccagagcagtgaccccccagccctgcagttccgcatcagcgagtacaagcccctgaacatggccggcgtggagcagccccccagccctgagctgcggcaggagggcgtgacagaatatgaagatggaggagccccagctggagatggagaggccggcccccagcaggccgaggaccacccccagaaccccccagaggaccccaaccaggaccccccagaagatgacagcacctgccagtgccaggcctgtggcccccaccaggccgccggccctgacctgggcagcagcaatgatggctgcccccagctgttccaggagaggtctgtgattgtggagaacagcagcggcagcaccagcgccagcgagctgctgaagcccatgaagaagaggaagagaagagagtaccagagccccagcgaggaggagagcgagcctgaggccatggagaagcaggaggagggcaaggaccctgagggccagcccacagccagcaccccagagagcgaggagtggagcagcagccagcctgccactggagagaagaaggagtgctggagctgggagagctacctggaggagcagaaggccatcacagcccctgtgtccctcttccaggacagccaggccgtgacccacaacaagaatggcttcaagctgggcatgaagctggagggcatcgacccccagcaccccagcatgtacttcatcctgactgtggccgaggtgtgtggctaccgcctgcggctgcactttgatggctacagtgaatgtcatgacttctgggtgaatgccaacagcccagacatccaccctgctggctggtttgagaagacaggccacaagctgcagccccccaagggctacaaggaggaggagttctcctggagccagtacctgcggagcacccgggcccaggccgcccccaagcacctgtttgtgtcccagagccacagccccccacccctgggcttccaggtgggcatgaagctggaggccgtggacaggatgaaccccagcctggtgtgtgtggcctctgtgacagatgtggtggacagccgcttcctggtgcactttgacaactgggatgacacctatgactactggtgtgaccccagcagcccctacatccaccctgtgggctggtgccagaagcagggcaagcccctgaccccaccccaggactacccagaccctgacaacttctgctgggagaagtacctggaggagactggagccagcgctgtgcccacctgggccttcaaggtgcggcccccccacagcttcctggtgaacatgaagctggaggccgtggacagaagaaatcctgccctgatccgggtggcctctgtggaggatgtggaggaccaccgcatcaagatccactttgatggctggagccacggctatgacttctggattgatgctgaccacccagacatccaccctgctggctggtgcagcaagacaggccaccccctgcagccccccctgggcccccgggagcccagcagcgccagccctgggggctgcccccccctgagctaccgcagcctgccccacaccaggaccagcaagtacagcttccaccacaggctcttcttccccaggaagtgccccaccccaggctgtgatggcagcggccacgtgacaggcaagttcaccgcccaccactgcctgagcggctgccccctggccgagaggaaccagagccggctgaaggccgagctgagtgacagcgaggccagcgccaggaagaagaacctgagcggcttcagccccaggaagaagcccaggcaccacggccgcatcggccggccccccaagtacaggaagatcccccaggaggacttccagaccctgaccccagatgtggtgcaccagagcctcttcatgtctgccctgagcgcccacccagacaggagcctgtctgtgtgctgggagcagcactgcaagctgctgcccggggtggccggcatcagcgccagcacagtggccaagtggaccattgatgaggtgtttggatttgtgcagaccctgaccggctgtgaggaccaggcccggctcttcaaggatgaggtgcgctgcaagtgccgggtgggggaccgggccggcgtgacagtgctgaagacagctggcagccgctgccccccccagaggcacttctgctag

SEQ ID NO: 157197 - DNA, 2319 bp, synthetic construct
  misc_feature 1..2319: note = Description of Artificial Sequence: Synthetic coding sequence
  source 1..2319: mol_type = other DNA
atgagaagaagagagggccatggaacagattctgagatgggccagggccctgtgcgggagagccagagcagtgaccccccagccctgcagttccgcatcagcgagtacaagcccctgaacatggccggcgtggagcagccccccagccctgagctgcggcaggagggcgtgacagaatatgaagatggaggagccccagctggagatggagaggccggcccccagcaggccgaggaccacccccagaaccccccagaggaccccaaccaggaccccccagaagatgacagcacctgccagtgccaggcctgtggcccccaccaggccgccggccctgacctgggcagcagcaatgatggctgcccccagctgttccaggagaggtctgtgattgtggagaacagcagcggcagcaccagcgccagcgagctgctgaagcccatgaagaagaggaagagaagagagtaccagagccccagcgaggaggagagcgagcctgaggccatggagaagcaggaggagggcaaggaccctgagggccagcccacagccagcaccccagagagcgaggagtggagcagcagccagcctgccactggagagaagaaggagtgctggagctgggagagctacctggaggagcagaaggccatcacagcccctgtgtccctcttccaggacagccaggccgtgacccacaacaagaatggcttcaagctgggcatgaagctggagggcatcgacccccagcaccccagcatgtacttcatcctgactgtggccgaggtgtgtggctaccgcctgcggctgcactttgatggctacagtgaatgtcatgacttctgggtgaatgccaacagcccagacatccaccctgctggctggtttgagaagacaggccacaagctgcagccccccaagggctacaaggaggaggagttctcctggagccagtacctgcggagcacccgggcccaggccgcccccaagcacctgtttgtgtcccagagccacagccccccacccctgggcttccaggtgggcatgaagctggaggccgtggacaggatgaaccccagcctggtgtgtgtggcctctgtgacagatgtggtggacagccgcttcctggtgcactttgacaactgggatgacacctatgactactggtgtgaccccagcagcccctacatccaccctgtgggctggtgccagaagcagggcaagcccctgaccccaccccaggactacccagaccctgacaacttctgctgggagaagtacctggaggagactggagccagcgctgtgcccacctgggccttcaaggtgcggcccccccacagcttcctggtgaacatgaagctggaggccgtggacagaagaaatcctgccctgatccgggtggcctctgtggaggatgtggaggaccaccgcatcaagatccactttgatggctggagccacggctatgacttctggattgatgctgaccacccagacatccaccctgctggctggtgcagcaagacaggccaccccctgcagccccccctgggcccccgggagcccagcagcgccagccctgggggctgcccccccctgagctaccgcagcctgccccacaccaggaccagcaagtacagcttccaccacaggaaatgtcccaccccaggctgtgatggcagcggccacgtgacaggcaagttcaccgcccaccactgcctgagcggctgccccctggccgagaggaaccagagccggctgaaggccgagctgagtgacagcgaggccagcgccaggaagaagaacctgagcggcttcagccccaggaagaagcccaggcaccacggcagaattggccggccccccaagtacaggaagatcccccaggaggacttccagaccctgaccccagatgtggtgcaccagagcctcttcatgtctgccctgagcgcccacccagacaggagcctgtctgtgtgctgggagcagcactgcaagctgctgcccggggtggccggcatcagcgccagcacagtggccaagtggaccattgatgaggtgtttggatttgtgcagaccctgaccggctgtgaggaccaggcccggctcttcaaggatgaggccagaattgtgcgggtgacccacgtgtctgggaagaccctggtgtggacagtggcccagctgggggacctggtgtgcagcgaccacctgcaggagggcaagggcatcctggagactggagtgcacagcctgctgtgcagcctgcccacccacctgctggccaagctgagctttgccagtgacagccagtactag

SEQ ID NO: 157198 - DNA, 2523 bp, synthetic construct
  misc_feature 1..2523: note = Description of Artificial Sequence: Synthetic coding sequence
  source 1..2523: mol_type = other DNA
atgcacctggtggccggggacagccctggcagcggcccccacctgcctgccacagccttcatcatcccagccagcagcgccaccctgggcctgcccagcagcgccctggatgtgtcctgcttcccccgggagcccatccacgtgggcgcccctgagcaggtggccggctgtgagcctgtgtctgccaccgtgctgccccagctgtctgctggccctgccagcagcagcaccagcacagtgcggctgctggagtggacagaggccgccgcccctcctcctgggggcggcctgcgcttccgcatcagcgagtacaagcccctgaacatggccggcgtggagcagccccccagccctgagctgcggcaggagggcgtgacagaatatgaagatggaggagccccagctggagatggagaggccggcccccagcaggccgaggaccacccccagaaccccccagaggaccccaaccaggaccccccagaagatgacagcacctgccagtgccaggcctgtggcccccaccaggccgccggccctgacctgggcagcagcaatgatggctgcccccagctgttccaggagaggtctgtgattgtggagaacagcagcggcagcaccagcgccagcgagctgctgaagcccatgaagaagaggaagagaagagagtaccagagccccagcgaggaggagagcgagcctgaggccatggagaagcaggaggagggcaaggaccctgagggccagcccacagccagcaccccagagagcgaggagtggagcagcagccagcctgccactggagagaagaaggagtgctggagctgggagagctacctggaggagcagaaggccatcacagcccctgtgtccctcttccaggacagccaggccgtgacccacaacaagaatggcttcaagctgggcatgaagctggagggcatcgacccccagcaccccagcatgtacttcatcctgactgtggccgaggtgtgtggctaccgcctgcggctgcactttgatggctacagtgaatgtcatgacttctgggtgaatgccaacagcccagacatccaccctgctggctggtttgagaagacaggccacaagctgcagccccccaagggctacaaggaggaggagttctcctggagccagtacctgcggagcacccgggcccaggccgcccccaagcacctgtttgtgtcccagagccacagccccccacccctgggcttccaggtgggcatgaagctggaggccgtggacaggatgaaccccagcctggtgtgtgtggcctctgtgacagatgtggtggacagccgcttcctggtgcactttgacaactgggatgacacctatgactactggtgtgaccccagcagcccctacatccaccctgtgggctggtgccagaagcagggcaagcccctgaccccaccccaggactacccagaccctgacaacttctgctgggagaagtacctggaggagactggagccagcgctgtgcccacctgggccttcaaggtgcggcccccccacagcttcctggtgaacatgaagctggaggccgtggacagaagaaatcctgccctgatccgggtggcctctgtggaggatgtggaggaccaccgcatcaagatccactttgatggctggagccacggctatgacttctggattgatgctgaccacccagacatccaccctgctggctggtgcagcaagacaggccaccccctgcagccccccctgggcccccgggagcccagcagcgccagccctgggggctgcccccccctgagctaccgcagcctgccccacaccaggaccagcaagtacagcttccaccacaggaaatgtcccaccccaggctgtgatggcagcggccacgtgacaggcaagttcaccgcccaccactgcctgagcggctgccccctggccgagaggaaccagagccggctgaaggccgagctgagtgacagcgaggccagcgccaggaagaagaacctgagcggcttcagccccaggaagaagcccaggcaccacggcagaattggccggccccccaagtacaggaagatcccccaggaggacttccagaccctgaccccagatgtggtgcaccagagcctcttcatgtctgccctgagcgcccacccagacaggagcctgtctgtgtgctgggagcagcactgcaagctgctgcccggggtggccggcatcagcgccagcacagtggccaagtggaccattgatgaggtgtttggatttgtgcagaccctgaccggctgtgaggaccaggcccggctcttcaaggatgaggccagaattgtgcgggtgacccacgtgtctgggaagaccctggtgtggacagtggcccagctgggggacctggtgtgcagcgaccacctgcaggagggcaagggcatcctggagactggagtgcacagcctgctgtgcagcctgcccacccacctgctggccaagctgagctttgccagtgacagccagtactag

SEQ ID NO: 157199 - DNA, 1617 bp, synthetic construct
  misc_feature 1..1617: note = Description of Artificial Sequence: Synthetic coding sequence
  source 1..1617: mol_type = other DNA
cagaaggccatcacagcccctgtgtccctcttccaggacagccaggccgtgacccacaacaagaatggcttcaagctgggcatgaagctggagggcatcgacccccagcaccccagcatgtacttcatcctgactgtggccgaggtgtgtggctaccgcctgcggctgcactttgatggctacagtgaatgtcatgacttctgggtgaatgccaacagcccagacatccaccctgctggctggtttgagaagacaggccacaagctgcagccccccaagggctacaaggaggaggagttctcctggagccagtacctgcggagcacccgggcccaggccgcccccaagcacctgtttgtgtcccagagccacagccccccacccctgggcttccaggtgggcatgaagctggaggccgtggacaggatgaaccccagcctggtgtgtgtggcctctgtgacagatgtggtggacagccgcttcctggtgcactttgacaactgggatgacacctatgactactggtgtgaccccagcagcccctacatccaccctgtgggctggtgccagaagcagggcaagcccctgaccccaccccaggactacccagaccctgacaacttctgctgggagaagtacctggaggagactggagccagcgctgtgcccacctgggccttcaaggtgcggcccccccacagcttcctggtgaacatgaagctggaggccgtggacagaagaaatcctgccctgatccgggtggcctctgtggaggatgtggaggaccaccgcatcaagatccactttgatggctggagccacggctatgacttctggattgatgctgaccacccagacatccaccctgctggctggtgcagcaagacaggccaccccctgcagccccccctgggcccccgggagcccagcagcgccagccctgggggctgcccccccctgagctaccgcagcctgccccacaccaggaccagcaagtacagcttccaccacaggaaatgtcccaccccaggctgtgatggcagcggccacgtgacaggcaagttcaccgcccaccactgcctgagcggctgccccctggccgagaggaaccagagccggctgaaggccgagctgagtgacagcgaggccagcgccaggaagaagaacctgagcggcttcagccccaggaagaagcccaggcaccacggcagaattggccggccccccaagtacaggaagatcccccaggaggacttccagaccctgaccccagatgtggtgcaccagagcctcttcatgtctgccctgagcgcccacccagacaggagcctgtctgtgtgctgggagcagcactgcaagctgctgcccggggtggccggcatcagcgccagcacagtggccaagtggaccattgatgaggtgtttggatttgtgcagaccctgaccggctgtgaggaccaggcccggctcttcaaggatgagatgattgatggagaggccttcctgctgctgacccaggccgacatcgtgaagatcatgtctgtgaagctgggccctgccctgaagatctacaatgccatcctgatgttcaagaatgctgatgacaccctgaagtag

SEQ ID NO: 157200 - DNA, 2523 bp, synthetic construct; identical to SEQ ID NO: 157198
  misc_feature 1..2523: note = Description of Artificial Sequence: Synthetic coding sequence
  source 1..2523: mol_type = other DNA

SEQ ID NO: 157201 - DNA, 255 bp, synthetic construct
  misc_feature 1..255: note = Description of Artificial Sequence: Synthetic coding sequence
  source 1..255: mol_type = other DNA
atggccggcgtggagcagccccccagccctgagctgcggcaggagggcgtgacagaatatgaagatggaggagccccagctggagatggagaggccggcccccagcaggccgaggaccacccccagaaccccccagaggaccccaaccaggaccccccagaagatgacagcacctgccagtgccaggcctgtggcccccaccaggccgccggccctgacctgggcagcagcaatgatggctgcccccagctgtag

SEQ ID NO: 157202 - DNA, 417 bp, synthetic construct
  misc_feature 1..417: note = Description of Artificial Sequence: Synthetic coding sequence
  source 1..417: mol_type = other DNA
atgcacctggtggccggggacagccctggcagcggcccccacctgcctgccacagccttcatcatcccagccagcagcgccaccctgggcctgcccagcagcgccctggatgtgtcctgcttcccccgggagcccatccacgtgggcgcccctgagcaggtggccggctgtgagcctgtgtctgccaccgtgctgccccagctgtctgctggccctgccagcagcagcaccagcacagtgcggctgctggagtggacagaggccgccgcccctcctcctgggggcggcctgcgcttccgcatcagcgagtacaagcccctgaacatggccggcgtggagcagccccccagccctgagctgcggcaggagggcgtgacagaatatgaagatggaggagccccagctggagatggatag

SEQ ID NO: 157203 - DNA, 2217 bp, synthetic construct
  misc_feature 1..2217: note = Description of Artificial Sequence: Synthetic coding sequence
  source 1..2217: mol_type = other DNA
atgagaagaagagagggccatggaacagattctgagatgggccagggccctgtgcgggagagccagagcagtgaccccccagccctgcagttccgcatcagcgagtacaagcccctgaacatggccggcgtggagcagccccccagccctgagctgcggcaggagggcgtgacagaatatgaagatggaggagccccagctggagatggagaggccggcccccagcaggccgaggaccacccccagaaccccccagaggaccccaaccaggaccccccagaagatgacagcacctgccagtgccaggcctgtggcccccaccaggccgccggccctgacctgggcagcagcaatgatggctgcccccagctgttccaggagaggtctgtgattgtggagaacagcagcggcagcaccagcgccagcgagctgctgaagcccatgaagaagaggaagagaagagagtaccagagccccagcgaggaggagagcgagcctgaggccatggagaagcaggaggagggcaaggaccctgagggccagcccacagccagcaccccagagagcgaggagtggagcagcagccagcctgccactggagagaagaaggagtgctggagctgggagagctacctggaggagcagaaggccatcacagcccctgtgtccctcttccaggacagccaggccgtgacccacaacaagaatggcttcaagctgggcatgaagctggagggcatcgacccccagcaccccagcatgtacttcatcctgactgtggccgaggtgtgtggctaccgcctgcggctgcactttgatggctacagtgaatgtcatgacttctgggtgaatgccaacagcccagacatccaccctgctggctggtttgagaagacaggccacaagctgcagccccccaagggctacaaggaggaggagttctcctggagccagtacctgcggagcacccgggcccaggccgcccccaagcacctgtttgtgtcccagagccacagccccccacccctgggcttccaggtgggcatgaagctggaggccgtggacaggatgaaccccagcctggtgtgtgtggcctctgtgacagatgtggtggacagccgcttcctggtgcactttgacaactgggatgacacctatgactactggtgtgaccccagcagcccctacatccaccctgtgggctggtgccagaagcagggcaagcccctgaccccaccccaggactacccagaccctgacaacttctgctgggagaagtacctggaggagactggagccagcgctgtgcccacctgggccttcaaggtgcggcccccccacagcttcctggtgaacatgaagctggaggccgtggacagaagaaatcctgccctgatccgggtggcctctgtggaggatgtggaggaccaccgcatcaagatccactttgatggctggagccacggctatgacttctggattgatgctgaccacccagacatccaccctgctggctggtgcagcaagacaggccaccccctgcagccccccctgggcccccgggagcccagcagcgccagccctgggggctgcccccccctgagctaccgcagcctgccccacaccaggaccagcaagtacagcttccaccacaggaaatgtcccaccccaggctgtgatggcagcggccacgtgacaggcaagttcaccgcccaccactgcctgagcggctgccccctggccgagaggaaccagagccggctgaaggccgagctgagtgacagcgaggccagcgccaggaagaagaacctgagcggcttcagccccaggaagaagcccaggcaccacggcagaattggccggccccccaagtacaggaagatcccccaggaggacttccagaccctgaccccagatgtggtgcaccagagcctcttcatgtctgccctgagcgcccacccagacaggagcctgtctgtgtgctgggagcagcactgcaagctgctgcccggggtggccggcatcagcgccagcacagtggccaagtggaccattgatgaggtgtttggatttgtgcagaccctgaccggctgtgaggaccaggcccggctcttcaaggatgaggtgcgctgcaagtgccgggtgggggacagagctggggtgacagtgctgaagacagctggcagccgctgccccccccagaggcacttctgctag

SEQ ID NO: 157204 - DNA, 870 bp, synthetic construct
  misc_feature 1..870: note = Description of Artificial Sequence: Synthetic coding sequence
  source 1..870: mol_type = other DNA
tgaacatctggctccatgcccacccccctgaccttcaccctgctggccggcagcagaagaagagccaccagctgcagcctgcccaagagccccccacccctgggcttccaggtgggcatgaagctggaggccgtggacaggatgaaccccagcctggtgtgtgtggcctctgtgacagatgtggtggacagccgcttcctggtgcactttgacaactgggatgacacctatgactactggtgtgaccccagcagcccctacatccaccctgtgggctggtgccagaagcagggcaagcccctgaccccaccccaggactacccagaccctgacaacttctgctgggagaagtacctggaggagaccggggccagcgctgtgcccacctgggccttcaaggtgcggcccccccacagcttcctggtgaacatgaagctggaggccgtggacagaagaaatcctgccctgatccgggtggcctctgtggaggatgtggaggaccaccgcatcaagatccactttgatggctggagccacggctatgacttctggattgatgctgaccacccagacatccaccctgctggctggtgcagcaagacaggccaccccctgcagccccccctgggcccccgggagcccagcagcgccagccctgggggctgcccccccctgagctaccgcagcctgccccacaccaggaccagcaagtacagcttccaccacaggaagtgccccaccccaggctgtgatggcagcggccacgtgacaggcaagttcaccgcccaccactgcctgagcggctgccccctggccgagaggaaccagagccggctgaaggccgagctgagtgacagcgaggccagctag

SEQ ID NO: 157205 - DNA, 327 bp, synthetic construct
  misc_feature 1..327: note = Description of Artificial Sequence: Synthetic coding sequence
  source 1..327: mol_type = other DNA
atggctgctgccatggatgtggacaccccatctggcaccaacagcggggccggcaagaagagatttgaggtgaagaagtggaatgctgtggccctgtgggcctgggacatcgtggtggacaactgtgccatctgcaggaaccacatcatggacctgtgcatcgagtgccaggccaaccaggccagcgccaccagtgaagaatgtactgtggcctggggcgtgtgcaaccacgccttccacttccactgcatcagccgctggctgaagacccggcaggtgtgccccctggacaaccgggagtgggagttccagaagtatggccactag

SEQ ID NO: 157206 - DNA, 867 bp, synthetic construct
  misc_feature 1..867: note = Description of Artificial Sequence: Synthetic coding sequence
  source 1..867: mol_type = other DNA
tgaagaccccacctgcagaaccagtggaggaagaggaagatgaccacctggagctgcctggtggccatgattgtgtctggagtcatcacagctgtgtgggccgtgcgggccgcccccatctggaggagccaggtgaagcagaagatgagaattggcaagcagggcaactgcaggcctccccgctgcatctgcagcgccctgggcctgctggccccctggatggctgtggtgctgagccagggcaagccacccaccaagaaggccaaggtgctgcacaaggccgcctggagcgccaagatcggggccttcctgcacagccagggcaccggccagctggctgatggcacccccaccggccaggatgccctggtgctgggctttgactggggcaagttcctgaaggaccacagctacaaggccgcccctgtgtcctgcttcaagcacgtgcccctgtatgaccagtgggaggatgtgatgaagggcatgaaggtggaggtgctgaacagtgatgctgtgctgcccagccgggtgtactggatcgccagcgtcatccagacagctggctacagagtgctgctgcgctatgagggctttgaaaatgatgccagccatgacttctggtgcaacctgggcaccgtggatgtgcaccccatcggctggtgtgccatcaacagcaagatcctggtgccccccaggaccatccacgccaagttcacagactggaagggctacctgatgaagaggctggtgggcagcaggaccctgcctgtggacttccacatcaaggtgggcagcgagcccctgacagatgtgccccccagcgccctgcccttcttctgcatcctgcacgccacccactggagctag

SEQ ID NO: 157207 - DNA, 3762 bp, synthetic construct
  misc_feature 1..3762: note = Description of Artificial Sequence: Synthetic coding sequence
  source 1..3762: mol_type = other DNA
atggtggtggccctgcgctacgtgtggcccctgctgctgtgcagcccctgcctgctgatccagatccctgaggagtatgagggccaccacgtgatggagccccctgtgatcacagagcagagcccccggcggctggtggtgttccccacagatgacatcagcctgaagtgtgaggccagcggcaagccagaggtgcagttccgctggaccagagatggagtgcacttcaagcccaaggaggagctgggcgtgacagtgtaccagagcccccacagcggcagcttcaccatcaccggcaacaacagcaactttgcccagcgcttccagggcatctaccgctgctttgccagcaacaagctgggcacagccatgagccatgagatccggctgatggccgagggcgcccccaagtggcccaaggagaccgtgaagcctgtggaggtggaggagggggagagcgtggtgctgccctgcaaccccccaccttctgctgagcccctgcgcatctactggatgaacagcaagatcctgcacatcaagcaggatgagcgggtgaccatgggccagaatggaaacctgtactttgccaacgtgctgaccagtgacaaccacagcgactacatctgccacgcccacttccctggcaccaggaccatcatccagaaggagcccatcgacctgcgggtgaaggccaccaacagcatgattgacaggaagccccggctgctcttccccaccaacagcagcagccacctggtggccctgcagggccagcccctggtgctggagtgcatcgccgagggcttccccacccccaccatcaagtggctgcggcccagcggccccatgcctgctgacagagtgacctaccagaaccacaacaagaccctgcagctgctgaaggtgggggaggaggatgatggagagtaccgctgcctggccgagaacagcctgggcagcgcccggcatgcctactacgtgacagtggaggccgccccctactggctgcacaagccccagagccacctgtatggccctggagaaacagcccggctggactgccaggtgcagggccggccccagcctgaggtgacctggaggatcaatggcatccctgtggaggagctggccaaggaccagaagtaccgcatccagagaggagccctgatcctgagcaatgtgcagcccagcgacaccatggtgacccagtgtgaggccaggaacagacatggcctgctgctggccaatgcctacatctacgtggtgcagctgcctgccaagatcctgacagctgacaaccagacctacatggctgtgcagggcagcacagcctacctgctgtgcaaggcctttggagcccctgtgcccagcgtgcagtggctggatgaagatggcaccaccgtgctgcaggatgagcgcttcttcccctatgccaacggcaccctgggcatccgggacctgcaggccaatgacaccggccgctacttctgcctggccgccaatgaccagaacaacgtgaccatcatggccaacctgaaggtgaaggatgccacccagatcacccagggccccaggagcaccatcgagaagaagggcagccgggtgaccttcacctgccaggccagctttgaccccagcctgcagcccagcatcacctggagaggagatggccgggacctgcaggagctgggggacagcgacaagtacttcattgaagatggccgcctggtgatccacagcctggactacagcgaccagggcaactacagctgtgtggccagcacagagctggatgtggtggagagccgggcccagctgctggtggtgggcagccctggccctgtgccccggctggtgctgagtgacctgcacctgctgacccagagccaggtgcgggtgtcctggagccctgctgaggaccacaatgcccccatcgagaagtatgacatcgagtttgaggacaaggagatggcccctgagaagtggtacagcctgggcaaggtgcccggcaaccagaccagcaccaccctgaagctgagcccctacgtgcactacaccttccgggtgacagccatcaacaagtatggccctggagagcccagccctgtgtctgagaccgtggtgaccccagaggccgcccctgagaagaaccctgtggatgtgaagggggagggcaatgagaccaccaacatggtgatcacctggaagcccctgcgctggatggactggaatgccccccaggtgcagtacagagtgcagtggaggccccagggcacccggggcccctggcaggagcagatcgtgtctgaccccttcctggtggtgagcaacaccagcacctttgtgccctatgagatcaaggtgcaggccgtgaacagccagggcaagggccctgagccccaggtgaccatcggctacagcggggaggactacccccaggccatccctgagctggagggcatcgagatcctgaacagcagcgctgtgctggtgaagtggaggcctgtggacctggcccaggtgaagggccacctgcggggctacaacgtgacctactggagggagggcagccagaggaagcacagcaagaggcacatccacaaggaccacgtggtggtgcctgccaacaccaccagcgtcatcctgagcggcctgcggccctacagcagctaccacctggaggtgcaggccttcaacggccggggcagcggccctgccagcgagttcaccttcagcaccccagagggcgtgcccggccaccctgaggccctgcacctggagtgccagagcaacaccagcctgctgctgcgctggcagccccccctgagccacaatggagtgctgaccggctacgtgctgagctaccaccccctggatgaaggaggcaagggccagctgtccttcaacctgcgggaccctgagctgcggacccacaacctgacagacctgagcccccacctgcgctaccgcttccagctgcaggccaccaccaaggagggccctggagaggccatcgtgcgggagggcggcaccatggccctgagcggcatcagtgactttggaaacatcagcgccacagctggggagaactacagcgtggtgtcctgggtgcccaaggagggccagtgcaacttccgcttccacatcctcttcaaggccctgggggaggagaagggcggggccagcctgagcccccagtatgtgtcctacaaccagagcagctacacccagtgggacctgcagcctgacacagattatgagatccacctgttcaaggagaggatgttccgccaccagatggctgtgaagaccaatggaacaggccgggtgcggctgcccccagctggctttgccacagagggctggttcatcggctttgtgtctgccatcatcctgctgctgctggtgctgctgatcctgtgcttcatcaagaggagcaaaggaggcaagtacagcgtgaaggacaaggaggacacccaggtggacagcgaggcccggcccatgaaggatgagacctttggagagtacagcgacaatgaggagaaggccttcggcagcagccagcccagcctgaatggagacatcaagcccctgggcagtgatgacagcctggccgactatggaggctctgtggatgtgcagttcaatgaagatggcagcttcatcggccagtacagcggcaagaaggagaaggaggccgccggcggcaatgacagcagcggggccaccagccccatcaacccagctgtggccctggagtag

SEQ ID NO: 157208 - DNA, 3747 bp, synthetic construct
  misc_feature 1..3747: note = Description of Artificial Sequence: Synthetic coding sequence
  source 1..3747: mol_type = other DNA
atggtggtggccctgcgctacgtgtggcccctgctgctgtgcagcccctgcctgctgatccagatccctgaggagctgatggagccccctgtgatcacagagcagagcccccggcggctggtggtgttccccacagatgacatcagcctgaagtgtgaggccagcggcaagccagaggtgcagttccgctggaccagagatggagtgcacttcaagcccaaggaggagctgggcgtgacagtgtaccagagcccccacagcggcagcttcaccatcactggaaacaacagcaactttgcccagcgcttccagggcatctaccgctgctttgccagcaacaagctgggcacagccatgagccatgagatccggctgatggccgagggcgcccccaagtggcccaaggagaccgtgaagcctgtggaggtggaggagggggagagcgtggtgctgccctgcaaccccccacccagcgctgagcccctgcgcatctactggatgaacagcaagatcctgcacatcaagcaggatgagcgggtgaccatgggccagaatggaaacctgtactttgccaacgtgctgaccagtgacaaccacagcgactacatctgccacgcccacttccctggcaccaggaccatcatccagaaggagcccatcgacctgcgggtgaaggccaccaacagcatgattgacaggaagccccggctgctcttccccaccaacagcagcagccacctggtggccctgcagggccagcccctggtgctggagtgcatcgccgagggcttccccacccccaccatcaagtggctgcggcccagcggccccatgcctgctgacagagtgacctaccagaaccacaacaagaccctgcagctgctgaaggtgggggaggaggatgatggagagtaccgctgcctggccgagaacagcctgggcagcgcccggcatgcctactacgtgacagtggaggccgccccctactggctgcacaagccccagagccacctgtatggccctggagaaacagcccggctggactgccaggtgcagggccggccccagcctgaggtgacctggaggatcaatggcatccctgtggaggagctggccaaggaccagaagtaccgcatccagagaggagccctgatcctgagcaatgtgcagcccagcgacaccatggtgacccagtgtgaggccaggaacagacatggcctgctgctggccaatgcctacatctacgtggtgcagctgcctgccaagatcctgacagctgacaaccagacctacatggctgtgcagggcagcacagcctacctgctgtgcaaggccttcggggcccctgtgcccagcgtgcagtggctggatgaagatggcaccaccgtgctgcaggatgagcgcttcttcccctatgccaacggcaccctgggcatccgggacctgcaggccaatgacaccggccgctacttctgcctggccgccaatgaccagaacaacgtgaccatcatggccaacctgaaggtgaaggatgccacccagatcacccagggccccaggagcaccatcgagaagaagggcagccgggtgaccttcacctgccaggccagctttgaccccagcctgcagcccagcatcacctggagaggagatggccgggacctgcaggagctgggggacagcgacaagtacttcattgaagatggccgcctggtgatccacagcctggactacagcgaccagggcaactacagctgtgtggccagcacagagctggatgtggtggagagccgggcccagctgctggtggtgggcagccctggccctgtgccccggctggtgctgagtgacctgcacctgctgacccagagccaggtgcgggtgtcctggagccctgctgaggaccacaatgcccccatcgagaagtatgacattgaatttgaggacaaggagatggcccctgagaagtggtacagcctgggcaaggtgcccggcaaccagaccagcaccaccctgaagctgagcccctacgtgcactacaccttccgggtgacagccatcaacaagtatggccctggagagcccagccctgtgtctgaaacagtggtgaccccagaggccgcccctgagaagaaccctgtggatgtgaagggggagggcaatgagaccaccaacatggtgatcacctggaagcccctgcgctggatggactggaatgccccccaggtgcagtacagagtgcagtggaggccccagggcacccggggcccctggcaggagcagatcgtgtctgaccccttcctggtggtgagcaacaccagcacctttgtgccctatgagatcaaggtgcaggccgtgaacagccagggcaaaggacctgagccccaggtgaccatcggctacagcggggaggactacccccaggccatccctgagctggagggcatcgagatcctgaacagcagcgctgtgctggtgaagtggaggcctgtggacctggcccaggtgaagggccacctgcggggctacaacgtgacctactggagggagggcagccagaggaagcacagcaagaggcacatccacaaggaccacgtggtggtgcctgccaacaccaccagcgtcatcctgagcggcctgcggccctacagcagctaccacctggaggtgcaggccttcaacggccggggcagcggccctgccagcgagttcaccttcagcaccccagagggcgtgcccggccaccctgaggccctgcacctggagtgccagagcaacaccagcctgctgctgcgctggcagccccccctgagccacaacggggtgctgaccggctacgtgctgagctaccaccccctggatgagggcggcaagggccagctgtccttcaacctgcgggaccctgagctgcggacccacaacctgacagacctgagcccccacctgcgctaccgcttccagctgcaggccaccaccaaggagggccctggagaggccatcgtgcgggagggcggcaccatggccctgagcggcatcagtgactttggaaacatcagcgccacagctggggagaactacagcgtggtgtcctgggtgcccaaggagggccagtgcaacttccgcttccacatcctcttcaaggccctgggggaggagaagggcggggccagcctgagcccccagtatgtgtcctacaaccagagcagctacacccagtgggacctgcagcctgacacagattatgagatccacctgttcaaggagaggatgttccgccaccagatggctgtgaagaccaacggcaccggccgggtgcggctgcccccagctggctttgccacagagggctggttcatcggctttgtgtctgccatcatcctgctgctgctggtgctgctgatcctgtgcttcatcaagaggagcaagggcggcaagtacagcgtgaaggacaaggaggacacccaggtggacagcgaggcccggcccatgaaggatgagaccttcggggagtacagcgacaatgaggagaaggccttcggcagcagccagcccagcctgaatggagacatcaagcccctgggcagtgatgacagcctggccgactatggaggctctgtggatgtgcagttcaatgaagatggcagcttcatcggccagtacagcggcaagaaggagaaggaggccgccggcggcaatgacagcagcggggccaccagccccatcaacccagctgtggccctggagtag

SEQ ID NO: 157209 - DNA, 3747 bp, synthetic construct; identical to SEQ ID NO: 157208
  misc_feature 1..3747: note = Description of Artificial Sequence: Synthetic coding sequence
  source 1..3747: mol_type = other DNA

SEQ ID NO: 157210 - DNA, 3774 bp, synthetic construct
  misc_feature 1..3774: note = Description of Artificial Sequence: Synthetic coding sequence
  source 1..3774: mol_type = other DNA
atggtggtggccctgcgctacgtgtggcccctgctgctgtgcagcccctgcctgctgatccagatccctgaggagtatgagggccaccacgtgatggagccccctgtgatcacagagcagagcccccggcggctggtggtgttccccacagatgacatcagcctgaagtgtgaggccagcggcaagccagaggtgcagttccgctggaccagagatggagtgcacttcaagcccaaggaggagctgggcgtgacagtgtaccagagcccccacagcggcagcttcaccatcaccggcaacaacagcaactttgcccagcgcttccagggcatctaccgctgctttgccagcaacaagctgggcacagccatgagccatgagatccggctgatggccgagggcgcccccaagtggcccaaggagaccgtgaagcctgtggaggtggaggagggggagagcgtggtgctgccctgcaaccccccaccttctgctgagcccctgcgcatctactggatgaacagcaagatcctgcacatcaagcaggatgagcgggtgaccatgggccagaatggaaacctgtactttgccaacgtgctgaccagtgacaaccacagcgactacatctgccacgcccacttccctggcaccaggaccatcatccagaaggagcccatcgacctgcgggtgaaggccaccaacagcatgattgacaggaagccccggctgctcttccccaccaacagcagcagccacctggtggccctgcagggccagcccctggtgctggagtgcatcgccgagggcttccccacccccaccatcaagtggctgcggcccagcggccccatgcctgctgacagagtgacctaccagaaccacaacaagaccctgcagctgctgaaggtgggggaggaggatgatggagagtaccgctgcctggccgagaacagcctgggcagcgcccggcatgcctactacgtgacagtggaggccgccccctactggctgcacaagccccagagccacctgtatggccctggagaaacagcccggctggactgccaggtgcagggccggccccagcctgaggtgacctggaggatcaatggcatccctgtggaggagctggccaaggaccagaagtaccgcatccagagaggagccctgatcctgagcaatgtgcagcccagcgacaccatggtgacccagtgtgaggccaggaacagacatggcctgctgctggccaatgcctacatctacgtggtgcagctgcctgccaagatcctgacagctgacaaccagacctacatggctgtgcagggcagcacagcctacctgctgtgcaaggcctttggagcccctgtgcccagcgtgcagtggctggatgaagatggcaccaccgtgctgcaggatgagcgcttcttcccctatgccaacggcaccctgggcatccgggacctgcaggccaatgacaccggccgctacttctgcctggccgccaatgaccagaacaacgtgaccatcatggccaacctgaaggtgaaggatgccacccagatcacccagggccccaggagcaccatcgagaagaagggcagccgggtgaccttcacctgccaggccagctttgaccccagcctgcagcccagcatcacctggagaggagatggccgggacctgcaggagctgggggacagcgacaagtacttcattgaagatggccgcctggtgatccacagcctggactacagcgaccagggcaactacagctgtgtggccagcacagagctggatgtggtggagagccgggcccagctgctggtggtgggcagccctggccctgtgccccggctggtgctgagtgacctgcacctgctgacccagagccaggtgcgggtgtcctggagccctgctgaggaccacaatgcccccatcgagaagtatgacatcgagtttgaggacaaggagatggcccctgagaagtggtacagcctgggcaaggtgcccggcaaccagaccagcaccaccctgaagctgagcccctacgtgcactacaccttccgggtgacagccatcaacaagtatggccctggagagcccagccctgtgtctgagaccgtggtgaccccagaggccgcccctgagaagaaccctgtggatgtgaagggggagggcaatgagaccaccaacatggtgatcacctggaagcccctgcgctggatggactggaatgccccccaggtgcagtacagagtgcagtggaggccccagggcacccggggcccctggcaggagcagatcgtgtctgaccccttcctggtggtgagcaacaccagcacctttgtgccctatgagatcaaggtgcaggccgtgaacagccagggcaagggccctgagccccaggtgaccatcggctacagcggggaggactacccccaggccatccctgagctggagggcatcgagatcctgaacagcagcgctgtgctggtgaagtggaggcctgtggacctggcccaggtgaagggccacctgcggggctacaacgtgacctactggagggagggcagccagaggaagcacagcaagaggcacatccacaaggaccacgtggtggtgcctgccaacaccaccagcgtcatcctgagcggcctgcggccctacagcagctaccacctggaggtgcaggccttcaacggccggggcagcggccctgccagcgagttcaccttcagcaccccagagggcgtgcccggccaccctgaggccctgcacctggagtgccagagcaacaccagcctgctgctgcgctggcagccccccctgagccacaatggagtgctgaccggctacgtgctgagctaccaccccctggatgaaggaggcaagggccagctgtccttcaacctgcgggaccctgagctgcggacccacaacctgacagacctgagcccccacctgcgctaccgcttccagctgcaggccaccaccaaggagggccctggagaggccatcgtgcgggagggcggcaccatggccctgagcggcatcagtgactttggaaacatcagcgccacagctggggagaactacagcgtggtgtcctgggtgcccaaggagggccagtgcaacttccgcttccacatcctcttcaaggccctgggggaggagaagggcggggccagcctgagcccccagtatgtgtcctacaaccagagcagctacacccagtgggacctgcagcctgacacagattatgagatccacctgttcaaggagaggatgttccgccaccagatggctgtgaagaccaatggaacaggccgggtgcggctgcccccagctggctttgccacagagggctggttcatcggctttgtgtctgccatcatcctgctgctgctggtgctgctgatcctgtgcttcatcaagaggagcaaaggaggcaagtacagcgtgaaggacaaggaggacacccaggtggacagcgaggcccggcccatgaaggatgagacctttggagagtaccgcagcctggagagtgacaatgaggagaaggccttcggcagcagccagcccagcctgaatggagacatcaagcccctgggcagtgatgacagcctggccgactatggaggctctgtggatgtgcagttcaatgaagatggcagcttcatcggccagtacagcggcaagaaggagaaggaggccgccggcggcaatgacagcagcggggccaccagccccatcaacccagctgtggccctggagtag

SEQ ID NO: 157211 - DNA, 3774 bp, synthetic construct; identical to SEQ ID NO: 157210
  misc_feature 1..3774: note = Description of Artificial Sequence: Synthetic coding sequence
  source 1..3774: mol_type = other DNA

SEQ ID NO: 157212 - DNA, 456 bp, synthetic construct
  misc_feature 1..456: note = Description of Artificial Sequence: Synthetic coding sequence
  source 1..456: mol_type = other DNA
atggtggtggccctgcgctacgtgtggcccctgctgctgtgcagcccctgcctgctgatccagatccctgaggagtatgagggccaccacgtgatggagccccctgtgatcacagagcagagcccccggcggctggtggtgttccccacagatgacatcagcctgaagtgtgaggccagcggcaagccagaggtgcagttccgctggaccagagatggagtgcacttcaagcccaaggaggagctgggcgtgacagtgtaccagagcccccacagcggcagcttcaccatcaccggcaacaacagcaactttgcccagcgcttccagggcatctaccgctgctttgccagcaacaagctgggcacagccatgagccatgagatccggctgatggccgagggcgcccccaagtggcccaaggagaccgtgaagcctgtggaggtggaggagggctag

SEQ ID NO: 157213 - DNA, 255 bp, synthetic construct
  misc_feature 1..255: note = Description of Artificial Sequence: Synthetic coding sequence
  source 1..255: mol_type = other DNA
atggtggtggccctgcgctacgtgtggcccctgctgctgtgcagcccctgcctgctgatccagatccctgaggagtatgagggccaccacgtgatggagccccctgtgatcacagagcagagcccccggcggctggtggtgttccccacagatgacatcagcctgaagtgtgaggccagcggcaagccagaggtgcagttccgctggaccagagatggagtgcacttcaagcccaaggaggagctgggcgtgtag

SEQ ID NO: 157214 - DNA, 3768 bp, synthetic construct
  misc_feature 1..3768: note = Description of Artificial Sequence: Synthetic coding sequence
  source 1..3768: mol_type = other DNA
atggtggtggccctgcgctacgtgtggcccctgctgctgtgcagcccctgcctgctgatccagatccctgaggagagcttccctggccaccgggtggtgatggagccccctgtgatcacagagcagagcccccggcggctggtggtgttccccacagatgacatcagcctgaagtgtgaggccagcggcaagccagaggtgcagttccgctggaccagagatggagtgcacttcaagcccaaggaggagctgggcgtgacagtgtaccagagcccccacagcggcagcttcaccatcaccggcaacaacagcaactttgcccagcgcttccagggcatctaccgctgctttgccagcaacaagctgggcacagccatgagccatgagatccggctgatggccgagggcgcccccaagtggcccaaggagaccgtgaagcctgtggaggtggaggagggggagagcgtggtgctgccctgcaaccccccaccttctgctgagcccctgcgcatctactggatgaacagcaagatcctgcacatcaagcaggatgagcgggtgaccatgggccagaatggaaacctgtactttgccaacgtgctgaccagtgacaaccacagcgactacatctgccacgcccacttccctggcaccaggaccatcatccagaaggagcccatcgacctgcgggtgaaggccaccaacagcatgattgacaggaagccccggctgctcttccccaccaacagcagcagccacctggtggccctgcagggccagcccctggtgctggagtgcatcgccgagggcttccccacccccaccatcaagtggctgcggcccagcggccccatgcctgctgacagagtgacctaccagaaccacaacaagaccctgcagctgctgaaggtgggggaggaggatgatggagagtaccgctgcctggccgagaacagcctgggcagcgcccggcatgcctactacgtgacagtggaggccgccccctactggctgcacaagccccagagccacctgtatggccctggagaaacagcccggctggactgccaggtgcagggccggccccagcctgaggtgacctggaggatcaatggcatccctgtggaggagctggccaaggaccagaagtaccgcatccagagaggagccctgatcctgagcaatgtgcagcccagcgacaccatggtgacccagtgtgaggccaggaacagacatggcctgctgctggccaatgcctacatctacgtggtgcagctgcctgccaagatcctgacagctgacaaccagacctacatggctgtgcagggcagcacagcctacctgctgtgcaaggcctttggagcccctgtgcccagcgtgcagtggctggatgaagatggcaccaccgtgctgcaggatgagcgcttcttcccctatgccaacggcaccctgggcatccgggacctgcaggccaatgacaccggccgctacttctgcctggccgccaatgaccagaacaacgtgaccatcatggccaacctgaaggtgaaggatgccacccagatcacccagggccccaggagcaccatcgagaagaagggcagccgggtgaccttcacctgccaggccagctttgaccccagcctgcagcccagcatcacctggagaggagatggccgggacctgcaggagctgggggacagcgacaagtacttcattgaagatggccgcctggtgatccacagcctggactacagcgaccagggcaactacagctgtgtggccagcacagagctggatgtggtggagagccgggcccagctgctggtggtgggcagccctggccctgtgccccggctggtgctgagtgacctgcacctgctgacccagagccaggtgcgggtgtcctggagccctgctgaggaccacaatgcccccatcgagaagtatgacatcgagtttgaggacaaggagatggcccctgagaagtggtacagcctgggcaaggtgcccggcaaccagaccagcaccaccctgaagctgagcccctacgtgcactacaccttccgggtgacagccatcaacaagtatggccctggagagcccagccctgtgtctgagaccgtggtgaccccagaggccgcccctgagaagaaccctgtggatgtgaagggggagggcaatgagaccaccaacatggtgatcacctggaagcccctgcgctggatggactggaatgccccccaggtgcagtacagagtgcagtggaggccccagggcacccggggcccctggcaggagcagatcgtgtctgaccccttcctggtggtgagcaacaccagcacctttgtgccctatgagatcaaggtgcaggccgtgaacagccagggcaagggccctgagccccaggtgaccatcggctacagcggggaggactacccccaggccatccctgagctggagggcatcgagatcctgaacagcagcgctgtgctggtgaagtggaggcctgtggacctggcccaggtgaagggccacctgcggggctacaacgtgacctactggagggagggcagccagaggaagcacagcaagaggcacatccacaaggaccacgtggtggtgcctgccaacaccaccagcgtcatcctgagcggcctgcggccctacagcagctaccacctggaggtgcaggccttcaacggccggggcagcggccctgccagcgagttcaccttcagcaccccagagggcgtgcccggccaccctgaggccctgcacctggagtgccagagcaacaccagcctgctgctgcgctggcagccccccctgagccacaatggagtgctgaccggctacgtgctgagctaccaccccctggatgaaggaggcaagggccagctgtccttcaacctgcgggaccctgagctgcggacccacaacctgacagacctgagcccccacctgcgctaccgcttccagctgcaggccaccaccaaggagggccctggagaggccatcgtgcgggagggcggcaccatggccctgagcggcatcagtgactttggaaacatcagcgccacagctggggagaactacagcgtggtgtcctgggtgcccaaggagggccagtgcaacttccgcttccacatcctcttcaaggccctgggggaggagaagggcggggccagcctgagcccccagtatgtgtcctacaaccagagcagctacacccagtgggacctgcagcctgacacagattatgagatccacctgttcaaggagaggatgttccgccaccagatggctgtgaagaccaatggaacaggccgggtgcggctgcccccagctggctttgccacagagggctggttcatcggctttgtgtctgccatcatcctgctgctgctggtgctgctgatcctgtgcttcatcaagaggagcaaaggaggcaagtacagcgtgaaggacaaggaggacacccaggtggacagcgaggcccggcccatgaaggatgagacctttggagagtacagcgacaatgaggagaaggccttcggcagcagccagcccagcctgaatggagacatcaagcccctgggcagtgatgacagcctggccgactatggaggctctgtggatgtgcagttcaatgaagatggcagcttcatcggccagtacagcggcaagaaggagaaggaggccgccggcggcaatgacagcagcggggccaccagccccatcaacccagctgtggccctggagtag

SEQ ID NO: 157215 - DNA, 351 bp, synthetic construct
  misc_feature 1..351: note = Description of Artificial Sequence: Synthetic coding sequence
  source 1..351: mol_type = other DNA
atggccgagggcgcccccaagtggcccaaggagaccgtgaagcctgtggaggtggaggagggggagagcgtggtgctgccctgcaaccccccaccttctgctgagcccctgcgcatctactggatgaacagcaagatcctgcacatcaagcaggatgagcgggtgaccatgggccagaatggaaacctgtactttgccaacgtgctgaccagtgacaaccacagcgactacatctgccacgcccacttccctggcaccaggaccatcatccagaaggagcccatcgacctgcgggtgaaggccaccaacagcatgattgacaggaagccccggctgctcttccccacctag

SEQ ID NO: 157216 - DNA, 3780 bp, synthetic construct
  misc_feature 1..3780: note = Description of Artificial Sequence: Synthetic coding sequence
  source 1..3780: mol_type = other DNA
atggtggtggccctgcgctacgtgtggcccctgctgctgtgcagcccctgcctgctgatccagatccctgaggagagcttccctggccaccgggtggtgatggagccccctgtgatcacagagcagagcccccggcggctggtggtgttccccacagatgacatcagcctgaagtgtgaggccagcggcaagccagaggtgcagttccgctggaccagagatggagtgcacttcaagcccaaggaggagctgggcgtgacagtgtaccagagcccccacagcggcagcttcaccatcaccggcaacaacagcaactttgcccagcgcttccagggcatctaccgctgctttgccagcaacaagctgggcacagccatgagccatgagatccggctgatggccgagggcgcccccaagtggcccaaggagaccgtgaagcctgtggaggtggaggagggggagagcgtggtgctgccctgcaaccccccaccttctgctgagcccctgcgcatctactggatgaacagcaagatcctgcacatcaagcaggatgagcgggtgaccatgggccagaatggaaacctgtactttgccaacgtgctgaccagtgacaaccacagcgactacatctgccacgcccacttccctggcaccaggaccatcatccagaaggagcccatcgacctgcgggtgaaggccaccaacagcatgattgacaggaagccccggctgctcttccccaccaacagcagcagccacctggtggccctgcagggccagcccctggtgctggagtgcatcgccgagggcttccccacccccaccatcaagtggctgcggcccagcggccccatgcctgctgacagagtgacctaccagaaccacaacaagaccctgcagctgctgaaggtgggggaggaggatgatggagagtaccgctgcctggccgagaacagcctgggcagcgcccggcatgcctactacgtgacagtggaggccgccccctactggctgcacaagccccagagccacctgtatggccctggagaaacagcccggctggactgccaggtgcagggccggccccagcctgaggtgacctggaggatcaatggcatccctgtggaggagctggccaaggaccagaagtaccgcatccagagaggagccctgatcctgagcaatgtgcagcccagcgacaccatggtgacccagtgtgaggccaggaacagacatggcctgctgctggccaatgcctacatctacgtggtgcagctgcctgccaagatcctgacagctgacaaccagacctacatggctgtgcagggcagcacagcctacctgctgtgcaaggcctttggagcccctgtgcccagcgtgcagtggctggatgaagatggcaccaccgtgctgcaggatgagcgcttcttcccctatgccaacggcaccctgggcatccgggacctgcaggccaatgacaccggccgctacttctgcctggccgccaatgaccagaacaacgtgaccatcatggccaacctgaaggtgaaggatgccacccagatcacccagggccccaggagcaccatcgagaagaagggcagccgggtgaccttcacctgccaggccagctttgaccccagcctgcagcccagcatcacctggagaggagatggccgggacctgcaggagctgggggacagcgacaagtacttcattgaagatggccgcctggtgatccacagcctggactacagcgaccagggcaactacagctgtgtggccagcacagagctggatgtggtggagagccgggcccagctgctggtggtgggcagccctggccctgtgccccggctggtgctgagtgacctgcacctgctgacccagagccaggtgcgggtgtcctggagccctgctgaggaccacaatgcccccatcgagaagtatgacatcgagtttgaggacaaggagatggcccctgagaagtggtacagcctgggcaaggtgcccggcaaccagaccagcaccaccctgaagctgagcccctacgtgcactacaccttccgggtgacagccatcaacaagtatggccctggagagcccagccctgtgtctgagaccgtggtgaccccagaggccgcccctgagaagaaccctgtggatgtgaagggggagggcaatgagaccaccaacatggtgatcacctggaagcccctgcgctggatggactggaatgccccccaggtgcagtacagagtgcagtggaggccccagggcacccggggcccctggcaggagcagatcgtgtctgaccccttcctggtggtgagcaacaccagcacctttgtgccctatgagatcaaggtgcaggccgtgaacagccagggcaagggccctgagccccaggtgaccatcggctacagcggggaggactacccccaggccatccctgagctggagggcatcgagatcctgaacagcagcgctgtgctggtgaagtggaggcctgtggacctggcccaggtgaagggccacctgcggggctacaacgtgacctactggagggagggcagccagaggaagcacagcaagaggcacatccacaaggaccacgtggtggtgcctgccaacaccaccagcgtcatcctgagcggcctgcggccctacagcagctaccacctggaggtgcaggccttcaacggccggggcagcggccctgccagcgagttcaccttcagcaccccagagggcgtgcccggccaccctgaggccctgcacctggagtgccagagcaacaccagcctgctgctgcgctggcagccccccctgagccacaatggagtgctgaccggctacgtgctgagctaccaccccctggatgaaggaggcaagggccagctgtccttcaacctgcgggaccctgagctgcggacccacaacctgacagacctgagcccccacctgcgctaccgcttccagctgcaggccaccaccaaggagggccctggagaggccatcgtgcgggagggcggcaccatggccctgagcggcatcagtgactttggaaacatcagcgccacagctggggagaactacagcgtggtgtcctgggtgcccaaggagggccagtgcaacttccgcttccacatcctcttcaaggccctgggggaggagaagggcggggccagcctgagcccccagtatgtgtcctacaaccagagcagctacacccagtgggacctgcagcctgacacagattatgagatccacctgttcaaggagaggatgttccgccaccagatggctgtgaagaccaatggaacaggccgggtgcggctgcccccagctggctttgccacagagggctggttcatcggctttgtgtctgccatcatcctgctgctgctggtgctgctgatcctgtgcttcatcaagaggagcaaaggaggcaagtacagcgtgaaggacaaggaggacacccaggtggacagcgaggcccggcccatgaaggatgagacctttggagagtaccgcagcctggagagtgacaatgaggagaaggccttcggcagcagccagcccagcctgaatggagacatcaagcccctgggcagtgatgacagcctggccgactatggaggctctgtggatgtgcagttcaatgaagatggcagcttcatcggccagtacagcggcaagaaggagaaggaggccgccggcggcaatgacagcagcggggccaccagccccatcaacccagctgtggccctggagtag

SEQ ID NO: 157217 - DNA, 1326 bp, synthetic construct
  misc_feature 1..1326: note = Description of Artificial Sequence: Synthetic coding sequence
  source 1..1326: mol_type = other DNA
atggtgcctgccctgcgctacctggtgggcgcctgtggccgggcccggggcctgtttgctgggggcagccctggggcctgtggctttgccagcggccggccccggcccctgtgtggcggcagccgcagcgccagcaccagcagctttgatattgtgattgtgggcggcggcatcgtgggcctggccagcgcccgggccctgatcctgcggcaccccagcctgagcattggagtgctggagaaggagaaggacctggccgtgcaccagacaggccacaacagcggggtcatccacagcggcatctactacaagccagagagcctgaaggccaagctgtgtgtgcagggcgccgccctgctgtatgagtactgccagcagaagggcatctcctacaagcagtgtgggaagctgattgtggccgtggagcaggaggagatcccccggctgcaggccctgtatgagaagggcctgcagaatggagtgcccggcctgcggctcatccagcaggaggacatcaagaagaaggagccctactgccggggcctgatggccatcgactgcccccacacaggcatcgtggactaccggcaggtggccctgagctttgcccaggacttccaggaggccggcggctctgtgctgaccaactttgaggtgaagggcatcgagatggccaaggagagccccagccgcagcattgatggcatgcagtaccccatcgtcatcaagaacaccaagggggaggagatccgctgccagtatgtggtgacctgtgccggcctgtacagcgaccgcatcagcgagctgagcggctgcaccccagacccccgcatcgtgcccttccggggggactacctgctgctgaagccagagaagtgctacctggtgaagggcaacatctaccctgtgcctgacagccgcttccccttcctgggcgtgcacttcacccccaggatggatggcagcatctggctgggccccaatgctgtgctggccttcaagcgggagggctaccggccctttgacttcagcgccacagatgtgatggacatcatcatcaacagcggcctcatcaagctggccagccagaacttctcctatggagtgacagagatgtacaaggcctgcttcctgggcgccaccgtgaagtacctgcagaagttcatccctgagatcaccatcagtgacatcctgcggcaggtggccgtgcggggccccagctggctgtggcagcagcccatgaaggtgtctgacaacaacatctactgcttcctgtggcgctgctttgccctgctgctgaccggcagcgcctgcagcttcaagtag

SEQ ID NO: 157218 - DNA, 1392 bp, synthetic construct
  misc_feature 1..1392: note = Description of Artificial Sequence: Synthetic coding sequence
  source 1..1392: mol_type = other DNA
atggtgcctgccctgcgctacctggtgggcgcctgtggccgggcccggggcctgtttgctgggggcagccctggggcctgtggctttgccagcggccggccccggcccctgtgtggcggcagccgcagcgccagcaccagcagctttgatattgtgattgtgggcggcggcatcgtgggcctggccagcgcccgggccctgatcctgcggcaccccagcctgagcattggagtgctggagaaggagaaggacctggccgtgcaccagacaggccacaacagcggggtcatccacagcggcatctactacaagccagagagcctgaaggccaagctgtgtgtgcagggcgccgccctgctgtatgagtactgccagcagaagggcatctcctacaagcagtgtgggaagctgattgtggccgtggagcaggaggagatcccccggctgcaggccctgtatgagaagggcctgcagaatggagtgcccggcctgcggctcatccagcaggaggacatcaagaagaaggagccctactgccggggcctgatggccatcgactgcccccacacaggcatcgtggactaccggcaggtggccctgagctttgcccaggacttccaggaggccggcggctctgtgctgaccaactttgaggtgaagggcatcgagatggccaaggagagccccagccgcagcattgatggcatgcagtaccccatcgtcatcaagaacaccaagggggaggagatccgctgccagtatgtggtgacctgtgccggcctgtacagcgaccgcatcagcgagctgagcggctgcaccccagacccccgcatcgtgcccttccggggggactacctgctgctgaagccagagaagtgctacctggtgaagggcaacatctaccctgtgcctgacagccgcttccccttcctgggcgtgcacttcacccccaggatggatggcagcatctggctgggccccaatgctgtgctggccttcaagcgggagggctaccggccctttgacttcagcgccacagatgtgatggacatcatcatcaacagcggcctcatcaagctggccagccagaacttctcctatggagtgacagagatgtacaaggcctgcttcctgggcgccaccgtgaagtacctgcagaagttcatccctgagatcaccatcagtgacatcctgcggggccctgctggggtgcgggcccaggccctggacagagatggcaacctggtggaggactttgtgtttgatgctggggtgggggacatcggcaaccgcatcctgcacgtgagaaatgcccccagccctgctgccaccagcagcatcgccatcagcggcatgattgctgatgaggtgcagcagagatttgagctgtag

SEQ ID NO: 157219 - DNA, 1392 bp, synthetic construct; identical to SEQ ID NO: 157218
  misc_feature 1..1392: note = Description of Artificial Sequence: Synthetic coding sequence
  source 1..1392: mol_type = other DNA

SEQ ID NO: 157220 - DNA, 3060 bp, synthetic construct
  misc_feature 1..3060: note = Description of Artificial Sequence: Synthetic coding sequence
  source 1..3060: mol_type = other DNA
atgctgtggagggtgctgctgagcaagaggcctcccttcccccaccctgagctggacttccaggaggcccccatccccagctgccccggccgcctgcccggcaggaagaacagcgtggccctggccgccgcccccaggaaggagcccaccggggaccgggagaagcccctgcccttccctgtgctggcccccttcagcaaccctgagcacagcgccccagccaaggtggtgcgggctgctgtgcccaagcagaggaagggcagcaaggtgggggactttggagatgccatcaactggcccaccccaggagaaattgcccacaagtctgtgcagccccagagccacaagccccagcccaccaggaagctgccccccaagaaggacatgaaggagcaggagaagggggagggcagtgacagcaaggagagccccaagaccaagagtgatgaaagtggagaggagaagaatggagatgaggactgccagaggggcggccagaagaagaagggcaacaagcacaagtgggtgcccctgcagattgacatgaagccagaggtgccccgggagaagctggccagccggcccacccggcccccagagcccaggcacatcccagccaacagaggagagatcaagggcagcgagagcgccacctacgtgcctgtggccccacccaccccagcctggcagcctgagatcaagccagagcccgcctggcatgaccaggatgagaccagctctgtgaagagtgatggagctggaggagcccgggccagcttccggggccggggccggggccggggccggggccggggccggggccggggcggcaccaggacccactttgactaccagtttggctacaggaagtttgatggagtggagggccccaggacccccaagtacatgaacaacatcacctactactttgacaacgtgagcagcacagagctgtacagcgtggaccaggagctgctgaaggactacatcaagaggcagatcgagtactacttctctgtggacaacctggagcgggacttcttcctgcggaggaagatggatgctgatggcttcctgcccatcaccctcatcgccagcttccaccgggtgcaggccctgaccacagacatcagcctcatctttgctgccctgaaggacagcaaggtggtggagatcgtggatgagaaggtgagaagaagagaggagcctgagaagtggcccctgccccccatcgtggactacagccagacagacttcagccagctgctgaactgcccagagtttgtgccccggcagcactaccagaaggagacagagagcgcccctggcagccccagggctgtgacccctgtgcccaccaagacagaggaggtgagcaacctgaagaccctgcccaagggcctgagcgccagcctgcctgacctggacagcgagaactggattgaggtgaagaagaggccccggcccagccctgcccggcccaagaagtctgaggagagccgcttcagccacctgaccagcctgccccagcagctgcccagccagcagctgatgagcaaggaccaggatgagcaggaggagctggacttcctgtttgatgaggagatggagcagatggatggcaggaagaacaccttcaccgcctggagcgatgaggagagtgactatgaaattgatgacagagatgtgaacaagatcctgattgtgacccagaccccccactacatgagaagacaccctggaggagacagaactggaaaccacaccagccgggccaagatgtctgctgagctggccaaggtgatcaatgatggcctcttctactatgagcaggacctgtgggccgagaagtttgagcctgagtacagccagatcaagcaggaggtggagaacttcaagaaggtgaacatgatcagccgggagcagtttgacaccctgaccccagagccccctgtggaccccaaccaggaggtgcccccaggccccccacgcttccagcaggtgcccacagatgccctggccaacaagctgtttggagcccctgagcccagcaccatcgcccggagcctgcccaccaccgtgcctgagagccccaactacagaaacaccaggacccccaggacccccaggaccccccagctgaaggacagcagccagaccagccgcttctaccctgtggtgaaggagggccgcaccctggatgccaagatgcccaggaagaggaagaccaggcacagcagcaacccccccctggagagccacgtgggctgggtgatggacagccgggagcaccggcccaggacagccagcatcagcagcagccccagcgagggcacccccaccgtgggcagctatggctgcaccccccagagcctgcccaagttccagcaccccagccatgagctgctgaaggaaaatggcttcacccagcacgtgtaccacaagtacagaagacgctgcctgaatgaaaggaagaggctgggcatcggccagagccaggagatgaacaccctcttccgcttctggagcttcttcctgcgggaccacttcaacaagaagatgtatgaggagttcaagcagctggccctggaggatgccaaggagggctaccgctatggcctggagtgcctcttccgctactacagctatggcctggagaagaagttccggctggacatcttcaaggacttccaggaggagaccgtgaaggactatgaagctggccagctgtatggcctggagaagttctgggccttcctgaagtacagcaaggccaagaacctggacatcgaccccaagctgcaggagtacctgggcaagttccggcggctggaggacttccgggtggacccccccatgggagaggagggcaaccacaagaggcacagcgtggtggccggcggcggcggcggggagggcaggaagcgctgccccagccagagcagcagcaggcctgctgccatgatcagccagccccccaccccacccaccggccagcctgtgagagaagatgccaagtggaccagccagcacagcaacacccagaccctgggcaagtag

SEQ ID NO: 157221 - DNA, 2451 bp, synthetic construct
  misc_feature 1..2451: note = Description of Artificial Sequence: Synthetic coding sequence
  source 1..2451: mol_type = other DNA
atggccacccaggtggagcccctgctgcccggcggggccaccctgctgcaggccgaggagcacggcggcctggtgaggaagaagcccccaccagcccctgagggcaagggggagcccggccccaatgatgtgcggggcggggagccagatggcagcgcccggcggccccggcccccctgtgccaagccccacaaggagggcaccggccagcaggagcgggagagcccccggcccctgcagctgcccggggctgagggccctgccatcagtgatggagaggagggcggcggggagcctggagctgggggcggggccgccggggctgctggagctggaagaagagactttgtggaggcccccccacccaaggtgaacccctggaccaagaatgccctgccccctgtgctgaccaccgtgaatggccagagccccccagagcacagcgccccagccaaggtggtgcgggctgctgtgcccaagcagaggaagggcagcaaggtgggggactttggagatgccatcaactggcccaccccaggagagatcgcccacaagtctgtgcagccccagagccacaagccccagcccaccaggaagctgccccccaagaaggacatgaaggagcaggagaagggggagggcagtgacagcaaggagagccccaagaccaagagtgatgagagcggggaggagaagaatggagatgaggactgccagagaggaggccagaagaagaagggcaacaagcacaagtgggtgcccctgcagattgacatgaagccagaggtgccccgggagaagctggccagccggcccaccaggcctcctgagcccaggcacatcccagccaacagaggagagatcaagggcagcgagagcgccacctacgtgcctgtggccccacccaccccagcctggcagcctgagatcaagccagagcccgcctggcatgaccaggatgagaccagctctgtgaagagtgatggagctgggggcgcccgggccagcttccggggccggggccggggccggggccggggccggggccggggccggggcggcaccaggacccactttgactaccagtttggctacaggaagtttgatggagtggagggccccaggacccccaagtacatgaacaacatcacctactactttgacaacgtgagcagcacagagctgtacagcgtggaccaggagctgctgaaggactacatcaagaggcagatcgagtactacttctctgtggacaacctggagcgggacttcttcctgcggaggaagatggatgctgatggcttcctgcccatcaccctgattgccagcttccaccgggtgcaggccctgaccacagacatcagcctcatctttgctgccctgaaggacagcaaggtggtggagatcgtggatgagaaggtgagaagaagagaggagcctgagaagtggcccctgccccccatcgtggactacagccagacagacttcagccagctgctgaactgcccagagtttgtgccccggcagcactaccagaaggagacagaaagtgcccctggcagccccagggctgtgacccctgtgcccaccaagacagaggaggtgagcaacctgaagaccctgcccaagggcctgagcgccagcctgcctgacctggacagcgagaactggattgaggtgaagaagaggccccggcccagccctgcccggcccaagaagtctgaggagagccgcttcagccacctgaccagcctgccccagcagctgcccagccagcagctgatgagcaaggaccaggatgagcaggaggagctggacttcctgtttgatgaggagatggagcagatggatggcaggaagaacaccttcaccgcctggagcgatgaggagagtgactatgaaattgatgacagagatgtgaacaagatcctgattgtgacccagaccccccactacatgaggaggcaccctggaggagacagaacaggcaaccacaccagccgggccaagatgtctgctgagctggccaaggtgatcaatgatggcctcttctactatgagcaggacctgtgggccgagaagtttgagcctgagtacagccagatcaagcaggaggtggagaacttcaagaaggtgaacatgatcagccgggagcagtttgacaccctgaccccagagccccctgtggaccccaaccaggaggtgcccccaggccccccacgcttccagcaggtgcccacagatgccctggccaacaagctgtttggagcccctgagcccagcaccatcgcccggagcctgcccaccaccgtgcctgagagccccaactacagaaacaccaggacccccaggacccccaggaccccccagctgaaggacagcagccagaccagccgcttctaccctgtggtgaaggagggccgcaccctggatgccaagatgcccaggtag

SEQ ID NO: 157222 - DNA, 282 bp, synthetic construct
  misc_feature 1..282: note = Description of Artificial Sequence: Synthetic coding sequence
  source 1..282: mol_type = other DNA
atgaaggagcaggagaagggggagggcagtgacagcaaggagagccccaagaccaagagtgatgaaagtggagaggagaagaatggagatgaggactgccagaggggcggccagaagaagaagggcaacaagcacaagtgggtgcccctgcagattgacatgaagccagaggtgccccgggagaagctggccagccggcccacccggcccccagagcccaggcacatcccagccaacagaggagagatcaagggcagcgagagcgccacctacgtgccctag

SEQ ID NO: 157223 - DNA, 1836 bp, synthetic construct
  misc_feature 1..1836: note = Description of Artificial Sequence: Synthetic coding sequence
  source 1..1836: mol_type = other DNA
atgaaggagcaggagaagggggagggcagtgacagcaaggagagccccaagaccaagagtgatgaaagtggagaggagaagaatggagatgaggactgccagaggggcggccagaagaagaagggcaacaagcacaagtgggtgcccctgcagattgacatgaagccagaggtgccccgggagaagctggccagccggcccacccggcccccagagcccaggcacatcccagccaacagaggagagatcaagggcagcgagagcgccacctacgtgcctgtggccccacccaccccagcctggcagcctgagatcaagccagagcccgcctggcatgaccaggatgagaccagctctgtgaagagtgatggagctggaggagcccgggccagcttccggggccggggccggggccggggccggggccggggccggggccggggcggcaccaggacccactttgactaccagtttggctacaggaagtttgatggagtggagggccccaggacccccaagtacatgaacaacatcacctactactttgacaacgtgagcagcacagagctgtacagcgtggaccaggagctgctgaaggactacatcaagaggcagatcgagtactacttctctgtggacaacctggagcgggacttcttcctgcggaggaagatggatgctgatggcttcctgcccatcaccctcatcgccagcttccaccgggtgcaggccctgaccacagacatcagcctcatctttgctgccctgaaggacagcaaggtggtggagatcgtggatgagaaggtgagaagaagagaggagcctgagaagtggcccctgccccccatcgtggactacagccagacagacttcagccagctgctgaactgcccagagtttgtgccccggcagcactaccagaaggagacagagagcgcccctggcagccccagggctgtgacccctgtgcccaccaagacagaggaggtgagcaacctgaagaccctgcccaagggcctgagcgccagcctgcctgacctggacagcgagaactggattgaggtgaagaagaggccccggcccagccctgcccggcccaagaagtctgaggagagccgcttcagccacctgaccagcctgccccagcagctgcccagccagcagctgatgagcaaggaccaggatgagcaggaggagctggacttcctgtttgatgaggagatggagcagatggatggcaggaagaacaccttcaccgcctggagcgatgaggagagtgactatgaaattgatgacagagatgtgaacaagatcctgattgtgacccagaccccccactacatgagaagacaccctggaggagacagaactggaaaccacaccagccgggccaagatgtctgctgagctggccaaggtgatcaatgatggcctcttctactatgagcaggacctgtgggccgagaagtttgagcctgagtacagccagatcaagcaggaggtggagaacttcaagaaggtgaacatgatcagccgggagcagtttgacaccctgaccccagagccccctgtggaccccaaccaggaggtgcccccaggccccccacgcttccagcaggtgcccacagatgccctggccaacaagctgtttggagcccctgagcccagcaccatcgcccggagcctgcccaccaccgtgcctgagagccccaactacagaaacaccaggacccccaggacccccaggaccccccagctgaaggacagcagccagaccagccgcttctaccctgtggtgaaggagggccgcaccctggatgccaagatgcccaggtag

SEQ ID NO: 157224 - DNA, 1749 bp, synthetic construct
  misc_feature 1..1749: note = Description of Artificial Sequence: Synthetic coding sequence
  source 1..1749: mol_type = other DNA
atggagacagaaagtggcaaccaggagaaggtgatggaggaggagagcacagagaagaagaaggaggtggagaagaagaagaggagccgggtgaagcaggtgctggccgacatcgccaagcaggtggacttctggtttggagatgccaacctgcacaaggaccgcttcctgcgggagcagatcgagaagagcagagatggctacgtggacatcagcctgctggtgtccttcaacaagatgaagaagctgaccacagatggcaagctgattgcccgggccctgcggagcagcgctgtggtggagctggacctggagggcacccgcatccggaggaagaagcccctgggggagcggcccaaggatgaagatgagaggacagtgtatgtggagctgctgcccaagaatgtgaaccacagctggattgagcgggtgtttggaaaatgtggaaatgtggtgtacatcagcatcccccactacaagagcactggagaccccaagggctttgcctttgtggagtttgagaccaaggagcaggccgccaaggccatcgagttcctgaacaaccccccagaggaggcccccaggaagccaggcatcttccccaagacagtgaagaacaagcccatcccagccctgcgggtggtggaggagaagaagaagaagaagaagaagaagggccgcatgaagaaggaggacaacatccaggccaaggaggagaacatggacaccagcaacaccagcatcagcaagatgaagaggagccggcccaccagcgagggcagtgacatcgagagcacagagccccagaagcagtgcagcaagaagaagaagaagagggacagagtggaggccagcagcctgcctgaggtgaggacaggcaagaggaagaggagcagcagtgaagatgctgagagcctggcccccaggagcaaggtgaagaagatcatccagaaggacatcatcaaggaggccagcgaggccagcaaggagaacagagacatcgagatcagcacagaggaggagaaggacaccggggacctgaaggacagcagcctgctgaagaccaagaggaagcacaagaagaagcacaaggagcggcacaagatgggagaggaggtgatccccctgcgggtgctgagcaagtctgagtggatggacctgaagaaggagtacctggccctgcagaaggcctccatggccagcctgaagaagaccatcagccagatcaagtctgagagcgagatggagacagattctggagtgccccagaacacaggcatgaagaatgagaagacagccaaccgggaggagtgcaggacccaggagaaggtgaatgccaccggcccccagtttgtgtctggagtcatcgtgaagatcatcagcacagagcccctgcccggcaggaagcaggtgcgggacaccctggccgccatcagcgaggtgctgtatgtggacctgctggagggggacacagagtgccacgcccgcttcaagaccccagaagatgcccaggccgtcatcaatgcctacacagagatcaacaagaagcactgctggaagctggagatcctgagcggggaccacgagcagcgctactggcagaagatcctggtggaccggcaggccaagctgaaccagccccgggagaagaagaggggcacagagaagctgatcaccaaggccgagaagatccggctggccaagacccagcaggccagcaagcacatccgcttctctgaatatgactag

SEQ ID NO: 157225 - DNA, 1749 bp, synthetic construct; identical to SEQ ID NO: 157224
  misc_feature 1..1749: note = Description of Artificial Sequence: Synthetic coding sequence
  source 1..1749: mol_type = other DNA

SEQ ID NO: 157226 - DNA, 900 bp, synthetic construct
  misc_feature 1..900: note = Description of Artificial Sequence: Synthetic coding sequence
  source 1..900: mol_type = other DNA
atggagacagaaagtggcaaccaggagaaggtgatggaggaggagagcacagagaagaagaaggaggtggagaagaagaagaggagccgggtgaagcaggtgctggccgacatcgccaagcaggtggacttctggtttggagatgccaacctgcacaaggaccgcttcctgcgggagcagatcgagaagagcagagatggctacgtggacatcagcctgctggtgtccttcaacaagatgaagaagctgaccacagatggcaagctgattgcccgggccctgcggagcagcgctgtggtggagctggacctggagggcacccgcatccggaggaagaagcccctgggggagcggcccaaggatgaagatgagaggacagtgtatgtggagctgctgcccaagaatgtgaaccacagctggattgagcgggtgtttggaaaatgtggaaatgtggtgtacatcagcatcccccactacaagagcactggagaccccaagggctttgcctttgtggagtttgagaccaaggagcaggccgccaaggccatcgagttcctgaacaaccccccagaggaggcccccaggaagccaggcatcttccccaagacagtgaagaacaagcccatcccagccctgcgggtggtggaggagaagaagaagaagaagaagaagaagggccgcatgaagaaggaggacaacatccaggccaaggaggagaacatggacaccagcaacaccagcatcagcaagatgaagaggagccggcccaccagcgagggcagtgacatcgagagcacagagccccagaagcagtgcagcaagaagaagaagaagagggacagagtggaggccagcagcctgcctgaggtgaggacaggcaagaggaagaggagcagctag

SEQ ID NO: 157227 - DNA, 390 bp, synthetic construct
  misc_feature 1..390: note = Description of Artificial Sequence: Synthetic coding sequence
  source 1..390: mol_type = other DNA
atggagacagaaagtggcaaccaggagaaggtgatggaggaggagagcacagagaagaagaaggaggtggagaagaagaagaggagccgggtgaagcaggtgctggccgacatcgccaagcaggtggacttctggtttggagatgccaacctgcacaaggaccgcttcctgcgggagcagatcgagaagagcagagatggctacgtggacatcagcctgctggtgtccttcaacaagatgaagaagctgaccacagatggcaagctgattgcccgggccctgcggagcagcgctgtggtggagctggacctggagggcacccgcatccggaggaagaagcccctgggggagcggcccaaggatgaagatgagaggacagtgtatgtgtag

SEQ ID NO: 157228 - DNA, 360 bp, synthetic construct
  misc_feature 1..360: note = Description of Artificial Sequence: Synthetic coding sequence
  source 1..360: mol_type = other DNA
atggagacagaaagtggcaaccaggagaaggtgatggaggaggagagcacagagaagaagaaggaggtggagaagaagaagaggagccgggtgaagcaggtgctggccgacatcgccaagcaggtggacttctggtttggagatgccaacctgcacaaggaccgcttcctgcgggagcagatcgagaagagcagagatggctacgtggacatcagcctgctggtgtccttcaacaagatgaagaagctgaccacagatggcaagctgattgcccgggccctgcggagcagcgctgtggtggagctggacctggagggcacccgcatccggaggaagaagcccctgggggagcggccctag

SEQ ID NO: 157229 - DNA, 1770 bp, synthetic construct
  misc_feature 1..1770: note = Description of Artificial Sequence: Synthetic coding sequence
  source 1..1770: mol_type = other DNA
atgatccccaacatcgagggcatggagacagagagcggcaaccaggagaaggtgatggaggaggagagcacagagaagaagaaggaggtggagaagaagaagaggagccgggtgaagcaggtgctggccgacatcgccaagcaggtggacttctggtttggagatgccaacctgcacaaggaccgcttcctgcgggagcagatcgagaagagcagagatggctacgtggacatcagcctgctggtgtccttcaacaagatgaagaagctgaccacagatggcaagctgattgcccgggccctgcggagcagcgctgtggtggagctggacctggagggcacccgcatccggaggaagaagcccctgggggagcggcccaaggatgaagatgagaggacagtgtatgtggagctgctgcccaagaatgtgaaccacagctggattgaaagagtgtttggaaaatgtggaaatgtggtgtacatcagcatcccccactacaagagcactggagaccccaagggctttgcctttgtggagtttgagaccaaggagcaggccgccaaggccatcgagttcctgaacaaccccccagaggaggcccccaggaagccaggcatcttccccaagacagtgaagaacaagcccatcccagccctgcgggtggtggaggagaagaagaagaagaagaagaagaagggccgcatgaagaaggaggacaacatccaggccaaggaggagaacatggacaccagcaacaccagcatcagcaagatgaagaggagccggcccaccagcgagggcagtgacatcgagagcacagagccccagaagcagtgcagcaagaagaagaagaagagggacagagtggaggccagcagcctgcctgaggtgaggacaggcaagaggaagaggagcagcagtgaagatgctgagagcctggcccccaggagcaaggtgaagaagatcatccagaaggacatcatcaaggaggccagcgaggccagcaaagaaaatagagacatcgagatcagcacagaggaggagaaggacacaggagacctgaaggacagcagcctgctgaagaccaagaggaagcacaagaagaagcacaaggagcggcacaagatgggagaggaggtgatccccctgcgggtgctgagcaagtctgagtggatggacctgaagaaggagtacctggccctgcagaaggcctccatggccagcctgaagaagaccatcagccagatcaagtctgagagcgagatggagacagacagcggcgtgccccagaacacaggcatgaagaatgagaagacagccaaccgggaggagtgcaggacccaggagaaggtgaatgccaccggcccccagtttgtgtctggagtgattgtgaagatcatcagcacagagcccctgcccggcaggaagcaggtgcgggacaccctggccgccatcagcgaggtgctgtatgtggacctgctggagggggacacagaatgtcatgcccgcttcaagaccccagaagatgcccaggccgtcatcaatgcctacacagagatcaacaagaagcactgctggaagctggagatcctgagcggggaccacgagcagcgctactggcagaagatcctggtggaccggcaggccaagctgaaccagccccgggagaagaagaggggcacagagaagctgatcaccaaggccgagaagatccggctggccaagacccagcaggccagcaagcacatccgcttctctgaatatgactag

SEQ ID NO: 157230 - DNA, 417 bp, synthetic construct
  misc_feature 1..417: note = Description of Artificial Sequence: Synthetic coding sequence
  source 1..417: mol_type = other DNA
atgaagttcaccaccctgctcttcctggccgctgtggccggggccctggtgtatgcagaagatgccagcagtgacagcactggagctgaccctgcccaggaggccggcaccagcaagcccaatgaggagatcagcggccctgctgagcccgccagccccccagagaccaccaccacagcccaggagaccagcgctgctgctgtgcagggcacagccaaggtgaccagcagccggcaggagctgaaccccctgaagagcatcgtggagaagagcatcctgctgacagagcaggccctggccaaggccggcaagggcatgcatggaggagtgcctgggggcaagcagttcattgaaaatggaagtgaatttgcccagaagctgctgaagaagttcagcctgctgaagccctgggcctag

SEQ ID NO: 157231 - DNA, 429 bp, synthetic construct
  misc_feature 1..429: note = Description of Artificial Sequence: Synthetic coding sequence
  source 1..429: mol_type = other DNA
atgaggttctttgtgcccctcttcctggtgggcatcctcttccctgccatcctggccaagcagttcaccaagtgtgagctgagccagctgctgaaggacattgatggctatggaggcatcgccctgcctgagctgatctgcaccatgttccacaccagcggctatgacacccaggccatcgtggagaacaatgaaagcacagaatatggcctcttccagatcagcaacaagctgtggtgcaagagcagccaggtgccccagagcaggaacatctgtgacatcagctgtgacaagttcctggatgatgacatcacagatgacatcatgtgtgccaagaagatcctggacatcaagggcatcgactactggctggcccacaaggccctgtgcacagagaagctggagcagtggctgtgtgagaagctgtag

SEQ ID NO: 157232 - DNA, 1644 bp, synthetic construct
  misc_feature 1..1644: note = Description of Artificial Sequence: Synthetic coding sequence
  source 1..1644: mol_type = other DNA
atgtaccgcctgatgtctgctgtgacagcccgggctgctgcccctgggggcctggccagcagctgtggccggcggggcgtgcaccagagagctggcctgccccccctgggccacggctgggtgggcggcctgggcctgggcctgggcctggccctgggcgtgaagctggccggcggcctgcggggagctgccccagcccagagccctgctgccccagaccctgaggccagccccctggccgagcccccccaggagcagagcctggccccctggagcccccagaccccagccccaccctgcagccgctgctttgcccgggccatcgagagcagccgggacctgctgcaccgcatcaaggatgaggtgggcgcccctggcatcgtggtgggcgtgtctgtggatggcaaggaggtgtggagcgagggcctgggctatgcagatgtggagaacagagtgccctgcaagccagagaccgtgatgagaattgccagcatcagcaagagcctgaccatggtggccctggccaagctgtgggaggccggcaagctggacctggacatccctgtgcagcactacgtgcctgagttccctgagaaggagtatgaaggagagaaggtgtctgtgaccacccggctgctgatcagccacctgagcggcatccgccactatgagaaggacatcaagaaggtgaaggaggagaaggcctacaaggccctgaagatgatgaaggaaaatgtggcctttgagcaggagaaggagggcaagagcaatgagaagaatgacttcaccaagttcaagacagagcaggagaatgaggccaagtgcaggaacagcaagccaggcaagaagaagaatgactttgagcagggcgagctgtacctgcgggagaagtttgaaaattccattgagagcctgcggctcttcaagaatgaccccctcttcttcaagccaggcagccagttcctgtacagcaccttcggctacaccctgctggccgccatcgtggagcgggccagcggctgcaagtacctggactacatgcagaagatcttccatgacctggacatgctgaccaccgtgcaggaggagaatgagcccgtcatctacaacagagcccgcttctacgtgtacaacaagaagaagaggctggtgaacaccccctacgtggacaacagctacaagtgggccggcggcggcttcctgagcacagtgggggacctgctgaagtttggaaatgccatgctgtatggctaccaggtgggcctcttcaagaacagcaatgaaaacctgctgcccggctacctgaagccagagaccatggtgatgatgtggacccctgtgcccaacacagagatgtcctgggacaaggagggcaagtatgccatggcctggggcgtggtggagaggaagcagacctacggcagctgcaggaagcagaggcactacgccagccacactggaggagctgtgggcgccagctctgtgctgctggtgctgcctgaggagctggacacagagaccatcaacaacaaggtgcccccccggggcatcatcgtgtccatcatctgcaacatgcagagcgtgggcctgaacagcacagccctgaagatcgccctggagtttgacaaggacagaagtgactag

SEQ ID NO: 157233 - DNA, 1122 bp, synthetic construct
  misc_feature 1..1122: note = Description of Artificial Sequence: Synthetic coding sequence
  source 1..1122: mol_type = other DNA
atgtaccgcctgatgtctgctgtgacagcccgggctgctgcccctgggggcctggccagcagctgtggccggcggggcgtgcaccagagagctggcctgccccccctgggccacggctgggtgggcggcctgggcctgggcctgggcctggccctgggcgtgaagctggccggcggcctgcggggagctgccccagcccagagccctgctgccccagaccctgaggccagccccctggccgagcccccccaggagcagagcctggccccctggagcccccagaccccagccccaccctgcagccgctgctttgcccgggccatcgagagcagccgggacctgctgcaccgcatcaaggatgaggtgggcgcccctggcatcgtggtgggcgtgtctgtggatggcaaggaggtgtggagcgagggcctgggctatgcagatgtggagaacagagtgccctgcaagccagagaccgtgatgagaattgccagcatcagcaagagcctgaccatggtggccctggccaagctgtgggaggccggcaagctggacctggacatccctgtgcagcactacgtgcctgagttccctgagaaggagtatgaaggagagaaggtgtctgtgaccacccggctgctgatcagccacctgagcggcatccgccactatgagaaggacatcaagaaggtgaaggaggagaaggcctacaaggccctgaagatgatgaaggaaaatgtggcctttgagcaggagaaggagggcaagagcaatgagaagaatgacttcaccaagttcaagacagagcaggagaatgaggccaagtgcaggaacagcaagccaggcaagaagaagaatgactttgagcagggcgagctgtacctgcgggagaagtttgaaaattccattgagagcctgcggctcttcaagaatgaccccctcttcttcaagccaggcagccagttcctgtacagcaccttcggctacaccctgctggccgccatcgtggagcgggccagcggctgcaagtacctggactacatgcagaagatcttccatgacctggacatgctgaccaccgtgcaggaggagaatgagcccgtcatctacaacagagccaggtag

SEQ ID NO: 157234 - DNA, 5784 bp, synthetic construct
  misc_feature 1..5784: note = Description of Artificial Sequence: Synthetic coding sequence
  source 1..5784: mol_type = other DNA
atggagctgtcctggcacgtggtgttcatcgccctgctgtccttcagctgctggggcagtgactgggagagtgacaggaacttcatcagcacagctggccccctgaccaatgacctgctgcacaacctgagcggcctgctgggggaccagagcagcaactttgtggccggggacaaggacatgtatgtgtgccaccagcccctgcccaccttcctgcctgagtacttcagcagcctgcacgccagccagatcacccactacaaggtgttcctgtcctgggcccagctgctgcctgctggcagcacccagaacccagatgagaagacagtgcagtgctaccgccgcctgctgaaggccctgaagacagcccggctgcagcccatggtgatcctgcaccaccagaccctgcctgccagcaccctgcggaggacagaggcctttgctgacctgtttgctgactatgccacctttgccttccacagctttggagacctggtgggcatctggttcaccttcagtgacctggaggaggtgatcaaggagctgccccaccaggagagccgggccagccagctgcagaccctgagtgatgcccacaggaaggcctatgagatctaccacgagagctatgccttccagggcggcaagctgtctgtggtgctgcgggcagaggacatccctgagctgctgctggagccccccatcagcgccctggcccaggacacagtggacttcctgagcctggacctgtcctatgagtgccagaatgaggccagcctgcggcagaagctgagcaagctgcagaccatcgagcccaaggtgaaggtgttcatcttcaacctgaagctgcctgactgccccagcaccatgaagaacccagccagcctgctcttcagcctgtttgaggccatcaacaaggaccaggtgctgaccatcggctttgacatcaatgagttcctgagctgcagcagcagcagcaagaagtccatgagctgcagcctgaccggcagcctggccctgcagcctgaccagcagcaggaccacgagaccacagacagcagccctgccagcgcctaccagaggatctgggaggcctttgccaaccagagcagagctgagagagatgccttcctgcaggacaccttccctgagggcttcctgtggggcgccagcactggagccttcaacgtggagggcggctgggccgagggcggccggggcgtgtccatctgggacccccggcggcccctgaacaccacagagggccaggccaccctggaggtggccagtgacagctaccacaaggtggccagtgatgtggccctgctgtgtggcctgcgggcccaggtgtacaagttcagcatctcctggagccgcatcttccccatgggccacggcagcagccccagcctgcccggggtggcctactacaacaagctgattgaccggctgcaggatgctggcatcgagcccatggccaccctcttccactgggacctgccccaggccctgcaggaccatggaggctggcagaatgaatctgtggtggatgccttcctggactatgctgccttctgcttcagcaccttcggggacagagtgaagctgtgggtgaccttccacgagccctgggtgatgtcctatgccggctatggaacaggccagcaccccccaggcatcagtgaccccggggtggccagcttcaaggtggcccacctggtgctgaaggcccacgcccggacctggcaccactacaacagccaccaccggccccagcagcagggccacgtgggcatcgtgctgaacagcgactgggccgagcccctgagccctgagaggcctgaggacctgcgggccagcgagcgcttcctgcacttcatgctgggctggtttgcccaccctgtgtttgtggatggagactacccagccaccctgcggacccagatccagcagatgaaccggcagtgcagccaccctgtggcccagctgcctgagttcacagaagctgagaagcagctgctgaagggcagcgctgacttcctgggcctgagccactacaccagccgcctcatcagcaatgccccccagaacacctgcatccccagctatgacaccatcggcggcttcagccagcacgtgaaccacgtgtggccccagaccagcagctcctggatccgggtggtgccctggggcatccggcggctgctgcagtttgtgtccctggagtacacccggggcaaggtgcccatctacctggccggaaatggcatgcccatcggggagagcgagaacctgtttgatgacagcctgcgggtggactacttcaaccagtacatcaatgaggtgctgaaggccatcaaggaggacagcgtggatgtgcgcagctacatcgcccggagcctgattgatggctttgagggccccagcggctacagccagagatttggcctgcaccacgtgaacttcagtgacagcagcaagagcaggacccccaggaagagcgcctacttcttcaccagcatcatcgagaagaatggcttcctgaccaagggggccaagaggctgctgccccccaacacagtgaacctgcccagcaaggtgcgggccttcaccttccccagcgaggtgcccagcaaggccaaggtggtgtgggagaagttcagcagccagcccaagtttgagcgggacctcttctaccacggcaccttcagagatgacttcctgtggggcgtgagcagcagcgcctaccagatcgagggcgcctgggatgctgatggcaagggccccagcatctgggacaacttcacccacaccccaggcagcaatgtgaaggacaatgccaccggggacatcgcctgtgacagctaccaccagctggatgctgacctgaacatgctgcgggccctgaaggtgaaggcctaccgcttcagcatctcctggagccgcatcttccccaccggcaggaacagcagcatcaacagccatggagtggactactacaacagactcatcaatggcctggtggccagcaacatcttccccatggtgaccctcttccactgggacctgccccaggccctgcaggacatcggcggctgggagaacccagccctgattgacctgtttgacagctatgctgacttctgcttccagacctttggagacagagtgaagttctggatgaccttcaatgagcccatgtacctggcctggctgggctacggcagcggggagttccccccaggagtgaaggaccccggctgggccccctacagaattgcccacgccgtcatcaaggcccacgcccgggtgtaccacacctatgatgagaagtaccggcaggagcagaagggcgtcatcagcctgagcctgagcacccactgggccgagcccaagagccctggggtgcccagagatgtggaggccgctgacaggatgctgcagttcagcctgggctggtttgcccaccccatcttcagaaatggagactacccagacaccatgaagtggaaggtgggcaacagaagtgagctgcagcacctggccaccagccggctgcccagcttcacagaggaggagaagcgcttcatccgggccacagcagatgtgttctgcctgaacacctactacagcagaattgtgcagcacaagaccccccggctgaaccccccatcctatgaagatgaccaggagatggccgaggaggaggaccccagctggcccagcacagccatgaacagagctgccccctggggcacccggcggctgctgaactggatcaaggaggagtatggagacatccccatctacatcacagaaaatggagtgggcctgaccaaccccaacacagaggacacagaccgcatcttctaccacaagacctacatcaatgaggccctgaaggcctaccgcctggatggcatcgacctgcggggctacgtggcctggagcctgatggacaactttgagtggctgaatggctacacagtgaagtttggcctgtaccacgtggacttcaacaacaccaaccggcccaggacagcccgggccagcgcccgctactacacagaggtgatcaccaacaacggcatgcccctggccagagaagatgagttcctgtatggccgcttccctgagggcttcatctggagcgctgccagcgctgcctaccagatcgagggcgcctggagggcagatggcaagggcctgagcatctgggacaccttcagccacacccccctgcgggtggagaatgatgccatcggagatgtggcctgtgacagctaccacaagattgctgaggacctggtgaccctgcagaacctgggcgtgagccactaccgcttcagcatctcctggagccgcatcctgcctgatggcaccacccgctacatcaatgaggccggcctgaactactacgtgcggctgattgacaccctgctggccgccagcatccagccccaggtgaccatctaccactgggacctgccccagaccctgcaggatgtgggcggctgggagaatgagaccatcgtgcagcgcttcaaggagtatgcagatgtgctcttccagaggctgggggacaaggtgaagttctggatcaccctgaatgagcccttcgtcatcgcctaccagggctacggctatggaacagctgcccctggggtgagcaaccggcccggcacagccccctacatcgtgggccacaacctgatcaaggcccacgccgaggcctggcacctgtacaatgatgtgtaccgggccagccagggcggcgtcatcagcatcaccatcagcagtgactgggccgagccccgggaccccagcaaccaggaggatgtggaggccgcccggcgctacgtgcagttcatgggcggctggtttgcccaccccatcttcaagaatggagactacaatgaggtgatgaagacccgcatccgggacaggagcctggccgccggcctgaacaagagccggctgcctgagttcacagagagcgagaagaggcgcatcaatggcacctatgacttcttcggcttcaaccactacaccaccgtgctggcctacaacctgaactatgccacagccatcagcagctttgatgctgacagaggagtggccagcattgctgaccgctcctggccagattctggcagcttctggctgaagatgaccccatttggcttccgccgcatcctgaactggctgaaggaggagtacaatgacccccccatctacgtgacagaaaatggagtgtcccagcgggaggagacagacctgaatgacacagcccgcatctactacctgcggacctacatcaatgaggccctgaaggctgtgcaggacaaggtggacctgcggggctacacagtgtggagcgccatggacaactttgagtgggccaccggcttcagcgagcgcttcggcctgcactttgtgaactacagcgaccccagcctgccccgcatccccaaggccagcgccaagttctacgcctctgtggtgcgctgcaatggcttcccagaccctgccaccggcccccacgcctgcctgcaccagccagatgctggccccaccatcagccctgtgcggcaggaggaggtgcagttcctgggcctgatgctgggcaccacagaggcccagacagccctgtatgtgctcttcagcctggtgctgctgggcgtgtgtggcctggccttcctgagctacaagtactgcaagaggagcaagcagggcaagacccagaggagccagcaggagctgagccctgtgagcagcttctag

SEQ ID NO: 157235 - DNA, 3012 bp, synthetic construct
  misc_feature 1..3012: note = Description of Artificial Sequence: Synthetic coding sequence
  source 1..3012: mol_type = other DNA
aaggtggcccacctggtgctgaaggcccacgcccggacctggcaccactacaacagccaccaccggccccagcagcagggccacgtgggcatcgtgctgaacagcgactgggccgagcccctgagccctgagaggcctgaggacctgcgggccagcgagcgcttcctgcacttcatgctgggctggtttgcccaccctgtgtttgtggatggagactacccagccaccctgcggacccagatccagcagatgaaccggcagtgcagccaccctgtggcccagctgcctgagttcacagaagctgagaagcagctgctgaagggcagcgctgacttcctgggcctgagccactacaccagccgcctcatcagcaatgccccccagaacacctgcatccccagctatgacaccatcggcggcttcagccagcacgtgaaccacgtgtggccccagaccagcagctcctggatccgggtggtgccctggggcatccggcggctgctgcagtttgtgtccctggagtacacccggggcaaggtgcccatctacctggccggaaatggcatgcccatcggggagagcgagaacctgtttgatgacagcctgcgggtggactacttcaaccagtacatcaatgaggtgctgaaggccatcaaggaggacagcgtggatgtgcgcagctacatcgcccggagcctgattgatggctttgagggccccagcggctacagccagagatttggcctgcaccacgtgaacttcagtgacagcagcaagagcaggacccccaggaagagcgcctacttcttcaccagcatcatcgagaagaatggcttcctgaccaagggggccaagaggctgctgccccccaacacagtgaacctgcccagcaaggtgcgggccttcaccttccccagcgaggtgcccagcaaggccaaggtggtgtgggagaagttcagcagccagcccaagtttgagcgggacctcttctaccacggcaccttcagagatgacttcctgtggggcgtgagcagcagcgcctaccagatcgagggcgcctgggatgctgatggcaagggccccagcatctgggacaacttcacccacaccccaggcagcaatgtgaaggacaatgccaccggggacatcgcctgtgacagctaccaccagctggatgctgacctgaacatgctgcgggccctgaaggtgaaggcctaccgcttcagcatctcctggagccgcatcttccccaccggcaggaacagcagcatcaacagccatggagtggactactacaacagactcatcaatggcctggtggccagcaacatcttccccatggtgaccctcttccactgggacctgccccaggccctgcaggacatcggcggctgggagaacccagccctgattgacctgtttgacagctatgctgacttctgcttccagacctttggagacagagtgaagttctggatgaccttcaatgagcccatgtacctggcctggctgggctacggcagcggggagttccccccaggagtgaaggaccccggctgggccccctacagaattgcccacgccgtcatcaaggcccacgcccgggtgtaccacacctatgatgagaagtaccggcaggagcagaagggcgtcatcagcctgagcctgagcacccactgggccgagcccaagagccctggggtgcccagagatgtggaggccgctgacaggatgctgcagttcagcctgggctggtttgcccaccccatcttcagaaatggagactacccagacaccatgaagtggaaggtgggcaacagaagtgagctgcagcacctggccaccagccggctgcccagcttcacagaggaggagaagcgcttcatccgggccacagcagatgtgttctgcctgaacacctactacagcagaattgtgcagcacaagaccccccggctgaaccccccatcctatgaagatgaccaggagatggccgaggaggaggaccccagctggcccagcacagccatgaacagagctgccccctggggcacccggcggctgctgaactggatcaaggaggagtatggagacatccccatctacatcacagaaaatggagtgggcctgaccaaccccaacacagaggacacagaccgcatcttctaccacaagacctacatcaatgaggccctgaaggcctaccgcctggatggcatcgacctgcggggctacgtggcctggagcctgatggacaactttgagtggctgaatggctacacagtgaagtttggcctgtaccacgtggacttcaacaacaccaaccggcccaggacagcccgggccagcgcccgctactacacagaggtgatcaccaacaacggcatgcccctggccagagaagatgagttcctgtatggccgcttccctgagggcttcatctggagcgctgccagcgctgcctaccagatcgagggcgcctggagggcagatggcaagggcctgagcatctgggacaccttcagccacacccccctgcgggtggagaatgatgccatcggagatgtggcctgtgacagctaccacaagattgctgaggacctggtgaccctgcagaacctgggcgtgagccactaccgcttcagcatctcctggagccgcatcctgcctgatggcaccacccgctacatcaatgaggccggcctgaactactacgtgcggctgattgacaccctgctggccgccagcatccagccccaggtgaccatctaccactgggacctgccccagaccctgcaggatgtgggcggctgggagaatgagaccatcgtgcagcgcttcaaggagtatgcagatgtgctcttccagaggctgggggacaaggtgaagttctggatcaccctgaatgagcccttcgtcatcgcctaccagggctacggctatggaacagctgcccctgtgcacggccgcctggtgtgcaccagctacttccaggagtggaggctgcagtag

SEQ ID NO: 157236 - DNA, 1005 bp, synthetic construct
  misc_feature 1..1005: note = Description of Artificial Sequence: Synthetic coding sequence
  source 1..1005: mol_type = other DNA
atggccaccctgaaggagaagctgattgcccctgtggccgaggaggaggccaccgtgcccaacaacaagatcaccgtggtgggcgtgggccaggtgggcatggcctgtgccatcagcatcctgggcaagagcctggctgatgagctggccctggtggatgtgctggaggacaagctgaagggggagatgatggacctgcagcacggcagcctcttcctgcagacccccaagatcgtggccgacaaggactacagcgtgacagccaacagcaagatcgtggtggtgacagctggggtgcggcagcaggagggggagagccggctgaacctggtgcagagaaatgtgaatgtgttcaagttcatcatcccccagatcgtgaagtacagcccagactgcatcatcatcgtggtgagcaaccctgtggacatcctgacctacgtgacctggaagctgagcggcctgcccaagcacagggtcatcggcagcggctgcaacctggacagcgcccgcttccgctacctgatggccgagaagctgggcatccaccccagcagctgccacggctggatcctgggggagcacggggacagctctgtggccgtgtggagcggcgtgaatgtggccggcgtgtccctgcaggagctgaaccctgagatgggcacagacaatgattctgagaactggaaggaggtgcacaagatggtggtggagagcgcctatgaggtgatcaagctgaagggctacaccaactgggccatcggcctgtctgtggccgacctgattgaatccatgctgaagaacctgagccgcatccaccctgtgtccaccatggtgaagggcatgtatggaattgaaaatgaggtgttcctgagcctgccctgcatcctgaatgcccggggcctgaccagcgtcatcaaccagaagctgaaggatgatgaggtggcccagctgaagaagtctgctgacaccctgtgggacatccagaaggacctgaaggacctgtag

SEQ ID NO: 157237 - DNA, 699 bp, synthetic construct
  misc_feature 1..699: note = Description of Artificial Sequence: Synthetic coding sequence
  source 1..699: mol_type = other DNA
atggccaccctgaaggagaagctgattgcccctgtggccgaggaggaggccaccgtgcccaacaacaagatcaccgtggtgggcgtgggccaggtgggcatggcctgtgccatcagcatcctgggcaagagcctggctgatgagctggccctggtggatgtgctggaggacaagctgaagggggagatgatggacctgcagcacggcagcctcttcctgcagacccccaagatcgtggccgacaaggactacagcgtgacagccaacagcaagatcgtggtggtgacagctggggtgcggcagcaggagggggagagccggctgaacctggtgcagagaaatgtgaatgtgttcaagttcatcatcccccagatcgtgaagtacagcccagactgcatcatcatcgtggtgagcaaccctgtggacatcctgacctacgtgacctggaagctgagcggcctgcccaagcacagggtcatcggcagcggctgcaacctggacagcgcccgcttccgctacctgatggccgagaagctgggcatccaccccagcagctgccacggctggatcctgggggagcacggggacagctctgtggccgtgtggagcggcgtgaatgtggccggcgtgtccctgcaggagctgaaccctgagatgggcacagacaatgattctgagaactggaaggaggtgcactag

SEQ ID NO: 157238 - DNA, 1005 bp, synthetic construct; identical to SEQ ID NO: 157236
  misc_feature 1..1005: note = Description of Artificial Sequence: Synthetic coding sequence
  source 1..1005: mol_type = other DNA

SEQ ID NO: 157239 - DNA, 414 bp, synthetic construct
  misc_feature 1..414: note = Description of Artificial Sequence: Synthetic coding sequence
  source 1..414: mol_type = other DNA
atggccaccctgaaggagaagctgattgcccctgtggccgaggaggaggccaccgtgcccaacaacaagatcaccgtggtgggcgtgggccaggtgggcatggcctgtgccatcagcatcctgggcaagagcctggctgatgagctggccctggtggatgtgctggaggacaagctgaagggggagatgatggacctgcagcacggcagcctcttcctgcagacccccaagatcgtggccgacaaggactacagcgtgacagccaacagcaagatcgtggtggtgacagctggggtgcggcagcaggagggggagagccggctgaacctggtgcagagaaatgtgaatgtgttcaagttcatcatcccccagatcgtgaagtacagcccagactgcatcatcatcgtggtgtag

SEQ ID NO: 157240 - DNA, 309 bp, synthetic construct
  misc_feature 1..309: note = Description of Artificial Sequence: Synthetic coding sequence
  source 1..309: mol_type = other DNA
atggccaccctgaaggagaagctgattgcccctgtggccgaggaggaggccaccgtgcccaacaacaagatcaccgtggtgggcgtgggccaggtgggcatggcctgtgccatcagcatcctgggcaagagcctggctgatgagctggccctggtggatgtgctggaggacaagctgaagggggagatgatggacctgcagcacggcagcctcttcctgcagacccccaagatcgtggccgacaaggactacagcgtgacagccaacagcaagatcgtggtggtgacagctggggtgcggcagcagtag

SEQ ID NO: 157241 - DNA, 999 bp, synthetic construct
  misc_feature 1..999: note = Description of Artificial Sequence: Synthetic coding sequence
  source 1..999: mol_type = other DNA
atgagcacagtgaaggagcagctgattgagaagctgattgaagatgatgagaacagccagtgcaagatcaccatcgtgggcaccggggctgtgggcatggcctgtgccatcagcatcctgctgaaggacctggctgatgagctggccctggtggatgtggccctggacaagctgaagggggagatgatggacctgcagcacggcagcctcttcttcagcaccagcaagatcaccagcggcaaggactacagcgtgtctgccaacagcagaattgtgattgtgacagctggggcccggcagcaggagggggagacccggctggccctggtgcagagaaatgtggccatcatgaagagcatcatcccagccatcgtgcactacagcccagactgcaagatcctggtggtgagcaaccctgtggacatcctgacctacatcgtgtggaagatcagcggcctgcctgtgaccagggtgattggcagcggctgcaacctggacagcgcccgcttccgctacctgattggagagaagctgggcgtgcaccccaccagctgccacggctggatcatcggggagcacggggacagctctgtgcccctgtggagcggcgtgaatgtggccggcgtggccctgaagaccctggaccccaagctgggcacagacagcgacaaggagcactggaagaacatccacaagcaggtgatccagagcgcctatgagatcatcaagctgaagggctacacctcctgggccatcggcctgtctgtgatggacctggtgggcagcatcctgaagaacctgcggcgggtgcaccctgtgtccaccatggtgaagggcctgtatggcatcaaggaggagctgttcctgagcatcccctgtgtgctgggcagaaatggagtgtctgatgtggtgaagatcaacctgaacagcgaggaggaggccctcttcaagaagtctgctgagaccctgtggaacatccagaaggacctgatcttctag

SEQ ID NO: 157242 - DNA, 999 bp, synthetic construct; identical to SEQ ID NO: 157241
  misc_feature 1..999: note = Description of Artificial Sequence: Synthetic coding sequence
  source 1..999: mol_type = other DNA

SEQ ID NO: 157243 - DNA, 1524 bp, synthetic construct
  misc_feature 1..1524: note = Description of Artificial Sequence: Synthetic coding sequence
  source 1..1524: mol_type = other DNA
atggcccggctgctgcggagcgccacctgggagctgttcccctggaggggctactgcagccagaaggccaagggggagctgtgccgggactttgtggaggccctgaaggctgtggtgggcggcagccacgtgtccacagctgctgtggtgcgggagcagcacggcagagatgaatctgtgcaccgctgtgagcccccagatgctgtggtgtggccccagaatgtggagcaggtgtcccggctggccgccctgtgctaccggcagggcgtgcccatcatcccctttggaactggaacaggcctggagggcggcgtgtgtgctgtgcagggcggcgtgtgtgtgaacctgacccacatggaccgcatcctggagctgaaccaggaggacttctctgtggtggtggagcccggggtgaccaggaaggccctgaatgcccacctgcgggacagcggcctgtggttccctgtggaccccggggctgatgccagcctgtgtggcatggccgccaccggggccagcggcaccaatgctgtgcgctatggcaccatgagggacaacgtgctgaacctggaggtggtgctgcctgatggccgcctgctgcacacagctggccggggccgccacttccgcttcggcttctggccagagatcccccaccacacagcctggtacagcccctgtgtgtccctgggccgcaggaagtctgctgctggctacaacctgaccggcctgtttgtgggcagcgagggcaccctgggcctcatcacagccaccaccctgcggctgcacccagcccctgaggccaccgtggccgccacctgtgccttccccagcgtgcaggccgctgtggacagcacagtgcacatcctgcaggccgctgtgcctgtggccagaattgagttcctggatgaggtgatgatggatgcctgcaaccgctacagcaagctgaactgcctggtggcccccaccctcttcctggagttccacggcagccagcaggccctggaggagcagctgcagaggacagaggagatcgtgcagcagaatggagccagtgacttctcctgggccaaggaggccgaggagaggagccggctgtggacagcccggcacaatgcctggtacgccgccctggccacccggcccggctgcaagggctacagcacagatgtgtgtgtgcccatcagccggctgcctgagatcgtggtgcagaccaaggaggacctgaatgccagcggcctgaccggcagcatcgtgggccacgtgggagatggcaacttccactgcatcctgctggtgaacccagatgatgctgaggagctgggccgggtgaaggcctttgctgagcagctgggcagaagagccctggccctgcacggcacctgcacaggagagcacggcatcggcatgggcaagaggcagctgctgcaggaggaggtgggcgctgtgggcgtggagaccatgaggcagctgaaggctgtgctggacccccagggcctgatgaaccctgggaaggtgctgtag

SEQ ID NO: 157244 - DNA, 1455 bp, synthetic construct
  misc_feature 1..1455: note = Description of Artificial Sequence: Synthetic coding sequence
  source 1..1455: mol_type = other DNA
atggcccggctgctgcggagcgccacctgggagctgttcccctggaggggctactgcagccagaaggccaagggggagctgtgccgggactttgtggaggccctgaaggctgtggtgggcggcagccacgtgtccacagctgctgtggtgcgggagcagcacggcagagatgaatctgtgcaccgctgtgagcccccagatgctgtggtgtggccccagaatgtggagcaggtgtcccggctggccgccctgtgctaccggcagggcgtgcccatcatcccctttggaactggaacaggcctggagggcggcgtgtgtgctgtgcagggcggcgtgtgtgtgaacctgacccacatggaccgcatcctggagctgaaccaggaggacttctctgtggtggtggagcccggggtgaccaggaaggccctgaatgcccacctgcgggacagcggcctgtggttccctgtggaccccggggctgatgccagcctgtgtggcatggccgccaccggggccagcggcaccaatgctgtgcgctatggcaccatgagggacaacgtgctgaacctggaggtggtgctgcctgatggccgcctgctgcacacagctggccggggccgccacttcaggaagtctgctgctggctacaacctgaccggcctgtttgtgggcagcgagggcaccctgggcctcatcacagccaccaccctgcggctgcacccagcccctgaggccaccgtggccgccacctgtgccttccccagcgtgcaggccgctgtggacagcacagtgcacatcctgcaggccgctgtgcctgtggcccgcatcgagttcctggatgaggtgatgatggatgcctgcaaccgctacagcaagctgaactgcctggtggcccccaccctcttcctggagttccacggcagccagcaggccctggaggagcagctgcagaggacagaggagatcgtgcagcagaatggagccagtgacttctcctgggccaaggaggccgaggagaggagccggctgtggacagcccggcacaatgcctggtatgctgccctggccaccaggcctggctgcaagggctacagcacagatgtgtgtgtgcccatcagccggctgcctgagatcgtggtgcagaccaaggaggacctgaatgccagcggcctgaccggcagcatcgtgggccacgtgggagatggcaacttccactgcatcctgctggtgaacccagatgatgctgaggagctgggccgggtgaaggcctttgctgagcagctgggccggcgggccctggccctgcacggcacctgcaccggggagcacggcatcggcatgggcaagaggcagctgctgcaggaggaggtgggcgctgtgggcgtggagaccatgaggcagctgaaggctgtgctggacccccagggcctgatgaaccctgggaaggtgctgtag

SEQ ID NO: 157245 - DNA, 2139 bp, synthetic construct
  misc_feature 1..2139: note = Description of Artificial Sequence: Synthetic coding sequence
  source 1..2139: mol_type = other DNA
atgagggtgctgctgcacctgcctgccctgctggccagcctcatcctgctgcaggccgccgccagcaccacccgggcccagaccaccaggaccagcgccatcagtgacacagtgtcccaggccaaggtgcaggtgaacaaggccttcctggacagcaggacccggctgaagacagccatgagcagcgagacccccaccagccggcagctgtctgagtacctgaagcacgccaagggccgcaccaggacagccatcagaaatggccaggtgtgggaggagagcctgaagaggctgcggcagaaggccagcctgaccaacgtgacagaccccagcctggacctgaccagcctgagcctggaggtgggctgtggggccccagcccctgtggtgcgctgtgacccctgcagcccctaccgcaccatcaccggggactgcaacaacagaaggaagccagccctgggcgccgccaacagagccctggcccgctggctgcctgcagaatatgaagatggcctgagcctgcccttcggctggacccctgggaagaccagaaatggcttccccctgcccctggcccgggaggtgagcaacaagatcgtgggctacctgaatgaggagggcgtgctggaccagaacagaagcctgctcttcatgcagtggggccagatcgtggaccatgacctggactttgccccagacacagagctgggcagcagcgagtacagcaaggcccagtgtgatgagtactgcatccagggcgacaactgcttccccatcatgttccccccaaatgaccccaaggccggcacccagggcaagtgcatgcccttcttccgggccggctttgtgtgccccaccccaccctacaagagcctggcccgggagcagatcaatgccctgaccagcttcctggatgccagctttgtgtacagcagcgagcccagcctggccagccggctgaggaacctgagcagccccctgggcctgatggctgtgaaccaggaggtgtctgaccacggcctgccctacctgccctatgacagcaagaagcccagcccctgtgagttcatcaacaccacagcccgggtgccctgcttcctggccggggacagccgggccagcgagcacatcctgctggccaccagccacaccctcttcctgcgggagcacaaccggctggcccgggagctgaagaggctgaacccccagtgggatggagagaagctgtaccaggaggccaggaagatcctgggcgcctttgtgcagatcatcaccttccgggactacctgcccatcctgctgggggaccacatgcagaagtggatccccccctaccagggctacagcgagagcgtggacccccgcatcagcaatgtgttcacctttgccttccgcttcggccacctggaggtgcccagctccatgttccggctggatgagaactaccagccctggggccctgagcctgagctgcccctgcacaccctcttcttcaacacctggaggatggtgaaggatggcggcatcgaccccctggtgcggggcctgctggccaagaagagcaagctgatgaagcagaacaagatgatgactggagagctgaggaacaagctgttccagcccacccaccgcatccacggctttgacctggccgccatcaacacccagcgctgccgggaccacggccagcccggctacaacagctggagggccttctgtgacctgagccagccccagaccctggaggagctgaacacagtgctgaagagcaagatgctggccaagaagctgctgggcctgtatggcaccccagacaacatcgacatctggattggagccatcgccgagcccctggtggagcggggccgggtgggccccctgctggcctgcctgctgggcaagcagttccagcagatcagagatggagaccgcttctggtgggagaaccctggggtcttcaccaatgagcagaaggacagcctgcagaagatgtccttcagccggctggtgtgtgacaacacccgcatcaccaaggtgccccgggaccccttctgggccaacagctacccctatgactttgtggactgcagcgccatcgacaagctggacctgagcccctgggcctctgtgaagaactag

SEQ ID NO: 157246 - DNA, 1374 bp, synthetic construct
  misc_feature 1..1374: note = Description of Artificial Sequence: Synthetic coding sequence
  source 1..1374: mol_type = other DNA
tgcttccctgtgcagtttcctccaaatgaccccaaggccggcacccagggcaagtgcatgcccttcttccgggccggctttgtgtgccccaccccaccctacaagagcctggcccgggagcagatcaatgccctgaccagcttcctggatgccagctttgtgtacagcagcgagcccagcctggccagccggctgaggaacctgagcagccccctgggcctgatggctgtgaaccaggaggtgtctgaccacggcctgccctacctgccctatgacagcaagaagcccagcccctgtgagttcatcaacaccacagcccgggtgccctgcttcctggccggggacagccgggccagcgagcacatcctgctggccaccagccacaccctcttcctgcgggagcacaaccggctggcccgggagctgaagaggctgaacccccagtgggatggagagaagctgtaccaggaggccaggaagatcctgggcgcctttgtgcagatcatcaccttccgggactacctgcccatcctgctgggggaccacatgcagaagtggatccccccctaccagggctacagcgagagcgtggacccccgcatcagcaatgtgttcacctttgccttccgcttcggccacctggaggtgcccagctccatgttccggctggatgagaactaccagccctggggccctgagcctgagctgcccctgcacaccctcttcttcaacacctggaggatggtgaaggatggcggcatcgaccccctggtgcggggcctgctggccaagaagagcaagctgatgaagcagaacaagatgatgaccggggagctgaggaacaagctgttccagcccacccaccgcatccacggctttgacctggccgccatcaacacccagcgctgccgggaccacggccagcccggctacaacagctggagggccttctgtgacctgagccagccccagaccctggaggagctgaacacagtgctgaagagcaagatgctggccaagaagctgctgggcctgtatggcaccccagacaacatcgacatctggattggagccatcgccgagcccctggtggagcggggccgggtgggccccctgctggcctgcctgctgggcaagcagttccagcagatcagagatggagaccgcttctggtgggagaaccctggggtcttcaccaatgagcagaaggacagcctgcagaagatgtccttcagccggctggtgtgtgacaacacccgcatcaccaaggtgccccgggaccccttctgggccaacagctacccctatgactttgtggactgcagcgccatcgacaagctggacctgagcccctgggcctctgtgaagaactag

SEQ ID NO: 157247 - DNA, 1890 bp, synthetic construct
  misc_feature 1..1890: note = Description of Artificial Sequence: Synthetic coding sequence
  source 1..1890: mol_type = other DNA
atgagggtgctgctgcacctgcctgccctgctggccagcctcatcctgctgcaggccgccgccagcaccacccgggaccccagcctggacctgaccagcctgagcctggaggtgggctgtggggccccagcccctgtggtgcgctgtgacccctgcagcccctaccgcaccatcactggagactgcaacaacagaaggaagccagccctgggcgccgccaacagagccctggcccgctggctgcctgcagaatatgaagatggcctgagcctgcccttcggctggaccccaggcaagaccagaaatggcttccccctgcccctggcccgggaggtgagcaacaagatcgtgggctacctgaatgaggagggcgtgctggaccagaacagaagcctgctcttcatgcagtggggccagatcgtggaccatgacctggactttgccccagacacagagctgggcagcagcgagtacagcaaggcccagtgtgatgagtactgcatccagggcgacaactgcttccccatcatgtttcctccaaatgaccccaaggccggcacccagggcaagtgcatgcccttcttccgggccggctttgtgtgccccaccccaccctacaagagcctggcccgggagcagatcaatgccctgaccagcttcctggatgccagctttgtgtacagcagcgagcccagcctggccagccggctgaggaacctgagcagccccctgggcctgatggctgtgaaccaggaggtgtctgaccacggcctgccctacctgccctatgacagcaagaagcccagcccctgtgagttcatcaacaccacagcccgggtgccctgcttcctggccggggacagccgggccagcgagcacatcctgctggccaccagccacaccctcttcctgcgggagcacaaccggctggcccgggagctgaagaggctgaacccccagtgggatggagagaagctgtaccaggaggccaggaagatcctgggcgcctttgtgcagatcatcaccttccgggactacctgcccatcctgctgggggaccacatgcagaagtggatccccccctaccagggctacagcgagagcgtggacccccgcatcagcaatgtgttcacctttgccttccgcttcggccacctggaggtgcccagctccatgttccggctggatgagaactaccagccctggggccctgagcctgagctgcccctgcacaccctcttcttcaacacctggaggatggtgaaggatggcggcatcgaccccctggtgcggggcctgctggccaagaagagcaagctgatgaagcagaacaagatgatgaccggggagctgaggaacaagctgttccagcccacccaccgcatccacggctttgacctggccgccatcaacacccagcgctgccgggaccacggccagcccggctacaacagctggagggccttctgtgacctgagccagccccagaccctggaggagctgaacacagtgctgaagagcaagatgctggccaagaagctgctgggcctgtatggcaccccagacaacatcgacatctggattggagccatcgccgagcccctggtggagcggggccgggtgggccccctgctggcctgcctgctgggcaagcagttccagcagatcagagatggagaccgcttctggtgggagaaccctggggtcttcaccaatgagcagaaggacagcctgcagaagatgtccttcagccggctggtgtgtgacaacacccgcatcaccaaggtgccccgggaccccttctgggccaacagctacccctatgactttgtggactgcagcgccatcgacaagctggacctgagcccctgggcctctgtgaagaactag

SEQ ID NO: 157248 - DNA, 1962 bp, synthetic construct
  misc_feature 1..1962: note = Description of Artificial Sequence: Synthetic coding sequence
  source 1..1962: mol_type = other DNA
atgagcagcgagacccccaccagccggcagctgtctgagtacctgaagcacgccaagggccgcaccaggacagccatcagaaatggccaggtgtgggaggagagcctgaagaggctgcggcagaaggccagcctgaccaacgtgacagaccccagcctggacctgaccagcctgagcctggaggtgggctgtggggccccagcccctgtggtgcgctgtgacccctgcagcccctaccgcaccatcactggagactgcaacaacagaaggaagccagccctgggcgccgccaacagagccctggcccgctggctgcctgcagaatatgaagatggcctgagcctgcccttcggctggaccccaggcaagaccagaaatggcttccccctgcccctggcccgggaggtgagcaacaagatcgtgggctacctgaatgaggagggcgtgctggaccagaacagaagcctgctcttcatgcagtggggccagatcgtggaccatgacctggactttgccccagacacagagctgggcagcagcgagtacagcaaggcccagtgtgatgagtactgcatccagggcgacaactgcttccccatcatgtttcctccaaatgaccccaaggccggcacccagggcaagtgcatgcccttcttccgggccggctttgtgtgccccaccccaccctacaagagcctggcccgggagcagatcaatgccctgaccagcttcctggatgccagctttgtgtacagcagcgagcccagcctggccagccggctgaggaacctgagcagccccctgggcctgatggctgtgaaccaggaggtgtctgaccacggcctgccctacctgccctatgacagcaagaagcccagcccctgtgagttcatcaacaccacagcccgggtgccctgcttcctggccggggacagccgggccagcgagcacatcctgctggccaccagccacaccctcttcctgcgggagcacaaccggctggcccgggagctgaagaggctgaacccccagtgggatggagagaagctgtaccaggaggccaggaagatcctgggcgcctttgtgcagatcatcaccttccgggactacctgcccatcctgctgggggaccacatgcagaagtggatccccccctaccagggctacagcgagagcgtggacccccgcatcagcaatgtgttcacctttgccttccgcttcggccacctggaggtgcccagctccatgttccggctggatgagaactaccagccctggggccctgagcctgagctgcccctgcacaccctcttcttcaacacctggaggatggtgaaggatggcggcatcgaccccctggtgcggggcctgctggccaagaagagcaagctgatgaagcagaacaagatgatgaccggggagctgaggaacaagctgttccagcccacccaccgcatccacggctttgacctggccgccatcaacacccagcgctgccgggaccacggccagcccggctacaacagctggagggccttctgtgacctgagccagccccagaccctggaggagctgaacacagtgctgaagagcaagatgctggccaagaagctgctgggcctgtatggcaccccagacaacatcgacatctggattggagccatcgccgagcccctggtggagcggggccgggtgggccccctgctggcctgcctgctgggcaagcagttccagcagatcagagatggagaccgcttctggtgggagaaccctggggtcttcaccaatgagcagaaggacagcctgcagaagatgtccttcagccggctggtgtgtgacaacacccgcatcaccaaggtgccccgggaccccttctgggccaacagctacccctatgactttgtggactgcagcgccatcgacaagctggacctgagcccctgggcctctgtgaagaactag

SEQ ID NO: 157249 - DNA, 1323 bp, synthetic construct
  misc_feature 1..1323: note = Description of Artificial Sequence: Synthetic coding sequence
  source 1..1323: mol_type = other DNA
atgggagacctggagctgctgctgcctggagaggccgaggtgctggtgcggggcctgcgctccttccccctgcgggagatgggcagcgagggctggaaccagcagcacgagaacctggagaagctgaacatgcaggccatcctggatgccaccgtgtcccagggcgagcccatccaggagctgctggtgacccacggcaaggtgcccaccctggtggaggagctgattgctgtggagatgtggaagcagaaggtgtttcctgtgttctgccgggtggaggacttcaagccccagaacaccttccccatctacatggtggtgcaccacgaggccagcatcatcaacctgctggagaccgtcttcttccacaaggaggtgtgtgagagcgcagaagatactgtgctggacctggtggactactgccacaggaagctgaccctgctggtggcccagagcggctgcggcggccccccagagggggagggcagccaggacagcaaccccatgcaggagctgcagaagcaggccgagctgatggagtttgaaattgccctgaaggccctgtctgtgctgcgctacatcacagactgtgtggacagcctgagcctgagcaccctgagcaggatgctgagcacccacaacctgccctgcctgctggtggagctgctggagcacagcccctggagccggcgggagggcggcaagctgcagcagtttgagggcagccgctggcacacagtggcccccagcgagcagcagaagctgagcaagctggatggccaggtgtggatcgccctgtacaacctgctgctgagccctgaggcccaggcccgctactgcctgaccagctttgccaagggccgcctgctgaagctgcgggccttcctgacagacaccctgctggaccagctgcccaacctggcccacctgcagagcttcctggcccacctgaccctgacagagacccagccccccaagaaggacctggtgctggagcagatccctgagatctgggagcggctggagcgggagaacagaggcaagtggcaggccatcgccaagcaccagctgcagcacgtgttcagccccagcgagcaggacctgcggctgcaggcccggcgctgggccgagacctaccgcctggatgtgctggaggccgtggcccctgagcggccccgctgtgcctactgcagcgctgaggccagcaagcgctgcagccgctgccagaatgagtggtactgctgccgggagtgccaggtgaagcactgggagaagcacggcaagacctgtgtgctggccgcccagggcgaccgggccaagtag

SEQ ID NO: 157250 - DNA, 2001 bp, synthetic construct
  misc_feature 1..2001: note = Description of Artificial Sequence: Synthetic coding sequence
  source 1..2001: mol_type = other DNA
atgaggaaggtgcggggcccccctgtgtcctgcatcaagagggacagccccatccagtgcatccaggccatcgccgagaacagagcagatgctgtgaccctggatggcggcttcatctatgaggccggcctggccccctacaagctgcggcctgtggccgctgaggtgtatggaacagagcggcagcccaggacccactactatgctgtggccgtggtgaagaagggcggcagcttccagctgaatgagctgcagggcctgaagagctgccacacaggcctgcggaggacagctggctggaatgtgcccatcggcaccctgcggcccttcctgaactggacaggccccccagagcccatcgaggccgctgtggcccgcttcttcagcgccagctgtgtgcctggagctgacaagggccagttccccaacctgtgccgcctgtgtgccggcactggagaaaataaatgtgccttcagcagccaggagccctacttctcctacagcggggccttcaagtgcctgagagatggagctggagatgtggccttcatccgggagagcacagtgtttgaggacctgagtgatgaagctgagagagatgaatatgagctgctgtgcccagacaacaccaggaagcctgtggacaagttcaaggactgccacctggcccgggtgcccagccatgctgtggtggcccggtctgtgaatggcaaggaggatgccatctggaacctgctgcggcaggcccaggagaagtttgggaaggacaagagccccaagttccagctgtttggcagccccagcggccagaaggacctgctcttcaaggacagcgccatcggcttcagccgggtgcccccaagaattgattctggcctgtacctgggcagcggctacttcaccgccatccagaacctgaggaagtctgaggaggaggtggccgcccggcgggcccgggtggtgtggtgtgctgtgggggagcaggagctgaggaagtgcaaccagtggagcggcctgtctgagggctctgtgacctgcagcagcgccagcaccacagaggactgcatcgccctggtgctgaagggggaggctgatgccatgagcctggatggcggctacgtgtacacagctggaaaatgtggcctggtgcctgtgctggccgagaactacaagagccagcagagcagtgaccctgaccccaactgtgtggacaggcctgtggagggctacctggccgtggccgtggtgagaagaagtgacaccagcctgacctggaacagcgtgaagggcaagaagagctgccacacagctgtggacagaacagctggctggaacatccccatgggcctgctcttcaaccagacaggcagctgcaagtttgatgagtacttcagccagagctgtgcccctggcagtgaccccaggagcaacctgtgtgccctgtgcattggagatgagcagggagaaaataaatgtgtgcccaacagcaatgaaagatactacggctacaccggggccttccgctgcctggccgagaatgctggagatgtggcctttgtgaaggatgtgacagtgctgcagaacacagatggcaacaacaatgaggcctgggccaaggacctgaagctggccgactttgccctgctgtgcctggatggcaagaggaagcctgtgacagaggcccggagctgccacctggccatggcccccaaccacgctgtggtgtccaggatggacaaggtggagcggctgaagcaggtgctgctgcaccagcaggccaagtttggaagaaatggaagtgactgcccagacaagttctgcctcttccagagcgagaccaagaacctgctcttcaatgacaacacagaatgtctggcccggctgcacggcaagaccacctatgagaagtacctgggcccccagtatgtggccggcatcaccaacctgaagaagtgcagcaccagccccctgctggaggcctgtgagttcctgaggaagtag

SEQ ID NO: 157251 - DNA, 453 bp, synthetic construct
  misc_feature 1..453: note = Description of Artificial Sequence: Synthetic coding sequence
  source 1..453: mol_type = other DNA
atgaagctggtgttcctggtgctgctcttcctgggcgccctgggcctgtgcctggccggcagaagaagatctgtgcagtggtgtgctgtgtcccagcctgaggccaccaagtgcttccagtggcagaggaacatgaggaaggtgcggggcccccctgtgtcctgcatcaagagggacagccccatccagtgcatccaggccatcgccgagaacagagcagatgctgtgaccctggatggcggcttcatctatgaggccggcctggccccctacaagctgcggcctgtggccgctgaggtgtatggaacagagcggcagcctgctgtgtttcctgtgcagatcaaggacagcagccccacctgtgtggcctgtgtgcggggccagggcaagaccaacgtgcccagcccccccaggaacagaaccagcgccaccctggtgcccagctctgtgtag

SEQ ID NO: 157252 - DNA, 846 bp, synthetic construct
  misc_feature 1..846: note = Description of Artificial Sequence: Synthetic coding sequence
  source 1..846: mol_type = other DNA
atgaccagcaaagaagatggcaaggccgcccctggagaggagcggcggcgcagccccctggaccacctgcccccaccagccaacagcaacaagcccctgacccccttcagcattgaggacatcctgaacaagcccagcgtgcggcgcagctacagcctgtgtggggccgcccacctgctggccgctgctgacaagcacgcccagggcggcctgcccctggccggccgggccctgctgagccagaccagccccctgtgtgccctggaggagctggccagcaagaccttcaagggcctggaggtgtctgtgctgcaggccgctgagggcagagatggcatgaccatcttcggccagaggcagacccccaagaagaggaggaagagcaggacagccttcaccaaccaccagatctatgagctggagaagcgcttcctgtaccagaagtacctgagccctgctgaccgggaccagatcgcccagcagctgggcctgaccaatgcccaggtgatcacctggttccagaacagaagagccaagctgaagagggacctggaggagatgaaggcagatgtggagagcgccaagaagctgggccccagcggccagatggacatcgtggccctggccgagctggagcagaacagcgaggccacagctgggggcggcggcggctgcggccgggccaagagccggcccggcagccctgtgctgcccccaggggcccccaaggcccctggagctggggccctgcagctgagccctgccagccccctgacagaccagcctgccagcagccaggactgcagtgaagatgaagaagatgaggagattgatgtggatgactag

SEQ ID NO: 157253 - DNA, 597 bp, synthetic construct
  misc_feature 1..597: note = Description of Artificial Sequence: Synthetic coding sequence
  source 1..597: mol_type = other DNA
atgaacagcggccgggagcccaggacccccaggaccctgctgagcattgctgacatcctggcccccaggatggtgccccgggcccccagcgccccccagctgcctgagagcggccctggccccaccagccccctgtgtgccctggaggagctgaccagcaagaccttccggggcctggatgcccgggccctgcagcccagcgagggccgggccggcccagatgccctgggccctggcccctttggaaggaagaggaggaagagcaggacagccttcaccgcccagcaggtgctggagctggagaggagatttgtgttccagaagtacctggcccccagcgagagagatggcctggccacccggctgggcctggccaatgcccaggtggtgacctggttccagaacagaagagccaagctgaagagagatgtggaggagatgagagcagatgtggccagcctgcgggccctgagccctgaggtgctgtgcagcctggccctgcctgagggcgccccagaccccggcctgtgcctgggccctgctggccctgacagccggccccacctgagtgatgaggagatccaggtggatgactag

SEQ ID NO: 157254 - DNA, 585 bp, synthetic construct
  misc_feature 1..585: note = Description of Artificial Sequence: Synthetic coding sequence
  source 1..585: mol_type = other DNA
atgggcaagaggaccagcctggaggtgtccctgggggagctgggcggggagaagtgccggggcggcagaagaagcttcccccccctggccgccagcaggcctgcccggcctgggggctggcgctgggcccggcgggacctgtgcaagacagccagcagagctgagaacaacagccaggcctgccggccccagaggagagctggcccagatgccctgggccctggcccctttggaaggaagaggaggaagagcaggacagccttcaccgcccagcaggtgctggagctggagaggagatttgtgttccagaagtacctggcccccagcgagagagatggcctggccacccggctgggcctggccaatgcccaggtggtgacctggttccagaacagaagagccaagctgaagagagatgtggaggagatgagagcagatgtggccagcctgcgggccctgagccctgaggtgctgtgcagcctggccctgcctgagggcgccccagaccccggcctgtgcctgggccctgctggccctgacagccggccccacctgagtgatgaggagatccaggtggatgactag

SEQ ID NO: 157255 - DNA, 1398 bp, synthetic construct
  misc_feature 1..1398: note = Description of Artificial Sequence: Synthetic coding sequence
  source 1..1398: mol_type = other DNA
atggagacccccagccagaggcgggccaccaggtctggggcccaggccagcagcacccccctgagccccacccgcatcacccggctgcaggagaaggaggacctgcaggagctgaatgaccggctggccgtgtacatcgacagagtgcgcagcctggagacagaaaatgccggcctgcggctgcgcatcacagagagcgaggaggtggtgtcccgggaggtgtctggcatcaaggccgcctatgaagctgagctgggagatgccaggaagaccctggacagcgtggccaaggagcgggcccggctgcagctggagctgagcaaggtgcgggaggagttcaaggagctgaaggccaggaacaccaagaaggagggggacctgattgctgcccaggcccggctgaaggacctggaggccctgctgaacagcaaggaggccgccctgagcacagccctgtctgagaagaggaccctggagggggagctgcatgacctgcggggccaggtggccaagctggaggccgccctgggggaggccaagaagcagctgcaggatgagatgctgcggcgggtggatgctgagaaccggctgcagaccatgaaggaggagctggacttccagaagaacatctacagcgaggagctgcgggagaccaagagaagacatgagacccggctggtggagattgacaatggcaagcagcgggagtttgagagccggctggctgatgccctgcaggagctgcgggcccagcacgaggaccaggtggagcagtacaagaaggagctggagaagacctacagcgccaagctggacaatgcccggcagagcgctgagaggaacagcaacctggtgggcgccgcccacgaggagctgcagcagagccgcatcagaattgacagcctgagcgcccagctgagccagctgcagaagcagctggccgccaaggaggccaagctgcgggacctggaggacagcctggcccgggagcgggacaccagccggcggctgctggccgagaaggagcgggagatggccgagatgagggccaggatgcagcagcagctggatgagtaccaggagctgctggacatcaagctggccctggacatggagatccacgcctacaggaagctgctggagggggaggaggagcggctgcggctgagccccagccccaccagccagaggagccggggccgggccagcagccacagcagccagacccagggcggcggctctgtgaccaagaagaggaagctggagagcacagagagccgcagcagcttcagccagcacgcccggaccagcggccgggtggccgtggaggaggtggatgaagatgaagatggagatgacctgctgcaccaccaccacgtgtctggcagcagaagatag

SEQ ID NO: 157256 - DNA, 1905 bp, synthetic construct
  misc_feature 1..1905: note = Description of Artificial Sequence: Synthetic coding sequence
  source 1..1905: mol_type = other DNA
atggagacccccagccagaggcgggccaccaggtctggggcccaggccagcagcacccccctgagccccacccgcatcacccggctgcaggagaaggaggacctgcaggagctgaatgaccggctggccgtgtacatcgacagagtgcgcagcctggagacagaaaatgccggcctgcggctgcgcatcacagagagcgaggaggtggtgtcccgggaggtgtctggcatcaaggccgcctatgaagctgagctgggagatgccaggaagaccctggacagcgtggccaaggagcgggcccggctgcagctggagctgagcaaggtgcgggaggagttcaaggagctgaaggccaggaacaccaagaaggagggggacctgattgctgcccaggcccggctgaaggacctggaggccctgctgaacagcaaggaggccgccctgagcacagccctgtctgagaagaggaccctggagggggagctgcatgacctgcggggccaggtggccaagctggaggccgccctgggggaggccaagaagcagctgcaggatgagatgctgcggcgggtggatgctgagaaccggctgcagaccatgaaggaggagctggacttccagaagaacatctacagcgaggagctgcgggagaccaagagaagacatgagacccggctggtggagattgacaatggcaagcagcgggagtttgagagccggctggctgatgccctgcaggagctgcgggcccagcacgaggaccaggtggagcagtacaagaaggagctggagaagacctacagcgccaagctggacaatgcccggcagagcgctgagaggaacagcaacctggtgggcgccgcccacgaggagctgcagcagagccgcatcagaattgacagcctgagcgcccagctgagccagctgcagaagcagctggccgccaaggaggccaagctgcgggacctggaggacagcctggcccgggagcgggacaccagccggcggctgctggccgagaaggagcgggagatggccgagatgagggccaggatgcagcagcagctggatgagtaccaggagctgctggacatcaagctggccctggacatggagatccacgcctacaggaagctgctggagggggaggaggagcggctgcggctgagccccagccccaccagccagaggagccggggccgggccagcagccacagcagccagacccagggcggcggctctgtgaccaagaagaggaagctggagagcacagagagccgcagcagcttcagccagcacgcccggaccagcggccgggtggccgtggaggaggtggatgaggagggcaagtttgtgcggctgaggaacaagagcaatgaagaccagagcatgggcaactggcagatcaagaggcagaatggagatgaccccctgctgacctaccgcttcccccccaagttcaccctgaaggccggccaggtggtgaccatctgggccgccggggccggggccacccacagccccccaacagacctggtgtggaaggcccagaacacctggggctgcggcaacagcctgaggacagccctgatcaacagcactggagagggcagccactgcagcagcagcggggaccctgctgagtacaacctgcggagcaggacagtgctgtgtggcacctgtggccagcctgctgacaaggccagcgccagcggcagcggggcccaggtgggcggccccatcagcagcggcagcagcgccagctctgtgacagtgaccaggagctacagatctgtgggcggcagcggcggcggcagctttggagacaacctggtgaccaggagctacctgctgggcaacagcagccccaggacccagagcccccagaactgcagcatcatgtag

SEQ ID NO: 157257 - DNA, 1719 bp, synthetic construct
  misc_feature 1..1719: note = Description of Artificial Sequence: Synthetic coding sequence
  source 1..1719: mol_type = other DNA
atggagacccccagccagaggcgggccaccaggtctggggcccaggccagcagcacccccctgagccccacccgcatcacccggctgcaggagaaggaggacctgcaggagctgaatgaccggctggccgtgtacatcgacagagtgcgcagcctggagacagaaaatgccggcctgcggctgcgcatcacagagagcgaggaggtggtgtcccgggaggtgtctggcatcaaggccgcctatgaagctgagctgggagatgccaggaagaccctggacagcgtggccaaggagcgggcccggctgcagctggagctgagcaaggtgcgggaggagttcaaggagctgaaggccaggaacaccaagaaggagggggacctgattgctgcccaggcccggctgaaggacctggaggccctgctgaacagcaaggaggccgccctgagcacagccctgtctgagaagaggaccctggagggggagctgcatgacctgcggggccaggtggccaagctggaggccgccctgggggaggccaagaagcagctgcaggatgagatgctgcggcgggtggatgctgagaaccggctgcagaccatgaaggaggagctggacttccagaagaacatctacagcgaggagctgcgggagaccaagagaagacatgagacccggctggtggagattgacaatggcaagcagcgggagtttgagagccggctggctgatgccctgcaggagctgcgggcccagcacgaggaccaggtggagcagtacaagaaggagctggagaagacctacagcgccaagctggacaatgcccggcagagcgctgagaggaacagcaacctggtgggcgccgcccacgaggagctgcagcagagccgcatcagaattgacagcctgagcgcccagctgagccagctgcagaagcagctggccgccaaggaggccaagctgcgggacctggaggacagcctggcccgggagcgggacaccagccggcggctgctggccgagaaggagcgggagatggccgagatgagggccaggatgcagcagcagctggatgagtaccaggagctgctggacatcaagctggccctggacatggagatccacgcctacaggaagctgctggagggggaggaggagcggctgcggctgagccccagccccaccagccagaggagccggggccgggccagcagccacagcagccagacccagggcggcggctctgtgaccaagaagaggaagctggagagcacagagagccgcagcagcttcagccagcacgcccggaccagcggccgggtggccgtggaggaggtggatgaggagggcaagtttgtgcggctgaggaacaagagcaatgaagaccagagcatgggcaactggcagatcaagaggcagaatggagatgaccccctgctgacctaccgcttcccccccaagttcaccctgaaggccggccaggtggtgaccatctgggccgccggggccggggccacccacagccccccaacagacctggtgtggaaggcccagaacacctggggctgcggcaacagcctgaggacagccctgatcaacagcactggagaggaggtggccatgaggaagctggtgcgctctgtgacagtggtggaggatgatgaagatgaagatggagatgacctgctgcaccaccaccacgtgtctggcagcagaagatag

SEQ ID NO: 157258 - DNA, 1476 bp, synthetic construct
  misc_feature 1..1476: note = Description of Artificial Sequence: Synthetic coding sequence
  source 1..1476: mol_type = other DNA
atgcagcccctgctgtgcctgggcaacctggaggatgcccgggagaggacaggcaccctgctggcccagcacccagcctggggccgcacccgggccaagccaggcagccccctgaacaccaagaaggagggggacctgattgctgcccaggcccggctgaaggacctggaggccctgctgaacagcaaggaggccgccctgagcacagccctgtctgagaagaggaccctggagggggagctgcatgacctgcggggccaggtggccaagctggaggccgccctgggggaggccaagaagcagctgcaggatgagatgctgcggcgggtggatgctgaaaatcggctgcagaccatgaaggaggagctggacttccagaagaacatctacagcgaggagctgcgggagaccaagagaagacatgagacccggctggtggagattgacaacgggaagcagcgggagtttgagagccggctggctgatgccctgcaggagctgcgggcccagcacgaggaccaggtggagcagtacaagaaggagctggagaagacctacagcgccaagctggacaatgcccggcagagcgctgagaggaacagcaacctggtgggcgccgcccacgaggagctgcagcagagccgcatcagaattgacagcctgagcgcccagctgagccagctgcagaagcagctggccgccaaggaggccaagctgcgggacctggaggacagcctggcccgggagcgggacaccagccggcggctgctggccgagaaggagcgggagatggccgagatgagggccaggatgcagcagcagctggatgagtaccaggagctgctggacatcaagctggccctggacatggagatccacgcctacaggaagctgctggagggggaggaggagcggctgcggctgagccccagccccaccagccagaggagccggggccgggccagcagccacagcagccagacccagggcggcggctctgtgaccaagaagaggaagctggagagcacagagagccgcagcagcttcagccagcacgcccggaccagcggccgggtggccgtggaggaggtggatgaggagggcaagtttgtgcggctgaggaacaagagcaatgaagaccagagcatgggcaactggcagatcaagaggcagaatggagatgaccccctgctgacctaccgcttcccccccaagttcaccctgaaggccggccaggtggtgaccatctgggccgccggggccggggccacccacagccccccaacagacctggtgtggaaggcccagaacacctggggctgcggcaacagcctgaggacagccctgatcaacagcactggagaggaggtggccatgaggaagctggtgcgctctgtgacagtggtggaggatgatgaagatgaagatggagatgacctgctgcaccaccaccacgtgtctggcagcagaagatag

SEQ ID NO: 157259 - DNA, 1845 bp, synthetic construct
  misc_feature 1..1845: note = Description of Artificial Sequence: Synthetic coding sequence
  source 1..1845: mol_type = other DNA
atggagacccccagccagaggcgggccaccaggtctggggcccaggccagcagcacccccctgagccccacccgcatcacccggctgcaggagaaggaggacctgcaggagctgaatgaccggctggccgtgtacatcgacagagtgcgcagcctggagacagaaaatgccggcctgcggctgcgcatcacagagagcgaggaggtggtgtcccgggaggtgtctggcatcaaggccgcctatgaagctgagctgggagatgccaggaagaccctggacagcgtggccaaggagcgggcccggctgcagctggagctgagcaaggtgcgggaggagttcaaggagctgaaggccaggaacaccaagaaggagggggacctgattgctgcccaggcccggctgaaggacctggaggccctgctgaacagcaaggaggccgccctgagcacagccctgtctgagaagaggaccctggagggggagctgcatgacctgcggggccaggtggccaagctggaggccgccctgggggaggccaagaagcagctgcaggatgagatgctgcggcgggtggatgctgagaaccggctgcagaccatgaaggaggagctggacttccagaagaacatctacagcgaggagctgcgggagaccaagagaagacatgagacccggctggtggagattgacaatggcaagcagcgggagtttgagagccggctggctgatgccctgcaggagctgcgggcccagcacgaggaccaggtggagcagtacaagaaggagctggagaagacctacagcgccaagctggacaatgcccggcagagcgctgagaggaacagcaacctggtgggcgccgcccacgaggagctgcagcagagccgcatcagaattgacagcctgagcgcccagctgagccagctgcagaagcagctggccgccaaggaggccaagctgcgggacctggaggacagcctggcccgggagcgggacaccagccggcggctgctggccgagaaggagcgggagatggccgagatgagggccaggatgcagcagcagctggatgagtaccaggagctgctggacatcaagctggccctggacatggagatccacgcctacaggaagctgctggagggggaggaggagcggctgcggctgagccccagccccaccagccagaggagccggggccgggccagcagccacagcagccagacccagggcggcggctctgtgaccaagaagaggaagctggagagcacagagagccgcagcagcttcagccagcacgcccggaccagcggccgggtggccgtggaggaggtggatgaggagggcaagtttgtgcggctgaggaacaagagcaatgaagaccagagcatgggcaactggcagatcaagaggcagaatggagatgaccccctgctgacctaccgcttcccccccaagttcaccctgaaggccggccaggtggtgaccatctgggccgccggggccggggccacccacagccccccaacagacctggtgtggaaggcccagaacacctggggctgcggcaacagcctgaggacagccctgatcaacagcactggagaggaggtggccatgaggaagctggtgcgctctgtgacagtggtggaggatgatgaagatgaagatggagatgacctgctgcaccaccaccacggcagccactgcagcagcagcggggaccctgctgagtacaacctgcggagcaggacagtgctgtgtggcacctgtggccagcctgctgacaaggccagcgccagcggcagcggggcccagagcccccagaactgcagcatcatgtag

SEQ ID NO: 157260 - DNA, 1995 bp, synthetic construct
  misc_feature 1..1995: note = Description of Artificial Sequence: Synthetic coding sequence
  source 1..1995: mol_type = other DNA
atggagacccccagccagaggcgggccaccaggtctggggcccaggccagcagcacccccctgagccccacccgcatcacccggctgcaggagaaggaggacctgcaggagctgaatgaccggctggccgtgtacatcgacagagtgcgcagcctggagacagaaaatgccggcctgcggctgcgcatcacagagagcgaggaggtggtgtcccgggaggtgtctggcatcaaggccgcctatgaagctgagctgggagatgccaggaagaccctggacagcgtggccaaggagcgggcccggctgcagctggagctgagcaaggtgcgggaggagttcaaggagctgaaggccaggaacaccaagaaggagggggacctgattgctgcccaggcccggctgaaggacctggaggccctgctgaacagcaaggaggccgccctgagcacagccctgtctgagaagaggaccctggagggggagctgcatgacctgcggggccaggtggccaagctggaggccgccctgggggaggccaagaagcagctgcaggatgagatgctgcggcgggtggatgctgagaaccggctgcagaccatgaaggaggagctggacttccagaagaacatctacagcgaggagctgcgggagaccaagagaagacatgagacccggctggtggagattgacaatggcaagcagcgggagtttgagagccggctggctgatgccctgcaggagctgcgggcccagcacgaggaccaggtggagcagtacaagaaggagctggagaagacctacagcgccaagctggacaatgcccggcagagcgctgagaggaacagcaacctggtgggcgccgcccacgaggagctgcagcagagccgcatcagaattgacagcctgagcgcccagctgagccagctgcagaagcagctggccgccaaggaggccaagctgcgggacctggaggacagcctggcccgggagcgggacaccagccggcggctgctggccgagaaggagcgggagatggccgagatgagggccaggatgcagcagcagctggatgagtaccaggagctgctggacatcaagctggccctggacatggagatccacgcctacaggaagctgctggagggggaggaggagcggctgcggctgagccccagccccaccagccagaggagccggggccgggccagcagccacagcagccagacccagggcggcggctctgtgaccaagaagaggaagctggagagcacagagagccgcagcagcttcagccagcacgcccggaccagcggccgggtggccgtggaggaggtggatgaggagggcaagtttgtgcggctgaggaacaagagcaatgaagaccagagcatgggcaactggcagatcaagaggcagaatggagatgaccccctgctgacctaccgcttcccccccaagttcaccctgaaggccggccaggtggtgaccatctgggccgccggggccggggccacccacagccccccaacagacctggtgtggaaggcccagaacacctggggctgcggcaacagcctgaggacagccctgatcaacagcactggagaggaggtggccatgaggaagctggtgcgctctgtgacagtggtggaggatgatgaagatgaagatggagatgacctgctgcaccaccaccacggcagccactgcagcagcagcggggaccctgctgagtacaacctgcggagcaggacagtgctgtgtggcacctgtggccagcctgctgacaaggccagcgccagcggcagcggggcccaggtgggcggccccatcagcagcggcagcagcgccagctctgtgacagtgaccaggagctacagatctgtgggcggcagcggcggcggcagctttggagacaacctggtgaccaggagctacctgctgggcaacagcagccccaggacccagagcccccagaactgcagcatcatgtag

SEQ ID NO: 157261 - DNA, 1719 bp, synthetic construct; identical to SEQ ID NO: 157257
  misc_feature 1..1719: note = Description of Artificial Sequence: Synthetic coding sequence
  source 1..1719: mol_type = other DNA

SEQ ID NO: 157262 - DNA, 1476 bp, synthetic construct; identical to SEQ ID NO: 157258
  misc_feature 1..1476: note = Description of Artificial Sequence: Synthetic coding sequence
  source 1..1476: mol_type = other DNA

SEQ ID NO: 157263 - DNA, 1464 bp, synthetic construct
  misc_feature 1..1464: note = Description of Artificial Sequence: Synthetic coding sequence
  source 1..1464: mol_type = other DNA
atggagacccccagccagaggcgggccaccaggtctggggcccaggccagcagcacccccctgagccccacccgcatcacccggctgcaggagaaggaggacctgcaggagctgaatgaccggctggccgtgtacatcgacagagtgcgcagcctggagacagaaaatgccggcctgcggctgcgcatcacagagagcgaggaggtggtgtcccgggaggtgtctggcatcaaggccgcctatgaagctgagctgggagatgccaggaagaccctggacagcgtggccaaggagcgggcccggctgcagctggagctgagcaaggtgcgggaggagttcaaggagctgaaggccaggaacaccaagaaggagggggacctgattgctgcccaggcccggctgaaggacctggaggccctgctgaacagcaaggaggccgccctgagcacagccctgtctgagaagaggaccctggagggggagctgcatgacctgcggggccaggtggccaagctggaggccgccctgggggaggccaagaagcagctgcaggatgagatgctgcggcgggtggatgctgagaaccggctgcagaccatgaaggaggagctggacttccagaagaacatctacagcgaggagctgcgggagaccaagagaagacatgagacccggctggtggagattgacaatggcaagcagcgggagtttgagagccggctggctgatgccctgcaggagctgcgggcccagcacgaggaccaggtggagcagtacaagaaggagctggagaagacctacagcgccaagctggacaatgcccggcagagcgctgagaggaacagcaacctggtgggcgccgcccacgaggagctgcagcagagccgcatcagaattgacagcctgagcgcccagctgagccagctgcagaagcagctggccgccaaggaggccaagctgcgggacctggaggacagcctggcccgggagcgggacaccagccggcggctgctggccgagaaggagcgggagatggccgagatgagggccaggatgcagcagcagctggatgagtaccaggagctgctggacatcaagctggccctggacatggagatccacgcctacaggaagctgctggagggggaggaggagcggctgcggctgagccccagccccaccagccagaggagccggggccgggccagcagccacagcagccagacccagggcggcggctctgtgaccaagaagaggaagctggagagcacagagagccgcagcagcttcagccagcacgcccggaccagcggcaacagcctgaggacagccctgatcaacagcactggagaggaggtggccatgaggaagctggtgcgctctgtgacagtggtggaggatgatgaagatgaagatggagatgacctgctgcaccaccaccacgtgtctggcagcagaagatag

SEQ ID NO: 157264 - DNA, 1725 bp, synthetic construct
  misc_feature 1..1725: note = Description of Artificial Sequence: Synthetic coding sequence
  source 1..1725: mol_type = other DNA
atgggcaacagcgagggctgcaacaccaagaaggagggggacctgattgctgcccaggcccggctgaaggacctggaggccctgctgaacagcaaggaggccgccctgagcacagccctgtctgagaagaggaccctggagggggagctgcatgacctgcggggccaggtggccaagctggaggccgccctgggggaggccaagaagcagctgcaggatgagatgctgcggcgggtggatgctgagaaccggctgcagaccatgaaggaggagctggacttccagaagaacatctacagcgaggagctgcgggagaccaagagaagacatgagacccggctggtggagattgacaatggcaagcagcgggagtttgagagccggctggctgatgccctgcaggagctgcgggcccagcacgaggaccaggtggagcagtacaagaaggagctggagaagacctacagcgccaagctggacaatgcccggcagagcgctgagaggaacagcaacctggtgggcgccgcccacgaggagctgcagcagagccgcatcagaattgacagcctgagcgcccagctgagccagctgcagaagcagctggccgccaaggaggccaagctgcgggacctggaggacagcctggcccgggagcgggacaccagccggcggctgctggccgagaaggagcgggagatggccgagatgagggccaggatgcagcagcagctggatgagtaccaggagctgctggacatcaagctggccctggacatggagatccacgcctacaggaagctgctggagggggaggaggagcggctgcggctgagccccagccccaccagccagaggagccggggccgggccagcagccacagcagccagacccagggcggcggctctgtgaccaagaagaggaagctggagagcacagagagccgcagcagcttcagccagcacgcccggaccagcggccgggtggccgtggaggaggtggatgaggagggcaagtttgtgcggctgaggaacaagagcaatgaagaccagagcatgggcaactggcagatcaagaggcagaatggagatgaccccctgctgacctaccgcttcccccccaagttcaccctgaaggccggccaggtggtgaccatctgggccgccggggccggggccacccacagccccccaacagacctggtgtggaaggcccagaacacctggggctgcggcaacagcctgaggacagccctgatcaacagcactggagaggaggtggccatgaggaagctggtgcgctctgtgacagtggtggaggatgatgaagatgaagatggagatgacctgctgcaccaccaccacggcagccactgcagcagcagcggggaccctgctgagtacaacctgcggagcaggacagtgctgtgtggcacctgtggccagcctgctgacaaggccagcgccagcggcagcggggcccaggtgggcggccccatcagcagcggcagcagcgccagctctgtgacagtgaccaggagctacagatctgtgggcggcagcggcggcggcagctttggagacaacctggtgaccaggagctacctgctgggcaacagcagccccaggacccagagcccccagaactgcagcatcatccaggagatgggcatgcgctgggaggtggaggagggccgcaggaaggtgtccctgagctgcctgccctag

SEQ ID NO: 157265 - DNA, 1848 bp, synthetic construct
  misc_feature 1..1848: note = Description of Artificial Sequence: Synthetic coding sequence
  source 1..1848: mol_type = other DNA
atgcccagcaggaagtttgctgatggagaggtggtgcggggccgctggccaggcagcagcctgtactatgaggtggagatcctgagccatgacagcaccagccagctgtacacagtgaagtacaaggatggaacagagctggagctgaaggaaaatgacatcaagcccctgaccagcttccggcagaggaagggcggcagcaccagcagcagccccagcagaagaagaggcagccgcagccgcagccgcagccgcagccctggccggccccccaagagcgccaggagaagtgccagcgccagccaccaggccgacatcaaggaggcccggcgggaggtggaggtgaagctgacccccctcatcctgaagccctttggaaacagcatcagccgctacaatggagagcctgagcacattgaaagaaatgatgccccccacaagaacacccaggagaagttcagcctgagccaggagagcagctacatcgccacccagtacagcctgcggccccggcgggaggaggtgaagctgaaggagattgacagcaaggaggagaagtatgtggccaaggagctggccgtgaggacctttgaggtgacccccatccgggccaaggacctggagtttggaggagtgcctggggtcttcctgatcatgtttggcctgcctgtgttcctgttcctgctgctgctgatgtgcaagcagaaggaccccagcctgctgaacttccccccacccctgcctgccctgtatgagctgtgggagaccagggtgtttggagtgtacctgctgtggttcctgatccaggtgctcttctacctgctgcccatcggcaaggtggtggagggcacccccctgattgatggccggcggctgaagtaccgcctgaatggcttctacgccttcatcctgaccagcgctgtgattggcaccagcctcttccagggcgtggagttccactacgtgtacagccacttcctgcagtttgccctggccgccaccgtcttctgtgtggtgctgtctgtgtacctgtacatgaggagcctgaaggcccccagaaatgacctgagccctgccagcagtggaaatgctgtgtatgacttcttcatcggccgggagctgaacccccgcatcggcacctttgacctgaagtacttctgtgagctgcggcccggcctcatcggctgggtggtgatcaacctggtgatgctgctggccgagatgaagatccaggacagagctgtgcccagcctggccatgatcctggtgaacagcttccagctgctgtatgtggtggatgccctgtggaatgaggaggccctgctgaccaccatggacatcatccatgatggcttcggcttcatgctggccttcggggacctggtgtgggtgcccttcatctacagcttccaggccttctacctggtgagccaccccaatgaggtgtcctggcccatggccagcctcatcatcgtgctgaagctgtgtggctacgtgatcttccggggggccaacagccagaagaatgccttcaggaagaaccccagcgaccccaagctggcccacctgaagaccatccacaccagcacaggcaagaacctgctggtgtctggctggtggggctttgtgcgccaccccaactacctgggggacctgatcatggccctggcctggagcctgccctgtggcttcaaccacatcctgccctacttctacatcatctacttcaccatgctgctggtgcaccgggaggccagagatgagtaccactgcaagaagaagtatggagtggcctgggagaagtactgccagagggtgccctaccgcatcttcccctacatctactag

SEQ ID NO: 157266 - DNA, 1848 bp, synthetic construct; identical to SEQ ID NO: 157265
  misc_feature 1..1848: note = Description of Artificial Sequence: Synthetic coding sequence
  source 1..1848: mol_type = other DNA

SEQ ID NO: 157267 - DNA, 156 bp, synthetic construct
  misc_feature 1..156: note = Description of Artificial Sequence: Synthetic coding sequence
  source 1..156: mol_type = other DNA
atgcccagcaggaagtttgctgatggagaggtggtgcggggccgctggccaggcagcagcctgtactatgaggtggagatcctgagccatgacagcaccagccagctgtacacagtgaagtacaaggatggaacagagctggagctgaaggagtag

SEQ ID NO: 157268 - DNA, 387 bp, synthetic construct
  misc_feature 1..387: note = Description of Artificial Sequence: Synthetic coding sequence
  source 1..387: mol_type = other DNA
attggccgggagctgaaccccagaattggcacctttgacctgaagtacttctgtgagctgcggcccggcctgattggctgggtggtgatcaacctggtgatgctgctggccgagatgaagatccaggacagagctgtgcccagcctggccatgatcctggtgaacagcttccagctgctgtatgtggtggatgccctgtggaatgaggaggccctgctgaccaccatggacatcatccatgatggcttcggcttcatgctggcctttggagacctggtgtgggtgcccttcatctacagcttccaggccttctacctggtgagccaccccaatgaggtgtcctggcccatggccagcctcatcatcgtgctgaagcgggagtactag

SEQ ID NO: 157269 - DNA, 642 bp, synthetic construct
  misc_feature 1..642: note = Description of Artificial Sequence: Synthetic coding sequence
  source 1..642: mol_type = other DNA
atgcccagcaggaagtttgctgatggagaggtggtgcggggccgctggccaggcagcagcctgtactatgaggtggagatcctgagccatgacagcaccagccagctgtacacagtgaagtacaaggatggaacagagctggagctgaaggaaaatgacatcaagcccctgaccagcttccggcagaggaagggcggcagcaccagcagcagccccagcagaagaagaggcagccgcagccgcagccgcagccgcagccctggccggccccccaagagcgccaggagaagtgccagcgccagccaccaggccgacatcaaggaggcccggcgggaggtggaggtgaagctgacccccctcatcctgaagccctttggaaacagcatcagccgctacaatggagagcctgagcacattgaaagaaatgatgccccccacaagaacacccaggagaagttcagcctgagccaggagagcagctacatcgccacccagtacagcctgcggccccggcgggaggaggtgaagctgaaggagattgacagcaaggaggagaagtatgtggccaaggagctggccgtgaggacctttgaggtgacccccatccgggccaaggacctggagtttggaggagtgccctag

SEQ ID NO: 157270 - DNA, 324 bp, synthetic construct
  misc_feature 1..324: note = Description of Artificial Sequence: Synthetic coding sequence
  source 1..324: mol_type = other DNA
tgaagcaccagcctgaagatgtacttctacttctacatcgacctgaagaccatccacaccagcacaggcaagaacctgctggtgtctggctggtggggctttgtgcgccaccccaactacctgggggacctgatcatggccctggcctggagcctgccctgtggcttcaaccacatcctgccctacttctacatcatctacttcaccatgctgctggtgcaccgggaggccagagatgagtaccactgcaagaagaagtatggagtggcctgggagaagtactgccagagggtgccctaccgcatcttcccctacatctactag

SEQ ID NO: 157271 - DNA, 1761 bp, synthetic construct
  misc_feature 1..1761: note = Description of Artificial Sequence: Synthetic coding sequence
  source 1..1761: mol_type = other DNA
atggccacagccacccctgtgccccccaggatgggcagcagagctgggggccccaccacccccctgagccccacccggctgagccggctgcaggagaaggaggagctgcgggagctgaatgaccggctggccgtgtacatcgacaaggtgcgcagcctggagacagagaacagcgccctgcagctgcaggtgacagagcgggaggaggtgcggggccgggagctgaccggcctgaaggccctgtatgaaacagagctggctgatgcccggcgggccctggatgacacagcccgggagcgggccaagctgcagatcgagctgggcaagtgcaaggccgagcatgaccagctgctgctgaactatgccaagaaggagagtgacctgaatggagcccagatcaagctgcgggagtatgaggccgccctgaacagcaaggatgctgccctggccacagccctgggggacaagaagagcctggagggggacctggaggacctgaaggaccagatcgcccagctggaggccagcctggccgccgccaagaagcagctggctgatgagaccctgctgaaggtggacctggagaaccgctgccagagcctgacagaggacctggagttcaggaagtccatgtatgaggaggagatcaatgagaccaggaggaagcatgagacccggctggtggaggtggacagcggccggcagatcgagtatgagtacaagctggcccaggccctgcacgagatgagggagcagcatgatgcccaggtgcggctgtacaaggaggagctggagcagacctaccacgccaagctggagaatgcccggctgagcagcgagatgaacaccagcacagtgaacagcgcccgggaggagctgatggagagcaggatgagaattgagagcctgagcagccagctgagcaacctgcagaaggagagccgggcctgcctggagcgcatccaggagctggaggacctgctggccaaggagaaggacaacagcaggaggatgctgacagacaaggagcgggagatggccgagatccgggaccagatgcagcagcagctgaatgactatgagcagctgctggatgtgaagctggccctggacatggagatcagcgcctacaggaagctgctggagggggaggaggagcggctgaagctgagccccagccccagcagccgggtgacagtgtcccgggccagcagcagccgctctgtgaggaccacccggggcaagaggaagagggtggatgtggaggagagcgaggccagcagctctgtgtccatcagccacagcgccagcgccactggaaatgtgtgcatcgaggagattgatgtggatggcaagttcatccggctgaagaacaccagcgagcaggaccagcccatgggcggctgggagatgatcaggaagattggagacacctctgtgtcctacaagtacaccagccgctacgtgctgaaggccggccagacagtgaccatctgggccgccaatgctggggtgacagccagccccccaacagacctgatctggaagaaccagaacagctggggcactggagaagatgtgaaggtgatcctgaagaacagccagggcgaggaggtggcccagaggagcaccgtcttcaagaccaccatccctgaggaggaggaggaggaggaggaggccgccggcgtggtggtggaggaggagctgttccaccagcagggcaccccccgggccagcaacagaagctgtgccatcatgtag

SEQ ID NO: 157272 - DNA, 1803 bp, synthetic construct
  misc_feature 1..1803: note = Description of Artificial Sequence: Synthetic coding sequence
  source 1..1803: mol_type = other DNA
atggccacccccctgcccggccgggccggcggccctgccacccccctgagccccacccggctgagccggctgcaggagaaggaggagctgcgggagctgaatgaccggctggcccactacatcgacagagtgcgggccctggagctggagaatgaccggctgctgctgaagatcagcgagaaggaggaggtgaccacccgggaggtgtctggcatcaaggccctgtatgagagcgagctggctgatgcccggcgggtgctggatgaaacagcccgggagcgggcccggctgcagattgaaattggcaagctgcgggcagagctggatgaggtgaacaagagcgccaagaagcgggagggggagctgactgtggcccagggccgggtgaaggacctggagagcctcttccacaggtctgaggtggagctggccgccgccctgagtgacaagaggggcctggagagtgatgtggccgagctgcgggcccagctggccaaggccgaggatggccatgctgtggccaagaagcagctggagaaggagaccctgatgagggtggacctggagaaccgctgccagagcctgcaggaggagctggacttcaggaagtctgtgtttgaggaggaggtgcgggagaccaggagaagacatgaaagaaggctggtggaggtggacagcagccggcagcaggagtatgacttcaagatggcccaggccctggaggagctgcggagccagcatgatgagcaggtgcggctgtacaagctggagctggagcagacctaccaggccaagctggacagcgccaagctgagcagtgaccagaatgacaaggccgccagcgctgcccgggaggagctgaaggaggccaggatgaggctggagagcctgagctaccagctgagcggcctgcagaagcaggccagcgctgctgaggaccgcatccgggagctggaggaggccatggccggggagcgggacaagttcaggaagatgctggatgccaaggagcaggagatgacagagatgagagatgtgatgcagcagcagctggccgagtaccaggagctgctggatgtgaagctggccctggacatggagatcaatgcctacaggaagctgctggagggggaggaggagcggctgaagctgagccccagccccagcagccgggtgacagtgtcccgggccaccagcagcagcagcggcagcctgagcgccaccggccgcctgggccgcagcaagaggaagaggctggaggtggaggagcccctgggcagcggccccagcgtgctgggcaccggcaccggcggcagcggcggcttccacctggcccagcaggccagcgccagcggctctgtgtccattgaggagattgacctggagggcaagtttgtgcagctgaagaacaacagcgacaaggaccagagcctgggcaactggaggatcaagaggcaggtgctggagggggaggagatcgcctacaagttcacccccaagtacatcctgcgggccggccagatggtgacagtgtgggccgccggggccggcgtggcccacagcccccccagcaccctggtgtggaagggccagagctcctggggcaccggggagagcttcagaacagtgctggtgaatgctgatggagaggaggtggccatgaggacagtgaagaagagctctgtgatgagagaaaatgaaaatggagaggaggaggaggaggaggccgagtttggagaagaagatctcttccaccagcagggcgaccccaggaccaccagccggggctgctacgtgatgtag

SEQ ID NO: 157273 - DNA, 1803 bp, synthetic construct; identical to SEQ ID NO: 157272
  misc_feature 1..1803: note = Description of Artificial Sequence: Synthetic coding sequence
  source 1..1803: mol_type = other DNA

SEQ ID NO: 157274 - DNA, 651 bp, synthetic construct
  misc_feature 1..651: note = Description of Artificial Sequence: Synthetic coding sequence
  source 1..651: mol_type = other DNA
atgctgattggaggcaacatcgaggtgcacgtgaaccctggagatggcaccggcctgaggaaggccctgctgcacgcccccaccggcacctgcagtgatggccaggcccacagcatcagcctggtgaggaacagacgcatcatcaccgtgcagctggatgagaacaaccctgtggagatgaagctgggcaccctggtggagagcaggaccatcaacgtgagcaacctgtatgtgggcggcatccctgagggggagggcaccagcctgctgaccatgagaagaagcttccacggctgcatcaagaacctgatcttcaacctggagctgctggacttcaacagcgctgtgatgagcaagagcacctggaccccagctggctgccagaagggcctgtcctggctgcccatgcagaggaccaagctgctgcctgagccccgggccttccctgtgggcgccgccagcttcaccatcagccaggtgcagagcgccaaggagggcctgggccagcgggagctgaagtggggcctggccgtgaaggtgcctgccaaggccggggccggggccggggccggggctgtgctgaagatccgggccggcaccggccgggagcgggtgccccaggccacccagatgacccggcccaacccctag

SEQ ID NO: 157275 - DNA, 9228 bp, synthetic construct
  misc_feature 1..9228: note = Description of Artificial Sequence: Synthetic coding sequence
  source 1..9228: mol_type = other DNA
atgagaggaggagtgctgctggtgctgctgctgtgtgtggccgcccagtgccggcagaggggcctcttccctgccatcctgaacctggccagcaatgcccacatcagcaccaatgccacctgtggggagaagggccctgagatgttctgcaagctggtggagcacgtgcccggccggcctgtgaggaacccccagtgccgcatctgtgatggcaacagcgccaacccccgggagcggcaccccatcagccacgccattgatggcaccaacaactggtggcagagccccagcatccagaatggccgggagtaccactgggtgaccatcaccctggacctgcggcaggtgttccaggtggcctacgtgatcatcaaggccgccaatgccccccggcccggcaactggatcctggagaggagcctggatggcaccaccttcagcccctggcagtactatgctgtgtctgattctgagtgcctgagccgctacaacatcaccccccggcggggcccccccacctacagagcagatgatgaggtgatctgcaccagctactacagccggctggtgcccctggagcacggggagatccacaccagcctcatcaatggccggcccagcgcagatgacctgagccccaagctgctggagttcaccagcgcccgctacatccggctgcggctgcagaggatccgcaccctgaatgctgacctgatgaccctgagccaccgggagcccaaggagctggaccccatcgtgacccggcgctactactacagcatcaaggacatctctgtgggcggcatgtgcatctgctacggccacgccagcagctgcccctgggatgagaccaccaagaagctgcagtgccagtgtgagcacaacacctgtggggagagctgcaaccgctgctgccccggctaccaccagcagccctggaggcctggcaccgtgagcagcggcaacacctgtgaggcctgcaactgccacaacaaggccaaggactgctactatgatgaatctgtggccaagcagaagaagagcctgaacacagctggccagttccggggcggcggcgtgtgcatcaactgcctgcagaacaccatgggcatcaactgtgagacctgcattgatggctactaccggccccacaaggtgagcccctatgaagatgagccctgccggccctgcaactgtgaccctgtgggcagcctgagctctgtgtgcatcaaggatgacctgcacagcgacctgcacaacgggaagcagcccggccagtgcccctgcaaggagggctacaccggggagaagtgtgaccgctgccagctgggctacaaggactaccccacctgtgtgtcctgtggctgcaaccctgtgggcagcgccagtgatgagccctgcaccggcccctgtgtgtgcaaggaaaatgtggagggcaaggcctgtgaccgctgcaagccaggcttctacaacctgaaggagaagaacccccggggctgcagcgagtgcttctgcttcggcgtgtctgatgtgtgcagcagcctgtcctggcctgtgggccaggtgaacagcatgagcggctggctggtgacagacctgatcagccccaggaagatccccagccagcaggatgccctgggcggccgccaccaggtgtccatcaacaacacagctgtgatgcagaggctggcccccaagtactactgggccgcccctgaggcctacctgggcaacaagctgacagcctttggaggcttcctgaagtacacagtgtcctatgacatccctgtggagaccgtggacagcaacctgatgagccatgctgatgtgatcatcaagggaaatggcctgaccctgagcacccaggccgagggcctgagcctgcagccctatgaggagtacctgaatgtggtgcggctggtgcctgagaacttccaggacttccacagcaagaggcagattgaccgggaccagctgatgacagtgctggccaacgtgacccacctgctgatccgggccaactacaacagcgccaagatggccctgtaccgcctggagagcgtgtccctggacatcgccagcagcaatgccatcgacctggtggtggccgcagatgtggagcactgtgagtgcccccagggctacacaggcaccagctgtgagagctgcctgagcggctactacagagtggatggcatcctgtttggaggcatctgccagccctgtgaatgtcatggccacgccgctgagtgcaatgtgcacggcgtgtgcatcgcctgtgcccacaacaccactggagtgcactgtgagcagtgcctgcccggcttctatggagagcccagccggggcacccctggggactgccagccctgtgcctgccccctgaccatcgccagcaacaacttcagccccacctgccacctgaatgatggagatgaggtggtgtgtgactggtgtgcccctggctacagcggggcctggtgtgagcgctgtgctgatggctactacggcaaccccaccgtgcctggagagagctgtgtgccctgtgactgcagcggaaatgtggaccccagcgaggccggccactgtgacagcgtgactggagaatgtctgaagtgcctgggcaacacagatggagcccactgtgagcgctgtgctgatggcttctatggagatgctgtgacagccaagaactgccgggcctgtgaatgtcatgtgaagggcagccacagcgctgtgtgccacctggagaccggcctgtgtgactgcaagcccaacgtgacaggccagcagtgtgaccagtgcctgcacggctactacggcctggacagcggccacggctgccggccctgcaactgcagcgtggccggctctgtgtctgatggctgcacagatgagggccagtgccactgtgtgcctggggtggccggcaagagatgtgacagatgtgcccacggcttctacgcctaccaggacggcagctgcaccccctgtgactgcccccacacccagaacacctgtgaccctgagactggagaatgtgtgtgccccccccacacccagggcgtgaagtgtgaagaatgtgaagatggccactggggctatgatgctgaggtgggctgccaggcctgcaactgcagcctggtgggcagcacccaccaccgctgtgatgtggtgacaggccactgccagtgcaagagcaagtttggaggccgggcctgtgaccagtgcagcctgggctacagagacttcccagactgtgtgccctgtgactgtgacctgcggggcaccagcggagatgcctgcaacctggagcagggcctgtgtggctgtgtggaggagactggagcctgcccctgcaaggaaaatgtgtttggcccccagtgcaatgaatgtcgggagggcacctttgccctgcgggctgacaaccccctgggctgcagcccctgcttctgcagcggcctgagccacctgtgcagcgagctggaggactatgtgaggacccctgtgaccctgggcagtgaccagcccctgctgcgggtggtgtcccagagcaacctgcggggcaccacagaaggagtgtactaccaggccccagacttcctgctggatgctgccaccgtgcggcagcacatccgggcagagcccttctactggaggctgccccagcagttccagggcgaccagctgatggcctatggaggcaagctgaagtacagcgtggccttctacagcctggatggagtgggcaccagcaactttgagccccaggtgctgatcaagggcggccgcatcaggaagcaggtgatctacatggatgccccagccccagaaaatggagtgcggcaggagcaggaggtggccatgagggagaacttctggaagtacttcaacagcgtgtctgagaagcctgtgacccgggaggacttcatgtctgtgctgagtgacatcgagtacatcctgatcaaggccagctatggccagggcctgcagcagagccgcatcagtgacatctccatggaggtgggcaggaaggccgagaagctgcaccctgaggaggaggtggccagcctgctggagaactgtgtgtgccccccaggcaccgtgggcttcagctgccaggactgtgcccctggctaccaccggggcaagctgcctgctggcagtgaccggggcccccggcccctggtggccccctgtgtgccctgcagctgcaacaaccacagcgacacctgtgaccccaacacaggcaagtgcctgaactgtggggacaacacagctggggaccactgtgatgtgtgcaccagcggctactacggcaaggtgactggaagtgccagtgactgtgccctgtgtgcctgcccccacagccccccagccagcttcagccccacctgtgtgctggagggggaccatgacttccgctgtgatgcctgcctgctgggctatgagggcaagcactgtgagcgctgcagcagcagctactacggcaacccccagacccctgggggcagctgccagaagtgtgactgcaacccccacggctctgtgcacggggactgtgacaggaccagcggccagtgtgtgtgccgcctgggcgccagcggcctgcgctgtgatgaatgtgagcccaggcacatcctgatggagacagactgtgtgtcctgtgatgatgaatgtgtgggcgtgctgctgaatgacctggatgaaattggagatgctgtgctgagcctgaacctgaccggcatcatccctgtgccctacggcatcctgagcaacctggagaacaccaccaagtacctgcaggagagcctgctgaaggagaacatgcagaaggacctgggcaagatcaagctggagggcgtggccgaggagacagacaacctgcagaagaagctgaccaggatgctggccagcacccagaaggtgaacagagccacagagcgcatcttcaaggagagccaggacctggccatcgccatcgagcggctgcagatgagcatcacagagatcatggagaagaccaccctgaaccagaccctggatgaggacttcctgctgcccaacagcaccctgcagaacatgcagcagaatggcaccagcctgctggagatcatgcagatccgggacttcacccagctgcaccagaatgccaccctggagctgaaggctgctgaggacctgctgagccagatccaggagaactaccagaagcccctggaggagctggaggtgctgaaggaggccgccagccacgtgctgagcaagcacaacaatgagctgaaggctgctgaggccctggtgcgggaggccgaggccaagatgcaggagagcaaccacctgctgctgatggtgaatgccaacctgcgggagttcagtgacaagaagctgcacgtgcaggaggagcagaacctgaccagcgagctgattgtgcagggccggggcctgattgatgctgctgctgcccagacagatgctgtgcaggatgccctggagcacctggaggaccaccaggacaagctgctgctgtggagcgccaagatccgccaccacattgatgacctggtgatgcacatgagccagagaaatgctgtggacctggtgtacagagctgaggaccatgctgctgagttccagaggctggctgatgtgctgtacagcggcctggagaacatcagaaatgtgtccctgaatgccaccagcgctgcctacgtgcactacaacatccagagcctgattgaggagagcgaggagctggccagagatgcccacaggacagtgacagagaccagcctgctgtctgagagcctggtgtccaatggcaaggctgctgtgcagaggagcagccgcttcctgaaggagggcaacaacctgagcaggaagctgcccggcatcgccctggagctgtctgagctgaggaacaagaccaaccgcttccaggagaatgctgtggagatcacccggcagaccaatgaaagcctgctgatcctgcgggccatccccaagggcatccgggacaagggggccaagaccaaggagctggccaccagcgccagccagagcgctgtgtccaccctgagagatgtggccggcctgagccaggagctgctgaacaccagcgccagcctgagccgggtgaacaccaccctgcgggagacccaccagctgctgcaggacagcaccatggccaccctgctggccggcaggaaggtgaaggatgtggagatccaggccaacctgctgtttgaccggctgaagcccctgaagatgctggaggagaacctgagcaggaacctgtctgagatcaagctgctgatcagccaggccaggaagcaggccgccagcatcaaggtggccgtgtctgctgaccgggactgcatccgggcctaccagccccagatcagcagcaccaactacaacaccctgaccctgaatgtgaagacccaggagccagacaacctgctcttctacctgggcagcagcacagccagtgacttcctggccgtggagatgaggcggggccgggtggccttcctgtgggacctgggcagcggcagcacccggctggagttcccagacttccccattgatgacaaccgctggcacagcatccacgtggccaggtttggaaacatcggcagcctgtctgtgaaggagatgagcagcaaccagaagagccccaccaagaccagcaagagccctggaacagccaacgtgctggatgtgaacaacagcaccctgatgtttgtgggcggcctgggcggccagatcaagaagagccctgctgtgaaggtgacccacttcaagggctgcctgggggaggccttcctgaatggcaagagcatcggcctgtggaactacatcgagcgggagggcaaatgtcggggctgcttcggcagcagccagaatgaagaccccagcttccactttgatggcagcggctacagcgtggtggagaagagcctgcctgccaccgtgacccagatcatcatgctgttcaacaccttcagccccaacggcctgctgctgtacctgggcagctatggcaccaaggacttcctgagcattgagctgttccggggccgggtgaaggtgatgacagacctgggcagcggccccatcaccctgctgacagaccggcgctacaacaacggcacctggtacaagatcgccttccagaggaacaggaagcagggcgtgctggccgtgattgatgcctacaacaccagcaacaaggagaccaagcagggcgagacccctggggccagcagtgacctgaaccggctggacaaggaccccatctacgtgggcggcctgcccaggagccgggtggtgcggcggggcgtgaccaccaagagctttgtgggctgcatcaagaacctggagatcagccgcagcacctttgacctgctgaggaacagctatggagtgaggaagggctgcctgctggagcccatccgctctgtgtccttcctgaagggcggctacatcgagctgccccccaagagcctgagccctgagagcgagtggctggtgacctttgccaccaccaacagcagcggcatcatcctggccgccctgggcggagatgtggagaagagaggagaccgggaggaggcccacgtgcccttcttctctgtgatgctgattggaggcaacatcgaggtgcacgtgaaccctggagatggcaccggcctgaggaaggccctgctgcacgcccccaccggcacctgcagtgatggccaggcccacagcatcagcctggtgaggaacagacgcatcatcaccgtgcagctggatgagaacaaccctgtggagatgaagctgggcaccctggtggagagcaggaccatcaacgtgagcaacctgtatgtgggcggcatccctgagggggagggcaccagcctgctgaccatgaggaggagcttccacggctgcatcaagaacctgatcttcaacctggagctgctggacttcaacagcgctgtgggccacgagcaggtggacctggacacctgctggctgtctgagcggcccaagctggccccagatgctgaggacagcaagctgctgcctgagccccgggccttccctgagcagtgtgtggtggatgctgccctggagtatgtgcctggggcccaccagtttggcctgacccagaacagccacttcatcctgcccttcaaccagagcgctgtgaggaagaagctgtctgtggagctgagcatccgcacctttgccagcagcggcctcatctactacatggcccaccagaaccaggccgactatgctgtgctgcagctgcatggaggccgcctgcacttcatgtttgacctgggcaaaggaagaaccaaggtgagccacccagccctgctgagtgatggcaagtggcacacagtgaagacagattatgtgaagaggaagggcttcatcaccgtggatggccgggagagccccatggtgacagtggtgggagatggcaccatgctggatgtggagggcctcttctacctgggcggcctgcccagccagtaccaggccaggaagattggcaacatcacccacagcatcccagcctgcattggagatgtgacagtgaacagcaagcagctggacaaggacagccctgtgtctgccttcaccgtgaaccgctgctatgctgtggcccaggagggcacctactttgatggcagcggctatgctgccctggtgaaggagggctacaaggtgcagagtgatgtgaacatcaccctggagttccgcaccagcagccagaatggagtgctgctgggcatcagcacagccaaggtggatgccatcggcctggagctggtggatggcaaggtgctcttccacgtgaacaatggagctggccgcatcacagctgcctatgagcccaagacagccaccgtgctgtgtgatggcaagtggcacaccctgcaggccaacaagagcaagcaccgcatcaccctcatcgtggatggaaatgctgtgggcgctgagagcccccacacccagagcacctctgtggacaccaacaaccccatctacgtgggcggctacccagctggggtgaagcagaagtgcctgcggagccagaccagcttccggggctgcctgaggaagctggccctgatcaagagcccccaggtgcagagctttgacttcagccgggcctttgagctgcatggagtcttcctgcacagctgccctggaacagagagctag

SEQ ID NO: 157276 - DNA, 9366 bp, synthetic construct
  misc_feature 1..9366: note = Description of Artificial Sequence: Synthetic coding sequence
  source 1..9366: mol_type = other DNA
atgcctggagctgctggggtgctgctgctgctgctgctgagcggcggcctgggcggcgtgcaggcccagaggccccagcagcagaggcagagccaggcccaccagcagaggggcctcttccctgctgtgctgaacctggccagcaatgccctgatcaccaccaatgccacctgtggggagaagggccctgagatgtactgcaagctggtggagcacgtgcccggccagcctgtgaggaacccccagtgccgcatctgcaaccagaacagcagcaaccccaaccagaggcaccccatcaccaatgccattgatggcaagaacacctggtggcagagccccagcatcaagaatggaattgagtaccactacgtgaccatcaccctggacctgcagcaggtgttccagatcgcctacgtgattgtgaaggccgccaacagccccaggcctggcaactggatcctggagaggagcctggatgatgtggagtacaagccctggcagtaccacgctgtgacagacacagaatgtctgaccctgtacaacatctaccccaggacaggcccccccagctatgccaaggatgatgaagtcatctgcaccagcttctacagcaagatccaccccctggagaatggagagatccacatcagcctcatcaatggccggcccagcgcagatgaccccagccctgagctgctggagttcaccagcgcccgctacatccggctgcgcttccagaggatccgcaccctgaatgctgacctgatgatgtttgcccacaaggacccccgggagattgaccccatcgtgacccggcgctactactacagcgtgaaggacatctctgtgggcggcatgtgcatctgctacggccacgcccgggcctgccccctggaccctgccaccaacaagagccgctgtgaatgtgagcacaacacctgtggggacagctgtgaccagtgctgccccggcttccaccagaagccctggagggctggcaccttcctgaccaagacagaatgtgaggcctgcaactgccacggcaaggccgaggagtgctactatgatgaaaatgtggcccggaggaacctgagcctgaacatccggggcaagtacatcggcggcggcgtgtgcatcaactgcacccagaacacagctggcatcaactgtgagacctgcacagatggcttcttccggcccaagggcgtgagccccaactacccccggccctgccagccctgccactgtgaccccatcggcagcctgaatgaggtgtgtgtgaaggatgagaagcacgcccggcggggcctggcccctggcagctgccactgcaagacaggctttggaggagtgtcctgtgacagatgtgcccggggctacacaggctacccagactgcaaggcctgcaactgcagcggcctgggcagcaagaatgaagacccctgcttcggcccctgcatctgcaaggaaaatgtggagggcggggactgcagccgctgcaagagcggcttcttcaacctgcaggaggacaactggaagggctgtgatgagtgcttctgcagcggcgtgagcaaccgctgccagagcagctactggacctacggcaagatccaggacatgagcggctggtacctgacagacctgcccggccgcatccgggtggccccccagcaggatgacctggacagcccccagcagatcagcatcagcaatgctgaggcccggcaggccctgccccacagctactactggagcgccccagccccctacctgggcaacaagctgcctgctgtgggcggccagctgaccttcaccatctcctatgacctggaggaggaggaggaggacacagagcgggtgctgcagctgatgatcatcctggagggcaatgacctgagcatcagcacagcccaggatgaggtgtacctgcaccccagcgaggagcacaccaacgtgctgctgctgaaggaggagagcttcaccatccacggcacccacttccctgtgcggaggaaggagttcatgacagtgctggccaacctgaagagggtgctgctgcagatcacctacagctttggcatggatgccatcttccggctgagctctgtgaacctggagagcgctgtgtcctaccccacagatggcagcattgctgctgctgtggaggtgtgccagtgccccccaggctacacaggcagcagctgtgagagctgctggcccaggcacagaagagtgaatggcaccatctttggaggcatctgtgagccctgccagtgcttcggccatgctgagagctgtgatgatgtgactggagagtgcctgaactgcaaggaccacactggaggcccctactgtgacaagtgcctgcccggcttctatggagagcccaccaagggcaccagcgaggactgccagccctgtgcctgccccctgaacatccccagcaacaacttcagccccacctgccacctggacaggagcctgggcctcatctgtgatggctgccctgtgggctacacaggcccccgctgtgagcgctgtgccgagggctacttcggccagcccagcgtgcctgggggcagctgccagccctgccagtgcaatgacaacctggacttcagcatccctggcagctgtgacagcctgagcggcagctgcctgatctgcaagccaggcaccaccggccgctactgtgagctgtgtgctgatggctactttggagatgctgtggatgccaagaactgccagccctgccgctgcaatgctgggggcagcttcagcgaggtgtgccacagccagacaggccagtgtgagtgccgggccaacgtgcagggccagagatgtgacaagtgcaaggccggcaccttcggcctgcagagcgcccggggctgtgtgccctgcaactgcaacagctttggcagcaagagctttgactgtgaggagagcggccagtgctggtgccagcccggggtgacaggcaagaagtgtgacagatgtgcccacggctacttcaacttccaggagggcggctgcacagcctgtgaatgtagccacctgggcaacaactgtgaccccaagacaggccgctgcatctgcccccccaacaccatcggggagaagtgcagcaaatgtgcccccaacacctggggccacagcatcaccaccggctgcaaggcctgcaactgcagcacagtgggcagcctggacttccagtgcaatgtgaacacaggccagtgcaactgccaccccaagttcagcggggccaagtgcacagagtgcagccggggccactggaactacccccgctgcaacctgtgtgactgcttcctgcctggaacagatgccaccacctgtgacagcgagaccaagaagtgcagctgcagcgaccagacaggccagtgcacctgcaaggtgaatgtggagggcatccactgtgaccgctgcaggcctgggaagtttggcctggatgccaagaaccccctgggctgcagcagctgctactgcttcggcaccaccacccagtgcagcgaggccaagggcctcatccgcacctgggtgaccctgaaggccgagcagaccatcctgcccctggtggatgaggccctgcagcacaccaccaccaagggcatcgtgttccagcaccctgagatcgtggcccacatggacctgatgagggaggacctgcacctggagcccttctactggaagctgcctgagcagtttgagggcaagaagctgatggcctatggaggcaagctgaagtatgccatctactttgaggcccgggaggagaccggcttcagcacctacaacccccaggtgatcatccggggcggcacccccacccacgcccgcatcatcgtgcgccacatggccgcccccctcatcggccagctgaccaggcatgaaattgagatgacagagaaggagtggaagtactatggagatgacccccgggtgcacaggacagtgacccgggaggacttcctggacatcctgtatgacatccactacatcctgatcaaggccacctacggcaacttcatgaggcagagccgcatcagcgagatctccatggaggtggccgagcagggccggggcaccaccatgaccccacctgctgacctgattgaaaaatgtgactgccccctgggctacagcggcctgagctgtgaggcctgcctgcccggcttctaccgcctgcggagccagcccggcggccgcaccccaggccccaccctgggcacctgtgtgccctgccagtgcaatggccacagcagcctgtgtgaccctgagaccagcatctgccagaactgccagcaccacacagctggggacttctgtgagcgctgtgccctgggctactacggcatcgtgaagggcctgcccaatgactgccagcagtgtgcctgccccctcatcagcagcagcaacaacttcagccccagctgtgtggccgagggcctggatgactaccgctgcacagcctgcccccggggctatgagggccagtactgtgagcgctgtgcccctggctacacaggcagccctggcaaccctgggggcagctgccaggagtgtgaatgtgacccctacggcagcctgcctgtgccctgtgaccctgtgacaggcttctgcacctgcaggcctggggccactggaagaaaatgtgatggctgcaagcactggcacgcccgggagggctgggagtgtgtgttctgtggagatgaatgtacaggcctgctgctgggggacctggcccggctggagcagatggtgatgagcatcaacctgaccggccccctgcctgccccctacaagatgctgtatggcctggagaacatgacccaggagctgaagcacctgctgagcccccagagggcccctgagcggctcatccagctggccgagggcaacctgaacaccctggtgacagagatgaatgagctgctgacccgggccaccaaggtgacagcagatggagagcagacaggccaggatgctgagaggaccaacacccgggccaagagcctgggggagttcatcaaggagctggccagagatgctgaggccgtgaatgagaaggccatcaagctgaatgagaccctgggcaccagagatgaggcctttgagaggaacctggagggcctgcagaaggagattgaccagatgatcaaggagctgcggaggaagaacctggagacccagaaggagattgctgaagatgagctggtggccgctgaggccctgctgaagaaggtgaagaagctgtttggagagagcagaggagaaaatgaggagatggagaaggacctgcgggagaagctggccgactacaagaacaaggtggatgatgcctgggacctgctgcgggaggccacagacaagatccgggaggccaacagactctttgctgtgaaccagaagaacatgacagccctggagaagaagaaggaggccgtggagagcggcaagaggcagatcgagaacaccctgaaggagggcaatgacatcctggatgaggccaaccggctggctgatgagatcaacagcatcattgattatgtggaggacatccagaccaagctgccccccatgtctgaggagctgaatgacaagattgatgacctgagccaggagatcaaggacaggaagctggccgagaaggtgtcccaggccgagagccatgctgcccagctgaatgacagcagcgctgtgctggatggcatcctggatgaggccaagaacatctccttcaatgccacagctgccttcaaggcctacagcaacatcaaggactacattgatgaggccgagaaggtggccaaggaggccaaggacctggcccacgaggccaccaagctggccaccggcccccggggcctgctgaaggaggatgccaagggctgcctgcagaagagcttccgcatcctgaatgaggccaagaagctggccaatgatgtgaaggaaaatgaagaccacctgaatggcctgaagaccagaattgaaaatgctgatgccagaaatggagacctgctgcggaccctgaatgacaccctgggcaagctgagcgccatccccaatgacacagctgccaagctgcaggccgtgaaggacaaggcccggcaggccaatgacacagccaaggatgtgctggcccagatcacagagctgcaccagaacctggatggcctgaagaagaactacaacaagctggccgacagcgtggccaagaccaatgctgtggtgaaggaccccagcaagaacacagtggctgatgctgatgccaccgtgaagaacctggagcaggaggccgaccggctgattgacaagctgaagcccatcaaggagctggaggacaacctgaagaagaacatcagcgagatcaaggagctgatcaaccaggccaggaagcaggccaacagcatcaaggtgtctgtgtcctctggaggagactgcatccgcacctacaagccagagatcaagaagggcagctacaacaacatcgtggtgaatgtgaagacagctgtggccgacaacctgctcttctacctgggcagcgccaagttcatcgacttcctggccatcgagatgaggaagggcaaggtgtccttcctgtgggatgtgggcagcggcgtgggccgggtggagtacccagacctgaccattgatgacagctactggtacagaattgtggccagcaggactggaagaaatggcaccatctctgtgcgggccctggatggccccaaggccagcatcgtgcccagcacccaccacagcaccagccccccaggctacaccatcctggatgtggatgccaatgccatgctgtttgtgggcggcctgaccgggaagctgaagaaggcagatgctgtgcgggtcatcaccttcaccggctgcatgggagagacctactttgacaacaagcccatcggcctgtggaacttccgggagaaggagggggactgcaagggctgcaccgtgagcccccaggtggaggacagcgagggcaccatccagtttgatggagagggctacgccctggtgtcccggcccatccgctggtaccccaacatcagcacagtgatgttcaagttccgcaccttcagcagcagcgccctgctgatgtacctggccacccgggacctgcgggacttcatgtctgtggagctgacagatggccacatcaaggtgtcctatgacctgggcagcggcatggcctctgtggtgagcaaccagaaccacaatgatggcaagtggaagagcttcaccctgagccgcatccagaagcaggccaacatcagcatcgtggacatcgacaccaaccaggaggagaacatcgccaccagcagcagcggcaacaactttggcctggacctgaaggcagatgacaagatctactttggaggcctgcccaccctgaggaacctgtccatgaaggcccggcctgaggtgaacctgaagaagtacagcggctgcctgaaggacatcgagatcagcaggaccccctacaacatcctgagcagcccagactatgtgggcgtgaccaagggctgcagcctggagaatgtgtacacagtgtccttccccaagccaggctttgtggagctgagccctgtgcccattgatgtgggcacagagatcaacctgtccttcagcaccaagaatgaaagtggcatcatcctgctgggcagcggcggcaccccagccccacccaggaggaagaggcggcagacaggccaggcctactatgccatcctgctgaacagaggccgcctggaggtgcacctgagcactggagcccggaccatgaggaagatcgtcatccggcctgagcccaacctcttccatgatggccgggagcacagcgtgcacgtggagaggacccggggcatcttcaccgtgcaggtggatgagaacagacgctacatgcagaacctgactgtggagcagcccatcgaggtgaagaagctgtttgtgggcggggcccctcctgagttccagcccagccccctgaggaacatccccccatttgagggctgcatctggaacctggtgatcaacagcgtgcccatggactttgcccggcctgtgtccttcaagaatgctgacatcggccgctgtgcccaccagaagctgcgggaggatgaagatggagctgccccagctgagatcgtcatccagcctgagcctgtgcccaccccagccttccccacccccacccctgtgctgacccacggcccctgtgccgctgagagcgagcccgccctgctgattggcagcaagcagtttggcctgagcaggaacagccacatcgccatcgcctttgatgacaccaaggtgaagaaccggctgaccatcgagctggaggtgaggacagaggccgagagcggcctgctcttctacatggcccgcatcaaccacgccgactttgccaccgtgcagctgagaaatggcctgccctacttctcctatgacctgggcagcggggacacccacaccatgatccccaccaagatcaatgatggccagtggcacaagatcaagatcatgaggagcaagcaggagggcatcctgtatgtggatggagccagcaacagaaccatcagccccaagaaggctgacatcctggatgtggtgggcatgctgtatgtgggcggcctgcccatcaactacaccacccggcgcatcggccctgtgacctacagcattgatggctgtgtgaggaacctgcacatggccgaggccccagctgacctggagcagcccaccagcagcttccacgtgggcacctgctttgccaatgcccagaggggcacctactttgatggcaccggctttgccaaggctgtgggcggcttcaaggtgggcctggacctgctggtggagtttgagttccgcaccaccaccaccactggagtgctgctgggcatcagcagccagaagatggatggcatgggcatcgagatgattgatgagaagctgatgtttcatgtggacaacggggccggccgcttcaccgctgtgtatgatgctggggtgcccggccacctgtgtgatggccagtggcacaaggtgacagccaacaagatcaagcaccgcatcgagctgactgtggatggcaaccaggtggaggcccagagccccaacccagccagcaccagcgctgacaccaatgaccctgtgtttgtgggcggcttcccagatgacctgaagcagtttggcctgaccaccagcatccccttccggggctgcatccgcagcctgaagctgaccaagggcaccgggaagcccctggaggtgaactttgccaaggccctggagctgcggggcgtgcagcctgtgtcctgcccagccaactag

SEQ ID NO: 157277 - DNA, 9369 bp, synthetic construct
  misc_feature 1..9369: note = Description of Artificial Sequence: Synthetic coding sequence
  source 1..9369: mol_type = other DNA
atgcctggagctgctggggtgctgctgctgctgctgctgagcggcggcctgggcggcgtgcaggcccagaggccccagcagcagaggcagagccaggcccaccagcagaggggcctcttccctgctgtgctgaacctggccagcaatgccctgatcaccaccaatgccacctgtggggagaagggccctgagatgtactgcaagctggtggagcacgtgcccggccagcctgtgaggaacccccagtgccgcatctgcaaccagaacagcagcaaccccaaccagaggcaccccatcaccaatgccattgatggcaagaacacctggtggcagagccccagcatcaagaatggaattgagtaccactacgtgaccatcaccctggacctgcagcaggtgttccagatcgcctacgtgattgtgaaggccgccaacagccccaggcctggcaactggatcctggagaggagcctggatgatgtggagtacaagccctggcagtaccacgctgtgacagacacagaatgtctgaccctgtacaacatctaccccaggacaggcccccccagctatgccaaggatgatgaagtcatctgcaccagcttctacagcaagatccaccccctggagaatggagagatccacatcagcctcatcaatggccggcccagcgcagatgaccccagccctgagctgctggagttcaccagcgcccgctacatccggctgcgcttccagaggatccgcaccctgaatgctgacctgatgatgtttgcccacaaggacccccgggagattgaccccatcgtgacccggcgctactactacagcgtgaaggacatctctgtgggcggcatgtgcatctgctacggccacgcccgggcctgccccctggaccctgccaccaacaagagccgctgtgaatgtgagcacaacacctgtggggacagctgtgaccagtgctgccccggcttccaccagaagccctggagggctggcaccttcctgaccaagacagaatgtgaggcctgcaactgccacggcaaggccgaggagtgctactatgatgaaaatgtggcccggaggaacctgagcctgaacatccggggcaagtacatcggcggcggcgtgtgcatcaactgcacccagaacacagctggcatcaactgtgagacctgcacagatggcttcttccggcccaagggcgtgagccccaactacccccggccctgccagccctgccactgtgaccccatcggcagcctgaatgaggtgtgtgtgaaggatgagaagcacgcccggcggggcctggcccctggcagctgccactgcaagacaggctttggaggagtgtcctgtgacagatgtgcccggggctacacaggctacccagactgcaaggcctgcaactgcagcggcctgggcagcaagaatgaagacccctgcttcggcccctgcatctgcaaggaaaatgtggagggcggggactgcagccgctgcaagagcggcttcttcaacctgcaggaggacaactggaagggctgtgatgagtgcttctgcagcggcgtgagcaaccgctgccagagcagctactggacctacggcaagatccaggacatgagcggctggtacctgacagacctgcccggccgcatccgggtggccccccagcaggatgacctggacagcccccagcagatcagcatcagcaatgctgaggcccggcaggccctgccccacagctactactggagcgccccagccccctacctgggcaacaagctgcctgctgtgggcggccagctgaccttcaccatctcctatgacctggaggaggaggaggaggacacagagcgggtgctgcagctgatgatcatcctggagggcaatgacctgagcatcagcacagcccaggatgaggtgtacctgcaccccagcgaggagcacaccaacgtgctgctgctgaaggaggagagcttcaccatccacggcacccacttccctgtgcggaggaaggagttcatgacagtgctggccaacctgaagagggtgctgctgcagatcacctacagctttggcatggatgccatcttccggctgagctctgtgaacctggagagcgctgtgtcctaccccacagatggcagcattgctgctgctgtggaggtgtgccagtgccccccaggctacacaggcagcagctgtgagagctgctggcccaggcacagaagagtgaatggcaccatctttggaggcatctgtgagccctgccagtgcttcggccatgctgagagctgtgatgatgtgactggagagtgcctgaactgcaaggaccacactggaggcccctactgtgacaagtgcctgcccggcttctatggagagcccaccaagggcaccagcgaggactgccagccctgtgcctgccccctgaacatccccagcaacaacttcagccccacctgccacctggacaggagcctgggcctcatctgtgatggctgccctgtgggctacacaggcccccgctgtgagcgctgtgccgagggctacttcggccagcccagcgtgcctgggggcagctgccagccctgccagtgcaatgacaacctggacttcagcatccctggcagctgtgacagcctgagcggcagctgcctgatctgcaagccaggcaccaccggccgctactgtgagctgtgtgctgatggctactttggagatgctgtggatgccaagaactgccagccctgccgctgcaatgctgggggcagcttcagcgaggtgtgccacagccagacaggccagtgtgagtgccgggccaacgtgcagggccagagatgtgacaagtgcaaggccggcaccttcggcctgcagagcgcccggggctgtgtgccctgcaactgcaacagctttggcagcaagagctttgactgtgaggagagcggccagtgctggtgccagcccggggtgacaggcaagaagtgtgacagatgtgcccacggctacttcaacttccaggagggcggctgcacagcctgtgaatgtagccacctgggcaacaactgtgaccccaagacaggccgctgcatctgcccccccaacaccatcggggagaagtgcagcaaatgtgcccccaacacctggggccacagcatcaccaccggctgcaaggcctgcaactgcagcacagtgggcagcctggacttccagtgcaatgtgaacacaggccagtgcaactgccaccccaagttcagcggggccaagtgcacagagtgcagccggggccactggaactacccccgctgcaacctgtgtgactgcttcctgcctggaacagatgccaccacctgtgacagcgagaccaagaagtgcagctgcagcgaccagacaggccagtgcacctgcaaggtgaatgtggagggcatccactgtgaccgctgcaggcctgggaagtttggcctggatgccaagaaccccctgggctgcagcagctgctactgcttcggcaccaccacccagtgcagcgaggccaagggcctcatccgcacctgggtgaccctgaaggccgagcagaccatcctgcccctggtggatgaggccctgcagcacaccaccaccaagggcatcgtgttccagcaccctgagatcgtggcccacatggacctgatgagggaggacctgcacctggagcccttctactggaagctgcctgagcagtttgagggcaagaagctgatggcctatggaggcaagctgaagtatgccatctactttgaggcccgggaggagaccggcttcagcacctacaacccccaggtgatcatccggggcggcacccccacccacgcccgcatcatcgtgcgccacatggccgcccccctcatcggccagctgaccaggcatgaaattgagatgacagagaaggagtggaagtactatggagatgacccccgggtgcacaggacagtgacccgggaggacttcctggacatcctgtatgacatccactacatcctgatcaaggccacctacggcaacttcatgaggcagagccgcatcagcgagatctccatggaggtggccgagcagggccggggcaccaccatgaccccacctgctgacctgattgaaaaatgtgactgccccctgggctacagcggcctgagctgtgaggcctgcctgcccggcttctaccgcctgcggagccagcccggcggccgcaccccaggccccaccctgggcacctgtgtgccctgccagtgcaatggccacagcagcctgtgtgaccctgagaccagcatctgccagaactgccagcaccacacagctggggacttctgtgagcgctgtgccctgggctactacggcatcgtgaagggcctgcccaatgactgccagcagtgtgcctgccccctcatcagcagcagcaacaacttcagccccagctgtgtggccgagggcctggatgactaccgctgcacagcctgcccccggggctatgagggccagtactgtgagcgctgtgcccctggctacacaggcagccctggcaaccctgggggcagctgccaggagtgtgaatgtgacccctacggcagcctgcctgtgccctgtgaccctgtgacaggcttctgcacctgcaggcctggggccactggaagaaaatgtgatggctgcaagcactggcacgcccgggagggctgggagtgtgtgttctgtggagatgaatgtacaggcctgctgctgggggacctggcccggctggagcagatggtgatgagcatcaacctgaccggccccctgcctgccccctacaagatgctgtatggcctggagaacatgacccaggagctgaagcacctgctgagcccccagagggcccctgagcggctcatccagctggccgagggcaacctgaacaccctggtgacagagatgaatgagctgctgacccgggccaccaaggtgacagcagatggagagcagacaggccaggatgctgagaggaccaacacccgggccaagagcctgggggagttcatcaaggagctggccagagatgctgaggccgtgaatgagaaggccatcaagctgaatgagaccctgggcaccagagatgaggcctttgagaggaacctggagggcctgcagaaggagattgaccagatgatcaaggagctgcggaggaagaacctggagacccagaaggagattgctgaagatgagctggtggccgctgaggccctgctgaagaaggtgaagaagctgtttggagagagcagaggagaaaatgaggagatggagaaggacctgcgggagaagctggccgactacaagaacaaggtggatgatgcctgggacctgctgcgggaggccacagacaagatccgggaggccaacagactctttgctgtgaaccagaagaacatgacagccctggagaagaagaaggaggccgtggagagcggcaagaggcagatcgagaacaccctgaaggagggcaatgacatcctggatgaggccaaccggctggctgatgagatcaacagcatcattgattatgtggaggacatccagaccaagctgccccccatgtctgaggagctgaatgacaagattgatgacctgagccaggagatcaaggacaggaagctggccgagaaggtgtcccaggccgagagccatgctgcccagctgaatgacagcagcgctgtgctggatggcatcctggatgaggccaagaacatctccttcaatgccacagctgccttcaaggcctacagcaacatcaaggactacattgatgaggccgagaaggtggccaaggaggccaaggacctggcccacgaggccaccaagctggccaccggcccccggggcctgctgaaggaggatgccaagggctgcctgcagaagagcttccgcatcctgaatgaggccaagaagctggccaatgatgtgaaggaaaatgaagaccacctgaatggcctgaagaccagaattgaaaatgctgatgccagaaatggagacctgctgcggaccctgaatgacaccctgggcaagctgagcgccatccccaatgacacagctgccaagctgcaggccgtgaaggacaaggcccggcaggccaatgacacagccaaggatgtgctggcccagatcacagagctgcaccagaacctggatggcctgaagaagaactacaacaagctggccgacagcgtggccaagaccaatgctgtggtgaaggaccccagcaagaacaagatcgtggctgatgctgatgccaccgtgaagaacctggagcaggaggccgaccggctgattgacaagctgaagcccatcaaggagctggaggacaacctgaagaagaacatcagcgagatcaaggagctgatcaaccaggccaggaagcaggccaacagcatcaaggtgtctgtgagcagcggcggggactgcatccgcacctacaagccagagatcaagaagggcagctacaacaacatcgtggtgaatgtgaagacagctgtggccgacaacctgctcttctacctgggcagcgccaagttcatcgacttcctggccatcgagatgaggaagggcaaggtgtccttcctgtgggatgtgggcagcggcgtgggccgggtggagtacccagacctgaccattgatgacagctactggtaccgcatcgtggccagcaggactggaagaaatggcaccatctctgtgcgggccctggatggccccaaggccagcatcgtgcccagcacccaccacagcaccagccccccaggctacaccatcctggatgtggatgccaatgccatgctgtttgtgggcggcctgaccgggaagctgaagaaggcagatgctgtgcgggtcatcaccttcaccggctgcatgggagagacctactttgacaacaagcccatcggcctgtggaacttccgggagaaggagggggactgcaagggctgcaccgtgagcccccaggtggaggacagcgagggcaccatccagtttgatggagagggctacgccctggtgtcccggcccatccgctggtaccccaacatcagcacagtgatgttcaagttccgcaccttcagcagcagcgccctgctgatgtacctggccacccgggacctgcgggacttcatgtctgtggagctgacagatggccacatcaaggtgtcctatgacctgggcagcggcatggcctctgtggtgagcaaccagaaccacaatgatggcaagtggaagagcttcaccctgagccgcatccagaagcaggccaacatcagcatcgtggacatcgacaccaaccaggaggagaacatcgccaccagcagcagcggcaacaactttggcctggacctgaaggcagatgacaagatctactttggaggcctgcccaccctgaggaacctgcggctcttcaacagacctgaggtgaacctgaagaagtacagcggctgcctgaaggacatcgagatcagcaggaccccctacaacatcctgagcagcccagactatgtgggcgtgaccaagggctgcagcctggagaatgtgtacacagtgtccttccccaagccaggctttgtggagctgagccctgtgcccattgatgtgggcacagagatcaacctgtccttcagcaccaagaatgaaagtggcatcatcctgctgggcagcggcggcaccccagccccacccaggaggaagaggcggcagacaggccaggcctactatgccatcctgctgaacagaggccgcctggaggtgcacctgagcactggagcccggaccatgaggaagatcgtcatccggcctgagcccaacctcttccatgatggccgggagcacagcgtgcacgtggagaggacccggggcatcttcaccgtgcaggtggatgaaaatcgccgctacatgcagaacctgactgtggagcagcccatcgaggtgaagaagctgtttgtgggcggggcccctcctgagttccagcccagccccctgaggaacatccccccatttgagggctgcatctggaacctggtgatcaacagcgtgcccatggactttgcccggcctgtgtccttcaagaatgctgacatcggccgctgtgcccaccagaagctgagagaagatgaagatggagctgccccagctgagatcgtcatccagcctgagcctgtgcccaccccagccttccccacccccacccctgtgctgacccacggcccctgtgccgctgagagcgagcccgccctgctgattggcagcaagcagtttggcctgagcaggaacagccacatcgccatcgcctttgatgacaccaaggtgaagaaccggctgaccatcgagctggaggtgaggacagaagctgagagcggcctgctcttctacatggcccgcatcaaccacgccgactttgccaccgtgcagctgagaaatggcctgccctacttctcctatgacctgggcagcggggacacccacaccatgatccccaccaagatcaatgatggccagtggcacaagatcaagatcatgaggagcaagcaggagggcatcctgtatgtggatggagccagcaacagaaccatcagccccaagaaggctgacatcctggatgtggtgggcatgctgtatgtgggcggcctgcccatcaactacaccaccaggagaattggccctgtgacctacagcattgatggctgtgtgaggaacctgcacatggccgaggccccagctgacctggagcagcccaccagcagcttccacgtgggcacctgctttgccaatgcccagaggggcacctactttgatggcactggatttgccaaggctgtgggcggcttcaaggtgggcctggacctgctggtggagtttgagttccgcaccaccaccaccaccggggtgctgctgggcatcagcagccagaagatggatggcatgggcatcgagatgattgatgagaagctgatgttccacgtggacaatggagctggccgcttcaccgctgtgtatgatgctggggtgcccggccacctgtgtgatggccagtggcacaaggtgacagccaacaagatcaagcacagaattgagctgactgtggatggcaaccaggtggaggcccagagccccaacccagccagcaccagcgctgacaccaatgaccctgtgtttgtgggcggcttcccagatgacctgaagcagtttggcctgaccaccagcatccccttccggggctgcatccgcagcctgaagctgaccaagggcaccgggaagcccctggaggtgaactttgccaaggccctggagctgcggggcgtgcagcctgtgtcctgcccagccaactag

SEQ ID NO: 157278 - DNA, 9369 bp, synthetic construct
  misc_feature 1..9369: note = Description of Artificial Sequence: Synthetic coding sequence
  source 1..9369: mol_type = other DNA
atgcctggagctgctggggtgctgctgctgctgctgctgagcggcggcctgggcggcgtgcaggcccagaggccccagcagcagaggcagagccaggcccaccagcagaggggcctcttccctgctgtgctgaacctggccagcaatgccctgatcaccaccaatgccacctgtggggagaagggccctgagatgtactgcaagctggtggagcacgtgcccggccagcctgtgaggaacccccagtgccgcatctgcaaccagaacagcagcaaccccaaccagaggcaccccatcaccaatgccattgatggcaagaacacctggtggcagagccccagcatcaagaatggaattgagtaccactacgtgaccatcaccctggacctgcagcaggtgttccagatcgcctacgtgattgtgaaggccgccaacagccccaggcctggcaactggatcctggagaggagcctggatgatgtggagtacaagccctggcagtaccacgctgtgacagacacagaatgtctgaccctgtacaacatctaccccaggacaggcccccccagctatgccaaggatgatgaagtcatctgcaccagcttctacagcaagatccaccccctggagaatggagagatccacatcagcctcatcaatggccggcccagcgcagatgaccccagccctgagctgctggagttcaccagcgcccgctacatccggctgcgcttccagaggatccgcaccctgaatgctgacctgatgatgtttgcccacaaggacccccgggagattgaccccatcgtgacccggcgctactactacagcgtgaaggacatctctgtgggcggcatgtgcatctgctacggccacgcccgggcctgccccctggaccctgccaccaacaagagccgctgtgaatgtgagcacaacacctgtggggacagctgtgaccagtgctgccccggcttccaccagaagccctggagggctggcaccttcctgaccaagacagaatgtgaggcctgcaactgccacggcaaggccgaggagtgctactatgatgaaaatgtggcccggaggaacctgagcctgaacatccggggcaagtacatcggcggcggcgtgtgcatcaactgcacccagaacacagctggcatcaactgtgagacctgcacagatggcttcttccggcccaagggcgtgagccccaactacccccggccctgccagccctgccactgtgaccccatcggcagcctgaatgaggtgtgtgtgaaggatgagaagcacgcccggcggggcctggcccctggcagctgccactgcaagacaggctttggaggagtgtcctgtgacagatgtgcccggggctacacaggctacccagactgcaaggcctgcaactgcagcggcctgggcagcaagaatgaagacccctgcttcggcccctgcatctgcaaggaaaatgtggagggcggggactgcagccgctgcaagagcggcttcttcaacctgcaggaggacaactggaagggctgtgatgagtgcttctgcagcggcgtgagcaaccgctgccagagcagctactggacctacggcaagatccaggacatgagcggctggtacctgacagacctgcccggccgcatccgggtggccccccagcaggatgacctggacagcccccagcagatcagcatcagcaatgctgaggcccggcaggccctgccccacagctactactggagcgccccagccccctacctgggcaacaagctgcctgctgtgggcggccagctgaccttcaccatctcctatgacctggaggaggaggaggaggacacagagcgggtgctgcagctgatgatcatcctggagggcaatgacctgagcatcagcacagcccaggatgaggtgtacctgcaccccagcgaggagcacaccaacgtgctgctgctgaaggaggagagcttcaccatccacggcacccacttccctgtgcggaggaaggagttcatgacagtgctggccaacctgaagagggtgctgctgcagatcacctacagctttggcatggatgccatcttccggctgagctctgtgaacctggagagcgctgtgtcctaccccacagatggcagcattgctgctgctgtggaggtgtgccagtgccccccaggctacacaggcagcagctgtgagagctgctggcccaggcacagaagagtgaatggcaccatctttggaggcatctgtgagccctgccagtgcttcggccatgctgagagctgtgatgatgtgactggagagtgcctgaactgcaaggaccacactggaggcccctactgtgacaagtgcctgcccggcttctatggagagcccaccaagggcaccagcgaggactgccagccctgtgcctgccccctgaacatccccagcaacaacttcagccccacctgccacctggacaggagcctgggcctcatctgtgatggctgccctgtgggctacacaggcccccgctgtgagcgctgtgccgagggctacttcggccagcccagcgtgcctgggggcagctgccagccctgccagtgcaatgacaacctggacttcagcatccctggcagctgtgacagcctgagcggcagctgcctgatctgcaagccaggcaccaccggccgctactgtgagctgtgtgctgatggctactttggagatgctgtggatgccaagaactgccagccctgccgctgcaatgctgggggcagcttcagcgaggtgtgccacagccagacaggccagtgtgagtgccgggccaacgtgcagggccagagatgtgacaagtgcaaggccggcaccttcggcctgcagagcgcccggggctgtgtgccctgcaactgcaacagctttggcagcaagagctttgactgtgaggagagcggccagtgctggtgccagcccggggtgacaggcaagaagtgtgacagatgtgcccacggctacttcaacttccaggagggcggctgcacagcctgtgaatgtagccacctgggcaacaactgtgaccccaagacaggccgctgcatctgcccccccaacaccatcggggagaagtgcagcaaatgtgcccccaacacctggggccacagcatcaccaccggctgcaaggcctgcaactgcagcacagtgggcagcctggacttccagtgcaatgtgaacacaggccagtgcaactgccaccccaagttcagcggggccaagtgcacagagtgcagccggggccactggaactacccccgctgcaacctgtgtgactgcttcctgcctggaacagatgccaccacctgtgacagcgagaccaagaagtgcagctgcagcgaccagacaggccagtgcacctgcaaggtgaatgtggagggcatccactgtgaccgctgcaggcctgggaagtttggcctggatgccaagaaccccctgggctgcagcagctgctactgcttcggcaccaccacccagtgcagcgaggccaagggcctcatccgcacctgggtgaccctgaaggccgagcagaccatcctgcccctggtggatgaggccctgcagcacaccaccaccaagggcatcgtgttccagcaccctgagatcgtggcccacatggacctgatgagggaggacctgcacctggagcccttctactggaagctgcctgagcagtttgagggcaagaagctgatggcctatggaggcaagctgaagtatgccatctactttgaggcccgggaggagaccggcttcagcacctacaacccccaggtgatcatccggggcggcacccccacccacgcccgcatcatcgtgcgccacatggccgcccccctcatcggccagctgaccaggcatgaaattgagatgacagagaaggagtggaagtactatggagatgacccccgggtgcacaggacagtgacccgggaggacttcctggacatcctgtatgacatccactacatcctgatcaaggccacctacggcaacttcatgaggcagagccgcatcagcgagatctccatggaggtggccgagcagggccggggcaccaccatgaccccacctgctgacctgattgaaaaatgtgactgccccctgggctacagcggcctgagctgtgaggcctgcctgcccggcttctaccgcctgcggagccagcccggcggccgcaccccaggccccaccctgggcacctgtgtgccctgccagtgcaatggccacagcagcctgtgtgaccctgagaccagcatctgccagaactgccagcaccacacagctggggacttctgtgagcgctgtgccctgggctactacggcatcgtgaagggcctgcccaatgactgccagcagtgtgcctgccccctcatcagcagcagcaacaacttcagccccagctgtgtggccgagggcctggatgactaccgctgcacagcctgcccccggggctatgagggccagtactgtgagcgctgtgcccctggctacacaggcagccctggcaaccctgggggcagctgccaggagtgtgaatgtgacccctacggcagcctgcctgtgccctgtgaccctgtgacaggcttctgcacctgcaggcctggggccactggaagaaaatgtgatggctgcaagcactggcacgcccgggagggctgggagtgtgtgttctgtggagatgaatgtacaggcctgctgctgggggacctggcccggctggagcagatggtgatgagcatcaacctgaccggccccctgcctgccccctacaagatgctgtatggcctggagaacatgacccaggagctgaagcacctgctgagcccccagagggcccctgagcggctcatccagctggccgagggcaacctgaacaccctggtgacagagatgaatgagctgctgacccgggccaccaaggtgacagcagatggagagcagacaggccaggatgctgagaggaccaacacccgggccaagagcctgggggagttcatcaaggagctggccagagatgctgaggccgtgaatgagaaggccatcaagctgaatgagaccctgggcaccagagatgaggcctttgagaggaacctggagggcctgcagaaggagattgaccagatgatcaaggagctgcggaggaagaacctggagacccagaaggagattgctgaagatgagctggtggccgctgaggccctgctgaagaaggtgaagaagctgtttggagagagcagaggagaaaatgaggagatggagaaggacctgcgggagaagctggccgactacaagaacaaggtggatgatgcctgggacctgctgcgggaggccacagacaagatccgggaggccaacagactctttgctgtgaaccagaagaacatgacagccctggagaagaagaaggaggccgtggagagcggcaagaggcagatcgagaacaccctgaaggagggcaatgacatcctggatgaggccaaccggctggctgatgagatcaacagcatcattgattatgtggaggacatccagaccaagctgccccccatgtctgaggagctgaatgacaagattgatgacctgagccaggagatcaaggacaggaagctggccgagaaggtgtcccaggccgagagccatgctgcccagctgaatgacagcagcgctgtgctggatggcatcctggatgaggccaagaacatctccttcaatgccacagctgccttcaaggcctacagcaacatcaaggactacattgatgaggccgagaaggtggccaaggaggccaaggacctggcccacgaggccaccaagctggccaccggcccccggggcctgctgaaggaggatgccaagggctgcctgcagaagagcttccgcatcctgaatgaggccaagaagctggccaatgatgtgaaggaaaatgaagaccacctgaatggcctgaagaccagaattgaaaatgctgatgccagaaatggagacctgctgcggaccctgaatgacaccctgggcaagctgagcgccatccccaatgacacagctgccaagctgcaggccgtgaaggacaaggcccggcaggccaatgacacagccaaggatgtgctggcccagatcacagagctgcaccagaacctggatggcctgaagaagaactacaacaagctggccgacagcgtggccaagaccaatgctgtggtgaaggaccccagcaagaacaagatcatcgcagatgctgatgccaccgtgaagaacctggagcaggaggccgaccggctgattgacaagctgaagcccatcaaggagctggaggacaacctgaagaagaacatcagcgagatcaaggagctgatcaaccaggccaggaagcaggccaacagcatcaaggtgtctgtgagcagcggcggggactgcatccgcacctacaagccagagatcaagaagggcagctacaacaacatcgtggtgaatgtgaagacagctgtggccgacaacctgctcttctacctgggcagcgccaagttcatcgacttcctggccatcgagatgaggaagggcaaggtgtccttcctgtgggatgtgggcagcggcgtgggccgggtggagtacccagacctgaccattgatgacagctactggtaccgcatcgtggccagcaggactggaagaaatggcaccatctctgtgcgggccctggatggccccaaggccagcatcgtgcccagcacccaccacagcaccagccccccaggctacaccatcctggatgtggatgccaatgccatgctgtttgtgggcggcctgaccgggaagctgaagaaggcagatgctgtgcgggtcatcaccttcaccggctgcatgggagagacctactttgacaacaagcccatcggcctgtggaacttccgggagaaggagggggactgcaagggctgcaccgtgagcccccaggtggaggacagcgagggcaccatccagtttgatggagagggctacgccctggtgtcccggcccatccgctggtaccccaacatcagcacagtgatgttcaagttccgcaccttcagcagcagcgccctgctgatgtacctggccacccgggacctgcgggacttcatgtctgtggagctgacagatggccacatcaaggtgtcctatgacctgggcagcggcatggcctctgtggtgagcaaccagaaccacaatgatggcaagtggaagagcttcaccctgagccgcatccagaagcaggccaacatcagcatcgtggacatcgacaccaaccaggaggagaacatcgccaccagcagcagcggcaacaactttggcctggacctgaaggcagatgacaagatctactttggaggcctgcccaccctgaggaacctgtccatgaaggcccggcctgaggtgaacctgaagaagtacagcggctgcctgaaggacatcgagatcagcaggaccccctacaacatcctgagcagcccagactatgtgggcgtgaccaagggctgcagcctggagaatgtgtacacagtgtccttccccaagccaggctttgtggagctgagccctgtgcccattgatgtgggcacagagatcaacctgtccttcagcaccaagaatgaaagtggcatcatcctgctgggcagcggcggcaccccagccccacccaggaggaagaggcggcagacaggccaggcctactatgccatcctgctgaacagaggccgcctggaggtgcacctgagcactggagcccggaccatgaggaagatcgtcatccggcctgagcccaacctcttccatgatggccgggagcacagcgtgcacgtggagaggacccggggcatcttcaccgtgcaggtggatgaaaatcgccgctacatgcagaacctgactgtggagcagcccatcgaggtgaagaagctgtttgtgggcggggcccctcctgagttccagcccagccccctgaggaacatccccccatttgagggctgcatctggaacctggtgatcaacagcgtgcccatggactttgcccggcctgtgtccttcaagaatgctgacatcggccgctgtgcccaccagaagctgagagaagatgaagatggagctgccccagctgagatcgtcatccagcctgagcctgtgcccaccccagccttccccacccccacccctgtgctgacccacggcccctgtgccgctgagagcgagcccgccctgctgattggcagcaagcagtttggcctgagcaggaacagccacatcgccatcgcctttgatgacaccaaggtgaagaaccggctgaccatcgagctggaggtgaggacagaagctgagagcggcctgctcttctacatggcccgcatcaaccacgccgactttgccaccgtgcagctgagaaatggcctgccctacttctcctatgacctgggcagcggggacacccacaccatgatccccaccaagatcaatgatggccagtggcacaagatcaagatcatgaggagcaagcaggagggcatcctgtatgtggatggagccagcaacagaaccatcagccccaagaaggctgacatcctggatgtggtgggcatgctgtatgtgggcggcctgcccatcaactacaccaccaggagaattggccctgtgacctacagcattgatggctgtgtgaggaacctgcacatggccgaggccccagctgacctggagcagcccaccagcagcttccacgtgggcacctgctttgccaatgcccagaggggcacctactttgatggcactggatttgccaaggctgtgggcggcttcaaggtgggcctggacctgctggtggagtttgagttccgcaccaccaccaccaccggggtgctgctgggcatcagcagccagaagatggatggcatgggcatcgagatgattgatgagaagctgatgttccacgtggacaatggagctggccgcttcaccgctgtgtatgatgctggggtgcccggccacctgtgtgatggccagtggcacaaggtgacagccaacaagatcaagcacagaattgagctgactgtggatggcaaccaggtggaggcccagagccccaacccagccagcaccagcgctgacaccaatgaccctgtgtttgtgggcggcttcccagatgacctgaagcagtttggcctgaccaccagcatccccttccggggctgcatccgcagcctgaagctgaccaagggcaccgggaagcccctggaggtgaactttgccaaggccctggagctgcggggcgtgcagcctgtgtcctgcccagccaactag

SEQ ID NO: 157279 - DNA, 3387 bp, synthetic construct
  misc_feature 1..3387: note = Description of Artificial Sequence: Synthetic coding sequence
  source 1..3387: mol_type = other DNA
aagaagctggccaatgatgtgaaggaaaatgaagaccacctgaatggcctgaagaccagaattgaaaatgctgatgccagaaatggagacctgctgcggaccctgaatgacaccctgggcaagctgagcgccatccccaatgacacagctgccaagctgcaggccgtgaaggacaaggcccggcaggccaatgacacagccaaggatgtgctggcccagatcacagagctgcaccagaacctggatggcctgaagaagaactacaacaagctggccgacagcgtggccaagaccaatgctgtggtgaaggaccccagcaagaacacagtggctgatgctgatgccaccgtgaagaacctggagcaggaggccgaccggctgattgacaagctgaagcccatcaaggagctggaggacaacctgaagaagaacatcagcgagatcaaggagctgatcaaccaggccaggaagcaggccaacagcatcaaggtgtctgtgagcagcggcggggactgcatccgcacctacaagccagagatcaagaagggcagctacaacaacatcgtggtgaatgtgaagacagctgtggccgacaacctgctcttctacctgggcagcgccaagttcatcgacttcctggccatcgagatgaggaagggcaaggtgtccttcctgtgggatgtgggcagcggcgtgggccgggtggagtacccagacctgaccattgatgacagctactggtaccgcatcgtggccagcaggactggaagaaatggcaccatctctgtgcgggccctggatggccccaaggccagcatcgtgcccagcacccaccacagcaccagccccccaggctacaccatcctggatgtggatgccaatgccatgctgtttgtgggcggcctgaccgggaagctgaagaaggcagatgctgtgcgggtcatcaccttcaccggctgcatgggagagacctactttgacaacaagcccatcggcctgtggaacttccgggagaaggagggggactgcaagggctgcaccgtgagcccccaggtggaggacagcgagggcaccatccagtttgatggagagggctacgccctggtgtcccggcccatccgctggtaccccaacatcagcacagtgatgttcaagttccgcaccttcagcagcagcgccctgctgatgtacctggccacccgggacctgcgggacttcatgtctgtggagctgacagatggccacatcaaggtgtcctatgacctgggcagcggcatggcctctgtggtgagcaaccagaaccacaatgatggcaagtggaagagcttcaccctgagccgcatccagaagcaggccaacatcagcatcgtggacatcgacaccaaccaggaggagaacatcgccaccagcagcagcggcaacaactttggcctggacctgaaggcagatgacaagatctactttggaggcctgcccaccctgaggaacctgtccatgaaggcccggcctgaggtgaacctgaagaagtacagcggctgcctgaaggacatcgagatcagcaggaccccctacaacatcctgagcagcccagactatgtgggcgtgaccaagggctgcagcctggagaatgtgtacacagtgtccttccccaagccaggctttgtggagctgagccctgtgcccattgatgtgggcacagagatcaacctgtccttcagcaccaagaatgaaagtggcatcatcctgctgggcagcggcggcaccccagccccacccaggaggaagaggcggcagacaggccaggcctactatgccatcctgctgaacagaggccgcctggaggtgcacctgagcactggagcccggaccatgaggaagatcgtcatccggcctgagcccaacctcttccatgatggccgggagcacagcgtgcacgtggagaggacccggggcatcttcaccgtgcaggtggatgaaaatcgccgctacatgcagaacctgactgtggagcagcccatcgaggtgaagaagctgtttgtgggcggggcccctcctgagttccagcccagccccctgaggaacatccccccatttgagggctgcatctggaacctggtgatcaacagcgtgcccatggactttgcccggcctgtgtccttcaagaatgctgacatcggccgctgtgcccaccagaagctgagagaagatgaagatggagctgccccagctgagatcgtcatccagcctgagcctgtgcccaccccagccttccccacccccacccctgtgctgacccacggcccctgtgccgctgagagcgagcccgccctgctgattggcagcaagcagtttggcctgagcaggaacagccacatcgccatcgcctttgatgacaccaaggtgaagaaccggctgaccatcgagctggaggtgaggacagaagctgagagcggcctgctcttctacatggcccgcatcaaccacgccgactttgccaccgtgcagctgagaaatggcctgccctacttctcctatgacctgggcagcggggacacccacaccatgatccccaccaagatcaatgatggccagtggcacaagatcaagatcatgaggagcaagcaggagggcatcctgtatgtggatggagccagcaacagaaccatcagccccaagaaggctgacatcctggatgtggtgggcatgctgtatgtgggcggcctgcccatcaactacaccaccaggagaattggccctgtgacctacagcattgatggctgtgtgaggaacctgcacatggccgaggccccagctgacctggagcagcccaccagcagcttccacgtgggcacctgctttgccaatgcccagaggggcacctactttgatggcactggatttgccaaggctgtgggcggcttcaaggtgggcctggacctgctggtggagtttgagttccgcaccaccaccaccaccggggtgctgctgggcatcagcagccagaagatggatggcatgggcatcgagatgattgatgagaagctgatgttccacgtggacaatggagctggccgcttcaccgctgtgtatgatgctggggtgcccggccacctgtgtgatggccagtggcacaaggtgacagccaacaagatcaagcacagaattgagctgactgtggatggcaaccaggtggaggcccagagccccaacccagccagcaccagcgctgacaccaatgaccctgtgtttgtgggcggcttcccagatgacctgaagcagtttggcctgaccaccagcatccccttccggggctgcatccgcagcctgaagctgaccaagggcacagccagccactggaggctcatcctgccccggccctggaactag

SEQ ID NO: 157280 - DNA, 5175 bp, synthetic construct
  misc_feature 1..5175: note = Description of Artificial Sequence: Synthetic coding sequence
  source 1..5175: mol_type = other DNA
atgcccccagctgtgcggcgcagcgcctgcagcatgggctggctgtggatctttggagctgccctgggccagtgcctgggctacagcagccagcagcagagggtgcccttcctgcagcccccaggccagagccagctgcaggccagctatgtggagttccggcccagccagggctgcagccctggctactacagagaccacaagggcctgtacacaggccgctgtgtgccctgcaactgcaatggccacagcaaccagtgccaggacggcagcggcatctgtgtgaactgccagcacaacacagctggggagcactgtgagcgctgccaggagggctactatggaaatgctgtgcacggcagctgccgggcctgcccctgcccccacaccaacagctttgccaccggctgtgtggtgaatggaggagatgtgcgctgcagctgcaaggccggctacacaggcacccagtgtgagcgctgtgcccctggctactttggaaacccccagaagtttggaggcagctgccagccctgcagctgcaacagcaatggccagctgggcagctgccaccccctgactggagactgcatcaaccaggagcccaaggacagcagccctgcagaagaatgtgatgactgtgacagctgtgtgatgaccctgctgaatgacctggccaccatgggagagcagctgcggctggtgaagagccagctgcagggcctgagcgccagcgctggcctgctggagcagatgaggcacatggagacccaggccaaggacctgaggaaccagctgctgaactaccgcagcgccatcagcaaccacggcagcaagattgagggcctggagcgggagctgacagacctgaaccaggagtttgagaccctgcaggagaaggcccaggtgaacagcaggaaggcccagaccctgaacaacaacgtgaacagagccacccagagcgccaaggagctggatgtgaagatcaagaatgtcatcagaaatgtgcacatcctgctgaagcagatctctggaacagatggagagggcaacaacgtgcccagcggggacttcagccgggagtgggccgaggcccagaggatgatgagggagctgaggaacagaaactttgggaagcacctgcgggaggccgaggccgacaagcgggagagccagctgctgctgaaccgcatccgcacctggcagaagacccaccagggagaaaataatggcctggccaacagcatccgggacagcctgaatgaatatgaggccaagctgagtgacctgcgggcccggctgcaggaggccgccgcccaggccaagcaggccaacggcctgaaccaggagaatgaaagagccctgggcgccatccagaggcaggtgaaggagatcaacagcctgcagagcgacttcaccaagtacctgaccacagctgacagcagcctgctgcagaccaacatcgccctgcagctgatggagaagagccagaaggagtatgagaagctggccgccagcctgaatgaggcccggcaggagctgagtgacaaggtgcgggagctgagccgctctgctgggaagaccagcctggtggaggaggccgagaagcacgcccggagcctgcaggagctggccaagcagctggaggagatcaagagaaatgccagcggagatgagctggtgcgctgtgctgtggatgctgccacagcctatgagaacatcctgaatgccatcaaggccgcagaagatgctgccaacagagctgccagcgccagcgagagcgccctgcagaccgtcatcaaggaggacctgcccaggaaggccaagaccctgagcagcaacagcgacaagctgctgaatgaggccaagatgacccagaagaagctgaagcaggaggtgtccccagccctgaacaacctgcagcagaccctgaacatcgtgacagtgcagaaggaggtgattgacaccaacctgaccaccctgagagatggcctgcacggcatccagagaggagacattgatgccatgatcagcagcgccaagtccatggtgaggaaggccaatgacatcacagatgaggtgctggatggcctgaaccccatccagacagatgtggagcgcatcaaggacacctacggccgcacccagaatgaagacttcaagaaggccctgacagatgctgacaacagcgtgaacaagctgaccaacaagctgcctgacctgtggaggaagattgagagcatcaaccagcagctgctgcccctgggcaacatcagtgacaacatggaccgcatccgggagctgatccagcaggccagagatgctgccagcaaggtggccgtgcccatgaggttcaacgggaagagcggcgtggaggtgcggctgcccaatgacctggaggacctgaagggctacaccagcctgagcctcttcctgcagaggcccaacagccgggagaatggaggaacagagaacatgtttgtgatgtacctgggcaacaaggatgccagccgggactacatcggcatggctgtggtggatggccagctgacctgtgtgtacaacctgggggaccgggaggccgagctgcaggtggaccagatcctgaccaagtctgagaccaaggaggccgtgatggacagagtgaagttccagaggatctaccagtttgcccggctgaactacaccaagggggccaccagcagcaagccagagaccccaggagtgtatgacatggatggcaggaacagcaacaccctgctgaacctggaccctgaaaatgtggtgttctacgtgggcggctaccccccagacttcaagctgcccagccggctgtccttccccccctacaagggctgcatcgagctggatgacctgaatgaaaatgtgctgagcctgtacaacttcaagaagaccttcaacctgaacaccacagaggtggagccctgcagaagaaggaaggaggagagtgacaagaactactttgagggcaccggctacgcccgggtgcccacccagccccacgcccccatccccaccttcggccagaccatccagaccaccgtggaccggggcctgctcttctttgctgaaaatggagaccgcttcatcagcctgaacattgaagatggcaagctgatggtgcgctacaagctgaacagcgagctgcccaaggagcggggcgtgggagatgccatcaacaacggccgggaccacagcatccagatcaagattggcaagctgcagaagaggatgtggatcaacgtggatgtgcagaacaccatcattgatggagaggtgtttgacttcagcacctactacctgggcggcatccccatcgccatccgggagcgcttcaacatcagcaccccagccttccggggctgcatgaagaacctgaagaagaccagcggcgtggtgcggctgaatgacacagtgggcgtgaccaagaagtgcagcgaggactggaagctggtgcgcagcgccagcttcagccggggcggccagctgtccttcacagacctgggcctgcccccaacagaccacctgcaggccagctttggcttccagaccttccagcccagcggcatcctgctggaccaccagacctggaccaggaacctgcaggtgaccctggaggatggctacatcgagctgagcaccagtgacagcggcagccccatcttcaagagcccccagacctacatggatggcctgctgcactacgtgtctgtcatcagtgacaacagcggcctgcggctgctgattgatgaccagctgctgaggaacagcaagaggctgaagcacatcagcagcagccggcagagcctgcggctgggcggcagcaactttgagggctgcatcagcaatgtgtttgtgcagaggctgagcctgagccctgaggtgctggacctgaccagcaacagcctgaagagagatgtgtccctgggcggctgcagcctgaacaagccacccttcctgatgctgctgaagggcagcacccgcttcaacaagaccaagaccttccgcatcaaccagctgctgcaggacacccctgtggccagccccaggtctgtgaaggtgtggcaggatgcctgcagccccctgcccaagacccaggccaaccacggggccctgcagtttggagacatccccaccagccacctgctcttcaagctgccccaggagctgctgaagcccaggagccagtttgctgtggacatgcagaccaccagcagccggggcctggtgttccacacaggcaccaagaacagcttcatggccctgtacctgagcaagggccgcctggtgtttgccctgggcacagatggcaagaagctgcgcatcaagagcaaggagaagtgcaatgatggcaagtggcacacagtggtgtttggacatgatggagagaagggccgcctggtggtggatggcctgcgggcccgggagggcagcctgcccggcaacagcaccatcagcatccgggcccctgtgtacctgggcagcccccccagcggcaagcccaagagcctgcccaccaacagctttgtgggctgcctgaagaacttccagctggacagcaagcccctgtacacccccagcagcagctttggagtgagcagctgcctgggcggccccctggagaagggcatctacttcagcgaggagggcggccacgtggtgctggcccacagcgtgctgctgggccctgagttcaagctggtgttcagcatccggcccaggagcctgaccggcatcctgatccacatcggcagccagcccgggaagcacctgtgtgtgtacctggaggccggcaaggtgacagcctccatggacagcggggccggcggcaccagcacctctgtgacccccaagcagagcctgtgtgatggccagtggcacagcgtggccgtgaccatcaagcagcacatcctgcacctggagctggacacagacagcagctacacagctggccagatccccttccccccagccagcacccaggagcccctgcacctgggcggggccccagccaacctgaccaccctgcgcatccctgtgtggaagagcttcttcggctgcctgaggaacatccacgtgaaccacatccctgtgcctgtgacagaggccctggaggtgcagggccctgtgtccctgaatggctgcccagaccagtag

SEQ ID NO: 157281 - DNA, 10002 bp, synthetic construct
  misc_feature 1..10002: note = Description of Artificial Sequence: Synthetic coding sequence
  source 1..10002: mol_type = other DNA
atggctgctgctgcccggccccggggccgggccctgggccctgtgctgccccccacccccctgctgctgctggtgctgcgggtgctgcctgcctgtggggccacagcccgggaccctggagctgctgctggcctgagcctgcaccccacctacttcaacctggccgaggccgcccgcatctgggccacagccacctgtggggagcggggccctggagagggccggccccagcctgagctgtactgcaagctggtgggcggccccacagcccctggcagcggccacaccatccagggccagttctgtgactactgcaacagcgaggaccccaggaaggcccaccctgtgaccaatgccattgatggcagcgagcgctggtggcagagcccccccctgagcagcggcacccagtacaacagagtgaacctgaccctggacctgggccagctgttccacgtggcctacatcctgatcaagtttgccaacagccccaggccagacctgtgggtgctggagaggtctgtggactttggcagcacctacagcccctggcagtactttgcccacagcaaggtggactgcctgaaggagtttggccgggaggccaacatggctgtgaccagagatgatgatgtgctgtgtgtgacagagtacagcagaattgtgcccctggagaatggagaggtggtggtgtccctcatcaatggccggcctggggccaagaacttcaccttcagccacaccctgcgggagttcaccaaggccaccaacatccggctgcgcttcctgcggaccaacaccctgctgggccacctgatcagcaaggcccagagggaccccaccgtgacccggcgctactactacagcatcaaggacatcagcattggaggccagtgtgtgtgcaatggacatgctgaggtgtgcaacatcaacaaccctgagaagctgttccgctgtgagtgccagcaccacacctgtggggagacctgtgaccgctgctgcaccggctacaaccagaggcgctggaggcctgctgcctgggagcagagccatgaatgtgaggcctgcaactgccacggccacgccagcaactgctactatgaccctgatgtggagcggcagcaggccagcctgaacacccagggcatctatgccggcggcggcgtgtgcatcaactgccagcacaacacagctggggtgaactgtgagcagtgtgccaagggctactaccggccctatggagtgcctgtggatgccccagatggctgcatcccctgcagctgtgaccctgagcacgcagatggctgtgagcagggcagcggccgctgccactgcaagcccaacttccacggggacaactgtgagaagtgtgccatcggctactacaacttccccttctgcctgcgcatccccatcttccctgtgtccacccccagcagtgaagatcctgtggccggggacatcaagggctgtgactgcaacctggagggcgtgctgcctgagatctgtgatgcccacggccgctgcctgtgcaggcctggggtggagggcccccgctgtgacacctgccgcagcggcttctacagcttccccatctgccaggcctgctggtgcagcgccctgggcagctaccagatgccctgcagctctgtgacaggccagtgtgagtgcaggcctggggtgacaggccagagatgtgaccgctgcctgagcggggcctatgacttcccccactgccagggcagcagcagcgcctgtgaccctgctggcaccatcaacagcaacctgggctactgccagtgcaagctgcacgtggagggccccacctgcagccgctgcaagctgctgtactggaacctggacaaggagaaccccagcggctgcagcgagtgcaagtgccacaaggccggcaccgtgtctggcaccggggagtgccggcagggagatggagactgccactgcaagagccacgtgggcggggacagctgtgacacctgtgaagatggctactttgccctggagaagagcaactacttcggctgccagggctgccagtgtgacatcggcggggccctgagctccatgtgcagcggccccagcggcgtgtgccagtgccgggagcacgtggtgggcaaggtgtgccagaggcctgagaacaactactacttcccagacctgcaccacatgaagtatgaaattgaagatggcagcacccccaacggccgggacctgcgcttcggctttgaccccctggccttccctgagttctcctggaggggctacgcccagatgacctctgtgcagaatgatgtgcgcatcaccctgaatgtgggcaagagcagcggcagcctcttccgggtcatcctgcgctacgtgaaccctggaacagaggccgtgtctggccacatcaccatctaccccagctggggcgccgcccagagcaaggagatcatcttcctgcccagcaaggagcccgcctttgtgacagtgcctggaaatggatttgctgaccccttcagcatcaccccaggcatctgggtggcctgcatcaaggccgagggcgtgctgctggactacctggtgctgctgccccgggactactatgaggcctctgtgctgcagctgcctgtgacagagccctgtgcctatgccggccccccccaggagaactgcctgctgtaccagcacctgcctgtgacccgcttcccctgcaccctggcctgtgaggcccggcacttcctgctggatggagagcccaggcctgtggccgtgcggcagcccaccccagcccaccctgtgatggtggacctgagcggccgggaggtggagctgcacctgcggctgcgcatcccccaggtgggccactacgtggtggtggtggagtacagcacagaggccgcccagctgtttgtggtggatgtgaatgtgaagagcagcggctctgtgctggccggccaggtgaacatctacagctgcaactacagcgtgctgtgccgctctgctgtgattgaccacatgagcagaattgccatgtatgagctgctggctgatgctgacatccagctgaagggccacatggcccgcttcctgctgcaccaggtgtgcatcatccccatcgaggagttcagcgcagaatatgtgcggccccaggtgcactgcatcgccagctatggccgctttgtgaaccagagcgccacctgtgtgtccctggcccacgagaccccacccacagccctgatcctggatgtgctgagcggccggcccttcccccacctgccccagcagagcagccccagcgtggatgtgctgcccggggtgaccctgaaggccccccagaaccaggtgaccctgcggggccgggtgccccacctgggccgctacgtgtttgtgatccacttctaccaggccgcccaccccaccttccctgcccaggtgtctgtggatggcggctggccccgggccggcagcttccacgccagcttctgcccccacgtgctgggctgccgggaccaggtgattgctgagggccagatcgagtttgacatcagcgagcctgaggtggccgccaccgtgaaggtgcctgagggcaagagcctggtgctggtgcgggtgctggtggtgcctgctgagaactatgactaccagatcctgcacaagaagtccatggacaagagcctggagttcatcaccaactgtgggaagaacagcttctacctggacccccagacagccagccgcttctgcaagaacagcgcccggagcctggtggccttctaccacaagggggccctgccctgtgagtgccaccccactggagccaccggcccccactgcagccctgagggcggccagtgcccctgccagcccaacgtcatcggccggcagtgcacccgctgtgccaccggccactacggcttcccccgctgcaagccctgcagctgtggccggcggctgtgtgaggagatgacaggccagtgccgctgcccccccaggacagtgcggccccagtgtgaggtgtgtgagacccacagcttctccttccaccccatggccggctgtgagggctgcaactgcagccggcggggcaccatcgaggccgccatgccagaatgtgaccgggacagcggccagtgccgctgcaagccccgcatcaccggccggcagtgtgacagatgtgccagcggcttctaccgcttcccagaatgtgtgccctgcaactgcaacagagatggaacagagcccggggtgtgtgaccccggcactggagcctgcctgtgcaaggaaaatgtggagggcacagagtgcaatgtgtgccgggagggcagcttccacctggaccctgccaacctgaagggctgcaccagctgcttctgctttggagtgaacaaccagtgccacagcagccacaagaggaggaccaagtttgtggacatgctgggctggcacctggagacagctgacagagtggacatccctgtgtccttcaaccctggcagcaacagcatggtggccgacctgcaggagctgcctgccaccatccacagcgcctcctgggtggcccccaccagctacctgggggacaaggtgtcctcctatggaggctacctgacctaccaggccaagagctttggcctgcccggggacatggtgctgctggagaagaagccagatgtgcagctgaccggccagcacatgagcatcatctatgaggagaccaacacccccaggccagaccggctgcaccacggccgggtgcacgtggtggagggcaacttcagacatgccagcagccgggcccctgtgtcccgggaggagctgatgacagtgctgagccggctggctgatgtgcgcatccagggcctgtacttcacagagacccagaggctgaccctgtctgaggtgggcctggaggaggccagtgacaccggcagcggcagaattgccctggccgtggagatctgtgcctgccccccagcctatgctggggacagctgccagggctgcagccctggctactacagagaccacaagggcctgtacacaggccgctgtgtgccctgcaactgcaatggccacagcaaccagtgccaggacggcagcggcatctgtgtgaactgccagcacaacacagctggggagcactgtgagcgctgccaggagggctactatggaaatgctgtgcacggcagctgccgggcctgcccctgcccccacaccaacagctttgccaccggctgtgtggtgaatggaggagatgtgcgctgcagctgcaaggccggctacacaggcacccagtgtgagcgctgtgcccctggctacttcggcaacccccagaagtttggaggcagctgccagccctgcagctgcaacagcaatggccagctgggcagctgccaccccctgaccggggactgcatcaaccaggagcccaaggacagcagccctgctgaggagtgtgatgactgtgacagctgtgtgatgaccctgctgaatgacctggccaccatgggagagcagctgcggctggtgaagagccagctgcagggcctgagcgccagcgctggcctgctggagcagatgaggcacatggagacccaggccaaggacctgaggaaccagctgctgaactacagaagtgccatcagcaaccacggcagcaagattgagggcctggagcgggagctgacagacctgaaccaggagtttgagaccctgcaggagaaggcccaggtgaacagcaggaaggcccagaccctgaacaacaacgtgaacagagccacccagagcgccaaggagctggatgtgaagatcaagaatgtcatcagaaatgtgcacatcctgctgaagcagatcagcggcacagatggagagggcaacaacgtgcccagcggggacttcagccgggagtgggccgaggcccagaggatgatgagggagctgaggaacagaaactttgggaagcacctgcgggaggccgaggccgacaagcgggagagccagctgctgctgaaccgcatccgcacctggcagaagacccaccagggcgagaacaacggcctggccaacagcatccgggacagcctgaatgaatatgaggccaagctgagtgacctgcgggcccggctgcaggaggccgccgcccaggccaagcaggccaacggcctgaaccaggagaatgaaagagccctgggcgccatccagaggcaggtgaaggagatcaacagcctgcagagcgacttcaccaagtacctgaccacagctgacagcagcctgctgcagaccaacatcgccctgcagctgatggagaagagccagaaggagtatgagaagctggccgccagcctgaatgaggcccggcaggagctgagtgacaaggtgcgggagctgagccgctctgctgggaagaccagcctggtggaggaggccgagaagcacgcccggagcctgcaggagctggccaagcagctggaggagatcaagagaaatgccagcggagatgagctggtgcgctgtgctgtggatgctgccacagcctatgagaacatcctgaatgccatcaaggctgctgaagatgctgccaacagagctgccagcgccagcgagagcgccctgcagaccgtcatcaaggaggacctgcccaggaaggccaagaccctgagcagcaacagcgacaagctgctgaatgaggccaagatgacccagaagaagctgaagcaggaggtgtccccagccctgaacaacctgcagcagaccctgaacatcgtgacagtgcagaaggaggtgattgacaccaacctgaccaccctgagagatggcctgcacggcatccagagaggagacattgatgccatgatcagcagcgccaagtccatggtgaggaaggccaatgacatcacagatgaggtgctggatggcctgaaccccatccagacagatgtggagcgcatcaaggacacctacggccgcacccagaatgaagacttcaagaaggccctgacagatgctgacaacagcgtgaacaagctgaccaacaagctgcctgacctgtggaggaagattgagagcatcaaccagcagctgctgcccctgggcaacatcagtgacaacatggaccgcatccgggagctgatccagcaggccagagatgctgccagcaaggtggccgtgcccatgaggttcaacgggaagtctggagtggaggtgcggctgcccaatgacctggaggacctgaagggctacaccagcctgagcctcttcctgcagaggcccaacagcagagaaaatggaggaacagagaacatgtttgtgatgtacctgggcaacaaggatgccagccgggactacatcggcatggctgtggtggatggccagctgacctgtgtgtacaacctgggggaccgggaggccgagctgcaggtggaccagatcctgaccaagtctgagaccaaggaggccgtgatggacagagtgaagttccagaggatctaccagtttgcccggctgaactacaccaagggggccaccagcagcaagccagagaccccaggagtgtatgacatggatggaagaaacagcaacaccctgctgaacctggaccctgaaaatgtggtgttctacgtgggcggctaccccccagacttcaagctgcccagccggctgtccttccccccctacaagggctgcatcgagctggatgacctgaatgaaaatgtgctgagcctgtacaacttcaagaagaccttcaacctgaacaccacagaggtggagccctgcagaagaaggaaggaggagagtgacaagaactactttgagggcaccggctacgcccgggtgcccacccagccccacgcccccatccccaccttcggccagaccatccagaccaccgtggaccggggcctgctcttctttgctgaaaatggagaccgcttcatcagcctgaacattgaagatggcaagctgatggtgcgctacaagctgaacagcgagctgcccaaggagcggggcgtgggagatgccatcaacaacggccgggaccacagcatccagatcaagattggcaagctgcagaagaggatgtggatcaacgtggatgtgcagaacaccatcattgatggagaggtgtttgacttcagcacctactacctgggcggcatccccatcgccatccgggagcgcttcaacatcagcaccccagccttccggggctgcatgaagaacctgaagaagaccagcggcgtggtgcggctgaatgacacagtgggcgtgaccaagaagtgcagcgaggactggaagctggtgcgcagcgccagcttcagcagaggaggccagctgtccttcacagacctgggcctgcccccaacagaccacctgcaggccagctttggcttccagaccttccagcccagcggcatcctgctggaccaccagacctggaccaggaacctgcaggtgaccctggaggatggctacatcgagctgagcaccagtgacagcggcagccccatcttcaagagcccccagacctacatggatggcctgctgcactacgtgtctgtcatcagtgacaacagcggcctgcggctgctgattgatgaccagctgctgaggaacagcaagaggctgaagcacatcagcagcagccggcagagcctgcggctgggcggcagcaactttgagggctgcatcagcaatgtgtttgtgcagaggctgagcctgagccctgaggtgctggacctgaccagcaacagcctgaagagagatgtgtccctgggcggctgcagcctgaacaagccacccttcctgatgctgctgaagggcagcacccgcttcaacaagaccaagaccttccgcatcaaccagctgctgcaggacacccctgtggccagccccaggtctgtgaaggtgtggcaggatgcctgcagccccctgcccaagacccaggccaaccacggggccctgcagtttggagacatccccaccagccacctgctcttcaagctgccccaggagctgctgaagcccaggagccagtttgctgtggacatgcagaccaccagcagccggggcctggtgttccacacaggcaccaagaacagcttcatggccctgtacctgagcaagggccgcctggtgtttgccctgggcacagatggcaagaagctgcgcatcaagagcaaggagaagtgcaatgatggcaagtggcacacagtggtgtttggacatgatggagagaagggccgcctggtggtggatggcctgcgggcccgggagggcagcctgcccggcaacagcaccatcagcatccgggcccctgtgtacctgggcagccccccatctgggaagcccaagagcctgcccaccaacagctttgtgggctgcctgaagaacttccagctggacagcaagcccctgtacacccccagcagcagctttggagtgagcagctgcctgggcggccccctggagaagggcatctacttcagcgaggagggcggccacgtggtgctggcccacagcgtgctgctgggccctgagttcaagctggtgttcagcatccggcccaggagcctgaccggcatcctgatccacatcggcagccagcccgggaagcacctgtgtgtgtacctggaggccggcaaggtgacagcctccatggattctggagctgggggcaccagcacctctgtgacccccaagcagagcctgtgtgatggccagtggcacagcgtggccgtgaccatcaagcagcacatcctgcacctggagctggacacagacagcagctacacagctggccagatccccttccccccagccagcacccaggagcccctgcacctgggcggggccccagccaacctgaccaccctgcgcatccctgtgtggaagagcttcttcggctgcctgaggaacatccacgtgaaccacatccctgtgcctgtgacagaggccctggaggtgcagggccctgtgtccctgaatggctgcccagaccagtag

SEQ ID NO: 157282 - DNA, 9834 bp, synthetic construct
  misc_feature 1..9834: note = Description of Artificial Sequence: Synthetic coding sequence
  source 1..9834: mol_type = other DNA
atggctgctgctgcccggccccggggccgggccctgggccctgtgctgccccccacccccctgctgctgctggtgctgcgggtgctgcctgcctgtggggccacagcccgggaccctggagctgctgctggcctgagcctgcaccccacctacttcaacctggccgaggccgcccgcatctgggccacagccacctgtggggagcggggccctggagagggccggccccagcctgagctgtactgcaagctggtgggcggccccacagcccctggcagcggccacaccatccagggccagttctgtgactactgcaacagcgaggaccccaggaaggcccaccctgtgaccaatgccattgatggcagcgagcgctggtggcagagcccccccctgagcagcggcacccagtacaacagagtgaacctgaccctggacctgggccagctgttccacgtggcctacatcctgatcaagtttgccaacagccccaggccagacctgtgggtgctggagaggtctgtggactttggcagcacctacagcccctggcagtactttgcccacagcaaggtggactgcctgaaggagtttggccgggaggccaacatggctgtgaccagagatgatgatgtgctgtgtgtgacagagtacagcagaattgtgcccctggagaatggagaggtggtggtgtccctcatcaatggccggcctggggccaagaacttcaccttcagccacaccctgcgggagttcaccaaggccaccaacatccggctgcgcttcctgcggaccaacaccctgctgggccacctgatcagcaaggcccagagggaccccaccgtgacccggcgctactactacagcatcaaggacatcagcattggaggccagtgtgtgtgcaatggacatgctgaggtgtgcaacatcaacaaccctgagaagctgttccgctgtgagtgccagcaccacacctgtggggagacctgtgaccgctgctgcaccggctacaaccagaggcgctggaggcctgctgcctgggagcagagccatgaatgtgaggcctgcaactgccacggccacgccagcaactgctactatgaccctgatgtggagcggcagcaggccagcctgaacacccagggcatctatgccggcggcggcgtgtgcatcaactgccagcacaacacagctggggtgaactgtgagcagtgtgccaagggctactaccggccctatggagtgcctgtggatgccccagatggctgcatcccctgcagctgtgaccctgagcacgcagatggctgtgagcagggcagcggccgctgccactgcaagcccaacttccacggggacaactgtgagaagtgtgccatcggctactacaacttccccttctgcctgcgcatccccatcttccctgtgtccacccccagcagtgaagatcctgtggccggggacatcaagggctgtgactgcaacctggagggcgtgctgcctgagatctgtgatgcccacggccgctgcctgtgcaggcctggggtggagggcccccgctgtgacacctgccgcagcggcttctacagcttccccatctgccaggcctgctggtgcagcgccctgggcagctaccagatgccctgcagctctgtgacaggccagtgtgagtgcaggcctggggtgacaggccagagatgtgaccgctgcctgagcggggcctatgacttcccccactgccagggcagcagcagcgcctgtgaccctgctggcaccatcaacagcaacctgggctactgccagtgcaagctgcacgtggagggccccacctgcagccgctgcaagctgctgtactggaacctggacaaggagaaccccagcggctgcagcgagtgcaagtgccacaaggccggcaccgtgtctggcaccggggagtgccggcagggagatggagactgccactgcaagagccacgtgggcggggacagctgtgacacctgtgaagatggctactttgccctggagaagagcaactacttcggctgccagggctgccagtgtgacatcggcggggccctgagctccatgtgcagcggccccagcggcgtgtgccagtgccgggagcacgtggtgggcaaggtgtgccagaggcctgagaacaactactacttcccagacctgcaccacatgaagtatgaaattgaagatggcagcacccccaacggccgggacctgcgcttcggctttgaccccctggccttccctgagttctcctggaggggctacgcccagatgacctctgtgcagaatgatgtgcgcatcaccctgaatgtgggcaagagcagcggcagcctcttccgggtcatcctgcgctacgtgaaccctggaacagaggccgtgtctggccacatcaccatctaccccagctggggcgccgcccagagcaaggagatcatcttcctgcccagcaaggagcccgcctttgtgacagtgcctggaaatggatttgctgaccccttcagcatcaccccaggcatctgggtggcctgcatcaaggccgagggcgtgctgctggactacctggtgctgctgccccgggactactatgaggcctctgtgctgcagctgcctgtgacagagccctgtgcctatgccggccccccccaggagaactgcctgctgtaccagcacctgcctgtgacccgcttcccctgcaccctggcctgtgaggcccggcacttcctgctggatggagagcccaggcctgtggccgtgcggcagcccaccccagcccaccctgtgatggtggacctgagcggccgggaggtggagctgcacctgcggctgcgcatcccccaggtgggccactacgtggtggtggtggagtacagcacagaggccgcccagctgtttgtggtggatgtgaatgtgaagagcagcggctctgtgctggccggccaggtgaacatctacagctgcaactacagcgtgctgtgccgctctgctgtgattgaccacatgagcagaattgccatgtatgagctgctggctgatgctgacatccagctgaagggccacatggcccgcttcctgctgcaccaggtgtgcatcatccccatcgaggagttcagcgcagaatatgtgcggccccaggtgcactgcatcgccagctatggccgctttgtgaaccagagcgccacctgtgtgtccctggcccacgagaccccacccacagccctgatcctggatgtgctgagcggccggcccttcccccacctgccccagcagagcagccccagcgtggatgtgctgcccggggtgaccctgaaggccccccagaaccaggtgaccctgcggggccgggtgccccacctgggccgctacgtgtttgtgatccacttctaccaggccgcccaccccaccttccctgcccaggtgtctgtggatggcggctggccccgggccggcagcttccacgccagcttctgcccccacgtgctgggctgccgggaccaggtgattgctgagggccagatcgagtttgacatcagcgagcctgaggtggccgccaccgtgaaggtgcctgagggcaagagcctggtgctggtgcgggtgctggtggtgcctgctgagaactatgactaccagatcctgcacaagaagtccatggacaagagcctggagttcatcaccaactgtgggaagaacagcttctacctggacccccagacagccagccgcttctgcaagaacagcgcccggagcctggtggccttctaccacaagggggccctgccctgtgagtgccaccccactggagccaccggcccccactgcagccctgagggcggccagtgcccctgccagcccaacgtcatcggccggcagtgcacccgctgtgccaccggccactacggcttcccccgctgcaagccctgcagctgtggccggcggctgtgtgaggagatgacaggccagtgccgctgcccccccaggacagtgcggccccagtgtgaggtgtgtgagacccacagcttctccttccaccccatggccggctgtgagggctgcaactgcagccggcggggcaccatcgaggccgccatgccagaatgtgaccgggacagcggccagtgccgctgcaagccccgcatcaccggccggcagtgtgacagatgtgccagcggcttctaccgcttcccagaatgtgtgccctgcaactgcaacagagatggaacagagcccggggtgtgtgaccccggcactggagcctgcctgtgcaaggaaaatgtggagggcacagagtgcaatgtgtgccgggagggcagcttccacctggaccctgccaacctgaagggctgcaccagctgcttctgctttggagtgaacaaccagtgccacagcagccacaagaggaggaccaagtttgtggacatgctgggctggcacctggagacagctgacagagtggacatccctgtgtccttcaaccctggcagcaacagcatggtggccgacctgcaggagctgcctgccaccatccacagcgcctcctgggtggcccccaccagctacctgggggacaaggtgtcctcctatggaggctacctgacctaccaggccaagagctttggcctgcccggggacatggtgctgctggagaagaagccagatgtgcagctgaccggccagcacatgagcatcatctatgaggagaccaacacccccaggccagaccggctgcaccacggccgggtgcacgtggtggagggcaacttcagacatgccagcagccgggcccctgtgtcccgggaggagctgatgacagtgctgagccggctggctgatgtgcgcatccagggcctgtacttcacagagacccagaggctgaccctgtctgaggtgggcctggaggaggccagtgacaccggcagcggcagaattgccctggccgtggagatctgtgcctgccccccagcctatgctggggacagctgccagggctgcagccctggctactacagagaccacaagggcctgtacacaggccgctgtgtgccctgcaactgcaatggccacagcaaccagtgccaggacggcagcggcatctgtgtgaactgccagcacaacacagctggggagcactgtgagcgctgccaggagggctactatggaaatgctgtgcacggcagctgccgggcctgcccctgcccccacaccaacagctttgccaccggctgtgtggtgaatggaggagatgtgcgctgcagctgcaaggccggctacacaggcacccagtgtgagcgctgtgcccctggctacttcggcaacccccagaagtttggaggcagctgccagccctgcagctgcaacagcaatggccagctgggcagctgccaccccctgaccggggactgcatcaaccaggagcccaaggacagcagccctgctgaggagtgtgatgactgtgacagctgtgtgatgaccctgctgaatgacctggccaccatgggagagcagctgcggctggtgaagagccagctgcagggcctgagcgccagcgctggcctgctggagcagatgaggcacatggagacccaggccaaggacctgaggaaccagctgctgaactacagaagtgccatcagcaaccacggcagcaagattgagggcctggagcgggagctgacagacctgaaccaggagtttgagaccctgcaggagaaggcccaggtgaacagcaggaaggcccagaccctgaacaacaacgtgaacagagccacccagagcgccaaggagctggatgtgaagatcaagaatgtcatcagaaatgtgcacatgctgaaccgcatccgcacctggcagaagacccaccagggcgagaacaacggcctggccaacagcatccgggacagcctgaatgaatatgaggccaagctgagtgacctgcgggcccggctgcaggaggccgccgcccaggccaagcaggccaacggcctgaaccaggagaatgaaagagccctgggcgccatccagaggcaggtgaaggagatcaacagcctgcagagcgacttcaccaagtacctgaccacagctgacagcagcctgctgcagaccaacatcgccctgcagctgatggagaagagccagaaggagtatgagaagctggccgccagcctgaatgaggcccggcaggagctgagtgacaaggtgcgggagctgagccgctctgctgggaagaccagcctggtggaggaggccgagaagcacgcccggagcctgcaggagctggccaagcagctggaggagatcaagagaaatgccagcggagatgagctggtgcgctgtgctgtggatgctgccacagcctatgagaacatcctgaatgccatcaaggctgctgaagatgctgccaacagagctgccagcgccagcgagagcgccctgcagaccgtcatcaaggaggacctgcccaggaaggccaagaccctgagcagcaacagcgacaagctgctgaatgaggccaagatgacccagaagaagctgaagcaggaggtgtccccagccctgaacaacctgcagcagaccctgaacatcgtgacagtgcagaaggaggtgattgacaccaacctgaccaccctgagagatggcctgcacggcatccagagaggagacattgatgccatgatcagcagcgccaagtccatggtgaggaaggccaatgacatcacagatgaggtgctggatggcctgaaccccatccagacagatgtggagcgcatcaaggacacctacggccgcacccagaatgaagacttcaagaaggccctgacagatgctgacaacagcgtgaacaagctgaccaacaagctgcctgacctgtggaggaagattgagagcatcaaccagcagctgctgcccctgggcaacatcagtgacaacatggaccgcatccgggagctgatccagcaggccagagatgctgccagcaaggtggccgtgcccatgaggttcaacgggaagtctggagtggaggtgcggctgcccaatgacctggaggacctgaagggctacaccagcctgagcctcttcctgcagaggcccaacagcagagaaaatggaggaacagagaacatgtttgtgatgtacctgggcaacaaggatgccagccgggactacatcggcatggctgtggtggatggccagctgacctgtgtgtacaacctgggggaccgggaggccgagctgcaggtggaccagatcctgaccaagtctgagaccaaggaggccgtgatggacagagtgaagttccagaggatctaccagtttgcccggctgaactacaccaagggggccaccagcagcaagccagagaccccaggagtgtatgacatggatggaagaaacagcaacaccctgctgaacctggaccctgaaaatgtggtgttctacgtgggcggctaccccccagacttcaagctgcccagccggctgtccttccccccctacaagggctgcatcgagctggatgacctgaatgaaaatgtgctgagcctgtacaacttcaagaagaccttcaacctgaacaccacagaggtggagccctgcagaagaaggaaggaggagagtgacaagaactactttgagggcaccggctacgcccgggtgcccacccagccccacgcccccatccccaccttcggccagaccatccagaccaccgtggaccggggcctgctcttctttgctgaaaatggagaccgcttcatcagcctgaacattgaagatggcaagctgatggtgcgctacaagctgaacagcgagctgcccaaggagcggggcgtgggagatgccatcaacaacggccgggaccacagcatccagatcaagattggcaagctgcagaagaggatgtggatcaacgtggatgtgcagaacaccatcattgatggagaggtgtttgacttcagcacctactacctgggcggcatccccatcgccatccgggagcgcttcaacatcagcaccccagccttccggggctgcatgaagaacctgaagaagaccagcggcgtggtgcggctgaatgacacagtgggcgtgaccaagaagtgcagcgaggactggaagctggtgcgcagcgccagcttcagcagaggaggccagctgtccttcacagacctgggcctgcccccaacagaccacctgcaggccagctttggcttccagaccttccagcccagcggcatcctgctggaccaccagacctggaccaggaacctgcaggtgaccctggaggatggctacatcgagctgagcaccagtgacagcggcagccccatcttcaagagcccccagacctacatggatggcctgctgcactacgtgtctgtcatcagtgacaacagcggcctgcggctgctgattgatgaccagctgctgaggaacagcaagaggctgaagcacatcagcagcagccggcagagcctgcggctgggcggcagcaactttgagggctgcatcagcaatgtgtttgtgcagaggctgagcctgagccctgaggtgctggacctgaccagcaacagcctgaagagagatgtgtccctgggcggctgcagcctgaacaagccacccttcctgatgctgctgaagggcagcacccgcttcaacaagaccaagaccttccgcatcaaccagctgctgcaggacacccctgtggccagccccaggtctgtgaaggtgtggcaggatgcctgcagccccctgcccaagacccaggccaaccacggggccctgcagtttggagacatccccaccagccacctgctcttcaagctgccccaggagctgctgaagcccaggagccagtttgctgtggacatgcagaccaccagcagccggggcctggtgttccacacaggcaccaagaacagcttcatggccctgtacctgagcaagggccgcctggtgtttgccctgggcacagatggcaagaagctgcgcatcaagagcaaggagaagtgcaatgatggcaagtggcacacagtggtgtttggacatgatggagagaagggccgcctggtggtggatggcctgcgggcccgggagggcagcctgcccggcaacagcaccatcagcatccgggcccctgtgtacctgggcagccccccatctgggaagcccaagagcctgcccaccaacagctttgtgggctgcctgaagaacttccagctggacagcaagcccctgtacacccccagcagcagctttggagtgagcagctgcctgggcggccccctggagaagggcatctacttcagcgaggagggcggccacgtggtgctggcccacagcgtgctgctgggccctgagttcaagctggtgttcagcatccggcccaggagcctgaccggcatcctgatccacatcggcagccagcccgggaagcacctgtgtgtgtacctggaggccggcaaggtgacagcctccatggattctggagctgggggcaccagcacctctgtgacccccaagcagagcctgtgtgatggccagtggcacagcgtggccgtgaccatcaagcagcacatcctgcacctggagctggacacagacagcagctacacagctggccagatccccttccccccagccagcacccaggagcccctgcacctgggcggggccccagccaacctgaccaccctgcgcatccctgtgtggaagagcttcttcggctgcctgaggaacatccacgtgaaccacatccctgtgcctgtgacagaggccctggaggtgcagggccctgtgtccctgaatggctgcccagaccagtag

SEQ ID NO: 157283 - DNA, 4560 bp, synthetic construct
  misc_feature 1..4560: note = Description of Artificial Sequence: Synthetic coding sequence
  source 1..4560: mol_type = other DNA
atggctgctgctgcccggccccggggccgggccctgggccctgtgctgccccccacccccctgctgctgctggtgctgcgggtgctgcctgcctgtggggccacagcccgggaccctggagctgctgctggcctgagcctgcaccccacctacttcaacctggccgaggccgcccgcatctgggccacagccacctgtggggagcggggccctggagagggccggccccagcctgagctgtactgcaagctggtgggcggccccacagcccctggcagcggccacaccatccagggccagttctgtgactactgcaacagcgaggaccccaggaaggcccaccctgtgaccaatgccattgatggcagcgagcgctggtggcagagcccccccctgagcagcggcacccagtacaacagagtgaacctgaccctggacctgggccagctgttccacgtggcctacatcctgatcaagtttgccaacagccccaggccagacctgtgggtgctggagaggtctgtggactttggcagcacctacagcccctggcagtactttgcccacagcaaggtggactgcctgaaggagtttggccgggaggccaacatggctgtgaccagagatgatgatgtgctgtgtgtgacagagtacagcagaattgtgcccctggagaatggagaggtggtggtgtccctcatcaatggccggcctggggccaagaacttcaccttcagccacaccctgcgggtgtaccagggcaacaagcaccccctcttcctgcggaccaacaccctgctgggccacctgatcagcaaggcccagagggaccccaccgtgacccggcgctactactacagcatcaaggacatcagcattggaggccagtgtgtgtgcaatggacatgctgaggtgtgcaacatcaacaaccctgagaagctgttccgctgtgagtgccagcaccacacctgtggggagacctgtgaccgctgctgcaccggctacaaccagaggcgctggaggcctgctgcctgggagcagagccatgaatgtgaggcctgcaactgccacggccacgccagcaactgctactatgaccctgatgtggagcggcagcaggccagcctgaacacccagggcatctatgccggcggcggcgtgtgcatcaactgccagcacaacacagctggggtgaactgtgagcagtgtgccaagggctactaccggccctatggagtgcctgtggatgccccagatggctgcatcccctgcagctgtgaccctgagcacgcagatggctgtgagcagggcagcggccgctgccactgcaagcccaacttccacggggacaactgtgagaagtgtgccatcggctactacaacttccccttctgcctgcgcatccccatcttccctgtgtccacccccagcagtgaagatcctgtggccggggacatcaagggctgtgactgcaacctggagggcgtgctgcctgagatctgtgatgcccacggccgctgcctgtgcaggcctggggtggagggcccccgctgtgacacctgccgcagcggcttctacagcttccccatctgccaggcctgctggtgcagcgccctgggcagctaccagatgccctgcagctctgtgacaggccagtgtgagtgcaggcctggggtgacaggccagagatgtgaccgctgcctgagcggggcctatgacttcccccactgccagggcagcagcagcgcctgtgaccctgctggcaccatcaacagcaacctgggctactgccagtgcaagctgcacgtggagggccccacctgcagccgctgcaagctgctgtactggaacctggacaaggagaaccccagcggctgcagcgagtgcaagtgccacaaggccggcaccgtgtctggcaccggggagtgccggcagggagatggagactgccactgcaagagccacgtgggcggggacagctgtgacacctgtgaagatggctactttgccctggagaagagcaactacttcggctgccagggctgccagtgtgacatcggcggggccctgagctccatgtgcagcggccccagcggcgtgtgccagtgccgggagcacgtggtgggcaaggtgtgccagaggcctgagaacaactactacttcccagacctgcaccacatgaagtatgaaattgaagatggcagcacccccaacggccgggacctgcgcttcggctttgaccccctggccttccctgagttctcctggaggggctacgcccagatgacctctgtgcagaatgatgtgcgcatcaccctgaatgtgggcaagagcagcggcagcctcttccgggtcatcctgcgctacgtgaaccctggaacagaggccgtgtctggccacatcaccatctaccccagctggggcgccgcccagagcaaggagatcatcttcctgcccagcaaggagcccgcctttgtgacagtgcctggaaatggatttgctgaccccttcagcatcaccccaggcatctgggtggcctgcatcaaggccgagggcgtgctgctggactacctggtgctgctgccccgggactactatgaggcctctgtgctgcagctgcctgtgacagagccctgtgcctatgccggccccccccaggagaactgcctgctgtaccagcacctgcctgtgacccgcttcccctgcaccctggcctgtgaggcccggcacttcctgctggatggagagcccaggcctgtggccgtgcggcagcccaccccagcccaccctgtgatggtggacctgagcggccgggaggtggagctgcacctgcggctgcgcatcccccaggtgggccactacgtggtggtggtggagtacagcacagaggccgcccagctgtttgtggtggatgtgaatgtgaagagcagcggctctgtgctggccggccaggtgaacatctacagctgcaactacagcgtgctgtgccgctctgctgtgattgaccacatgagcagaattgccatgtatgagctgctggctgatgctgacatccagctgaagggccacatggcccgcttcctgctgcaccaggtgtgcatcatccccatcgaggagttcagcgcagaatatgtgcggccccaggtgcactgcatcgccagctatggccgctttgtgaaccagagcgccacctgtgtgtccctggcccacgagaccccacccacagccctgatcctggatgtgctgagcggccggcccttcccccacctgccccagcagagcagccccagcgtggatgtgctgcccggggtgaccctgaaggccccccagaaccaggtgaccctgcggggccgggtgccccacctgggccgctacgtgtttgtgatccacttctaccaggccgcccaccccaccttccctgcccaggtgtctgtggatggcggctggccccgggccggcagcttccacgccagcttctgcccccacgtgctgggctgccgggaccaggtgattgctgagggccagatcgagtttgacatcagcgagcctgaggtggccgccaccgtgaaggtgcctgagggcaagagcctggtgctggtgcgggtgctggtggtgcctgctgagaactatgactaccagatcctgcacaagaagtccatggacaagagcctggagttcatcaccaactgtgggaagaacagcttctacctggacccccagacagccagccgcttctgcaagaacagcgcccggagcctggtggccttctaccacaagggggccctgccctgtgagtgccaccccactggagccaccggcccccactgcagccctgagggcggggcccacgccagccccaccagcagcggcggcagcgccccagctgtgcagcaggcctacggcttcccccgctgcaagaggaagagctgcagctgtggccggcggctgtgtgaggagatgacaggccagtgccgctgcccccccaggacagtgcggccccagtgtgaggtgtgtgagacccacagcttctccttccaccccatggccggctgtgagggctgcaactgcagccggcggggcaccatcgaggccgccatgccagaatgtgaccgggacagcggccagtgccgctgcaagccccgcatcaccggccggcagtgtgacagatgtgccagcggcttctaccgcttcccagaatgtgtgccctgcaactgcaacagagatggaacagagcccggggtgtgtgaccccggcactggagcctgcctgtgcaaggaaaatgtggagggcacagagtgcaatgtgtgccgggagggcagcttccacctggaccctgccaacctgaagggctgcaccagctgcttctgctttggagtgaacaaccagtgccacagcagccacaagaggaggaccaagtttgtggacatgctgggctggcacctggagacagctgacagagtggacatccctgtgtccttcaaccctggcagcaacagcatggtggccgacctgcaggagctgcctgccaccatccacagcgcctcctgggtggccccctag

SEQ ID NO: 157284 - DNA, 1743 bp, synthetic construct
  misc_feature 1..1743: note = Description of Artificial Sequence: Synthetic coding sequence
  source 1..1743: mol_type = other DNA
atggctgctgctgcccggccccggggccgggccctgggccctgtgctgccccccacccccctgctgctgctggtgctgcgggtgctgcctgcctgtggggccacagcccgggaccctggagctgctgctggcctgagcctgcaccccacctacttcaacctggccgaggccgcccgcatctgggccacagccacctgtggggagcggggccctggagagggccggccccagcctgagctgtactgcaagctggtgggcggccccacagcccctggcagcggccacaccatccagggccagttctgtgactactgcaacagcgaggaccccaggaaggcccaccctgtgaccaatgccattgatggcagcgagcgctggtggcagagcccccccctgagcagcggcacccagtacaacagagtgaacctgaccctggacctgggccagctgttccacgtggcctacatcctgatcaagtttgccaacagccccaggccagacctgtgggtgctggagaggtctgtggactttggcagcacctacagcccctggcagtactttgcccacagcaaggtggactgcctgaaggagtttggccgggaggccaacatggctgtgaccagagatgatgatgtgctgtgtgtgacagagtacagcagaattgtgcccctggagaatggagaggtggtggtgtccctcatcaatggccggcctggggccaagaacttcaccttcagccacaccctgcgggagttcaccaaggccaccaacatccggctgcgcttcctgcggaccaacaccctgctgggccacctgatcagcaaggcccagagggaccccaccgtgacccggcgctactactacagcatcaaggacatcagcattggaggccagtgtgtgtgcaatggacatgctgaggtgtgcaacatcaacaaccctgagaagctgttccgctgtgagtgccagcaccacacctgtggggagacctgtgaccgctgctgcaccggctacaaccagaggcgctggaggcctgctgcctgggagcagagccatgaatgtgaggcctgcaactgccacggccacgccagcaactgctactatgaccctgatgtggagcggcagcaggccagcctgaacacccagggcatctatgccggcggcggcgtgtgcatcaactgccagcacaacacagctggggtgaactgtgagcagtgtgccaagggctactaccggccctatggagtgcctgtggatgccccagatggctgcatcccctgcagctgtgaccctgagcacgcagatggctgtgagcagggcagcggccgctgccactgcaagcccaacttccacggggacaactgtgagaagtgtgccatcggctactacaacttccccttctgcctgcgcatccccatcttccctgtgtccacccccagcagtgaagatcctgtggccggggacatcaagggcaactggtgtgactgcaacctggagggcgtgctgcctgagatctgtgatgcccacggccgctgcctgtgcaggcctggggtggagggcccccgctgtgacacctgccgcagcggcttctacagcttccccatctgccagggccccagcgagaaggtggccatctacaagccagagagccggcccagcgctgagacagagcccgccagcacctggatcctggacttccctgccagcaggactggagagatcaacttctactgcctgagcccctag

SEQ ID NO: 157285 - DNA, 5007 bp, synthetic construct
  misc_feature 1..5007: note = Description of Artificial Sequence: Synthetic coding sequence
  source 1..5007: mol_type = other DNA
atgcccccagctgtgcggcgcagcgcctgcagcatgggctggctgtggatctttggagctgccctgggccagtgcctgggctacagcagccagcagcagagggtgcccttcctgcagcccccaggccagagccagctgcaggccagctatgtggagttccggcccagccagggctgcagccctggctactacagagaccacaagggcctgtacacaggccgctgtgtgccctgcaactgcaatggccacagcaaccagtgccaggacggcagcggcatctgtgtgaactgccagcacaacacagctggggagcactgtgagcgctgccaggagggctactatggaaatgctgtgcacggcagctgccgggcctgcccctgcccccacaccaacagctttgccaccggctgtgtggtgaatggaggagatgtgcgctgcagctgcaaggccggctacacaggcacccagtgtgagcgctgtgcccctggctactttggaaacccccagaagtttggaggcagctgccagccctgcagctgcaacagcaatggccagctgggcagctgccaccccctgactggagactgcatcaaccaggagcccaaggacagcagccctgcagaagaatgtgatgactgtgacagctgtgtgatgaccctgctgaatgacctggccaccatgggagagcagctgcggctggtgaagagccagctgcagggcctgagcgccagcgctggcctgctggagcagatgaggcacatggagacccaggccaaggacctgaggaaccagctgctgaactaccgcagcgccatcagcaaccacggcagcaagattgagggcctggagcgggagctgacagacctgaaccaggagtttgagaccctgcaggagaaggcccaggtgaacagcaggaaggcccagaccctgaacaacaacgtgaacagagccacccagagcgccaaggagctggatgtgaagatcaagaatgtcatcagaaatgtgcacatgctgaaccgcatccgcacctggcagaagacccaccagggagaaaataatggcctggccaacagcatccgggacagcctgaatgaatatgaggccaagctgagtgacctgcgggcccggctgcaggaggccgccgcccaggccaagcaggccaacggcctgaaccaggagaatgaaagagccctgggcgccatccagaggcaggtgaaggagatcaacagcctgcagagcgacttcaccaagtacctgaccacagctgacagcagcctgctgcagaccaacatcgccctgcagctgatggagaagagccagaaggagtatgagaagctggccgccagcctgaatgaggcccggcaggagctgagtgacaaggtgcgggagctgagccgctctgctgggaagaccagcctggtggaggaggccgagaagcacgcccggagcctgcaggagctggccaagcagctggaggagatcaagagaaatgccagcggagatgagctggtgcgctgtgctgtggatgctgccacagcctatgagaacatcctgaatgccatcaaggccgcagaagatgctgccaacagagctgccagcgccagcgagagcgccctgcagaccgtcatcaaggaggacctgcccaggaaggccaagaccctgagcagcaacagcgacaagctgctgaatgaggccaagatgacccagaagaagctgaagcaggaggtgtccccagccctgaacaacctgcagcagaccctgaacatcgtgacagtgcagaaggaggtgattgacaccaacctgaccaccctgagagatggcctgcacggcatccagagaggagacattgatgccatgatcagcagcgccaagtccatggtgaggaaggccaatgacatcacagatgaggtgctggatggcctgaaccccatccagacagatgtggagcgcatcaaggacacctacggccgcacccagaatgaagacttcaagaaggccctgacagatgctgacaacagcgtgaacaagctgaccaacaagctgcctgacctgtggaggaagattgagagcatcaaccagcagctgctgcccctgggcaacatcagtgacaacatggaccgcatccgggagctgatccagcaggccagagatgctgccagcaaggtggccgtgcccatgaggttcaacgggaagagcggcgtggaggtgcggctgcccaatgacctggaggacctgaagggctacaccagcctgagcctcttcctgcagaggcccaacagccgggagaatggaggaacagagaacatgtttgtgatgtacctgggcaacaaggatgccagccgggactacatcggcatggctgtggtggatggccagctgacctgtgtgtacaacctgggggaccgggaggccgagctgcaggtggaccagatcctgaccaagtctgagaccaaggaggccgtgatggacagagtgaagttccagaggatctaccagtttgcccggctgaactacaccaagggggccaccagcagcaagccagagaccccaggagtgtatgacatggatggcaggaacagcaacaccctgctgaacctggaccctgaaaatgtggtgttctacgtgggcggctaccccccagacttcaagctgcccagccggctgtccttccccccctacaagggctgcatcgagctggatgacctgaatgaaaatgtgctgagcctgtacaacttcaagaagaccttcaacctgaacaccacagaggtggagccctgcagaagaaggaaggaggagagtgacaagaactactttgagggcaccggctacgcccgggtgcccacccagccccacgcccccatccccaccttcggccagaccatccagaccaccgtggaccggggcctgctcttctttgctgaaaatggagaccgcttcatcagcctgaacattgaagatggcaagctgatggtgcgctacaagctgaacagcgagctgcccaaggagcggggcgtgggagatgccatcaacaacggccgggaccacagcatccagatcaagattggcaagctgcagaagaggatgtggatcaacgtggatgtgcagaacaccatcattgatggagaggtgtttgacttcagcacctactacctgggcggcatccccatcgccatccgggagcgcttcaacatcagcaccccagccttccggggctgcatgaagaacctgaagaagaccagcggcgtggtgcggctgaatgacacagtgggcgtgaccaagaagtgcagcgaggactggaagctggtgcgcagcgccagcttcagccggggcggccagctgtccttcacagacctgggcctgcccccaacagaccacctgcaggccagctttggcttccagaccttccagcccagcggcatcctgctggaccaccagacctggaccaggaacctgcaggtgaccctggaggatggctacatcgagctgagcaccagtgacagcggcagccccatcttcaagagcccccagacctacatggatggcctgctgcactacgtgtctgtcatcagtgacaacagcggcctgcggctgctgattgatgaccagctgctgaggaacagcaagaggctgaagcacatcagcagcagccggcagagcctgcggctgggcggcagcaactttgagggctgcatcagcaatgtgtttgtgcagaggctgagcctgagccctgaggtgctggacctgaccagcaacagcctgaagagagatgtgtccctgggcggctgcagcctgaacaagccacccttcctgatgctgctgaagggcagcacccgcttcaacaagaccaagaccttccgcatcaaccagctgctgcaggacacccctgtggccagccccaggtctgtgaaggtgtggcaggatgcctgcagccccctgcccaagacccaggccaaccacggggccctgcagtttggagacatccccaccagccacctgctcttcaagctgccccaggagctgctgaagcccaggagccagtttgctgtggacatgcagaccaccagcagccggggcctggtgttccacacaggcaccaagaacagcttcatggccctgtacctgagcaagggccgcctggtgtttgccctgggcacagatggcaagaagctgcgcatcaagagcaaggagaagtgcaatgatggcaagtggcacacagtggtgtttggacatgatggagagaagggccgcctggtggtggatggcctgcgggcccgggagggcagcctgcccggcaacagcaccatcagcatccgggcccctgtgtacctgggcagcccccccagcggcaagcccaagagcctgcccaccaacagctttgtgggctgcctgaagaacttccagctggacagcaagcccctgtacacccccagcagcagctttggagtgagcagctgcctgggcggccccctggagaagggcatctacttcagcgaggagggcggccacgtggtgctggcccacagcgtgctgctgggccctgagttcaagctggtgttcagcatccggcccaggagcctgaccggcatcctgatccacatcggcagccagcccgggaagcacctgtgtgtgtacctggaggccggcaaggtgacagcctccatggacagcggggccggcggcaccagcacctctgtgacccccaagcagagcctgtgtgatggccagtggcacagcgtggccgtgaccatcaagcagcacatcctgcacctggagctggacacagacagcagctacacagctggccagatccccttccccccagccagcacccaggagcccctgcacctgggcggggccccagccaacctgaccaccctgcgcatccctgtgtggaagagcttcttcggctgcctgaggaacatccacgtgaaccacatccctgtgcctgtgacagaggccctggaggtgcagggccctgtgtccctgaatggctgcccagaccagtag

SEQ ID NO: 157286 - DNA, 1065 bp, synthetic construct
  misc_feature 1..1065: note = Description of Artificial Sequence: Synthetic coding sequence
  source 1..1065: mol_type = other DNA
atgcagggcctgctcttcagcaccctgctgctggccggcctggcccagttctgctgccgggtgcagggcaccggccccctggacaccaccccagagggccggcctggagaggtgtctgatgccccccagaggaagcagttctgccactggccctgcaagtgcccccagcagaagccccgctgccccccaggagtgtccctggtgagagatggctgcggctgctgcaagatctgtgccaagcagcccggggagatctgcaatgaagctgacctgtgtgacccccacaagggcctgtactgtgactacagcgtggaccggcccaggtatgaaacaggagtgtgtgcctacctggtggccgtgggctgtgagttcaaccaggtgcactaccacaacggccaggtgttccagcccaaccccctcttcagctgcctgtgtgtgtctggggccatcggctgcacccccctcttcatccccaagctggccggcagccactgcagcggggccaagggcggcaagaagagtgaccagagcaactgcagcctggagcccctgctgcagcagctgagcaccagctacaagaccatgcctgcctacagaaacctgcccctcatctggaagaagaagtgcctggtgcaggccaccaagtggaccccctgcagcaggacctgtggcatgggcatcagcaacagagtgaccaatgaaaacagcaactgtgagatgaggaaggagaagaggctgtgctacatccagccctgtgacagcaacatcctgaagaccatcaagatccccaagggcaagacctgccagcccaccttccagctgagcaaggccgagaagtttgtgttttctggctgcagcagcacccagagctacaagcccaccttctgtggcatctgcctggacaagcgctgctgcatccccaacaagagcaagatgatcaccatccagtttgactgccccaatgaaggcagcttcaagtggaagatgctgtggatcaccagctgtgtgtgccagaggaactgccgggagcccggggacatcttcagcgagctgaagatcctgtag

SEQ ID NO: 157287 - DNA, 267 bp, synthetic construct
  misc_feature 1..267: note = Description of Artificial Sequence: Synthetic coding sequence
  source 1..267: mol_type = other DNA
atggccctgagcagcgcctggaggtctgtgctgcccctgtggctgctgtggagcgctgcctgcagccgggccgccagcggagatgacaatgccttcccctttgacatcgagggcagcagcgctgtgggccggcaggaccccccagagaccagcgagccccgggtggccctgggccgcctgcccccagctgctgagaagtgcaatgccggcttcttccacaccctgagcggggagtgtgtgccctgtgactgcaatggaaacagctag

SEQ ID NO: 157288 - DNA, 363 bp, synthetic construct
  misc_feature 1..363: note = Description of Artificial Sequence: Synthetic coding sequence
  source 1..363: mol_type = other DNA
atggccctgagcagcgcctggaggtctgtgctgcccctgtggctgctgtggagcgctgcctgcagccgggccgccagcggagatgacaatgccttcccctttgacatcgagggcagcagcgctgtgggccggcaggaccccccagagaccagcgagccccgggtggccctgggccgcctgcccccagctgctgaggtgcagtgcccctgccactgccaccctgctggggccccagccccacccagggctgtgccccacagcagcttcagcctgagcccccccctgagcagcccccagtgcctggagagcttcacctgggcccggtctgtgaggaagctggagatcaagagcttccccctgtag

SEQ ID NO: 157289 - DNA, 549 bp, synthetic construct
  misc_feature 1..549: note = Description of Artificial Sequence: Synthetic coding sequence
  source 1..549: mol_type = other DNA
atggccctgagcagcgcctggaggtctgtgctgcccctgtggctgctgtggagcgctgcctgcagccgggccgccagcggagatgacaatgccttcccctttgacatcgagggcagcagcgctgtgggccggcaggaccccccagagaccagcgagccccgggtggccctgggccgcctgcccccagctgctgagaagtgcaatgccggcttcttccacaccctgagcggggagtgtgtgccctgtgactgcaatggaaacagcaatgaatgtctggatggcagcggctactgtgtgcactgccagaggaacaccaccggggagcactgtgagaagtgcctggatggctacatcggggacagcatccggggggccccccagttctgccagccctgcccctgccccctgccccacctggccaactttgctgagagctgctacaggaagaatggagctgtgcgctgcatctgcaatgaaaattatgccggccccaactgtgagcggcccagcccccagagcacccggggcttccccctgaatgacagctag

SEQ ID NO: 157290 - DNA, 537 bp, synthetic construct
  misc_feature 1..537: note = Description of Artificial Sequence: Synthetic coding sequence
  source 1..537: mol_type = other DNA
tgaatttttgaggactgtgatgaggtgacaggccagtgcaggaactgcctgaggaacaccaccggcttcaagtgtgagcgctgtgcccctggctactatggagatgcccgcatcgccaagaactgtgctgtgtgcaactgtggcggcggcccctgtgacagcgtgactggagagtgcctggaggagggctttgagccccccaccggcatggactgccccaccatcagctgtgacaagtgtgtgtgggacctgacagatgccctgcggctggccgccctgagcattgaggagggcaagagcggcgtgctgtctgtgtcctctggagctgctgcccaccgccacgtgaatgagatcaatgccaccatctacctgctgaagaccaagctgtctgaaagagagaaccagtatgccctgaggaagatccagatcaacaatgctgagaacaccatgaagagcctgctgagtgatgtggaggagctggtggagaagcactggaacaagccccggcggcggctggagctgcaggagggcgtgtag

SEQ ID NO: 157291 - DNA, 5451 bp, synthetic construct
  misc_feature 1..5451: note = Description of Artificial Sequence: Synthetic coding sequence
  source 1..5451: mol_type = other DNA
atggccctgagcagcgcctggaggtctgtgctgcccctgtggctgctgtggagcgctgcctgcagccgggccgccagcggagatgacaatgccttcccctttgacatcgagggcagcagcgctgtgggccggcaggaccccccagagaccagcgagccccgggtggccctgggccgcctgcccccagctgctgagaagtgcaatgccggcttcttccacaccctgagcggggagtgtgtgccctgtgactgcaatggaaacagcaatgaatgtctggatggcagcggctactgtgtgcactgccagaggaacaccaccggggagcactgtgagaagtgcctggatggctacatcggggacagcatccggggggccccccagttctgccagccctgcccctgccccctgccccacctggccaactttgctgagagctgctacaggaagaatggagctgtgcgctgcatctgcaatgaaaattatgccggccccaactgtgagcgctgtgcccctggctactacggcaaccccctgctgattggcagcacctgcaagaagtgtgactgcagcggcaacagcgaccccaacctgatctttgaggactgtgatgaggtgacaggccagtgcaggaactgcctgaggaacaccaccggcttcaagtgtgagcgctgtgcccctggctactatggagatgcccgcatcgccaagaactgtgctgtgtgcaactgtggcggcggcccctgtgacagcgtgactggagagtgcctggaggagggctttgagccccccaccggctgtgacaagtgtgtgtgggacctgacagatgccctgcggctggccgccctgagcattgaggagggcaagtctggagtgctgtctgtgagcagcggggctgctgcccacagacatgtgaatgagatcaatgccaccatctacctgctgaagaccaagctgtctgagcgggagaaccagtatgccctgaggaagatccagatcaacaatgctgagaacaccatgaagagcctgctgagtgatgtggaggagctggtggagaaggagaaccaggccagcaggaagggccagctggtgcagaaggagagcatggacaccatcaaccacgccagccagctggtggagcaggcccatgacatgagggacaagatccaggagatcaacaacaagatgctgtactacggggaggagcacgagctgagccccaaggagatcagcgagaagctggtgctggcccagaagatgctggaggagatccgcagccggcagcccttcttcacccagcgggagctggtggatgaggaggctgatgaggcctatgagctgctgagccaggccgagagctggcagaggctgcacaatgagaccaggaccctcttccctgtggtgctggagcagctggatgactacaatgccaagctgagtgacctgcaggaggccctggaccaggccctgaactacgtgagagatgctgaggacatgaacagagccacagctgcccggcagagggaccacgagaagcagcaggagcgggtgcgggagcagatggaggtggtgaacatgagcctgagcaccagcgctgacagcctgaccaccccccggctgaccctgtctgagctggatgacatcatcaagaatgccagcggcatctatgcagaaattgatggagccaagtctgagctgcaggtgaagctgagcaacctgagcaacctgagccatgacctggtgcaggaggccatcgaccacgcccaggacctgcagcaggaggccaatgagctgagcaggaagctgcacagcagtgacatgaatggcctggtgcagaaggccctggatgccagcaatgtgtatgaaaatattgtgaactacgtgtctgaggccaatgaaacagctgagtttgccctgaacaccacagaccgcatctatgatgctgtgtctggaattgacacccagatcatctaccacaaggatgaaagtgagaacctgctgaaccaggcccgggagctgcaggccaaggccgagagcagcagtgatgaagctgtggccgacaccagcagaagagtgggcggggccctggccaggaagagcgccctgaagacccggctgagtgatgctgtgaagcagctgcaggccgctgagagaggagatgcccagcagaggctgggccagagccgcctcatcacagaggaggccaacagaaccaccatggaggtgcagcaggccacagcccccatggccaacaacctgaccaactggagccagaacctgcagcactttgacagcagcgcctacaacacagctgtgaacagcgccagagatgctgtgaggaacctgacagaggtggtgccccagctgctggaccagctgaggacagtggagcagaagaggcctgccagcaatgtgtctgccagcatccagaggatccgggagctgattgcccagaccaggtctgtggccagcaagatccaggtgtccatgatgtttgatggccagagcgctgtggaggtgcacagcaggacctccatggatgacctgaaggccttcaccagcctgagcctgtacatgaagccccctgtgaagaggcctgagctgacagaaacagctgaccagttcatcctgtacctgggcagcaagaatgccaagaaggagtacatgggcctggccatcaagaatgacaacctggtgtatgtgtacaacctgggcaccaaggatgtggagatccccctggacagcaagcctgtgtcctcctggccagcctacttcagcatcgtgaagattgagcgggtgggcaagcacggcaaggtgttcctgactgtgcccagcctgagcagcacagctgaggagaagttcatcaagaagggggagttctctggagatgacagcctgctggacctggaccctgaagatactgtgttctacgtgggcggcgtgcccagcaacttcaagctgcccaccagcctgaacctgcccggctttgtgggctgcctggagctggccaccctgaacaatgatgtgatcagcctgtacaacttcaagcacatctacaacatggaccccagcacctctgtgccctgtgcccgggacaagctggccttcacccagagccgggccgccagctacttctttgatggcagcggctatgctgtggtgcgggacatcacccggcggggcaagtttggccaggtgaccaggtttgacatcgaggtgaggaccccagctgacaatggcctcatcctgctgatggtgaatggctccatgttcttccggctggagatgagaaatggctacctgcacgtgttctatgactttggcttcagcggcggccctgtgcacctggaggacaccctgaagaaggcccagatcaatgatgccaagtaccacgagatcagcatcatctaccacaatgacaagaagatgatcctggtggtggaccggcggcacgtgaagtccatggacaatgagaagatgaagatccccttcacagacatctacatcggcggggcccctcctgagatcctgcagagccgggccctgcgggcccacctgcccctggacatcaacttccggggctgcatgaagggcttccagttccagaagaaggacttcaacctgctggagcagacagagaccctgggcgtgggctacggctgcccagaggacagcctcatcagccggcgggcctacttcaacggccagagcttcatcgccagcatccagaagatctccttctttgatggctttgagggcggcttcaacttccgcaccctgcagcccaacggcctgctcttctactatgccagcggcagtgatgtgttcagcatcagcctggacaatggaacagtcatcatggatgtgaagggcatcaaggtgcagagcgtggacaagcagtacaatgatggcctgagccactttgtgatcagctctgtgagccccaccaggtatgagctgattgtggacaagagccgggtgggcagcaagaaccccaccaagggcaagattgagcagacccaggccagcgagaagaagttctactttggaggcagccccatcagcgcccagtatgccaacttcaccggctgcatcagcaatgcctacttcaccagggtggacagagatgtggaggtggaggacttccagcgctacacagagaaggtgcacaccagcctgtatgagtgccccatcgagagcagccccctcttcctgctgcacaagaagggcaagaacctgagcaagcccaaggccagccagaacaagaagggcggcaagagcaaggatgcccccagctgggaccctgtggccctgaagctgcctgagaggaacacccccaggaacagccactgccacctgagcaacagcccccgggccattgaacatgcctaccagtatggaggaacagccaacagccggcaggagtttgagcacctgaagggggactttggagccaagagccagttcagcatccggctgcggaccaggagcagccacggcatgatcttctacgtgtctgaccaggaggagaatgacttcatgaccctcttcctggcccacggccgcctggtgtacatgtttaatgtgggccacaagaagctgaagatccgcagccaggagaagtacaatgatggcctgtggcatgatgtgatcttcatccgggagaggagcagcggccgcctggtgattgatggcctgcgggtgctggaggagagcctgcccccaacagaggccacctggaagatcaagggccccatctacctgggcggcgtggcccctgggaaggctgtgaagaatgtgcagatcaacagcatctacagcttcagcggctgcctgagcaacctgcagctgaatggagccagcatcaccagcgccagccagaccttctctgtgaccccctgctttgagggccccatggagaccggcacctacttcagcacagagggcggctacgtggtgctggatgagagcttcaacatcggcctgaagtttgaaattgcctttgaggtgcggcccaggagcagcagcggcaccctggtgcacggccacagcgtgaatggagagtacctgaatgtgcacatgaagaatggccaggtgattgtgaaggtgaacaacggcatccgggacttcagcacctctgtgacccccaagcagagcctgtgtgatggccgctggcaccgcatcaccgtcatccgggacagcaatgtggtgcagctggatgtggacagcgaggtgaaccacgtggtgggccccctgaaccccaagcccatcgaccaccgggagcctgtgtttgtgggcggcgtgcctgagagcctgctgaccccccggctggcccccagcaagcccttcaccggctgcatccgccactttgtgattgatggccaccctgtgtccttcagcaaggccgccctggtgtctggagctgtgtccatcaacagctgcccagctgcctag

SEQ ID NO: 157292 - DNA, 5451 bp, synthetic construct; identical to SEQ ID NO: 157291
  misc_feature 1..5451: note = Description of Artificial Sequence: Synthetic coding sequence
  source 1..5451: mol_type = other DNA

SEQ ID NO: 157293 - DNA, 390 bp, synthetic construct
  misc_feature 1..390: note = Description of Artificial Sequence: Synthetic coding sequence
  source 1..390: mol_type = other DNA
atggccctgagcagcgcctggaggtctgtgctgcccctgtggctgctgtggagcgctgcctgcagccgggccgccagcggagatgacaatgccttcccctttgacatcgagggcagcagcgctgtgggccggcaggaccccccagagaccagcgagccccgggtggccctgggccgcctgcccccagctgctgagaagtgcaatgccggcttcttccacaccctgagcggggagtgtgtgccctgtgactgcaatggaaacagcaatgaatgtctggatggcagcggctactgtgtgaccacagatggagaggaccccggcttcagcgccagcgccctgtccttcatcctgagcagccagggcgcccgggaggcccgggcccccacctag

SEQ ID NO: 157294 - DNA, 363 bp, synthetic construct; identical to SEQ ID NO: 157288
  misc_feature 1..363: note = Description of Artificial Sequence: Synthetic coding sequence
  source 1..363: mol_type = other DNA

SEQ ID NO: 157295 - DNA, 1125 bp, synthetic construct
  misc_feature 1..1125: note = Description of Artificial Sequence: Synthetic coding sequence
  source 1..1125: mol_type = other DNA
atggccctgagcagcgcctggaggtctgtgctgcccctgtggctgctgtggagcgctgcctgcagccgggccgccagcggagatgacaatgccttcccctttgacatcgagggcagcagcgctgtgggccggcaggaccccccagagaccagcgagccccgggtggccctgggccgcctgcccccagctgctgagaagtgcaatgccggcttcttccacaccctgagcggggagtgtgtgccctgtgactgcaatggaaacagcaatgaatgtctggatggcagcggctactgtgtgcactgccagaggaacaccaccggggagcactgtgagaagtgcctggatggctacatcggggacagcatccggggggccccccagttctgccagccctgcccctgccccctgccccacctggccaactttgctgagagctgctacaggaagaatggagctgtgcgctgcatctgcaatgaaaattatgccggccccaactgtgagcgctgtgcccctggctactacggcaaccccctgctgattggcagcacctgcaagaagtgtgactgcagcggcaacagcgaccccaacctgatctttgaggactgtgatgaggtgacaggccagtgcaggaactgcctgaggaacaccaccggcttcaagtgtgagcgctgtgcccctggctactatggagatgcccgcatcgccaagaactgtgctgtgtgcaactgtggcggcggcccctgtgacagcgtgactggagagtgcctggaggagggctttgagccccccaccggcatggactgccccaccatcagctgtgacaagtgtgtgtgggacctgacagatgccctgcggctggccgccctgagcattgaggagggcaagagcggcgtgctgtctgtgtcctctggagctgctgcccaccgccacgtgaatgagatcaatgccaccatctacctgctgaagaccaagctgtctgaaagagagaaccagtatgccctgaggaagatccagatcaacaatgctgagaacaccatgaagagcctgctgagtgatgtggaggagctggtggagaagcactggaacaagccccggcggcggctggagctgcaggagggcgtgtag

SEQ ID NO: 157296 - DNA, 363 bp, synthetic construct; identical to SEQ ID NO: 157288
  misc_feature 1..363: note = Description of Artificial Sequence: Synthetic coding sequence
  source 1..363: mol_type = other DNA

SEQ ID NO: 157297 - DNA, 324 bp, synthetic construct
  misc_feature 1..324: note = Description of Artificial Sequence: Synthetic coding sequence
  source 1..324: mol_type = other DNA
atggccctgagcagcgcctggaggtctgtgctgcccctgtggctgctgtggagcgctgcctgcagccgggccgccagcggagatgacaatgccttcccctttgacatcgagggcagcagcgctgtgggccggcaggaccccccagagaccagcgagccccgggtggccctgggccgcctgcccccagctgctgagaagtgcaatgccggcttcttccacaccctgagcggggagtgtgtgccctgtgactgcaatggaaacagcaatgaatgtctggatggcagcggctactgtgtgcactgccagaggaacaccaccggctag

SEQ ID NO: 157298 - DNA, 996 bp, synthetic construct
  misc_feature 1..996: note = Description of Artificial Sequence: Synthetic coding sequence
  source 1..996: mol_type = other DNA
atggccctgagcagcgcctggaggtctgtgctgcccctgtggctgctgtggagcgctgcctgcagccgggccgccagcggagatgacaatgccttcccctttgacatcgagggcagcagcgctgtgggccggcaggaccccccagagaccagcgagccccgggtggccctgggccgcctgcccccagctgctgagaagtgcaatgccggcttcttccacaccctgagcggggagtgtgtgccctgtgactgcaatggaaacagcaatgaatgtctggatggcagcggctactgtgtgcactgccagaggaacaccaccggggagcactgtgagaagtgcctggatggctacatcggggacagcatccggggggccccccagttctgccagccctgcccctgccccctgccccacctggccaactttgctgagagctgctacaggaagaatggagctgtgcgctgcatctgcaatgaaaattatgccggccccaactgtgagcgctgtgcccctggctactacggcaaccccctgctgattggcagcacctgcaagaagtgtgactgcagcggcaacagcgaccccaacctgatctttgaggactgtgatgaggtgacaggccagtgcaggaactgcctgaggaacaccaccggcttcaagtgtgagcgctgtgcccctggctactatggagatgcccgcatcgccaagaactgtgctgtgtgcaactgtggcggcggcccctgtgacagcgtgactggagagtgcctggaggagggctttgagccccccaccggcatggactgccccaccatcagctgtgacaagtgtgtgtgggacctgacagatgccctgcggctggccgccctgagcattgaggagggcaagagcggcgtgctgtctgtgtcctctggagctgctgcccaccgccacgtgaatgagatcaatgccaccatctacctgctgaagaccaagctgtctgaaagagagaaccagtag

SEQ ID NO: 157299 - DNA, 246 bp, synthetic construct
  misc_feature 1..246: note = Description of Artificial Sequence: Synthetic coding sequence
  source 1..246: mol_type = other DNA
atggccctgagcagcgcctggaggtctgtgctgcccctgtggctgctgtggagcgctgcctgcagccgggccgccagcggagatgacaatgccttcccctttgacatcgagggcagcagcgctgtgggccggcaggaccccccagagaccagcgagccccgggtggccctgggccgcctgcccccagctgctgagaagtgcaatgccggcttcttccacaccctgagcggggagtgtgtgccctag

SEQ ID NO: 157300 - DNA, 5451 bp, synthetic construct; identical to SEQ ID NO: 157291
  misc_feature 1..5451: note = Description of Artificial Sequence: Synthetic coding sequence
  source 1..5451: mol_type = other DNA

SEQ ID NO: 157301 - DNA, 975 bp, synthetic construct
  misc_feature 1..975: note = Description of Artificial Sequence: Synthetic coding sequence
  source 1..975: mol_type = other DNA
atggccctgagcagcgcctggaggtctgtgctgcccctgtggctgctgtggagcgctgcctgcagccgggccgccagcggagatgacaatgccttcccctttgacatcgagggcagcagcgctgtgggccggcaggaccccccagagaccagcgagccccgggtggccctgggccgcctgcccccagctgctgagaagtgcaatgccggcttcttccacaccctgagcggggagtgtgtgccctgtgactgcaatggaaacagcaatgaatgtctggatggcagcggctactgtgtgcactgccagaggaacaccaccggggagcactgtgagaagtgcctggatggctacatcggggacagcatccggggggccccccagttctgccagccctgcccctgccccctgccccacctggccaactttgctgagagctgctacaggaagaatggagctgtgcgctgcatctgcaatgaaaattatgccggccccaactgtgagcgctgtgcccctggctactacggcaaccccctgctgattggcagcacctgcaagaagtgtgactgcagcggcaacagcgaccccaacctgatctttgaggactgtgatgaggtgacaggccagtgcaggaactgcctgaggaacaccaccggcttcaagtgtgagcgctgtgcccctggctactatggagatgcccgcatcgccaagaactgtgctgtgtgcaactgtggcggcggcccctgtgacagcgtgactggagagtgcctggaggagggctttgagccccccaccggctgtgacaagtgtgtgtgggacctgacagatgccctgcggctggccgccctgagcattgaggagggcaagtctggagtgctgtctgtgagcagcggggctgctgcccacagacatgtgaatgagatcaatgccaccatctacctgctgaagaagaccaagcagaagaacaacaagaagtag

SEQ ID NO: 157302 - DNA, 11088 bp, synthetic construct
  misc_feature 1..11088: note = Description of Artificial Sequence: Synthetic coding sequence
  source 1..11088: mol_type = other DNA
atggccaagaggctgtgtgccggcagcgccctgtgtgtgcggggcccccggggccctgcccccctgctgctggtgggcctggccctgctgggcgccgcccgggcccgggaggaggccggcggcggcttcagcctgcaccccccctacttcaacctggccgagggcgccagaattgctgccagcgccacctgtggggaggaggccccagcccggggcagcccccggcccacagaggacctgtactgcaagctggtgggcggccctgtggccggcggggaccccaaccagaccatccggggccagtactgtgacatctgcacagctgccaacagcaacaaggcccacccagccagcaatgccattgatggaacagagcgctggtggcagagcccccccctgagccggggcctggagtacaatgaggtgaatgtgaccctggacctgggccaggtgttccacgtggcctacgtgctgatcaagtttgccaacagccccaggccagacctgtgggtgctggagaggtccatggactttggccgcacctaccagccctggcagttctttgccagcagcaagagggactgcctggagagatttggcccccagaccctggagcgcatcaccagagatgatgctgccatctgcaccacagagtacagccgcatcgtgcccctggagaatggagagatcgtggtgtccctggtgaatggccggcctggggccatgaacttctcctacagccccctgctgcgggagttcaccaaggccaccaacgtgcggctgcgcttcctgcggaccaacaccctgctgggccacctgatgggcaaggccctgcgggaccccaccgtgacccggcgctactactacagcatcaaggacatcagcatcggcggccgctgtgtgtgccacggccacgcagatgcctgtgatgccaaggaccccacagaccccttccggctgcagtgcacctgccagcacaacacctgtggcggcacctgtgaccgctgctgccccggcttcaaccagcagccctggaagccagccacagccaacagcgccaatgaatgccagagctgcaactgctacggccacgccacagactgctactatgaccctgaggtggacagaagaagagccagccagagcctggatggcacctaccagggcggcggcgtgtgcatcgactgccagcaccacaccactggagtgaactgtgagcgctgcctgcccggcttctaccgcagccccaaccaccccctggacagcccccacgtgtgccgccgctgcaactgtgagagtgacttcacagatggcacctgtgaggacctgaccggccgctgctactgccggcccaacttcagcggggagcgctgtgatgtgtgtgccgagggcttcaccggcttccccagctgctaccccacccccagcagcagcaatgacacccgggagcaggtgctgcctgctggccagatcgtgaactgtgactgcagcgctgctggcacccagggcaatgcctgcaggaaggacccccgggtgggccgctgcctgtgcaagcccaacttccagggcacccactgtgagctgtgtgcccctggcttctacggccctggctgccagccctgccagtgcagcagccctggggtggctgatgacagatgtgaccctgacaccggccagtgccgctgccgggtgggctttgagggcgccacctgtgacagatgtgcccctggctacttccacttccccctgtgccagctgtgtggctgcagccctgctggcaccctgcctgagggctgtgatgaggccggccgctgcctgtgccagcctgagtttgctggcccccactgtgaccgctgcaggcctggctaccacggcttccccaactgccaggcctgcacctgtgaccccaggggggccctggaccagctgtgtggggccggcggcctgtgccgctgccggcccggctacacaggaacagcctgccaggagtgcagccctggcttccacggcttccccagctgtgtgccctgccactgcagcgctgagggcagcctgcatgctgcctgtgaccccaggagcggccagtgcagctgccggccccgggtgacaggcctgcgctgtgacacctgtgtgcctggggcctacaacttcccctactgtgaggccggcagctgccaccctgctggcctggcccctgtggaccctgccctgcctgaggcccaggtgccctgcatgtgccgggcccacgtggagggccccagctgtgaccgctgcaagccaggcttctggggcctgagccccagcaaccctgagggctgcacccgctgcagctgtgacctgcggggcaccctgggcggcgtggccgagtgccagcccggcaccggccagtgcttctgcaagccccacgtgtgtggccaggcctgtgccagctgcaaggatggcttcttcggcctggaccaggccgactacttcggctgccgcagctgccgctgtgacattggaggagccctgggccagagctgtgagcccaggactggagtgtgccgctgccggcccaacacccagggccccacctgcagcgagcccgcccgggaccactacctgcctgacctgcaccacctgcggctggagctggaggaggccgccaccccagagggccatgctgtgcgcttcggcttcaaccccctggagtttgagaacttctcctggaggggctacgcccagatggcccctgtgcagccccgcatcgtggcccggctgaacctgaccagcccagacctcttctggctggtgttccgctacgtgaacagaggagccatgtctgtgtctggccgggtgtctgtgcgggaggagggccgcagcgccacctgtgccaactgcacagcccagagccagcctgtggccttcccccccagcacagagcccgccttcatcaccgtgccccagaggggctttggagagccctttgtgctgaaccctggcacctgggccctgcgggtggaggccgagggcgtgctgctggactatgtggtgctgctgcccagcgcctactatgaggccgccctgctgcagctgcgggtgacagaggcctgcacctaccggcccagcgcccagcagagcggggacaactgcctgctgtacacccacctgcccctggatggcttccccagcgctgctggcctggaggccctgtgccggcaggacaacagcctgccccggccctgccccacagagcagctgagccccagccaccccccactcatcacctgcaccggcagtgatgtggatgtgcagctgcaggtggccgtgccccagcccggccgctatgccctggtggtggagtatgccaatgaagatgcccggcaggaggtgggcgtggccgtgcacaccccccagagggccccccagcagggcctgctgagcctgcacccctgcctgtacagcaccctgtgccggggcacagcccgggacacccaggaccacctggccgtgttccacctggacagcgaggcctctgtgcggctgacagctgagcaggcccgcttcttcctgcatggagtgaccctggtgcccatcgaggagttcagccctgagtttgtggagccccgggtgtcctgcatcagcagccacggggccttcggccccaacagcgctgcctgcctgcccagccgcttccccaagccaccccagcccatcatcctgcgggactgccaggtgatccccctgcccccaggcctgcccctgacccacgcccaggacctgaccccagccatgagccctgctggcccccggcccaggcctcccacagctgtggaccctgatgctgagcccaccctgctgcgggagccccaggccaccgtggtgttcaccacccacgtgcccaccctgggccgctatgccttcctgctgcacggctaccagcctgcccaccccaccttccctgtggaggtgctgatcaatgccggccgggtgtggcagggccacgccaatgccagcttctgcccccacggctacggctgcaggaccctggtggtgtgtgagggccaggccctgctggatgtgacccacagcgagctgactgtgacagtgcgggtgcccaagggccgctggctgtggctggactatgtgctggtggtgcctgaaaatgtgtacagctttggctacctgcgggaggagcccctggacaagagctatgacttcatcagccactgtgccgcccagggctaccacatcagccccagcagcagcagcctcttctgcagaaatgctgctgccagcctgagcctcttctacaacaatggagcccggccctgtggctgccacgaggtgggcgccaccggccccacctgtgagccctttggaggccagtgcccctgccacgcccacgtgattggccgggactgcagccgctgtgccaccggctactggggcttccccaactgccggccctgtgactgtggggcccggctgtgtgatgagctgaccggccagtgcatctgcccccccaggaccatccccccagactgcctgctgtgccagccccagaccttcggctgccaccccctggtgggctgtgaggagtgcaactgcagcggccctggcatccaggagctgacagaccccacctgtgacacagattctggccagtgcaagtgccggcccaacgtgactggaagaagatgtgacacctgcagccctggcttccacggctacccccgctgccggccctgtgactgccacgaggccggcacagcccctggggtgtgtgaccccctgaccggccagtgctactgcaaggaaaatgtgcagggccccaagtgtgaccagtgcagcctgggcaccttcagcctggatgctgccaaccccaagggctgcacccgctgcttctgctttggagccacagagcgctgccgcagcagcagctacacccggcaggagtttgtggacatggagggctgggtgctgctgagcacagaccggcaggtggtgccccatgagcggcagcctggaacagagatgctgcgggctgacctgcggcacgtgcctgaggccgtgcctgaggccttccctgagctgtactggcaggcccctccttcctacctgggggacagagtgtcctcctatggaggcaccctgcgctatgagctgcacagcgagacccagagaggagatgtgtttgtgcccatggagagcaggccagatgtggtgctgcagggcaaccagatgagcatcaccttcctggagcccgcctaccccaccccaggccacgtgcaccggggccagctgcagctggtggagggcaacttccgccacacagagaccaggaacacagtgtcccgggaggagctgatgatggtgctggccagcctggagcagctgcagatccgggccctcttcagccagatcagcagcgctgtgttcctgcggcgggtggccctggaggtggccagccctgctggccagggcgccctggccagcaatgtggagctgtgcctgtgcccagccagctacagaggagacagctgccaggagtgtgcccctggcttctacagagatgtgaagggcctcttcctgggccgctgtgtgccctgccagtgccacggccacagcgaccgctgcctgcccggcagcggcgtgtgtgtggactgccagcacaacacagaaggagcccactgtgagcgctgccaggccggctttgtgagcagcagagatgaccccagcgccccctgtgtgtcctgcccctgccccctgtctgtgcccagcaacaactttgctgagggctgtgtgctgcggggcggccgcacccagtgcctgtgcaagccaggctacgccggggccagctgtgagcgctgtgcccctggcttcttcggcaaccccctggtgctgggcagcagctgccagccctgtgactgcagcggaaatggagaccccaacctgctcttcagtgactgtgaccccctgaccggggcctgccggggctgcctgcggcacaccaccggcccccgctgtgagatctgtgcccctggcttctatggaaatgccctgctgcccggcaactgcacccgctgtgactgcaccccctgtggcacagaggcctgtgacccccacagcggccactgcctgtgcaaggccggcgtgactggaagaagatgtgaccgctgccaggagggccactttggatttgatggctgcggcggctgccggccctgtgcctgtggccctgctgctgagggcagcgagtgccacccccagagcggccagtgccactgccggcccggcaccatgggcccccagtgcagagaatgtgcccctggctactggggcctgcctgagcagggctgccgccgctgccagtgccctgggggccgctgtgacccccacacaggccgctgcaactgccccccaggcctgagcggggagcgctgtgacacctgcagccagcagcaccaggtgcctgtgcctgggggccctgtgggccacagcatccactgtgaggtgtgtgaccactgtgtggtgctgctgctggatgacctggagagagctggggccctgctgcctgccatccacgagcagctgcggggcatcaatgccagctccatggcctgggcccggctgcaccggctgaatgccagcattgctgacctgcagagccagctgcggagccccctgggccccaggcatgaaacagcccagcagctggaggtgctggagcagcagagcaccagcctgggccaggatgcccggcggctgggcggccaggccgtgggcacccgggaccaggccagccagctgctggccggcacagaggccaccctgggccacgccaagaccctgctggccgccatccgggctgtggacaggaccctgtctgagctgatgagccagacaggccacctgggcctggccaatgccagcgcccccagcggggagcagctgctgcggaccctggccgaggtggagcggctgctgtgggagatgagggcccgggacctgggcgccccccaggccgctgctgaggccgagctggccgccgcccagaggctgctggcccgggtgcaggagcagctgagcagcctgtgggaggagaaccaggccctggccacccagacccgggaccggctggcccagcatgaagctggcctgatggacctgcgggaggccctgaacagagctgtggatgccacccgggaggcccaggagctgaacagcaggaaccaggagcggctggaggaggccctgcagaggaagcaggagctgagccgggacaatgccaccctgcaggccaccctgcacgccgcccgggacaccctggcctctgtgttccggctgctgcacagcctggaccaggccaaggaggagctggagcggctggccgccagcctggatggagcccggacccccctgctgcagaggatgcagaccttctccccagctggcagcaagctgcggctggtggaggccgctgaggcccacgcccagcagctgggccagctggccctgaacctgagcagcatcatcctggatgtgaaccaggaccggctgacccagagggccatcgaggccagcaatgcctacagccgcatcctgcaggccgtgcaggccgcagaagatgctgctggccaggccctgcagcaggccgaccacacctgggccaccgtggtgcggcagggcctggtggaccgggcccagcagctgctggccaacagcacagccctggaggaggccatgctgcaggagcagcagaggctgggcctggtgtgggccgccctgcagggcgcccggacccagctgagagatgtgcgggccaagaaggaccagctggaggcccacatccaggccgcccaggccatgctggccatggacacagatgagaccagcaagaagatcgcccacgccaaggctgtggccgctgaggcccaggacacagccaccagggtgcagagccagctgcaggccatgcaggagaatgtggagcgctggcagggccagtatgagggcctgcggggccaggacctgggccaggccgtgctggatgctggccacagcgtgtccaccctggagaagaccctgccccagctgctggccaagctgagcatcctggagaacagaggagtgcacaatgccagcctggccctgagcgccagcatcggccgggtgcgggagctgattgcccaggcccggggagctgccagcaaggtgaaggtgcccatgaagttcaacggccgctctggagtgcagctgcggaccccccgggacctggccgacctggccgcctacacagccctgaagttctacctgcagggccctgagcctgagcccggccagggcacagaggacagatttgtgatgtacatgggcagccggcaggccactggagactacatgggcgtgtccctgcgggacaagaaggtgcactgggtgtaccagctgggggaggccggccctgctgtgctgagcattgatgaggacatcggggagcagtttgctgctgtgtccctggacaggaccctgcagtttggccacatgtctgtgacagtggagcggcagatgatccaggagaccaagggggacacagtggcccctggagctgagggcctgctgaacctgcggccagatgactttgtgttctacgtgggcggctaccccagcaccttcaccccaccacccctgctgcgcttccctggctaccggggctgcatcgagatggacaccctgaatgaggaggtggtgtccctgtacaactttgagaggaccttccagctggacacagctgtggaccggccctgtgcccggagcaagagcactggagacccctggctgacagatggcagctacctggatggcactggatttgcccgcatcagctttgacagccagatcagcaccaccaagagatttgagcaggagctgcggctggtgtcctacagcggcgtgctcttcttcctgaagcagcagagccagttcctgtgcctggccgtgcaggagggcagcctggtgctgctgtatgactttggagctggcctgaagaaggctgtgcccctgcagcccccaccacccctgaccagcgccagcaaggccatccaggtgttcctgctgggcggcagcaggaagagggtgctggtgcgggtggagcgggccaccgtgtacagcgtggagcaggacaatgacctggagctggctgatgcctactacctgggcggcgtgcccccagaccagctgccccccagcctgcggcggctcttccccactggaggctctgtgcggggctgtgtgaagggcatcaaggccctgggcaagtatgtggacctgaagaggctgaacaccactggagtgtctgctggctgcacagctgacctgctggtgggccgggccatgaccttccacggccacggcttcctgcggctggccctgagcaatgtggcccccctgactggaaatgtgtacagcggcttcggcttccacagcgcccaggacagcgccctgctgtactaccgggccagcccagatggcctgtgccaggtgtccctgcagcagggccgggtgtccctgcagctgctgaggacagaggtgaagacccaggccggctttgctgatggagccccccactacgtggccttctacagcaatgccactggagtgtggctgtatgtggatgaccagctgcagcagatgaagccccaccggggccccccacctgagctgcagccccagcctgagggccccccccggctgctgctgggcggcctgcctgagagcggcaccatctacaacttcagcggctgcatcagcaatgtgtttgtgcagaggctgctgggcccccagagggtgtttgacctgcagcagaacctgggctctgtgaatgtgtccacaggctgtgccccagccctgcaggcccagaccccaggcctgggcccccggggcctgcaggccacagccaggaaggccagcagaagaagccggcagcctgcccggcacccagcctgcatgctgcccccccacctgcggaccacccgggacagctaccagtttggaggcagcctgagcagccacctggagtttgtgggcatcctggcccggcacaggaactggcccagcctgtccatgcacgtgctgcccaggagcagccggggcctgctgctcttcaccgcccggctgcggcccggcagccccagcctggccctcttcctgagcaatggccactttgtggcccagatggagggcctgggcacccggctgcgggcccagagccggcagaggagccggcccggccgctggcacaaggtgtctgtgcgctgggagaagaaccgcatcctgctggtgacagatggagcccgggcctggagccaggagggcccccaccggcagcaccagggcgctgagcacccccagccccacaccctgtttgtgggcggcctgcctgccagcagccacagcagcaagctgcctgtgacagtgggcttcagcggctgtgtgaagaggctgcggctgcacggccggcccctgggcgcccccaccaggatggccggcgtgaccccctgcatcctgggccccctggaggccggcctcttcttccctggcagcggaggagtcatcaccctggacctgcccggggccaccctgcctgatgtgggcctggagctggaggtgcggcccctggccgtgacaggcctcatcttccacctgggccaggcccggaccccaccctacctgcagctgcaggtgacagagaagcaggtgctgctgcgggcagatgatggagctggggagttcagcacctctgtgacccggcccagcgtgctgtgtgatggccagtggcaccggctggccgtgatgaagtctggaaatgtgctgcggctggaggtggatgcccagagcaaccacacagtgggccccctgctggccgctgctgctggggccccagcccccctgtacctgggcggcctgcctgagcccatggctgtgcagccctggcccccagcctactgcggctgcatgaggcggctggccgtgaacagaagccctgtggccatgaccaggtctgtggaggtgcacggggctgtgggcgccagcggctgcccagctgcctag

SEQ ID NO: 157303 - DNA, 1503 bp, synthetic construct
  misc_feature 1..1503: note = Description of Artificial Sequence: Synthetic coding sequence
  source 1..1503: mol_type = other DNA
atggccaagaggctgtgtgccggcagcgccctgtgtgtgcggggcccccggggccctgcccccctgctgctggtgggcctggccctgctgggcgccgcccgggcccgggaggaggccggcggcggcttcagcctgcaccccccctacttcaacctggccgagggcgccagaattgctgccagcgccacctgtggggaggaggccccagcccggggcagcccccggcccacagaggacctgtactgcaagctggtgggcggccctgtggccggcggggaccccaaccagaccatccggggccagtactgtgacatctgcacagctgccaacagcaacaaggcccacccagccagcaatgccattgatggaacagagcgctggtggcagagcccccccctgagccggggcctggagtacaatgaggtgaatgtgaccctggacctgggccaggtgttccacgtggcctacgtgctgatcaagtttgccaacagccccaggccagacctgtgggtgctggagaggtccatggactttggccgcacctaccagccctggcagttctttgccagcagcaagagggactgcctggagagatttggcccccagaccctggagcgcatcaccagagatgatgctgccatctgcaccacagagtacagccgcatcgtgcccctggagaatggagagatcgtggtgtccctggtgaatggccggcctggggccatgaacttctcctacagccccctgctgcgggagttcaccaaggccaccaacgtgcggctgcgcttcctgcggaccaacaccctgctgggccacctgatgggcaaggccctgcgggaccccaccgtgacccggcgctactactacagcatcaaggacatcagcatcggcggccgctgtgtgtgccacggccacgcagatgcctgtgatgccaaggaccccacagaccccttccggctgcagtgcacctgccagcacaacacctgtggcggcacctgtgaccgctgctgccccggcttcaaccagcagccctggaagccagccacagccaacagcgccaatgaatgccagagctgcaactgctacggccacgccacagactgctactatgaccctgaggtggacagaagaagagccagccagagcctggatggcacctaccagggcggcggcgtgtgcatcgactgccagcaccacaccactggagtgaactgtgagcgctgcctgcccggcttctaccgcagccccaaccaccccctggacagcccccacgtgtgccgccgctgcaactgtgagagtgacttcacagatggcacctgtgaggacctgaccggccgctgctactgccggcccaacttcagcggggagcgctgtgatgtgtgtgccgagggcttcaccggcttccccagctgctaccccacccccagcagcagcaatgacacccgggagcaggtgctgcctgctggccagatcgtgaccaacaccaagatctcctgggtgtag

SEQ ID NO: 157304 - DNA, 1587 bp, synthetic construct
  misc_feature 1..1587: note = Description of Artificial Sequence: Synthetic coding sequence
  source 1..1587: mol_type = other DNA
atggccaagaggctgtgtgccggcagcgccctgtgtgtgcggggcccccggggccctgcccccctgctgctggtgggcctggccctgctgggcgccgcccgggcccgggaggaggccggcggcggcttcagcctgcaccccccctacttcaacctggccgagggcgccagaattgctgccagcgccacctgtggggaggaggccccagcccggggcagcccccggcccacagaggacctgtactgcaagctggtgggcggccctgtggccggcggggaccccaaccagaccatccggggccagtactgtgacatctgcacagctgccaacagcaacaaggcccacccagccagcaatgccattgatggaacagagcgctggtggcagagcccccccctgagccggggcctggagtacaatgaggtgaatgtgaccctggacctgggccaggtgttccacgtggcctacgtgctgatcaagtttgccaacagccccaggccagacctgtgggtgctggagaggtccatggactttggccgcacctaccagccctggcagttctttgccagcagcaagagggactgcctggagagatttggcccccagaccctggagcgcatcaccagagatgatgctgccatctgcaccacagagtacagccgcatcgtgcccctggagaatggagagatcgtggtgtccctggtgaatggccggcctggggccatgaacttctcctacagccccctgctgcgggagttcaccaaggccaccaacgtgcggctgcgcttcctgcggaccaacaccctgctgggccacctgatgggcaaggccctgcgggaccccaccgtgacccggcgctactactacagcatcaaggacatcagcatcggcggccgctgtgtgtgccacggccacgcagatgcctgtgatgccaaggaccccacagaccccttccggctgcagtgcacctgccagcacaacacctgtggcggcacctgtgaccgctgctgccccggcttcaaccagcagccctggaagccagccacagccaacagcgccaatgaatgccagagctgcaactgctacggccacgccacagactgctactatgaccctgaggtggacagaagaagagccagccagagcctggatggcacctaccagggcggcggcgtgtgcatcgactgccagcaccacaccactggagtgaactgtgagcgctgcctgcccggcttctaccgcagccccaaccaccccctggacagcccccacgtgtgccgccgctgcaactgtgagagtgacttcacagatggcacctgtgaggacctgaccggccgctgctactgccggcccaacttcagcggggagcgctgtgatgtgtgtgccgagggcttcaccggcttccccagctgctaccccacccccagcagcagcaatgacacccgggagcaggtgctgcctgctggccagatcgtgaatggagtgtccctgtgccggcccggctggagcgctgtggcccggagccggctgaccagcaccagcgcctcctgggtgcaggccatcctgctgccccagagccctgagtag

SEQ ID NO: 157305 - DNA, 2187 bp, synthetic construct
  misc_feature 1..2187: note = Description of Artificial Sequence: Synthetic coding sequence
  source 1..2187: mol_type = other DNA
atgtgggtgaccaagctgctgcctgccctgctgctgcagcacgtgctgctgcacctgctgctgctgcccatcgccatcccctatgcagagggccagaggaagagaagaaacaccatccacgagttcaagaagagcgccaagaccaccctcatcaagattgatcctgccctgaagatcaagaccaagaaggtgaacacagctgaccagtgtgccaaccgctgcaccaggaacaagggcctgcccttcacctgcaaggcctttgtgtttgacaaggccaggaagcagtgcctgtggttccccttcaacagcatgagcagcggcgtgaagaaggagtttggccacgagtttgacctgtatgagaacaaggactacatccggaactgcatcatcggcaagggccgcagctacaagggcaccgtgtccatcaccaagagcggcatcaagtgccagccctggagctccatgatcccccatgagcacagcttcctgcccagcagctaccggggcaaggacctgcaggagaactactgcaggaaccccagaggagaggagggcggcccctggtgcttcaccagcaaccctgaggtgcgctatgaggtgtgtgacatcccccagtgcagcgaggtggagtgcatgacctgcaatggagagagctaccggggcctgatggaccacacagagagcggcaagatctgccagcgctgggaccaccagaccccccaccgccacaagttcctgcctgagcgctacccagacaagggctttgatgacaactactgcagaaatccagatggccagccccggccctggtgctacaccctggacccccacacccgctgggagtactgtgccatcaagacctgtgccgacaacaccatgaatgacacagatgtgcccctggagaccacagagtgcatccagggccagggcgagggctaccggggcaccgtgaacaccatctggaatggcatcccctgccagcgctgggacagccagtacccccatgaacatgacatgaccccagagaacttcaagtgcaaggacctgcgggagaactactgcagaaatccagatggcagcgagagcccctggtgcttcaccacagaccccaacatccgggtgggctactgcagccagatccccaactgtgacatgagccacggccaggactgctacagaggaaatggcaagaactacatgggcaacctgagccagaccaggagcggcctgacctgcagcatgtgggacaagaacatggaggacctgcaccgccacatcttctgggagccagatgccagcaagctgaatgaaaactactgcagaaatccagatgatgatgcccacggcccctggtgctacacaggcaaccccctcatcccctgggactactgccccatcagccgctgtgagggggacaccacccccaccatcgtgaacctggaccaccctgtgatcagctgtgccaagaccaagcagctgcgggtggtgaatggcatccccaccaggaccaacatcggctggatggtgtccctgcgctacagaaacaagcacatctgtggcggcagcctcatcaaggagagctgggtgctgacagcccggcagtgcttccccagccgggacctgaaggactatgaggcctggctgggcatccatgatgtgcacggcagaggagatgagaagtgcaagcaggtgctgaatgtgtcccagctggtgtatggccctgagggcagtgacctggtgctgatgaagctggcccggcctgctgtgctggatgactttgtgtccaccatcgacctgcccaactacggctgcaccatccctgagaagaccagctgcagcgtgtatggctggggctacacaggcctcatcaactatgatggcctgctgcgggtggcccacctgtacatcatgggaaatgagaagtgcagccagcaccaccggggcaaggtgaccctgaatgaaagtgagatctgtgccggggctgagaagattggcagcggcccctgtgagggggactatggaggccccctggtgtgtgagcagcacaagatgaggatggtgctgggcgtgattgtgcccggccggggctgtgccatccccaacagacctggcatctttgtgcgggtggcctactatgccaagtggatccacaagatcatcctgacctacaaggtgccccagagctag

SEQ ID NO: 157306 - DNA, 276 bp, synthetic construct
  misc_feature 1..276: note = Description of Artificial Sequence: Synthetic coding sequence
  source 1..276: mol_type = other DNA
atgggcctgctgcagctgctggccttctccttcctggccctgtgccgggcccgggtgcgggcccaggagcctgagttctcctatggctgtgccgagggcagctgctacccagccactggagacctgctgattggccgggcccagaagctgtctgtgaccagcacctgtggcctgcacaagccagagccctactgcatcgtgagccacctgcaggaggacaagaagtgcttcatctgcaacagccaggacccctaccacgagaccctgaacccctag

SEQ ID NO: 157307 - DNA, 2553 bp, synthetic construct
  misc_feature 1..2553: note = Description of Artificial Sequence: Synthetic coding sequence
  source 1..2553: mol_type = other DNA
atgggcctgctgcagctgctggccttctccttcctggccctgtgccgggcccgggtgcgggcccaggagcctgagttctcctatggctgtgccgagggcagctgctacccagccactggagacctgctgattggccgggcccagaagctgtctgtgaccagcacctgtggcctgcacaagccagagccctactgcatcgtgagccacctgcaggaggacaagaagtgcttcatctgcaacagccaggacccctaccacgagaccctgaacccagacagccacctgattgaaaatgtggtgaccacctttgcccccaaccggctgaagatctggtggcagagtgaaaatggagtggagaatgtgaccatccagctggacctggaggccgagttccacttcacccacctgatcatgaccttcaagaccttccggcctgctgccatgctgattgaaagaagcagtgactttgggaagacctggggcgtgtaccgctactttgcctatgactgtgaggccagcttccctggcatcagcacaggccccatgaagaaggtggatgacatcatctgtgacagccgctacagcgacatcgagcccagcacagaaggagaggtgatcttccgggccctggaccctgccttcaagattgaggacccctacagcccccgcatccagaacctgctgaagatcaccaacctgcgcatcaagtttgtgaagctgcacaccctgggggacaacctgctggacagcaggatggagatccgggagaagtactactatgctgtgtatgacatggtggtgcggggcaactgcttctgctacggccacgcctctgaatgtgcccctgtggatggcttcaatgaggaggtggagggcatggtgcacggccactgcatgtgccgccacaacaccaagggcctgaactgtgagctgtgcatggacttctaccatgacctgccctggaggcctgctgagggcaggaacagcaatgcctgcaagaagtgcaactgcaatgagcacagcatcagctgccactttgacatggctgtgtacctggccactggaaatgtgtctgggggcgtgtgtgatgactgccagcacaacaccatgggcaggaactgtgagcagtgcaagcccttctactaccagcaccctgagcgggacatccgggaccccaacttctgtgagcgctgcacctgtgaccctgctggcagccagaatgaaggcatctgtgacagctacacagacttcagcacaggcctgattgctggccagtgccgctgcaagctgaatgtggagggggagcactgtgatgtgtgcaaggagggcttctatgacctgagcagcgaggaccccttcggctgcaagagctgtgcctgcaaccccctgggcaccatccctgggggcaacccctgtgacagcgagaccggccactgctactgcaagaggctggtgacaggccagcactgtgaccagtgcctgcctgagcactggggcctgagcaatgacctggatggctgccggccctgtgactgtgacctgggcggggccctgaacaacagctgctttgctgagagcggccagtgcagctgccggccccacatgattggccggcagtgcaatgaggtggagcccggctactactttgccaccctggaccactacctgtatgaagctgaggaggccaacctgggccctggggtgtccatcgtggagcggcagtacatccaggaccgcatccccagctggacaggagctggctttgtgcgggtgcctgagggcgcctacctggagttcttcatcgacaacatcccctacagcatggagtatgacatcctgatccgctatgagccccagctgcctgaccactgggagaaggctgtgatcaccgtgcagaggcctggccgcatccccaccagcagccgctgtggcaacaccatcccagatgatgacaaccaggtggtgtccctgagccctggcagccgctacgtggtgctgcccaggcctgtgtgctttgagaagggcaccaactacacagtgcggctggagctgccccagtacaccagcagtgacagtgatgtggagagcccctacaccctgattgacagcctggtgctgatgccctactgcaagagcctggacatcttcaccgtgggcggcagcggagatggagtggtgaccaacagcgcctgggagaccttccagcgctaccgctgcctggagaacagccgctctgtggtgaagacccccatgacagatgtgtgcaggaacatcatcttcagcatcagcgccctgctgcaccagacaggcctggcctgtgaatgtgacccccagggcagcctgagctctgtgtgtgaccccaacggcggccagtgccagtgccggcccaacgtggtgggccgcacctgcaacagatgtgcccctggcacctttggatttggccccagcggctgcaagaggcgcttcctgaagagcatcgtgatgcacagcttccggctgacccagcccctgtggcagggcagcattgctgctgagcccatgctgcccagctag

SEQ ID NO: 157308 - DNA, 5397 bp, synthetic construct
  misc_feature 1..5397: note = Description of Artificial Sequence: Synthetic coding sequence
  source 1..5397: mol_type = other DNA
atggagctgaccagccgggagcggggccggggccagcccctgccctgggagctgcggctgggcctgctgctgtctgtgctggccgccaccctggcccaggccccagccccagatgtgcccggctgcagccggggcagctgctacccagccactggagacctgctggtgggccgggctgaccggctgacagccagcagcacctgtggcctgaatggcccccagccctactgcatcgtgagccacctgcaggatgagaagaagtgcttcctgtgtgacagccggcggcccttcagcgcccgggacaacccccacagccaccgcatccagaatgtggtgaccagctttgccccccagaggagagctgcctggtggcagagtgaaaatggcatcccagctgtgaccatccagctggacctggaggccgagttccacttcacccacctgatcatgaccttcaagaccttccggcctgctgccatgctggtggagaggtctgctgactttggccgcacctggcacgtgtaccgctacttctcctatgactgtggggctgacttccctggggtgcccctggccccacccaggcactgggatgatgtggtgtgtgagagccgctacagcgagattgagcccagcacagaaggagaggtgatctacagagtgctggaccctgccatccccatcccagacccctacagcagccgcatccagaacctgctgaagatcaccaacctgcgggtgaacctgacccggctgcacaccctgggggacaacctgctggacccccggcgggagatccgggagaagtactactatgccctgtatgagctggtggtgcggggcaactgcttctgctacggccacgcctctgaatgtgccccagcccctggggccccagcccacgccgagggcatggtgcatggagcctgcatctgcaagcacaacacccggggcctgaactgtgagcagtgccaggacttctacagagacctgccctggaggcctgcagaagatggccacagccacgcctgcaggaaatgtgagtgccacggccacacccacagctgccactttgacatggctgtgtacctggccagcggaaatgtgtctgggggcgtgtgtgatggctgccagcacaacacagctggccgccactgtgagctgtgccggcccttcttctacagagaccccaccaaggacctgcgggaccctgctgtgtgccgcagctgtgactgtgaccccatgggcagccaggacggcggccgctgtgacagccatgatgatcctgccctgggcctggtgtctggccagtgccgctgcaaggagcacgtggtgggcacccgctgccagcagtgcagagatggcttcttcggcctgagcatcagtgaccggctgggctgccgccgctgccagtgcaatgcccggggcaccgtgcccggcagcaccccctgtgaccccaacagcggcagctgctactgcaagaggctggtgacaggccggggctgtgaccgctgcctgcccggccactggggcctgagccatgacctgctgggctgccggccctgtgactgtgatgtgggcggggccctggacccccagtgtgatgagggcaccggccagtgccactgccggcagcacatggtgggccgccgctgtgagcaggtgcagcccggctacttccggcccttcctggaccacctgatctgggaggccgaggacacccggggccaggtgctggatgtggtggagcggctggtgaccccaggagagacccccagctggacaggcagcggctttgtgcggctgcaggagggccagaccctggagttcctggtggcctctgtgcccaaggccatggactatgacctgctgctgcggctggagccccaggtgcctgagcagtgggccgagctggagctgattgtgcagaggcctggccctgtgcctgcccacagcctgtgtggccacctggtgcccaaggatgaccgcatccagggcaccctgcagccccacgcccgctacctgatcttccccaaccctgtgtgcctggagcccggcatctcctacaagctgcacctgaagctggtgaggactggaggcagcgcccagcctgagaccccctacagcggccctggcctgctgattgacagcctggtgctgctgccccgggtgctggtgctggagatgttttctggaggagatgctgctgccctggagcggcaggccacctttgagcgctaccagtgccacgaggagggcctggtgcccagcaagaccagccccagcgaggcctgtgcccccctgctgatcagcctgagcaccctcatctacaacggggccctgccctgccagtgcaacccccagggcagcctgagcagcgagtgcaacccccacggcggccagtgcctgtgcaagccaggagtggtgggcagaagatgtgacctgtgtgcccctggctactacggcttcggccccaccggctgccaggcctgccagtgcagccatgaaggagccctgagcagcctgtgtgagaagaccagcggccagtgcctgtgcaggactggagccttcggcctgcgctgtgaccgctgccagaggggccagtggggcttccccagctgccggccctgtgtgtgcaatggacatgctgatgagtgcaacacccacactggagcctgcctgggctgccgggaccacactggaggagagcactgtgagcgctgcatcgccggcttccatggagacccccggctgccctacggcggccagtgccggccctgcccctgcccagagggccctggcagccagaggcactttgccaccagctgccaccaggatgagtacagccagcagatcgtgtgccactgccgggccggctacacaggcctgcgctgtgaggcctgtgcccctggccactttggagaccccagcaggcctgggggccgctgccagctgtgtgaatgttctggcaacatcgaccccatggaccctgatgcctgtgacccccacacaggccagtgcctgcgctgcctgcaccacacagagggcccccactgtgcccactgcaagccaggcttccacggccaggccgcccggcagagctgccaccgctgcacctgcaacctgctgggcaccaacccccagcagtgccccagcccagaccagtgccactgtgaccccagcagcggccagtgcccctgcctgcccaacgtgcagggccccagctgtgacagatgtgcccccaacttctggaacctgaccagcggccacggctgccagccctgtgcctgccaccccagccgggcccggggccccacctgcaatgagttcaccggccagtgccactgccgggccggctttggaggccgcacctgcagcgagtgccaggagctgcactggggagaccccggcctgcagtgccacgcctgtgactgtgacagccggggcatcgacaccccccagtgccaccgcttcaccggccactgcagctgcaggcctggggtgtctggagtgcgctgtgaccagtgtgcccggggcttcagcggcatcttccctgcctgccacccctgccacgcctgcttcggggactgggacagagtggtgcaggacctggccgcccggacccagaggctggagcagagggcccaggagctgcagcagacaggagtgctgggcgcctttgagagcagcttctggcacatgcaggagaagctgggcatcgtgcagggcatcgtgggcgccaggaacaccagcgctgccagcacagcccagctggtggaggccacagaggagctgcggcgggagattggagaggccacagagcacctgacccagctggaggccgacctgacagatgtgcaggatgagaacttcaatgccaaccacgccctgagcggcctggagcgggaccggctggccctgaacctgaccctgcggcagctggaccagcacctggacctgctgaagcacagcaacttcctgggcgcctatgacagcatcagacatgcccacagccagagcgctgaggccgagcggcgggccaacaccagcgccctggccgtgcccagccctgtgagcaacagcgccagcgcccggcacaggacagaggccctgatggatgcccagaaggaggacttcaacagcaagcacatggccaaccagagggccctgggcaagctgagcgcccacacccacaccctgagcctgacagacatcaatgagctggtgtgtggggcccctggagatgccccctgtgccaccagcccctgtggcggggccggctgcagagatgaagatggccagccccgctgtggcggcctgagctgcaatggagctgctgccacagctgacctggccctgggccgggcccggcacacccaggccgagctgcagagggccctggccgagggcggcagcatcctgagccgggtggccgagacccggcggcaggccagcgaggcccagcagagggcccaggccgccctggacaaggccaatgccagccggggccaggtggagcaggccaaccaggagctgcaggagctgatccagagcgtgaaggacttcctgaaccaggagggcgctgaccctgacagcattgagatggtggccaccagggtgctggagctgagcatcccagccagcgctgagcagatccagcacctggccggggccatcgccgagcgggtgcgcagcctggctgatgtggatgccatcctggccaggacagtgggagatgtgagaagagctgagcagctgctgcaggatgcccggcgggcccgctcctgggccgaggatgagaagcagaaggccgagaccgtgcaggccgccctggaggaggcccagagggcccagggcatcgcccagggcgccatcagaggagctgtggccgacacccgggacacagagcagaccctgtaccaggtgcaggagaggatggccggggctgagcgggccctgagcagcgctggggagcgggcccggcagctggatgccctgctggaggccctgaagctgaagagagctggcaacagcctggccgccagcacagctgaggagacagctggcagcgcccagggccgggcccaggaggccgagcagctgctgcggggccccctgggggaccagtaccagacagtgaaggccctggccgagaggaaggcccagggcgtgctggccgcccaggcccgggcagagcagctgagagatgaggcccgggacctgctgcaggccgcccaggacaagctgcagaggctgcaggagctggagggcacctatgaagaaaatgaaagagccctggagagcaaggccgcccagctggatggcctggaggccaggatgaggtctgtgctgcaggccatcaacctgcaggtgcagatctacaacacctgccagtag

SEQ ID NO: 157309 - DNA, 1143 bp, synthetic construct
  misc_feature 1..1143: note = Description of Artificial Sequence: Synthetic coding sequence
  source 1..1143: mol_type = other DNA
atgcaggagaagctgggcatcgtgcagggcatcgtgggcgccaggaacaccagcgctgccagcacagcccagctggtggaggccacagaggagctgcggcgggagatcggggaggccacagagcacctgacccagctggaggccgacctgacagatgtgcaggatgagaacttcaatgccaaccacgccctgagcggcctggagcgggaccggctggccctgaacctgaccctgcggcagctggaccagcacctggacctgctgaagcacagcaacttcctgggcgcctatgacagcatcagacatgcccacagccagagcgctgaggccgagcggcgggccaacaccagcgccctggccgtgcccagccctgtgagcaacagcgccagcgcccggcacaggacagaggccctgatggatgcccagaaggaggacttcaacagcaagcacatggccaaccagagggccctgggcaagctgagcgcccacacccacaccctgagcctgacagacatcaatgagctggtgtgtggggcccctggagatgccccctgtgccaccagcccctgtggcggggccggctgcagagatgaagatggccagccccgctgtggcggcctgagctgcaatggagctgctgccacagctgacctggccctgggccgggcccggcacacccaggccgagctgcagagggccctggccgagggcggcagcatcctgagccgggtggccgagacccggcggcaggccagcgaggcccagcagagggcccaggccgccctggacaaggccaatgccagccggggccaggtggagcaggccaaccaggagctgcaggagctgatccagagcgtgaaggacttcctgaaccaggagggcgctgaccctgacagcattgagatggtggccaccagggtgctggagctgagcatcccagccagcgctgagcagatccagcacctggccggggccatcgccgagcgggtgcgcagcctggctgatgtggatgccatcctggcccagggcatcgcccagggcgccatcagaggagctgtggccgacacccgggacacagagcagcctgtgcccggcaccggggaggatggccgctgccgggccggcacagagctgtgcaggtag

SEQ ID NO: 157310 - DNA, 5397 bp, synthetic construct; identical to SEQ ID NO: 157308
  misc_feature 1..5397: note = Description of Artificial Sequence: Synthetic coding sequence
  source 1..5397: mol_type = other DNA

SEQ ID NO: 157311 - DNA, 3519 bp, synthetic construct
  misc_feature 1..3519: note = Description of Artificial Sequence: Synthetic coding sequence
  source 1..3519: mol_type = other DNA
atgaggcccttcttcctgctgtgctttgccctgcccggcctgctgcacgcccagcaggcctgcagcagaggagcctgctacccacctgtgggggacctgctggtgggccgcacccgcttcctgcgggccagcagcacctgtggcctgaccaagccagagacctactgcacccagtatggagagtggcagatgaagtgctgcaagtgtgacagccggcagccccacaactactacagccaccgggtggagaatgtggccagcagcagcggccccatgcgctggtggcagagccagaatgatgtgaaccctgtgtccctgcagctggacctggaccggcgcttccagctgcaggaggtgatgatggagttccagggccccatgcctgctggcatgctgattgaaagaagcagtgactttgggaagacctggagggtgtaccagtacctggccgctgactgcaccagcaccttcccccgggtgcggcagggccggccccagagctggcaggatgtgcgctgccagagcctgccccagaggcccaatgcccggctgaatggaggcaaggtgcagctgaacctgatggacctggtgtctggcatcccagccacccagagccagaagatccaggaggtgggggagatcaccaacctgcgggtgaacttcacccggctggcccctgtgccccagaggggctaccacccccccagcgcctactatgctgtgtcccagctgcggctgcagggcagctgcttctgccacggccacgccgacagatgtgcccccaagccaggggccagcgctggccccagcacagctgtgcaggtgcatgatgtgtgtgtgtgccagcacaacacagctggccccaactgtgagcgctgtgcccccttctacaacaaccggccctggaggcctgctgagggccaggatgcccacgagtgccagagatgtgactgcaatggccacagcgagacctgccactttgatcctgctgtgtttgctgccagccagggcgcctatggaggagtgtgtgacaactgccgggaccacacagagggcaagaactgtgagcgctgccagctgcactacttcaggaacagaagacctggggccagcatccaggagacctgcatcagctgtgaatgtgaccctgatggagctgtgcctggggccccctgtgaccctgtgacaggccagtgtgtgtgcaaggagcacgtgcagggcgagcgctgtgacctgtgcaagccaggcttcaccggcctgacctacgccaacccccagggctgccaccgctgtgactgcaacatcctgggcagcagaagagacatgccctgtgatgaggagagcggccgctgcctgtgcctgcccaacgtggtgggccccaagtgtgaccagtgtgccccctaccactggaagctggccagcggccagggctgtgagccctgtgcctgtgacccccacaacagcctgagcccccagtgcaaccagttcaccggccagtgcccctgccgggagggctttggaggcctgatgtgcagcgctgctgccatccggcagtgcccagacaggacctatggagatgtggccaccggctgccgggcctgtgactgtgacttccggggcacagagggccctggctgtgacaaggccagcggccgctgcctgtgcaggcctggcctgaccggcccccgctgtgaccagtgccagaggggctactgcaaccgctaccctgtgtgtgtggcctgccacccctgcttccagacctatgatgctgacctgcgggagcaggccctgcgcttcggccgcctgagaaatgccacagccagcctgtggagcggccctggcctggaggaccggggcctggccagccgcatcctggatgccaagagcaagattgagcagatccgggctgtgctgagcagccctgctgtgacagagcaggaggtggcccaggtggccagcgccatcctgagcctgcggaggaccctgcagggcctgcagctggacctgcccctggaggaggagaccctgagcctgccccgggacctggagagcctggacaggagcttcaacggcctgctgaccatgtaccagaggaagcgggagcagtttgagaagatcagcagcgctgaccccagcggggccttcaggatgctgagcacagcctatgagcagagcgcccaggccgcccagcaggtgtctgacagcagccggctgctggaccagctgcgggacagccggcgggaggccgagcggctggtgcggcaggccggcggcggcggcggcaccggcagccccaagctggtggccctgcggctggagatgagcagcctgcctgacctgacccccaccttcaacaagctgtgtggcaacagccggcagatggcctgcacccccatcagctgccctggagagctgtgcccccaggacaatggaacagcctgtggcagccgctgccggggcgtgctgcccagggctggaggagccttcctgatggccggccaggtggccgagcagctgcggggcttcaatgcccagctgcagaggacccggcagatgatccgggctgctgaggagagcgccagccagatccagagcagcgcccagaggctggagacccaggtgtctgccagccgcagccagatggaggaggatgtgcggaggacccggctgctgatccagcaggtgcgggacttcctgacagatcctgacacagatgctgccaccatccaggaggtgtctgaggccgtgctggccctgtggctgcccacagattctgccaccgtgctgcagaagatgaatgagatccaggccatcgccgcccggctgcccaacgtggacctggtgctgagccagaccaagcaggacatcgcccgggcccggcggctgcaggccgaggccgaggaggcccggagccgggcccatgctgtggagggccaggtggaggatgtggtgggcaacctgcggcagggcaccgtggccctgcaggaggcccaggacaccatgcagggcaccagccgcagcctgcggctcatccaggacagagtggccgaggtgcagcaggtgctgcggcctgctgagaagctggtgacctccatgaccaagcagctgggggacttctggaccaggatggaggagctgcggcaccaggcccggcagcagggcgctgaggccgtgcaggcccagcagctggccgagggcgccagcgagcaggccctgagcgcccaggagggctttgagcgcatcaagcagaagtatgcagagctgaaggaccggctgggccagagctccatgctgggggagcagggcgcccgcatccagagcgtgaagacagaggccgaggagctgtttggagagaccatggagatgatggacaggatgaaggacatggagctggagctgctgcggggcagccaggccatcatgctgcggtctgctgacctgaccggcctggagaagagggtggagcagatccgggaccacatcaatggccgggtgctgtactatgccacctgcaagtag

SEQ ID NO: 157312 - DNA, 3519 bp, synthetic construct; identical to SEQ ID NO: 157311
  misc_feature 1..3519: note = Description of Artificial Sequence: Synthetic coding sequence
  source 1..3519: mol_type = other DNA

SEQ ID NO: 157313 - DNA, 3519 bp, synthetic construct; identical to SEQ ID NO: 157311
  misc_feature 1..3519: note = Description of Artificial Sequence: Synthetic coding sequence
  source 1..3519: mol_type = other DNA

SEQ ID NO: 157314 - DNA, 567 bp, synthetic construct
  misc_feature 1..567: note = Description of Artificial Sequence: Synthetic coding sequence
  source 1..567: mol_type = other DNA
atgaggcccttcttcctgctgtgctttgccctgcccggcctgctgcacgcccagcaggcctgcagcagaggagcctgctacccacctgtgggggacctgctggtgggccgcacccgcttcctgcgggccagcagcacctgtggcctgaccaagccagagacctactgcacccagtatggagagtggcagatgaagtgctgcaagtgtgacagccggcagccccacaactactacagccaccgggtggagaatgtggccagcagcagcggccccatgcgctggtggcagagccagaatgatgtgaaccctgtgtccctgcagctggacctggaccggcgcttccagctgcaggaggtgatgatggagttccagggccccatgcctgctggcatgctgattgaaagaagcagtgactttgggaagacctggagggtgtaccagtacctggccgctgactgcaccagcaccttcccccgggtgcggcagggccggccccagagctggcaggatgtgcgctgccagagcctgccccagaggcccaatgcccggctgaatggaggcaagtag

SEQ ID NO: 157315 - DNA, 483 bp, synthetic construct
  misc_feature 1..483: note = Description of Artificial Sequence: Synthetic coding sequence
  source 1..483: mol_type = other DNA
atgaatgagatccaggccatcgccgcccggctgcccaacgtggacctggtgctgagccagaccaagcaggacatcgcccgggcccggcggctgcaggccgaggccgaggaggcccggagccgggcccatgctgtggagggccaggtggaggatgtggtgggcaacctgcggcagggcaccgtggccctgcaggaggcccaggacaccatgcagggcaccagccgcagcctgcggctcatccaggacagagtggccgaggtgcagcaggtgctgcggcctgctgagaagctggtgacctccatgaccaagcagctgggggacttctggaccaggatggaggagctgcggcaccaggcccggcagcagggcgctgaggccgtgcaggcccagcagctggccgagggcgccagcgagcaggccctgagcgcccaggagggctttgagcgcatcaagcagaagtatgcagagctgaaggacagatag

SEQ ID NO: 157316 - DNA, 4830 bp, synthetic construct
  misc_feature 1..4830: note = Description of Artificial Sequence: Synthetic coding sequence
  source 1..4830: mol_type = other DNA
atgaggggcagccacagagctgccccagccctgcggccccggggccgcctgtggcctgtgctggccgtgctggccgctgctgctgctgctggctgtgcccaggccgccatggatgaatgtacagatgagggcggccggccccagcgctgcatgcctgagtttgtgaatgctgccttcaacgtgacagtggtggccaccaacacctgtggcaccccacctgaggagtactgtgtgcagacaggagtgactggagtgaccaagagctgccacctgtgtgatgctggccagccccacctgcagcacggggccgccttcctgacagactacaacaaccaggccgacaccacctggtggcagagccagaccatgctggccggcgtgcagtaccccagcagcatcaacctgaccctgcacctgggcaaggcctttgacatcacctacgtgcggctgaagttccacaccagcaggcctgagagctttgccatctacaagaggacccgggaggatggcccctggatcccctaccagtactacagcggcagctgtgagaacacctacagcaaggccaacagaggcttcatcagaactggaggagatgagcagcaggccctgtgcacagatgagttcagtgacatcagccccctgaccggcggcaatgtggccttcagcaccctggagggccggcccagcgcctacaactttgacaacagccctgtgctgcaggagtgggtgacagccacagacatccgggtgaccctgaaccggctgaacacctttggagatgaggtgttcaatgaccccaaggtgctgaagagctactactatgccatcagtgactttgctgtgggcggccgctgcaagtgcaatggacatgccagcgagtgcatgaagaatgaatttgacaagctggtgtgcaactgcaagcacaacacctacggcgtggactgtgagaagtgcctgcccttcttcaatgaccggccctggaggcgggccacagctgagagcgccagcgagtgcctgccctgtgactgcaatggccgcagccaggagtgctactttgatcctgagctgtaccgcagcactggacatggaggccactgcaccaactgccaggacaacacagatggagcccactgtgagcgctgccgggagaacttcttccggctgggcaacaatgaggcctgcagcagctgccactgcagccctgtgggcagcctgagcacccagtgtgacagctatggccgctgcagctgcaagccaggagtgatgggagacaagtgtgaccgctgccagcccggcttccacagcctgacagaggccggctgccggccctgcagctgtgaccccagcggcagcattgatgagtgcaacatcgagaccggccgctgtgtgtgcaaggacaacgtggagggcttcaactgtgagcgctgcaagccaggcttcttcaacctggagagcagcaacccccggggctgcaccccctgcttctgcttcggccacagctctgtgtgcaccaatgctgtgggctacagcgtgtacagcatcagcagcaccttccagattgatgaagatggctggagggctgagcagagagatggcagcgaggccagcctggagtggagcagcgagcggcaggacattgctgtgatcagtgacagctacttcccccgctacttcatcgccccagccaagttcctgggcaagcaggtgctgtcctatggccagaacctgtccttctccttccgggtggacagaagagacacccggctgtctgctgaggacctggtgctggagggcgccggcctgcgggtgtctgtgcccctgattgcccagggcaacagctaccccagcgagaccaccgtgaagtatgtgttccggctgcacgaggccacagactacccctggaggcctgccctgaccccatttgagttccagaagctgctgaacaacctgaccagcatcaagatccggggcacctacagcgagaggtctgctggctacctggatgatgtgaccctggccagcgcccggcccggccctggggtgcctgccacctgggtggagagctgcacctgccctgtgggctacggcggccagttctgtgagatgtgcctgagcggctacagaagagagacccccaacctgggcccctacagcccctgtgtgctgtgtgcctgcaatggccacagcgagacctgtgaccctgagactggagtgtgcaactgccgggacaacacagctggcccccactgtgagaagtgcagtgatggctactatggagacagcacagctggcaccagcagtgactgccagccctgcccctgccctgggggcagcagctgtgctgtggtgcccaagaccaaggaggtggtgtgcaccaactgccccaccggcaccaccgggaagagatgtgagctgtgtgatgatggctactttggagaccccctgggcagaaatggacctgtgcggctgtgccgcctgtgccagtgcagcgacaacatcgaccccaatgctgtgggcaactgcaaccggctgaccggggagtgcctgaagtgcatctacaacacagctggcttctactgtgaccgctgcaaggatggcttctttggaaaccccctggcccccaacccagctgacaagtgcaaggcctgcaactgcaacctgtatggcaccatgaagcagcagagcagctgcaaccctgtgacaggccagtgtgagtgcctgccccacgtgacaggccaggactgtggggcctgtgaccccggcttctacaacctgcagagcggccagggctgtgagcgctgtgactgccacgccctgggcagcaccaacggccagtgtgacatcagaacaggccagtgtgagtgccagcccggcatcaccggccagcactgtgagcgctgtgaggtgaaccactttggatttggacctgagggctgcaagccctgtgactgccaccctgagggcagcctgagcctgcagtgcaaggatgatggccgctgtgagtgccgggagggctttgtgggcaacagatgtgaccagtgtgaggagaactacttctacaacagatcctggccaggctgccaggagtgcccagcctgctaccgcctggtgaaggacaaggtggccgaccaccgggtgaagctgcaggagctggagagcctcatcgccaacctgggcactggagatgagatggtgacagaccaggcctttgaggaccggctgaaggaggccgagcgggaggtgatggacctgctgcgggaggcccaggatgtgaaggatgtggaccagaacctgatggaccggctgcagagggtgaacaacaccctgagcagccagatcagccggctgcagaacatccggaacaccatcgaggagactggaaacctggccgagcaggcccgggcccacgtggagaacacagagcggctgattgaaattgccagccgggagctggagaaggccaaggtggccgccgccaacgtgtctgtgacccagcctgagagcactggagaccccaacaacatgaccctgctggccgaggaggccaggaagctggccgagcggcacaagcaggaggctgatgacatcgtgcgggtggccaagacagccaatgacaccagcacagaggcctacaacctgctgctgcggaccctggccggggagaaccagacagcctttgaaattgaggagctgaacagaaaatatgagcaggccaagaacatcagccaggacctggagaagcaggccgcccgggtgcatgaggaggccaagagagctggggacaaggctgtggagatctatgcctctgtggcccagctgagccccctggacagcgagaccctggagaatgaggccaacaacatcaagatggaggccgagaacctggagcagctgattgaccagaagctgaaggactatgaggacctgcgggaggacatgaggggcaaggagctggaggtgaagaacctgctggagaagggcaagacagagcagcagacagctgaccagctgctggcccgggcagatgctgccaaggccctggccgaggaggccgccaagaagggccgggacaccctgcaggaggccaatgacatcctgaacaacctgaaggactttgacagaagagtgaatgacaacaagacagctgctgaggaggccctgaggaagatcccagccatcaaccagaccatcacagaggccaatgagaagacccgggaggcccagcaggccctgggcagcgctgctgctgatgccacagaggccaagaacaaggcccatgaagctgagcgcatcgccagcgctgtgcagaagaatgccaccagcaccaaggccgaggccgagaggacctttgctgaggtgacagacctggacaatgaggtgaacaacatgctgaagcagctgcaggaggccgagaaggagctgaagaggaagcaggatgatgctgaccaggacatgatgatggccggcatggccagccaggccgcccaggaggccgagatcaatgccaggaaggccaagaacagcgtgaccagcctgctgagcatcatcaatgacctgctggagcagctgggccagctggacacagtggacctgaacaagctgaatgaaattgagggcaccctgaacaaggccaaggatgagatgaaggtgtctgacctggacaggaaggtgtctgacctggagaatgaggccaagaagcaggaggccgccatcatggactacaacagagacatcgaggagatcatgaaggacatccggaacctggaggacatcaggaagaccctgcccagcggctgcttcaacacccccagcattgagaagccctag

SEQ ID NO: 157317 - DNA, 3582 bp, synthetic construct
  misc_feature 1..3582: note = Description of Artificial Sequence: Synthetic coding sequence
  source 1..3582: mol_type = other DNA
atgcctgccctgtggctgggctgctgcctgtgcttcagcctgctgctgcctgctgcccgggccaccagccggcgggaggtgtgtgactgcaatggcaagagccggcagtgcatctttgaccgggagctgcaccggcagacaggaaatggcttccgctgcctgaactgcaatgacaacacagatggcatccactgtgagaagtgcaagaatggcttctaccgccaccgggagcgggaccgctgcctgccctgcaactgcaacagcaagggcagcctgagcgcccgctgtgacaacagcggccgctgcagctgcaagccaggagtgactggagcccgctgtgaccgctgcctgcccggcttccacatgctgacagatgctggctgcacccaggaccagaggctgctggacagcaaatgtgactgtgaccctgctggcattgctggcccctgtgatgctggccgctgtgtgtgcaagccagctgtgactggagagcgctgtgaccgctgccgcagcggctactacaacctggatggcggcaaccctgagggctgcacccagtgcttctgctacggccacagcgccagctgccgcagcagcgctgagtacagcgtgcacaagatcaccagcaccttccaccaggatgtggatggctggaaggctgtgcagagaaatggcagccctgccaagctgcagtggagccagaggcaccaggatgtgttcagcagcgcccagaggctggaccctgtgtactttgtggccccagccaagttcctgggcaaccagcaggtgtcctatggccagagcctgagctttgactacagagtggaccggggcggccgccaccccagcgcccatgatgtgatcctggagggcgccggcctgcgcatcacagcccccctgatgcccctgggcaagaccctgccctgtggcctgaccaagacctacaccttccggctgaatgagcaccccagcaacaactggagcccccagctgagctactttgagtacagaaggctgctgaggaacctgacagccctgcgcatccgggccacctacggggagtacagcacaggctacatcgacaacgtgaccctcatcagcgcccggcctgtgtctggggccccagccccctgggtggagcagtgcatctgccctgtgggctacaagggccagttctgccaggactgtgccagcggctacaagagggacagcgcccggctgggccccttcggcacctgcatcccctgcaactgccagggcggcggggcctgtgaccctgacaccggggactgctacagcggagatgagaacccagacattgaatgtgccgactgccccatcggcttctacaatgacccccatgaccccaggagctgcaagccctgcccctgccacaacggcttcagctgcagcgtgatgcctgagacagaggaggtggtgtgcaacaactgccccccaggagtgactggagcccgctgtgagctgtgtgctgatggctactttggagacccctttggagagcacggccctgtgcggccctgccagccctgccagtgcaacaacaacgtggaccccagcgccagcggcaactgtgaccggctgaccggccgctgcctgaagtgcatccacaacacagctggcatctactgtgaccagtgcaaggccggctactttggagaccccctggcccccaacccagctgacaagtgccgggcctgcaactgcaaccccatgggcagcgagcctgtgggctgccgcagtgatggcacctgtgtgtgcaagccaggctttggaggccccaactgtgagcacggggccttcagctgcccagcctgctacaaccaggtgaagatccagatggaccagttcatgcagcagctgcagaggatggaggccctgatcagcaaggcccagggcggagatggagtggtgcctgacacagagctggagggccgcatgcagcaggccgagcaggccctgcaggacatcctgagagatgcccagatcagcgagggcgccagccgcagcctgggcctgcagctggccaaggtgcgcagccaggagaacagctaccagagccggctggatgacctgaagatgacagtggagcgggtgcgggccctgggcagccagtaccagaacagagtgcgggacacccacaggctcatcacccagatgcagctgagcctggccgagagcgaggccagcctgggcaacaccaacatcccagccagtgaccactacgtgggccccaacggcttcaagagcctggcccaggaggccacccggctggccgagagccacgtggagagcgccagcaacatggagcagctgacccgggagacagaggactacagcaagcaggccctgagcctggtgaggaaggccctgcacgagggcgtgggcagcggcagcggcagcccagatggagctgtggtgcagggcctggtggagaagctggagaagaccaagagcctggcccagcagctgacccgggaggccacccaggccgagattgaagctgacaggagctaccagcacagcctgcggctgctggacagcgtgtcccggctgcagggcgtgtctgaccagagcttccaggtggaggaggccaagaggatcaagcagaaggctgacagcctgagcagcctggtgaccaggcacatggatgagttcaagaggacccagaagaacctgggcaactggaaggaggaggcccagcagctgctgcagaatggcaagagcggccgggagaagagtgaccagctgctgagccgggccaacctggccaagagccgggcccaggaggccctgtccatgggaaatgccaccttctatgaggtggagagcatcctgaagaacctgcgggagtttgacctgcaggtggacaacaggaaggccgaggccgaggaggccatgaagaggctgagctacatcagccagaaggtgtctgatgccagtgacaagacccagcaggccgagcgggccctgggcagcgctgctgctgatgcccagagggccaagaatggagctggggaggccctggagatcagcagcgagattgagcaggagatcggcagcctgaacctggaggccaacgtgacagcagatggagccctggccatggagaagggcctggccagcctgaagtctgagatgagggaggtggagggggagctggagaggaaggagctggagtttgacaccaacatggatgctgtgcagatggtgatcacagaggcccagaaggtggacacccgggccaagaatgctggggtgaccatccaggacaccctgaacaccctggatggcctgctgcacctgatggaccagcccctgtctgtggatgaggagggcctggtgctgctggagcagaagctgagccgggccaagacccagatcaacagccagctgcggcccatgatgtctgagctggaggagcgggcccggcagcagaggggccacctgcacctgctggagaccagcattgatggcatcctggctgatgtgaagaacctggagaacatccgggacaacctgcccccaggctgctacaacacccaggccctggagcagcagtag

SEQ ID NO: 157318 - DNA, 3336 bp, synthetic construct
  misc_feature 1..3336: note = Description of Artificial Sequence: Synthetic coding sequence
  source 1..3336: mol_type = other DNA
atgcctgccctgtggctgggctgctgcctgtgcttcagcctgctgctgcctgctgcccgggccaccagccggcgggaggtgtgtgactgcaatggcaagagccggcagtgcatctttgaccgggagctgcaccggcagacaggaaatggcttccgctgcctgaactgcaatgacaacacagatggcatccactgtgagaagtgcaagaatggcttctaccgccaccgggagcgggaccgctgcctgccctgcaactgcaacagcaagggcagcctgagcgcccgctgtgacaacagcggccgctgcagctgcaagccaggagtgactggagcccgctgtgaccgctgcctgcccggcttccacatgctgacagatgctggctgcacccaggaccagaggctgctggacagcaaatgtgactgtgaccctgctggcattgctggcccctgtgatgctggccgctgtgtgtgcaagccagctgtgactggagagcgctgtgaccgctgccgcagcggctactacaacctggatggcggcaaccctgagggctgcacccagtgcttctgctacggccacagcgccagctgccgcagcagcgctgagtacagcgtgcacaagatcaccagcaccttccaccaggatgtggatggctggaaggctgtgcagagaaatggcagccctgccaagctgcagtggagccagaggcaccaggatgtgttcagcagcgcccagaggctggaccctgtgtactttgtggccccagccaagttcctgggcaaccagcaggtgtcctatggccagagcctgagctttgactacagagtggaccggggcggccgccaccccagcgcccatgatgtgatcctggagggcgccggcctgcgcatcacagcccccctgatgcccctgggcaagaccctgccctgtggcctgaccaagacctacaccttccggctgaatgagcaccccagcaacaactggagcccccagctgagctactttgagtacagaaggctgctgaggaacctgacagccctgcgcatccgggccacctacggggagtacagcacaggctacatcgacaacgtgaccctcatcagcgcccggcctgtgtctggggccccagccccctgggtggagcagtgcatctgccctgtgggctacaagggccagttctgccaggactgtgccagcggctacaagagggacagcgcccggctgggccccttcggcacctgcatcccctgcaactgccagggcggcggggcctgtgaccctgacaccggggactgctacagcggagatgagaacccagacattgaatgtgccgactgccccatcggcttctacaatgacccccatgaccccaggagctgcaagccctgcccctgccacaacggcttcagctgcagcgtgatgcctgagacagaggaggtggtgtgcaacaactgccccccaggagtgactggagcccgctgtgagctgtgtgctgatggctactttggagacccctttggagagcacggccctgtgcggccctgccagccctgccagtgcaacaacaacgtggaccccagcgccagcggcaactgtgaccggctgaccggccgctgcctgaagtgcatccacaacacagctggcatctactgtgaccagtgcaaggccggctactttggagaccccctggcccccaacccagctgacaagtgccgggcctgcaactgcaaccccatgggcagcgagcctgtgggctgccgcagtgatggcacctgtgtgtgcaagccaggctttggaggccccaactgtgagcacggggccttcagctgcccagcctgctacaaccaggtgaagatccagatggaccagttcatgcagcagctgcagaggatggaggccctgatcagcaaggcccagggcggagatggagtggtgcctgacacagagctggagggccgcatgcagcaggccgagcaggccctgcaggacatcctgagagatgcccagatcagcgagggcgccagccgcagcctgggcctgcagctggccaaggtgcgcagccaggagaacagctaccagagccggctggatgacctgaagatgacagtggagcgggtgcgggccctgggcagccagtaccagaacagagtgcgggacacccacaggctcatcacccagatgcagctgagcctggccgagagcgaggccagcctgggcaacaccaacatcccagccagtgaccactacgtgggccccaacggcttcaagagcctggcccaggaggccacccggctggccgagagccacgtggagagcgccagcaacatggagcagctgacccgggagacagaggactacagcaagcaggccctgagcctggtgaggaaggccctgcacgagggcgtgggcagcggcagcggcagcccagatggagctgtggtgcagggcctggtggagaagctggagaagaccaagagcctggcccagcagctgacccgggaggccacccaggccgagattgaagctgacaggagctaccagcacagcctgcggctgctggacagcgtgtcccggctgcagggcgtgtctgaccagagcttccaggtggaggaggccaagaggatcaagcagaaggctgacagcctgagcagcctggtgaccaggcacatggatgagttcaagaggacccagaagaacctgggcaactggaaggaggaggcccagcagctgctgcagaatggcaagagcggccgggagaagagtgaccagctgctgagccgggccaacctggccaagagccgggcccaggaggccctgtccatgggaaatgccaccttctatgaggtggagagcatcctgaagaacctgcgggagtttgacctgcaggtggacaacaggaaggccgaggccgaggaggccatgaagaggctgagctacatcagccagaaggtgtctgatgccagtgacaagacccagcaggccgagcgggccctgggcagcgctgctgctgatgcccagagggccaagaatggagctggggaggccctggagatcagcagcgagattgagcaggagatcggcagcctgaacctggaggccaacgtgacagcagatggagccctggccatggagaagggcctggccagcctgaagtctgagatgagggaggtggagggggagctggagaggaaggagctggagtttgacaccaacatggatgctgtgcagatggtgatcacagaggcccagaaggtggacacccgggccaagaatgctggggtgaccatccaggacaccctgaacaccctggatggcctgctgcacctgatgggcatgtag

SEQ ID NO: 157319 - DNA, 3033 bp, synthetic construct
  misc_feature 1..3033: note = Description of Artificial Sequence: Synthetic coding sequence
  source 1..3033: mol_type = other DNA
atgcctgccctgtggctgggctgctgcctgtgcttcagcctgctgctgcctgctgcccgggccaccagccggcgggaggtgtgtgactgcaatggcaagagccggcagtgcatctttgaccgggagctgcaccggcagacaggaaatggcttccgctgcctgaactgcaatgacaacacagatggcatccactgtgagaagtgcaagaatggcttctaccgccaccgggagcgggaccgctgcctgccctgcaactgcaacagcaagggcagcctgagcgcccgctgtgacaacagcggccgctgcagctgcaagccaggagtgactggagcccgctgtgaccgctgcctgcccggcttccacatgctgacagatgctggctgcacccaggaccagaggctgctggacagcaaatgtgactgtgaccctgctggcattgctggcccctgtgatgctggccgctgtgtgtgcaagccagctgtgactggagagcgctgtgaccgctgccgcagcggctactacaacctggatggcggcaaccctgagggctgcacccagtgcttctgctacggccacagcgccagctgccgcagcagcgctgagtacagcgtgcacaagatcaccagcaccttccaccaggatgtggatggctggaaggctgtgcagagaaatggcagccctgccaagctgcagtggagccagaggcaccaggatgtgttcagcagcgcccagaggctggaccctgtgtactttgtggccccagccaagttcctgggcaaccagcaggtgtcctatggccagagcctgagctttgactacagagtggaccggggcggccgccaccccagcgcccatgatgtgatcctggagggcgccggcctgcgcatcacagcccccctgatgcccctgggcaagaccctgccctgtggcctgaccaagacctacaccttccggctgaatgagcaccccagcaacaactggagcccccagctgagctactttgagtacagaaggctgctgaggaacctgacagccctgcgcatccgggccacctacggggagtacagcacaggctacatcgacaacgtgaccctcatcagcgcccggcctgtgtctggggccccagccccctgggtggagcagtgcatctgccctgtgggctacaagggccagttctgccaggactgtgccagcggctacaagagggacagcgcccggctgggccccttcggcacctgcatcccctgcaactgccagggcggcggggcctgtgaccctgacaccggggactgctacagcggagatgagaacccagacattgaatgtgccgactgccccatcggcttctacaatgacccccatgaccccaggagctgcaagccctgcccctgccacaacggcttcagctgcagcgtgatgcctgagacagaggaggtggtgtgcaacaactgccccccaggagtgactggagcccgctgtgagctgtgtgctgatggctactttggagacccctttggagagcacggccctgtgcggccctgccagccctgccagtgcaacaacaacgtggaccccagcgccagcggcaactgtgaccggctgaccggccgctgcctgaagtgcatccacaacacagctggcatctactgtgaccagtgcaaggccggctactttggagaccccctggcccccaacccagctgacaagtgccgggcctgcaactgcaaccccatgggcagcgagcctgtgggctgccgcagtgatggcacctgtgtgtgcaagccaggctttggaggccccaactgtgagcacggggccttcagctgcccagcctgctacaaccaggtgaagatccagatggaccagttcatgcagcagctgcagaggatggaggccctgatcagcaaggcccagggcggagatggagtggtgcctgacacagagctggagggccgcatgcagcaggccgagcaggccctgcaggacatcctgagagatgcccagatcagcgagggcgccagccgcagcctgggcctgcagctggccaaggtgcgcagccaggagaacagctaccagagccggctggatgacctgaagatgacagtggagcgggtgcgggccctgggcagccagtaccagaacagagtgcgggacacccacaggctcatcacccagatgcagctgagcctggccgagagcgaggccagcctgggcaacaccaacatcccagccagtgaccactacgtgggccccaacggcttcaagagcctggcccaggaggccacccggctggccgagagccacgtggagagcgccagcaacatggagcagctgacccgggagacagaggactacagcaagcaggccctgagcctggtgaggaaggccctgcacgagggcgtgggcagcggcagcggcagcccagatggagctgtggtgcagggcctggtggagaagctggagaagaccaagagcctggcccagcagctgacccgggaggccacccaggccgagattgaagctgacaggagctaccagcacagcctgcggctgctggacagcgtgtcccggctgcagggcgtgtctgaccagagcttccaggtggaggaggccaagaggatcaagcagaaggctgacagcctgagcagcctggtgaccaggcacatggatgagttcaagaggacccagaagaacctgggcaactggaaggaggaggcccagcagctgctgcagaatggcaagagcggccgggagaagagtgaccagctgctgagccgggccaacctggccaagagccgggcccaggaggccctgtccatgggaaatgccaccttctatgaggtggagagcatcctgaagaacctgcgggagtttgacctgcaggtggacaacaggaaggccgaggccttccccagccaggaccctgaccagcagcccacagctgcccatgatgtgcgggccggccgggagggcaccagcgctgagggccccccaccatttgctggggacaagcaccgctgggacagcggctag

SEQ ID NO: 157320 - DNA, 1590 bp, synthetic construct
  misc_feature 1..1590: note = Description of Artificial Sequence: Synthetic coding sequence
  source 1..1590: mol_type = other DNA
atggctgctgctgccctgctgctgggcctggccctgctggcccccagggctgctggggccggcatgggcgcctgctatgatggagctggccggccccagcgctgcctgcctgtgtttgaaaatgctgccttcggccgcctggcccaggccagccacacctgtggcagccccccagaggacttctgcccccacgtgggcgccgccggggccggggcccactgccagagatgtgatgctgctgacccccagaggcaccacaatgccagctacctgacagacttccacagccaggatgagagcacctggtggcagagccccagcatggccttcggcgtgcagtaccccacctctgtgaacatcaccctgcggctgggcaaggcctatgagatcacctacgtgcggctgaagttccacaccagcaggcctgagagctttgccatctacaagaggagcagagcagatggcccctgggagccctaccagttctacagcgccagctgccagaagacctacggccggcctgagggccagtacctgcggcctggagaagatgagcgggtggccttctgcaccagcgagttcagtgacatcagccccctgagcggcggcaatgtggccttcagcaccctggagggccggcccagcgcctacaactttgaggagagccctggcctgcaggagtgggtgaccagcacagagctgctgatcagcctggaccggctgaacacctttggagatgacatcttcaaggaccccaaggtgctgcagagctactactatgctgtgtctgacttctctgtgggcggccgctgcaagtgcaatggccacgcctctgaatgtggcccagatgtggccggccagctggcctgccgctgccagcacaacaccactggaacagactgtgagcgctgcctgcccttcttccaggaccggccctgggcccggggcacagctgaggccgcccatgaatgtctgccctgcaactgcagcggccgctcagaagaatgtacctttgaccgggagctgttccgcagcacaggccacggcggccgctgccaccactgccgggaccacacagctggcccccactgtgagcgctgccaggagaacttctaccactgggaccccaggatgccctgccagccctgtgactgccagagcgctggcagcctgcacctgcagtgtgatgacaccggcacctgtgcctgcaagcccaccgtgacaggctggaagtgtgaccgctgcctgcccggcttccacagcctgtctgagggcggctgccggccctgcacctgcaacccagctggcagcctggacacctgtgaccccaggagcggccgctgcccctgcaaggaaaatgtggagggcaacctgtgtgaccgctgccggcccggcaccttcaacctgcagccccacaacccagctggccgcagctgccgcagccgggccagccgggtgaccagccccaggtctgcccccaccaacagaacctggaggcccttctgcacagcctgccccaggacagtgcctgctggcagcgagggctgcccagaccccaggcacaccctgccccacctgctcttcacctag

SEQ ID NO: 157321 - DNA, 4728 bp, synthetic construct
  misc_feature 1..4728: note = Description of Artificial Sequence: Synthetic coding sequence
  source 1..4728: mol_type = other DNA
atggctgctgctgccctgctgctgggcctggccctgctggcccccagggctgctggggccggcatgggcgcctgctatgatggagctggccggccccagcgctgcctgcctgtgtttgaaaatgctgccttcggccgcctggcccaggccagccacacctgtggcagccccccagaggacttctgcccccacgtgggcgccgccggggccggggcccactgccagagatgtgatgctgctgacccccagaggcaccacaatgccagctacctgacagacttccacagccaggatgagagcacctggtggcagagccccagcatggccttcggcgtgcagtaccccacctctgtgaacatcaccctgcggctgggcaaggcctatgagatcacctacgtgcggctgaagttccacaccagcaggcctgagagctttgccatctacaagaggagcagagcagatggcccctgggagccctaccagttctacagcgccagctgccagaagacctacggccggcctgagggccagtacctgcggcctggagaagatgagcgggtggccttctgcaccagcgagttcagtgacatcagccccctgagcggcggcaatgtggccttcagcaccctggagggccggcccagcgcctacaactttgaggagagccctggcctgcaggagtgggtgaccagcacagagctgctgatcagcctggaccggctgaacacctttggagatgacatcttcaaggaccccaaggtgctgcagagctactactatgctgtgtctgacttctctgtgggcggccgctgcaagtgcaatggccacgcctctgaatgtggcccagatgtggccggccagctggcctgccgctgccagcacaacaccactggaacagactgtgagcgctgcctgcccttcttccaggaccggccctgggcccggggcacagctgaggccgcccatgaatgtctgccctgcaactgcagcggccgctcagaagaatgtacctttgaccgggagctgttccgcagcacaggccacggcggccgctgccaccactgccgggaccacacagctggcccccactgtgagcgctgccaggagaacttctaccactgggaccccaggatgccctgccagccctgtgactgccagagcgctggcagcctgcacctgcagtgtgatgacaccggcacctgtgcctgcaagcccaccgtgacaggctggaagtgtgaccgctgcctgcccggcttccacagcctgtctgagggcggctgccggccctgcacctgcaacccagctggcagcctggacacctgtgaccccaggagcggccgctgcccctgcaaggaaaatgtggagggcaacctgtgtgaccgctgccggcccggcaccttcaacctgcagccccacaacccagctggctgcagcagctgcttctgctacggccacagcaaggtgtgtgccagcacagcccagttccaggtgcaccacatcctgagtgacttccaccagggcgctgagggctggtgggcccggtctgtgggcggcagcgagcaccccccccagtggagccccaacggggtgctgctgagcccagaagatgaggaggagctgacagcccctgagaagttcctgggggaccagcgcttctcctatggccagcccctcatcctgaccttccgggtgcccccaggggacagccccctgcctgtgcagctgcggctggagggcaccggcctggccctgagcctgcggcacagcagcctgagcggcccccaggatgctggccacccccgggaggtggagctgcgcttccacctgcaggagaccagtgaagatgtggccccacccctgccccccttccacttccagaggctgctggccaacctgaccagcctgcggctgcgggtgtccccaggccccagccctgctggccctgtgttcctgacagaggtgcggctgaccagcgcccggcccggcctgagccccccagcctcctgggtggagatctgcagctgccccaccggctacacaggccagttctgtgagagctgtgcccctggctacaagcgggagatgccccagggcggcccctatgccagctgtgtgccctgcacctgcaaccagcacggcacctgtgaccccaacacaggcatctgtgtgtgcagccaccacacagagggccccagctgtgagcgctgcctgcccggcttctacggcaacccctttgctggccaggctgatgactgccagccctgcccctgccccggccagagcgcctgcaccaccatccctgagagccgggaggtggtgtgcacccactgccccccaggccagaggggccgccgctgtgaggtgtgtgatgatggcttcttcggggaccccctgggcctgtttggccacccccagccctgccaccagtgccagtgcagcggaaatgtggaccccaatgctgtgggcaactgtgaccccctgagcggccactgcctgcgctgcctgcacaacaccactggagaccactgtgagcactgccaggagggcttctacggcagcgccctggcccccaggcctgctgacaagtgcatgccctgcagctgccacccccagggctctgtgtctgagcagatgccctgtgaccctgtgacaggccagtgcagctgcctgccccacgtgacagcccgggactgcagccgctgctacccaggcttctttgacctgcagcccggccggggctgccgcagctgcaagtgccaccccctgggcagccaggaggaccagtgccaccccaagacaggccagtgcacctgcaggcctggggtgacaggccaggcctgtgaccgctgccagctgggcttcttcggcttcagcatcaagggctgccgggcctgccgctgcagccccctgggcgccgccagcgcccagtgccatgaaaatggcacctgtgtgtgcaggcctggctttgagggctacaagtgtgaccgctgccacgacaacttcttcctgacagcagatggcacccactgccagcagtgccccagctgctacgccctggtgaaggaggaggccgccaagctgaaggcccggctgaccctgacagagggctggctgcagggcagtgactgtggcagcccctggggccccctggacatcctgctgggggaggcccccagaggagatgtgtaccagggccaccacctgctgcccggggcccgggaggccttcctggagcagatgatgagcctggagggcgctgtgaaggccgcccgggagcagctgcagaggctgaacaagggggcccgctgtgcccaggccggcagccagaagacctgcacccagctggccgacctggaggccgtgctggagagcagcgaggaggagatcctgcacgccgccgccatcctggccagcctggagatcccccaggagggccccagccagcccaccaagtggagccacctggccacagaggcccgggccctggcccggagccaccgggacacagccaccaagattgctgccacagcctggagggccctgctggccagcaacaccagctatgccctgctgtggaacctgctggagggccgggtggccctggagacccagagggacctggaggaccgctaccaggaggtgcaggccgcccagaaggccctgaggacagctgtggccgaggtgctgcctgaggccgagagcgtgctggccaccgtgcagcaggtgggcgctgacacagccccctacctggccctgctggccagccctggggccctgccccagaagagcagagctgaggacctgggcctgaaggccaaggccctggagaagacagtggcctcctggcagcacatggccacagaagctgcccggaccctgcagacagctgcccaggccaccctgcggcagacagagcccctgaccaagctgcaccaggaggcccgggccgccctgacccaggccagcagctctgtgcaggccgccaccgtgacagtgatgggcgcccggaccctgctggccgacctggagggcatgaagctgcagttcccccggcccaaggaccaggccgccctgcagaggaaggctgacagcgtgtctgaccggctgctggccgacaccaggaagaagaccaagcaggccgagaggatgctgggcaatgctgcccccctgagcagcagcgccaagaagaagggccgggaggccgaggtgctggccaaggacagcgccaagctggccaaggccctgctgcgggagaggaagcaggcccaccggcgggccagccggctgaccagccagacccaggccaccctgcagcaggccagccagcaggtgctggccagcgaggcccggcggcaggagctggaggaggccgagcgggtgggcgccggcctgtctgagatggagcagcagatccgggagagccgcatcagcctggagaaggacatcgagaccctgtctgagctgctggcccggctgggcagcctggacacccaccaggccccagcccaggccctgaatgagacccagtgggccctggagcggctgcggctgcagctgggcagccctggcagcctgcagaggaagctgagcctgctggagcaggagagccagcagcaggagctgcagatccagggctttgaaagtgacctggccgagatccgggctgacaagcagaacctggaggccatcctgcacagcctgcctgagaactgtgcctcctggcagtag

SEQ ID NO: 157322 - DNA, 459 bp, synthetic construct
  misc_feature 1..459: note = Description of Artificial Sequence: Synthetic coding sequence
  source 1..459: mol_type = other DNA
atgaggctgcccctgagccacagccctgagcacgtggagatggccctgctgagcaacatcctggccgcctacagctttgtgtctgaaaatcctgagcgggccgccctgtactttgtgtctggagtgtgcatcggcctggtgctgaccctggccgccctggtgatccgcatcagctgccacacagactgcagaagaagacctgggaagaagttcctgcaggaccgggagagcagcagtgacagcagtgacagtgaagatggctctgaagatactgtgtctgacctgtctgtgcggcggcacagaagatttgagaggaccctgaacaagaatgtgttcaccagcgctgaggagctggagcgggcccagaggctggaggagcgggagcgcatcatccgggagatctggatgaatggccagcctgaggtgcccggcaccaggagcctgaaccgctactactag

SEQ ID NO: 157323 - DNA, 1200 bp, synthetic construct
  misc_feature 1..1200: note = Description of Artificial Sequence: Synthetic coding sequence
  source 1..1200: mol_type = other DNA
atggcccagagggccttccccaacccctatgctgactacaacaagagcctggccgagggctactttgatgctgctggccgcctgaccccagagttcagccagaggctgaccaacaagatccgggagctgctgcagcagatggagcggggcctgaagtctgctgaccccagagatggcaccggctacacaggctgggccggcattgctgtgctgtacctgcacctgtatgatgtgtttggagaccctgcctacctgcagctggcccacggctacgtgaagcagagcctgaactgcctgaccaagaggagcatcaccttcctgtgtggagatgctggccccctggccgtggccgctgtgctgtaccacaagatgaacaatgagaagcaggccgaggactgcatcaccaggctcatccacctgaacaagattgacccccacgccccaaatgagatgctgtatggccgcatcggctacatctatgccctgctgtttgtgaacaagaactttggagtggagaagatcccccagagccacatccagcagatctgtgagaccatcctgaccagcggggagaacctggccaggaagaggaacttcaccgccaagagccccctgatgtatgagtggtaccaggagtactacgtgggcgccgcccacggcctggccggcatctactactacctgatgcagcccagcctgcaggtgtcccagggcaagctgcacagcctggtgaagcccagcgtggactatgtgtgccagctgaagttccccagcggcaactacccaccctgcattggagacaacagagacctgctggtgcactggtgccacggggcccctggggtcatctacatgctgatccaggcctacaaggtgttccgggaggagaagtacctgtgtgatgcctaccagtgtgctgatgtgatctggcagtatggcctgctgaagaagggctacggcctgtgccacggcagcgctggaaatgcctatgccttcctgaccctgtacaacctgacccaggacatgaagtacctgtaccgggcctgcaagtttgctgagtggtgcctggagtatggagaacatggctgcaggaccccagacacccccttcagcctgtttgagggcatggccggcaccatctacttcctggccgacctgctggtgcccaccaaggcccgcttccctgcctttgagctgtag

SEQ ID NO: 157324 - DNA, 1200 bp, synthetic construct; identical to SEQ ID NO: 157323
  misc_feature 1..1200: note = Description of Artificial Sequence: Synthetic coding sequence
  source 1..1200: mol_type = other DNA

SEQ ID NO: 157325 - DNA, 1200 bp, synthetic construct; identical to SEQ ID NO: 157323
  misc_feature 1..1200: note = Description of Artificial Sequence: Synthetic coding sequence
  source 1..1200: mol_type = other DNA

SEQ ID NO: 157326 - DNA, 591 bp, synthetic construct
  misc_feature 1..591: note = Description of Artificial Sequence: Synthetic coding sequence
  source 1..591: mol_type = other DNA
atggcccagagggccttccccaacccctatgctgactacaacaagagcctggccgagggctactttgatgctgctggccgcctgaccccagagttcagccagaggctgaccaacaagatccgggagctgctgcagcagatggagcggggcctgaagtctgctgaccccagagatggcaccggctacacaggctgggccggcattgctgtgctgtacctgcacctgtatgatgtgtttggagaccctgcctacctgcagctggcccacggctacgtgaagcagagcctgaactgcctgaccaagaggagcatcaccttcctgtgtggagatgctggccccctggccgtggccgctgtgctgtaccacaagatgaacaatgagaagcaggccgaggactgcatcaccaggctcatccacctgaacaagattgacccccacgccccaaatgagatgctgtatggccgcatcggctacatctatgccctgctgtttgtgaacaagaactttggagtggagaagatcccccagagccacatccagcagatctgtgagaccatcctgaccagcggggagaacctggccaggaagtag

SEQ ID NO: 157327 - DNA, 1200 bp, synthetic construct; identical to SEQ ID NO: 157323
  misc_feature 1..1200: note = Description of Artificial Sequence: Synthetic coding sequence
  source 1..1200: mol_type = other DNA

SEQ ID NO: 157328 - DNA, 1353 bp, synthetic construct
  misc_feature 1..1353: note = Description of Artificial Sequence: Synthetic coding sequence
  source 1..1353: mol_type = other DNA
atgggagagaccatgagcaagaggctgaagctgcacctgggcggggaggccgagatggaggagcgggcctttgtgaaccccttcccagactatgaagctgctgctggggccctgctggccagcggggctgctgaggagaccggctgtgtgcggcccccagccaccacagatgagcccggcctgcccttccaccaggacggcaagatcatccacaacttcatccgccgcatccagaccaagatcaaggacctgctgcagcagatggaggagggcctgaagacagctgacccccatgactgcagcgcctacacaggctggacaggaattgccctgctgtacctgcagctgtacagagtgacctgtgaccagacctacctgctgcggagcctggactatgtgaagaggaccctgaggaacctgaatggaagaagagtgaccttcctgtgtggagatgctggccccctggccgtgggcgctgtgatctaccacaagctgcggagtgactgtgagagccaggagtgtgtgaccaagctgctgcagctgcagaggtctgtggtgtgccaggagagtgacctgcctgatgagctgctgtatggccgggccggctacctgtatgccctgctgtacctgaacacagagatcggccctggcaccgtgtgtgagagcgccatcaaggaggtggtgaatgccatcatcgagagcggcaagaccctgagccgggaggagaggaagacagagcgctgccccctgctgtaccagtggcacaggaagcagtatgtgggcgccgcccacggcatggccggcatctactacatgctgatgcagcctgctgccaaggtggaccaggagaccctgacagagatggtgaagcccagcattgattatgtgcgccacaagaagttccgcagcggcaactaccccagcagcctgagcaatgaaacagaccggctggtgcactggtgccacggggcccctggggtcatccacatgctgatgcaggcctacaaggtgttcaaggaggagaagtacctgaaggaggccatggagtgcagtgatgtgatctggcagaggggcctgctgaggaagggctacggcatctgccacggcacagctggaaatggctacagcttcctgagcctgtaccgcctgacccaggacaagaagtacctgtaccgggcctgcaagtttgctgagtggtgcctggactatggagcccacggctgccgcatcccagaccggccctacagcctgtttgagggcatggccggggccatccacttcctgagtgatgtgctgggccctgagaccagccgcttccctgcctttgagctggacagcagcaagagggactag

SEQ ID NO: 157329 - DNA, 2199 bp, synthetic construct
  misc_feature 1..2199: note = Description of Artificial Sequence: Synthetic coding sequence
  source 1..2199: mol_type = other DNA
atgacagagggcacctgcctgcggaggagaggaggcccctacaagacagagcccgccacagacctgggccgctggaggctgaactgtgagcggggccggcagacctggacctacctgcaggatgagcgggccggccgggagcagacaggcctggaggcctatgccctgggcctggacaccaagaactacttcaaggacctgcccaaggcccacacagcctttgagggcgccctgaatggcatgaccttctacgtgggcctgcaggccgaggatggccactggacaggagactatggaggccccctcttcctgctgcccggcctgctgatcacctgccacgtggcccgcatccccctgcctgctggctaccgggaggagatcgtgcgctacctgcggtctgtgcagctgcctgatggcggctggggcctgcacatcgaggacaagagcacagtgtttggaacagccctgaactacgtgtccctgcgcatcctgggcgtgggcccagatgatcctgacctggtgcgggccaggaacatcctgcacaagaagggcggcgctgtggccatccccagctggggcaagttctggctggccgtgctgaatgtgtacagctgggagggcctgaacaccctcttccctgagatgtggctgttcccagactgggccccagcccaccccagcaccctgtggtgccactgccggcaggtgtacctgcccatgagctactgctatgctgtgcggctgtctgctgctgaggaccccctggtgcagagcctgcggcaggagctgtatgtggaggactttgccagcattgactggctggcccagagaaataatgtggccccagatgagctgtacaccccccacagctggctgctgcgggtggtgtatgccctgctgaacctgtatgagcaccaccacagcgcccacctgcggcagagagctgtgcagaagctgtatgagcacatcgtggctgatgaccgcttcaccaagagcatcagcatcggccccatcagcaagaccatcaacatgctggtgcgctggtacgtggatggccctgccagcacagccttccaggagcacgtgagccgcatcccagactacctgtggatgggcctggatggcatgaagatgcagggcaccaacggcagccagatctgggacacagcctttgccatccaggccctgctggaggccggcggccaccacaggcctgagttcagcagctgcctgcagaaggcccacgagttcctgcggctgagccaggtgcctgacaaccccccagactaccagaagtactaccggcagatgaggaaaggaggcttctccttcagcaccctggactgtggctggatcgtgtctgactgcacagctgaggccctgaaggctgtgctgctgctgcaggagaagtgcccccacgtgacagagcacatcccccgggagcggctgtgtgatgctgtggccgtgctgctgaacatgaggaacccagatggcggctttgccacctatgagaccaagaggggcggccacctgctggagctgctgaaccccagcgaggtgtttggagacatcatgattgactacacctacgtggagtgcaccagcgctgtgatgcaggccctgaagtacttccacaagcgcttccctgagcacagagctgctgagatccgggagaccctgacccagggcctggagttctgccggcggcagcagagagcagatggctcctgggagggctcctggggcgtgtgcttcacctacggcacctggtttggcctggaggcctttgcctgcatgggccagacctacagagatggaacagcctgtgccgaggtgtcccgggcctgtgacttcctgctgagccggcagatggctgatggcggctggggagaagattttgagagctgtgaggagcggcgctacctgcagagcgcccagagccagatccacaacacctgctgggccatgatgggcctgatggctgtgcgccacccagacatcgaggcccaggagcggggcgtgcgctgcctgctggagaagcagctgcccaacggggactggccccaggagaacattgctggggtcttcaacaagagctgtgccatctcctacaccagctacagaaacatcttccccatctgggccctgggccgcttcagccagctgtacccagagcgggccctggccggccacccctag

SEQ ID NO: 157330 - DNA, 2199 bp, synthetic construct; identical to SEQ ID NO: 157329
  misc_feature 1..2199: note = Description of Artificial Sequence: Synthetic coding sequence
  source 1..2199: mol_type = other DNA

SEQ ID NO: 157331 - DNA, 1959 bp, synthetic construct
  misc_feature 1..1959: note = Description of Artificial Sequence: Synthetic coding sequence
  source 1..1959: mol_type = other DNA
atgaccttctacgtgggcctgcaggccgaggatggccactggacaggagactatggaggccccctcttcctgctgcccggcctgctgatcacctgccacgtggcccgcatccccctgcctgctggctaccgggaggagatcgtgcgctacctgcggtctgtgcagctgcctgatggcggctggggcctgcacatcgaggacaagagcacagtgtttggaacagccctgaactacgtgtccctgcgcatcctgggcgtgggcccagatgatcctgacctggtgcgggccaggaacatcctgcacaagaagggcggcgctgtggccatccccagctggggcaagttctggctggccgtgctgaatgtgtacagctgggagggcctgaacaccctcttccctgagatgtggctgttcccagactgggccccagcccaccccagcaccctgtggtgccactgccggcaggtgtacctgcccatgagctactgctatgctgtgcggctgtctgctgctgaggaccccctggtgcagagcctgcggcaggagctgtatgtggaggactttgccagcattgactggctggcccagagaaataatgtggccccagatgagctgtacaccccccacagctggctgctgcgggtggtgtatgccctgctgaacctgtatgagcaccaccacagcgcccacctgcggcagagagctgtgcagaagctgtatgagcacatcgtggctgatgaccgcttcaccaagagcatcagcatcggccccatcagcaagaccatcaacatgctggtgcgctggtacgtggatggccctgccagcacagccttccaggagcacgtgagccgcatcccagactacctgtggatgggcctggatggcatgaagatgcagggcaccaacggcagccagatctgggacacagcctttgccatccaggccctgctggaggccggcggccaccacaggcctgagttcagcagctgcctgcagaaggcccacgagttcctgcggctgagccaggtgcctgacaaccccccagactaccagaagtactaccggcagatgaggaaaggaggcttctccttcagcaccctggactgtggctggatcgtgtctgactgcacagctgaggccctgaaggctgtgctgctgctgcaggagaagtgcccccacgtgacagagcacatcccccgggagcggctgtgtgatgctgtggccgtgctgctgaacatgaggaacccagatggcggctttgccacctatgagaccaagaggggcggccacctgctggagctgctgaaccccagcgaggtgtttggagacatcatgattgactacacctacgtggagtgcaccagcgctgtgatgcaggccctgaagtacttccacaagcgcttccctgagcacagagctgctgagatccgggagaccctgacccagggcctggagttctgccggcggcagcagagagcagatggctcctgggagggctcctggggcgtgtgcttcacctacggcacctggtttggcctggaggcctttgcctgcatgggccagacctacagagatggaacagcctgtgccgaggtgtcccgggcctgtgacttcctgctgagccggcagatggctgatggcggctggggagaagattttgagagctgtgaggagcggcgctacctgcagagcgcccagagccagatccacaacacctgctgggccatgatgggcctgatggctgtgcgccacccagacatcgaggcccaggagcggggcgtgcgctgcctgctggagaagcagctgcccaacggggactggccccaggagaacattgctggggtcttcaacaagagctgtgccatctcctacaccagctacagaaacatcttccccatctgggccctgggccgcttcagccagctgtacccagagcgggccctggccggccacccctag

SEQ ID NO: 157332 - DNA, 2166 bp, synthetic construct
  misc_feature 1..2166: note = Description of Artificial Sequence: Synthetic coding sequence
  source 1..2166: mol_type = other DNA
atgacagagggcacctgcctgcggaggagaggaggcccctacaagacagagcccgccacagacctgggccgctggaggctgaactgtgagcggggccggcagacctggacctacctgcaggatgagcgggccggccgggagcagacaggcctggaggcctatgccctgggcctggacaccaagaactacttcaaggacctgcccaaggcccacacagcctttgagggcgccctgaatggcatgaccttctacgtgggcctgcaggccgaggatggccactggacaggagactatggaggccccctcttcctgctgcccggcctgctgatcacctgccacgtggcccgcatccccctgcctgctggctaccgggaggagatcgtgcgctacctgcggcacatcgaggacaagagcacagtgtttggaacagccctgaactacgtgtccctgcgcatcctgggcgtgggcccagatgatcctgacctggtgcgggccaggaacatcctgcacaagaagggcggcgctgtggccatccccagctggggcaagttctggctggccgtgctgaatgtgtacagctgggagggcctgaacaccctcttccctgagatgtggctgttcccagactgggccccagcccaccccagcaccctgtggtgccactgccggcaggtgtacctgcccatgagctactgctatgctgtgcggctgtctgctgctgaggaccccctggtgcagagcctgcggcaggagctgtatgtggaggactttgccagcattgactggctggcccagaggaacaacgtggccccagatgagctgtacaccccccacagctggctgctgcgggtggtgtatgccctgctgaacctgtatgagcaccaccacagcgcccacctgcggcagagagctgtgcagaagctgtatgagcacatcgtggctgatgaccgcttcaccaagagcatcagcatcggccccatcagcaagaccatcaacatgctggtgcgctggtacgtggatggccctgccagcacagccttccaggagcacgtgagccgcatcccagactacctgtggatgggcctggatggcatgaagatgcagggcaccaacggcagccagatctgggacacagcctttgccatccaggccctgctggaggccggcggccaccacaggcctgagttcagcagctgcctgcagaaggcccacgagttcctgcggctgagccaggtgcctgacaaccccccagactaccagaagtactaccggcagatgaggaagggcggcttctccttcagcaccctggactgtggctggatcgtgtctgactgcacagctgaggccctgaaggctgtgctgctgctgcaggagaagtgcccccacgtgacagagcacatcccccgggagcggctgtgtgatgctgtggccgtgctgctgaacatgagaaatccagatggcggctttgccacctatgagaccaagagaggaggccacctgctggagctgctgaaccccagcgaggtgtttggagacatcatgattgactacacctacgtggagtgcaccagcgctgtgatgcaggccctgaagtacttccacaagcgcttccctgagcacagagctgctgagatccgggagaccctgacccagggcctggagttctgccggcggcagcagagagcagatggctcctgggagggctcctggggcgtgtgcttcacctacggcacctggtttggcctggaggcctttgcctgcatgggccagacctacagagatggaacagcctgtgccgaggtgtcccgggcctgtgacttcctgctgagccggcagatggctgatggcggctggggcgaggactttgagagctgtgaggagcggcgctacctgcagagcgcccagagccagatccacaacacctgctgggccatgatgggcctgatggctgtgcgccacccagacatcgaggcccaggagcggggcgtgcgctgcctgctggagaagcagctgcccaatggagactggccccaggagaacattgctggggtcttcaacaagagctgtgccatctcctacaccagctacagaaacatcttccccatctgggccctgggccgcttcagccagctgtacccagagcgggccctggccggccacccctag

SEQ ID NO: 157333 - DNA, 1977 bp, synthetic construct
  misc_feature 1..1977: note = Description of Artificial Sequence: Synthetic coding sequence
  source 1..1977: mol_type = other DNA
atgggcagaagaagagccccagctgggggcagcctgggccgggccctgatgaggcaccagacccagaggagccgcagccaccgccacacagacagctggctgcacaccagcgagctgaatgatggctatgactggggccgcctgaacctgcagagcgtgacagagcagagcagcctggatgacttcctggccacagctgagctggccggcacagaatttgtggccgagaagctgaacatcaagtttgtgcctgctgaggccaggacaggcctgctgagctttgaggagagccagaggatcaagaagctgcacgaggagaacaagcagttcctgtgcatcccccggcggcccaactggaaccagaacaccaccccagaggagctgaagcaggccgagaaggacaacttcctggagtggaggcggcagctggtgcggctggaggaggagcagaagctgatcctgaccccatttgaaagaaacctggacttctggaggcagctgtggagggtgattgaaagaagtgacatcgtggtgcagatcgtggatgccaggaaccccctgctcttccgctgtgaggacctggagtgctacgtgaaggagatggatgccaacaaggaaaatgtcatcctgatcaacaaggctgacctgctgacagctgagcagaggtctgcctgggccatgtactttgagaaggaggatgtgaaggtgatcttctggagcgccctggccggggccatccccctgaatggagacagcgaggaggaggccaacagagatgaccggcagagcaacaccaccaagtttggccacagcagctttgaccaggccgagatcagccacagcgagagcgagcacctgcctgcccgggacagccccagcctgtctgagaaccccaccacagatgaagatgattctgaatatgaggactgcccagaggaggaggaggatgactggcagacctgcagcgaggaggatggccccaaggaggaggactgcagccaggactggaaggagagcagcacagctgacagcgaggcccggagcaggaagaccccccagaagaggcagatccacaacttcagccacctggtgtccaagcaggagctgctggagctgttcaaggagctgcacacaggcaggaaggtgaaggatggccagctgactgtgggcctggtgggctaccccaacgtgggcaagagcagcaccatcaacaccatcatgggcaacaagaaggtgtctgtgtctgccaccccaggccacaccaagcacttccagaccctgtatgtggagcccggcctgtgcctgtgtgactgccccggcctggtgatgcccagctttgtgtccaccaaggccgagatgacctgcagcggcatcctgcccatcgaccagatgagggaccacgtgccccctgtgtccctggtgtgccagaacatccccaggcatgtgctggaggccacctacggcatcaacatcatcaccccccgggaggatgaggacccccacaggcctcccaccagcgaggagctgctgacagcctacggctacatgaggggcttcatgacagcccacggccagcctgaccagcccaggtctgcccgctacatcctgaaggactatgtgtctgggaagctgctgtactgccaccccccacctggccgggaccctgtgaccttccagcaccagcaccagaggctgctggagaacaagatgaacagtgatgagatcaagatgcagctgggcaggaacaagaaggccaagcagattgaaaatattgtggacaagaccttcttccaccaggagaatgtgcgggccctgaccaagggcgtgcaggccgtgatgggctacaagccaggcagcggcgtggtgacagccagcacagccagcagtgaaaatggagctgggaagccctggaagaagcacggcaacagaaacaagaaggagaagagccggcggctgtacaagcacctggacatgtag

SEQ ID NO: 157334 - DNA, 333 bp, synthetic construct
  misc_feature 1..333: note = Description of Artificial Sequence: Synthetic coding sequence
  source 1..333: mol_type = other DNA
atgagctgccagcagagccagcagcagtgccagcccccacccaagtgcacccccaagtgcccccccaagtgccccacccccaagtgcccccccaagtgcccccccaagtgcccccctgtgagcagctgctgcagcgtgagcagcggcggctgctgcggcagcagcagcggcggcggctgcagcagcggcggcggcggctgctgcctgagccaccacagaagacacaggagccaccgccaccggctgcagagcagcggctgctgcagccagcccagcggcggcagcagctgctgcggcggggacagcggccagcacagcggcggctgctgctag

SEQ ID NO: 157335 - DNA, 333 bp, synthetic construct; identical to SEQ ID NO: 157334
  misc_feature 1..333: note = Description of Artificial Sequence: Synthetic coding sequence
  source 1..333: mol_type = other DNA

SEQ ID NO: 157336 - DNA, 357 bp, synthetic construct
  misc_feature 1..357: note = Description of Artificial Sequence: Synthetic coding sequence
  source 1..357: mol_type = other DNA
atgagctgccagcagaaccagcagcagtgccagcccccacccaagtgcatccccaagtgcccccccaagtgcctgaccccccgctgcccccccaagtgcccccccaagtgcccccctgtgagcagctgctgcagcgtgagcagcggcggctgctgcggcagcagcagcggcggcagctgtggcagcagcagcggcggctgctgcagcagcggcggcggcggctgctgcctgagccaccacagaagaagaagaagccactgccaccggccccagagcagcggctgctgcagccagcccagcggcggcagcagctgctgcggcggcggcagcggccagcacagcggcggctgctgctag

SEQ ID NO: 157337 - DNA, 333 bp, synthetic construct
  misc_feature 1..333: note = Description of Artificial Sequence: Synthetic coding sequence
  source 1..333: mol_type = other DNA
atgagctgccagcagaaccagcagcagtgccagcccccacccaagtgcatccccaagtgcccccccaagtgcctgaccccccgctgcccccccaagtgcccccccaagtgcccccctgtgagcagctgctgcagcgtgagcagcggcggctgctgcggcagcagcagcggcggctgctgcagcagcggcggcggcggctgctgcctgagccaccacagaagaagaagaagccactgccaccggccccagagcagcggctgctgcagccagcccagcggcggcagcagctgctgcggcggcggcagcggccagcacagcggcggctgctgctag

SEQ ID NO: 157338 - DNA, 357 bp, synthetic construct
  misc_feature 1..357: note = Description of Artificial Sequence: Synthetic coding sequence
  source 1..357: mol_type = other DNA
atgagctgccagcagagccagcagcagtgccagcccccacccaagtgcacccccaagtgcccccccaagtgccccacccccaagtgcccccccaagtgcccccccaagtgcccccctgtgagcagctgctgcagcgtgagcagcggcggctgctgcggcagcagcagcggcggcagctgtggcagcagcagcggcggctgctgcagcagcggcggcggcggctgctgcctgagccaccacagaagaagaagaagccactgccaccggccccagagcagcggctgctgcagccagcccagcggcggcagcagctgctgcggcggcggcagcggccagcacagcggcggctgctgctag

SEQ ID NO: 157339 - DNA, 345 bp, synthetic construct
  misc_feature 1..345: note = Description of Artificial Sequence: Synthetic coding sequence
  source 1..345: mol_type = other DNA
atgagctgccagcagagccagcagcagtgccagcccccacccaagtgcacccccaagtgcacccccaagtgcccagcccccaagtgcccccccaagtgcccccctgtgagcagctgctgcagcgtgagcagcggcggctgctgcggcagcagcagcggcggcggctgcggcagcaacagcggcggctgctgcagcagcggcggcggcggctgctgcctgagccaccacagaagacacaggagccacagaagaagaccccagagcagtgactgctgcagccagcccagcggcggcagcagctgctgcggcggcggcagcagccagcacagcggcggctgctgctag

SEQ ID NO: 157340 - DNA, 357 bp, synthetic construct
  misc_feature 1..357: note = Description of Artificial Sequence: Synthetic coding sequence
  source 1..357: mol_type = other DNA
atgagctgccagcagagccagcagcagtgccagcccccacccaagtgcacccccaagtgcccccccaagtgccccacccccaagtgcccccccaagtgcccccccaagtgcccccctgtgagcagctgctgcagcgtgagcagcggcggctgctgcggcagcagcagcggcggcagctgtggcagcagcagcggcggctgctgcagcagcggcggcggcggctgctgcctgagccaccaccgccaccacaggagccaccgccaccggccccagagcagtgactgctgcagccagcccagcggcggcagcagctgctgcggcggcggcagcggccagcacagcggcggctgctgctag

SEQ ID NO: 157341 - DNA, 357 bp, synthetic construct; identical to SEQ ID NO: 157340
  misc_feature 1..357: note = Description of Artificial Sequence: Synthetic coding sequence
  source 1..357: mol_type = other DNA

SEQ ID NO: 157342 - DNA, 357 bp, synthetic construct
  misc_feature 1..357: note = Description of Artificial Sequence: Synthetic coding sequence
  source 1..357: mol_type = other DNA
atgagctgccagcagagccagcagcagtgccagcccccacccaagtgcacccccaagtgcccccccaagtgccccacccccaagtgcccccccaagtgcccccccaagtgcccccctgtgagcagctgctgcagcgtgagcagcggcggctgctgcggcagcagcagcggcggctgctgcagcagcggcggcggcggctgctgcagcagcggcggcggcggctgctgcctgagccaccacagaagaagaagaagccaccgccaccggccccagagcagtgactgctgcagccagcccagcgctggcagcagctgctgcggcggcggcagcggccagcacagcggcggctgctgctag

SEQ ID NO: 157343 - DNA, 321 bp, synthetic construct
  misc_feature 1..321: note = Description of Artificial Sequence: Synthetic coding sequence
  source 1..321: mol_type = other DNA
atgagctgccagcagaaccagcagcagtgccagcccccacccaagtgcccccccaagtgcccccccaagtgcccccccaagtgccggccccagtgcccagccccctgccccccacctgtgagcagctgctgcggccccagcagcggcggctgctgcggcagcagcagcggcggctgctgcagcagcggcggcggcggctgctgcctgagccaccaccggcccaggctcttccaccgccaccgccaccagagcccagactgctgtgaatgtgagcccagcggcggcagcggctgctgccacagcagcggggactgctgctag

SEQ ID NO: 157344 - DNA, 333 bp, synthetic construct
  misc_feature 1..333: note = Description of Artificial Sequence: Synthetic coding sequence
  source 1..333: mol_type = other DNA
atgagctgccagcagaaccagcagcagtgccagcccccacccaagtgcccccccaagtgcacccccaagtgcccccccaagtgcccccccaagtgcctgccccagtgcccagccccctgcagccctgctgtgagcagctgctgcggccccatcagcggcggctgctgcggccccagcagcggcggctgctgcaacagcggggccggcggctgctgcctgagccaccaccggcccaggctcttccacagaagaagacaccagagcccagactgctgtgagagcgagcccagcggcggcagcggctgctgccacagcagcggcggctgctgctag

SEQ ID NO: 157345 - DNA, 333 bp, synthetic construct; identical to SEQ ID NO: 157344
  misc_feature 1..333: note = Description of Artificial Sequence: Synthetic coding sequence
  source 1..333: mol_type = other DNA

SEQ ID NO: 157346 - DNA, 333 bp, synthetic construct
  misc_feature 1..333: note = Description of Artificial Sequence: Synthetic coding sequence
  source 1..333: mol_type = other DNA
atgagctgccagcagaaccagcagcagtgccagcccccacccaagtgcccccccaagtgcacccccaagtgcccccccaagtgcccccccaagtgccccccccagtgcccagccccctgcttccctgctgtgagcagctgctgcggccccagcagcggcagctgctgcggccccagcagcggcggctgctgcagcagcggggccggcggctgcagcctgagccaccaccggcccaggctcttccacagaagaagacaccagagcccagactgctgtgagagcgagcccagcggcggcagcggctgctgccacagcagcggcggctgctgctag

SEQ ID NO: 157347 - DNA, 333 bp, synthetic construct
  misc_feature 1..333: note = Description of Artificial Sequence: Synthetic coding sequence
  source 1..333: mol_type = other DNA
atgagctgccagcagaaccagcagcagtgccagcccccacccaagtgcccccccaagtgcacccccaagtgcccccccaagtgcccccccaagtgccccccccagtgcccagccccctgcagccctgctgtgagcagctgctgcggccccagcagcggcagctgctgcggccccagcagcggcggctgctgcagcagcggcggcggcggctgctgcctgagccaccaccggcccaggctcttccacagaagaagacaccagagcccagactgctgtgagagcgagcccagcggggccagcggctgctgccacagcagcggcggctgctgctag

SEQ ID NO: 157348 - DNA, 270 bp, synthetic construct
  misc_feature 1..270: note = Description of Artificial Sequence: Synthetic coding sequence
  source 1..270: mol_type = other DNA
atgagctgccagcagaaccagcagcagtgccagcccccacccaagtgcccagccaagagccctgcccagtgcctgcccccagccagcagcagctgtgcccccagcagcggcggctgcggccccagcagcgagaggagctgctgcctgagccaccaccgctgcagaagaagccaccgctgccgctgccagagcagcaacagctgtgaccggggcagcggccagcagggcggcagcagcagctgtggccacagcagcgctggctgctgctag

SEQ ID NO: 157349 - DNA, 288 bp, synthetic construct
  misc_feature 1..288: note = Description of Artificial Sequence: Synthetic coding sequence
  source 1..288: mol_type = other DNA
atgagctgccagcagaaccagcagcagtgccagcccctgcccaagtgccccagccccaagtgcccccccaagagcagcgcccagtgcctgcccccagccagcagctgctgtgcccccaggcctggctgctgcggcggccccagcagcgagggcggctgctgcctgagccaccaccgctgctgccgcagccaccgctgccggcggcagagcagcaacagctgtgaccggggcagcggccagcaggatggagccagtgactgtggctacggcagcggcggctgctgctag

SEQ ID NO: 157350 - DNA, 285 bp, synthetic construct
  misc_feature 1..285: note = Description of Artificial Sequence: Synthetic coding sequence
  source 1..285: mol_type = other DNA
atgagctgccagcagaaccagcagcagtgccagcccccacccagctgccccagccccaagtgcccccccaagagccctgcccagtgcctgcccccacccagcagtgactgtgccctgagcagcggcggctgcggccccagcagcgagagcggctgctgcctgagccaccaccgccacttccgcagccaccagtgccggcggcagaggagcaacagctgtgaccggggcagcggccagcagggcggcggcagctgccggggccacggcagcggcggctgctgctag

SEQ ID NO: 157351 - DNA, 279 bp, synthetic construct
  misc_feature 1..279: note = Description of Artificial Sequence: Synthetic coding sequence
  source 1..279: mol_type = other DNA
atgagctgccagcagaaccagcagcagtgccagcccccacccaagtgccccagccccaagtgcccccccaagagccctgtgcagtgcctgcccccagccagcagcggctgtgcccccagcagcggcggctgcggccccagcagcgagggcggctgcttcctgaaccaccaccggcggcaccaccgctgccggcggcagaggcccaacagctgtgaccggggcagcggccagcagggcggcggcagcggctgcggccacggcagcggcggctgctgctag

SEQ ID NO: 157352 - DNA, 279 bp, synthetic construct
  misc_feature 1..279: note = Description of Artificial Sequence: Synthetic coding sequence
  source 1..279: mol_type = other DNA
atgagctgccagcagaaccagaagcagtgccagcccccacccaagtgccccagccccaagtgcccccccaagaaccctgtgcagtgcctgcccccagccagcagcggctgtgcccccagcagcggcggctgcggccccagcagcgagggcggctgcttcctgaaccaccaccggcggcaccaccgctgccggcggcagaggagcaacagctgtgaccggggcagcggccagcagggcggcggcagcggctgctgccacggcagcggcggctgctgctag

SEQ ID NO: 157353 - DNA, 300 bp, synthetic construct
  misc_feature 1..300: note = Description of Artificial Sequence: Synthetic coding sequence
  source 1..300: mol_type = other DNA
atgagctgccagcagaaccagcagcagtgccagcccccacccaagtgccccatccccaagtacccacccaagtgccccagcaaatgtgccagcagctgccccccacccatcagcagctgctgcggcagcagcagcggcggctgcggctgctgcagcagcgagggcggcggctgctgcctgagccaccaccgccaccacaggagccactgccaccggcccaagagcagcaactgctacggcagcggcagcggccagcagagcggcggcagcggctgctgcagcggcggcggctgctgctag

SEQ ID NO: 157354 - DNA, 300 bp, synthetic construct; identical to SEQ ID NO: 157353
  misc_feature 1..300: note = Description of Artificial Sequence: Synthetic coding sequence
  source 1..300: mol_type = other DNA

SEQ ID NO: 157355 - DNA, 357 bp, synthetic construct
  misc_feature 1..357: note = Description of Artificial Sequence: Synthetic coding sequence
  source 1..357: mol_type = other DNA
atgagctgccagcagagccagcagcagtgccagcccccacccaagtgcacccccaagtgcccccccaagtgcacccccaagtgcccccccaagtgcccccccaagtgccccccccagtgcagcgccccctgccccccacctgtgagcagctgctgcggcagcagcagcggcggctgctgcagcagcgagggcggcggctgctgcctgagccaccaccggccccggcagagcctgcggcggcggccccagagcagcagctgctgcggcagcggcagcggccagcagagcggcggcagcagctgctgccacagcagcggcggcagcggctgctgccacagcagcggcggctgctgctag

SEQ ID NO: 157356 - DNA, 297 bp, synthetic construct
  misc_feature 1..297: note = Description of Artificial Sequence: Synthetic coding sequence
  source 1..297: mol_type = other DNA
atgagcagtgatgacaagagcaagagcaatgaccccaagacagagcccaagaactgtgaccccaagtgtgagcagaagtgtgagagcaagtgccagcccagctgcctgaagaagctgctgcagcgctgctttgagaagtgcccctgggagaagtgcccagccccacccaagtgcctgccctgccccagccagagccccagcagctgccccccccagccctgcaccaagccctgcccccccaagtgccccagcagctgcccccacgcctgccccccaccctgccccccacctgagtag

SEQ ID NO: 157357 - DNA, 1860 bp, synthetic construct
  misc_feature 1..1860: note = Description of Artificial Sequence: Synthetic coding sequence
  source 1..1860: mol_type = other DNA
atgtgcagctgccacaagggctacaccaggaccccagaccacaagcactgccgggacattgatgagtgccagcagggcaacctgtgtgtgaatggccagtgcaagaacacagagggcagcttccgctgcacctgtggccagggctaccagctgtctgctgccaaggaccagtgtgaagatattgatgagtgccagcaccgccacctgtgtgcccacggccagtgcaggaacacagagggcagcttccagtgtgtgtgtgaccagggctaccgggccagcggcctgggggaccactgtgaggacatcaatgaatgtctggaggacaagtctgtgtgccagagaggagactgcatcaacacagctggcagctatgactgcacctgcccagatggcttccagctggatgacaacaagacctgccaggacatcaatgaatgtgagcaccctggcctgtgtggcccccagggagaatgtctgaacacagagggcagcttccactgtgtgtgccagcagggcttcagcatctctgcagatggccgcacctgtgaagatgtgaatgaatgtgagctgctgagcggcgtgtgtggggaggccttctgtgaaaatgtggagggcagcttcctgtgtgtgtgtgctgatgagaaccaggagtacagccccatgacaggccagtgccgcagcaggaccagcacagacctggatgtggatgtggaccagcccaaggaggagaagaaggagtgctactacaacctgaatgatgccagcctgtgtgacaacgtgctggcccccaacgtgaccaagcaggagtgctgctgcaccagcggcgtgggctggggagacaactgtgagatcttcccctgccctgtgctgggcacagctgagttcacagagatgtgccccaagggcaaaggatttgtgcctgctggggagagcagcagcgaggccggcggggagaactacaaggatgctgatgaatgtctgctgtttggccaggagatctgcaagaatggcttctgcctgaacacccggcccggctatgagtgctactgcaagcagggcacctactatgaccctgtgaagctgcagtgctttgacatggatgagtgccaggaccccagcagctgcattgatggccagtgtgtgaacacagagggcagctacaactgcttctgcacccaccccatggtgctggatgccagcgagaagcgctgcatccggcctgctgagagcaatgagcagatcgaggagacagatgtgtaccaggacctgtgctgggagcacctgagtgatgaatatgtgtgcagccggcccctggtgggcaagcagaccacctacacagagtgctgctgcctgtatggagaggcctggggcatgcagtgtgccctgtgccccctgaaggacagtgatgattatgcccagctgtgcaacatccctgtgacaggccggcggcagccctacggcagagatgccctggtggacttcagcgagcagtacaccccagaggccgacccctacttcatccaggaccgcttcctgaacagctttgaggagctgcaggccgaggagtgtggcatcctgaatggctgtgaaaatggccgctgtgtgcgggtgcaggagggctacacctgtgactgctttgatggctaccacctggacacagccaagatgacctgtgtggatgtgaatgaatgtgatgagctgaacaacaggatgagcctgtgcaagaatgccaagtgcatcaacacagatggcagctacaagtgcctgtgcctgcccggctacgtgcccagcgacaagcccaactactgcacccccctgaacacagccctgaacctggagaaggacagcgacctggagtag

SEQ ID NO: 157358 - DNA, 5169 bp, synthetic construct
  misc_feature 1..5169: note = Description of Artificial Sequence: Synthetic coding sequence
  source 1..5169: mol_type = other DNA
atggccggggcctggctgcgctggggcctgctgctgtgggccggcctgctggccagcagcgcccacggccgcctgcggcgcatcacctacgtggtgcaccctggccctggcctggccgccggggccctgcccctgagcggcccccccaggagcaggaccttcaacgtggccctgaatgcccgctacagccgcagcagcgctgctgctggggcccccagccgggccagccctggggtgcccagcgagaggaccaggaggaccagcaagccaggaggagctgccctgcagggcctgcggcccccacctcctcctcctcctgagcccgcccggcctgctgtgcctgggggccagctgcaccccaaccctgggggccaccctgctgctgcccccttcaccaagcagggccggcaggtggtgcgcagcaaggtgccccaggagacccagagcggcggcggcagccggctgcaggtgcaccagaagcagcagctgcagggcgtgaatgtgtgtggcggccgctgctgccacggctggagcaaggcccctggcagccagcgctgcaccaagcccagctgtgtgcccccctgccagaatggaggcatgtgcctgcggccccagctgtgtgtgtgcaagccaggcaccaagggcaaggcctgtgagaccatcgccgcccaggacaccagcagccctgtgtttggaggccagagccctggggccgccagctcctggggccccccagagcaggccgccaagcacaccagcagcaagaaggctgacaccctgccccgggtgtcccctgtggcccagatgaccctgaccctgaagcccaagcccagcgtgggcctgccccagcagatccacagccaggtgacccccctgagcagccagagcgtggtgatccaccacggccagacccaggagtatgtgctgaagcccaagtacttccctgcccagaagggcatctctggagagcagagcacagagggcagcttccccctgcgctacgtgcaggaccaggtggccgcccccttccagctgagcaaccacacaggccgcatcaaggtggtgttcacccccagcatctgcaaggtgacctgcaccaagggcagctgccagaacagctgtgagaagggcaacaccaccaccctcatcagtgaaaatggacatgctgctgacaccctgacagccaccaacttccgggtggtgatctgccacctgccctgcatgaatggaggccagtgcagcagccgggacaagtgccagtgcccccccaacttcaccgggaagctgtgccagatccctgtgcatggagcctctgtgcccaagctgtaccagcacagccagcagcccgggaaggccctgggcacccacgtgatccacagcacccacaccctgcccctgactgtgaccagccagcagggcgtgaaggtgaagtttcctcccaacatcgtgaacatccacgtgaagcaccccccagaggcctctgtgcagatccaccaggtgtccagaattgatggccccaccggccagaagaccaaggaggcccagcccggccagagccaggtgtcctaccagggcctgcctgtgcagaagacccagaccatccacagcacctacagccaccagcaggtgatcccccacgtgtaccctgtggccgccaagacccagctgggccgctgcttccaggagaccatcggcagccagtgtgggaaggccctgcccggcctgagcaagcaggaggactgctgcggcaccgtgggcacctcctggggcttcaacaagtgccagaagtgccccaagaagcccagctaccacggctacaaccagatgatggagtgcctgcccggctacaagagggtgaacaacaccttctgccaggacatcaatgaatgccagctgcagggcgtgtgccccaacggggagtgcctgaacaccatgggcagctaccgctgcacctgcaagattggcttcggccctgaccccaccttcagcagctgtgtgcctgacccccctgtgatcagcgaggagaagggcccctgctaccgcctggtgagcagcggccggcagtgcatgcaccccctgtctgtgcacctgaccaagcagctgtgctgctgcagcgtgggcaaggcctggggcccccactgtgagaagtgccccctgcccggcacagctgccttcaaggagatctgccctgggggcatgggctacacagtgtctggagtgcacagaagaagacccatccaccaccacgtgggcaagggccctgtgtttgtgaagcccaagaacacccagcctgtggccaagagcacccaccccccacccctgcctgccaaggaggagcctgtggaggccctgaccttcagccgggagcacggccctggggtggccgagcctgaggtggccacagcccctcctgagaaggagatccccagcctggaccaggagaagaccaagctggagcccggccagccccagctgagccctggcatcagcaccatccacctgcacccccagtttcctggcatcgtgattgagaagaccagcccccctgtgcctgtggaggtggcccctgaggccagcaccagcagcgccagccaggtgattgcccccacccaggtgacagagatcaatgaatgtactgtgaacccagacatctgtggggccggccactgcatcaacctgcctgtgcgctacacctgcatctgctatgagggctaccgcttcagcgagcagcagaggaaatgtgtggacattgatgaatgtacccaggtgcagcacctgtgcagccagggccgctgtgaaaatacagagggcagcttcctgtgcatctgcccagctggcttcatggccagcgaggagggcaccaactgcattgatgtggatgaatgtctgcggccagatgtgtgtggggagggccactgtgtgaacacagtgggcgccttccgctgtgagtactgtgacagcggctacaggatgacccagaggggccgctgtgaggacattgatgagtgcctgaaccccagcacctgcccagatgagcagtgtgtgaacagccctggcagctaccagtgtgtgccctgcacagagggcttccggggctggaatggccagtgcctggatgtggatgagtgcctggagcccaacgtgtgtgccaatggagactgcagcaacctggagggcagctacatgtgcagctgccacaagggctacaccaggaccccagaccacaagcactgccgggacattgatgagtgccagcagggcaacctgtgtgtgaatggccagtgcaagaacacagagggcagcttccgctgcacctgtggccagggctaccagctgtctgctgccaaggaccagtgtgaggacattgatgagtgccagcaccgccacctgtgtgcccacggccagtgcaggaacacagagggcagcttccagtgtgtgtgtgaccagggctaccgggccagcggcctgggggaccactgtgaggacatcaatgaatgtctggaggacaagtctgtgtgccagagaggagactgcatcaacacagctggcagctatgactgcacctgcccagatggcttccagctggatgacaacaagacctgccaggacatcaatgaatgtgagcaccctggcctgtgtggcccccagggcgagtgcctgaacacagagggcagcttccactgtgtgtgccagcagggcttcagcatctctgcagatggccgcacctgtgaggacattgatgaatgtgtgaacaacacagtgtgtgacagccacggcttctgtgacaacacagctggcagcttccgctgcctgtgctaccagggcttccaggccccccaggacggccagggctgtgtggatgtgaatgaatgtgagctgctgtctggagtgtgtggggaggccttctgtgaaaatgtggagggcagcttcctgtgtgtgtgtgctgatgagaaccaggagtacagccccatgacaggccagtgccgcagcaggaccagcacagacctggatgtggatgtggaccagcccaaggaggagaagaaggagtgctactacaacctgaatgatgccagcctgtgtgacaacgtgctggccccaaatgtgaccaagcaggagtgctgctgcaccagcggcgtgggctggggagacaactgtgagatcttcccctgccctgtgctgggcacagctgagttcacagagatgtgccccaagggcaagggctttgtgcctgctggggagagcagcagcgaggccggaggagagaactacaaggatgctgatgagtgcctgctgtttggccaggagatctgcaagaatggcttctgcctgaacaccaggcctggctatgagtgctactgcaagcagggcacctactatgaccctgtgaagctgcagtgctttgacatggatgagtgccaggaccccagcagctgcattgatggccagtgtgtgaacacagagggcagctacaactgcttctgcacccaccccatggtgctggatgccagcgagaagcgctgcatccggcctgctgagagcaatgagcagatcgaggagacagatgtgtaccaggacctgtgctgggagcacctgagtgatgaatatgtgtgcagccggcccctggtgggcaagcagaccacctacacagagtgctgctgcctgtatggagaggcctggggcatgcagtgtgccctgtgccccctgaaggacagtgatgattatgcccagctgtgcaacatccctgtgactggaagacggcagccctacggcagagatgccctggtggacttcagcgagcagtacaccccagaggccgacccctacttcatccaggaccgcttcctgaacagctttgaggagctgcaggccgaggagtgtggcatcctgaatggctgtgaaaatggccgctgtgtgcgggtgcaggagggctacacctgtgactgctttgatggctaccacctggacacagccaagatgacctgtgtggatgtgaatgaatgtgatgagctgaacaacaggatgagcctgtgcaagaatgccaagtgcatcaacacagatggcagctacaagtgcctgtgcctgcccggctacgtgcccagcgacaagcccaactactgcacccccctgaacacagccctgaacctggagaaggacagcgacctggagtag

SEQ ID NO: 157359 - DNA, 4191 bp, synthetic construct
  misc_feature 1..4191: note = Description of Artificial Sequence: Synthetic coding sequence
  source 1..4191: mol_type = other DNA
atggacaccaagctgatgtgcctgctcttcttcttcagcctgccccccctgctggtgagcaaccacacaggccgcatcaaggtggtgttcacccccagcatctgcaaggtgacctgcaccaagggcagctgccagaacagctgtgagaagggcaacaccaccaccctcatcagtgaaaatggacatgctgctgacaccctgacagccaccaacttccgggtggtgatctgccacctgccctgcatgaatggaggccagtgcagcagccgggacaagtgccagtgcccccccaacttcaccgggaagctgtgccagatccctgtgcatggagcctctgtgcccaagctgtaccagcacagccagcagcccgggaaggccctgggcacccacgtgatccacagcacccacaccctgcccctgactgtgaccagccagcagggcgtgaaggtgaagtttcctcccaacatcgtgaacatccacgtgaagcaccccccagaggcctctgtgcagatccaccaggtgtccagaattgatggccccaccggccagaagaccaaggaggcccagcccggccagagccaggtgtcctaccagggcctgcctgtgcagaagacccagaccatccacagcacctacagccaccagcaggtgatcccccacgtgtaccctgtggccgccaagacccagctgggccgctgcttccaggagaccatcggcagccagtgtgggaaggccctgcccggcctgagcaagcaggaggactgctgcggcaccgtgggcacctcctggggcttcaacaagtgccagaagtgccccaagaagcccagctaccacggctacaaccagatgatggagtgcctgcccggctacaagagggtgaacaacaccttctgccaggacatcaatgaatgccagctgcagggcgtgtgccccaacggggagtgcctgaacaccatgggcagctaccgctgcacctgcaagattggcttcggccctgaccccaccttcagcagctgtgtgcctgacccccctgtgatcagcgaggagaagggcccctgctaccgcctggtgagcagcggccggcagtgcatgcaccccctgtctgtgcacctgaccaagcagctgtgctgctgcagcgtgggcaaggcctggggcccccactgtgagaagtgccccctgcccggcacagctgccttcaaggagatctgccctgggggcatgggctacacagtgtctggagtgcacagaagaagacccatccaccaccacgtgggcaagggccctgtgtttgtgaagcccaagaacacccagcctgtggccaagagcacccaccccccacccctgcctgccaaggaggagcctgtggaggccctgaccttcagccgggagcacggccctggggtggccgagcctgaggtggccacagcccctcctgagaaggagatccccagcctggaccaggagaagaccaagctggagcccggccagccccagctgagccctggcatcagcaccatccacctgcacccccagtttcctggcatcgtgattgagaagaccagcccccctgtgcctgtggaggtggcccctgaggccagcaccagcagcgccagccaggtgattgcccccacccaggtgacagagatcaatgaatgtactgtgaacccagacatctgtggggccggccactgcatcaacctgcctgtgcgctacacctgcatctgctatgagggctaccgcttcagcgagcagcagaggaaatgtgtggacattgatgaatgtacccaggtgcagcacctgtgcagccagggccgctgtgaaaatacagagggcagcttcctgtgcatctgcccagctggcttcatggccagcgaggagggcaccaactgcattgatgtggatgaatgtctgcggccagatgtgtgtggggagggccactgtgtgaacacagtgggcgccttccgctgtgagtactgtgacagcggctacaggatgacccagaggggccgctgtgaggacattgatgagtgcctgaaccccagcacctgcccagatgagcagtgtgtgaacagccctggcagctaccagtgtgtgccctgcacagagggcttccggggctggaatggccagtgcctggatgtggatgagtgcctggagcccaacgtgtgtgccaatggagactgcagcaacctggagggcagctacatgtgcagctgccacaagggctacaccaggaccccagaccacaagcactgccgggacattgatgagtgccagcagggcaacctgtgtgtgaatggccagtgcaagaacacagagggcagcttccgctgcacctgtggccagggctaccagctgtctgctgccaaggaccagtgtgaggacattgatgagtgccagcaccgccacctgtgtgcccacggccagtgcaggaacacagagggcagcttccagtgtgtgtgtgaccagggctaccgggccagcggcctgggggaccactgtgaggacatcaatgaatgtctggaggacaagtctgtgtgccagagaggagactgcatcaacacagctggcagctatgactgcacctgcccagatggcttccagctggatgacaacaagacctgccaggacatcaatgaatgtgagcaccctggcctgtgtggcccccagggcgagtgcctgaacacagagggcagcttccactgtgtgtgccagcagggcttcagcatctctgcagatggccgcacctgtgaggacattgatgaatgtgtgaacaacacagtgtgtgacagccacggcttctgtgacaacacagctggcagcttccgctgcctgtgctaccagggcttccaggccccccaggacggccagggctgtgtggatgtgaatgaatgtgagctgctgtctggagtgtgtggggaggccttctgtgaaaatgtggagggcagcttcctgtgtgtgtgtgctgatgagaaccaggagtacagccccatgacaggccagtgccgcagcaggaccagcacagacctggatgtggatgtggaccagcccaaggaggagaagaaggagtgctactacaacctgaatgatgccagcctgtgtgacaacgtgctggccccaaatgtgaccaagcaggagtgctgctgcaccagcggcgtgggctggggagacaactgtgagatcttcccctgccctgtgctgggcacagctgagttcacagagatgtgccccaagggcaagggctttgtgcctgctggggagagcagcagcgaggccggaggagagaactacaaggatgctgatgagtgcctgctgtttggccaggagatctgcaagaatggcttctgcctgaacaccaggcctggctatgagtgctactgcaagcagggcacctactatgaccctgtgaagctgcagtgctttgacatggatgagtgccaggaccccagcagctgcattgatggccagtgtgtgaacacagagggcagctacaactgcttctgcacccaccccatggtgctggatgccagcgagaagcgctgcatccggcctgctgagagcaatgagcagatcgaggagacagatgtgtaccaggacctgtgctgggagcacctgagtgatgaatatgtgtgcagccggcccctggtgggcaagcagaccacctacacagagtgctgctgcctgtatggagaggcctggggcatgcagtgtgccctgtgccccctgaaggacagtgatgattatgcccagctgtgcaacatccctgtgactggaagacggcagccctacggcagagatgccctggtggacttcagcgagcagtacaccccagaggccgacccctacttcatccaggaccgcttcctgaacagctttgaggagctgcaggccgaggagtgtggcatcctgaatggctgtgaaaatggccgctgtgtgcgggtgcaggagggctacacctgtgactgctttgatggctaccacctggacacagccaagatgacctgtgtggatgtgaatgaatgtgatgagctgaacaacaggatgagcctgtgcaagaatgccaagtgcatcaacacagatggcagctacaagtgcctgtgcctgcccggctacgtgcccagcgacaagcccaactactgcacccccctgaacacagccctgaacctggagaaggacagcgacctggagtag

SEQ ID NO: 157360 - DNA, 5166 bp, synthetic construct
  misc_feature 1..5166: note = Description of Artificial Sequence: Synthetic coding sequence
  source 1..5166: mol_type = other DNA
atggccggggcctggctgcgctggggcctgctgctgtgggccggcctgctggccagcagcgcccacggccgcctgcggcgcatcacctacgtggtgcaccctggccctggcctggccgccggggccctgcccctgagcggcccccccaggagcaggaccttcaacgtggccctgaatgcccgctacagccgcagcagcgctgctgctggggcccccagccgggccagccctggggtgcccagcgagaggaccaggaggaccagcaagccaggaggagctgccctgcagggcctgcggcccccacctcctcctcctcctgagcccgcccggcctgctgtgcctgggggccagctgcaccccaaccctgggggccaccctgctgctgcccccttcaccaagcagggccggcaggtggtgcgcagcaaggtgccccaggagacccagagcggcggcggcagccggctgcaggtgcaccagaagcagcagctgcagggcgtgaatgtgtgtggcggccgctgctgccacggctggagcaaggcccctggcagccagcgctgcaccaagcccagctgtgtgcccccctgccagaatggaggcatgtgcctgcggccccagctgtgtgtgtgcaagccaggcaccaagggcaaggcctgtgagaccatcgccgcccaggacaccagcagccctgtgtttggaggccagagccctggggccgccagctcctggggccccccagagcaggccgccaagcacaccagcagcaagaaggctgacaccctgccccgggtgtcccctgtggcccagatgaccctgaccctgaagcccaagcccagcgtgggcctgccccagcagatccacagccaggtgacccccctgagcagccagagcgtggtgatccaccacggccagacccaggagtatgtgctgaagcccaagtacttccctgcccagaagggcatctctggagagcagagcacagagggcagcttccccctgcgctacgtgcaggaccaggtggccgcccccttccagctgagcaaccacacaggccgcatcaaggtggtgttcacccccagcatctgcaaggtgacctgcaccaagggcagctgccagaacagctgtgagaagggcaacaccaccaccctcatcagtgaaaatggacatgctgctgacaccctgacagccaccaacttccgggtggtgatctgccacctgccctgcatgaatggaggccagtgcagcagccgggacaagtgccagtgcccccccaacttcaccgggaagctgtgccagatccctgtgcatggagcctctgtgcccaagctgtaccagcacagccagcagcccgggaaggccctgggcacccacgtgatccacagcacccacaccctgcccctgactgtgaccagccagcagggcgtgaaggtgaagtttcctcccaacatcgtgaacatccacgtgaagcaccccccagaggcctctgtgcagatccaccaggtgtccagaattgatggccccaccggccagaagaccaaggaggcccagcccggccagagccaggtgtcctaccagggcctgcctgtgcagaagacccagaccatccacagcacctacagccaccagcaggtgatcccccacgtgtaccctgtggccgccaagacccagctgggccgctgcttccaggagaccatcggcagccagtgtgggaaggccctgcccggcctgagcaagcaggaggactgctgcggcaccgtgggcacctcctggggcttcaacaagtgccagaagtgccccaagaagcccagctaccacggctacaaccagatgatggagtgcctgcccggctacaagagggtgaacaacaccttctgccaggacatcaatgaatgccagctgcagggcgtgtgccccaacggggagtgcctgaacaccatgggcagctaccgctgcacctgcaagattggcttcggccctgaccccaccttcagcagctgtgtgcctgacccccctgtgatcagcgaggagaagggcccctgctaccgcctggtgagcagcggccggcagtgcatgcaccccctgtctgtgcacctgaccaagcagctgtgctgctgcagcgtgggcaaggcctggggcccccactgtgagaagtgccccctgcccggcacagctgccttcaaggagatctgccctgggggcatgggctacacagtgtctggagtgcacagaagaagacccatccaccaccacgtgggcaagggccctgtgtttgtgaagcccaagaacacccagcctgtggccaagagcacccaccccccacccctgcctgccaaggaggagcctgtggaggccctgaccttcagccgggagcacggccctggggtggccgagcctgaggtggccacagcccctcctgagaaggagatccccagcctggaccaggagaagaccaagctggagcccggccagccccagctgagccctggcatcagcaccatccacctgcacccccagtttcctgtggtgattgagaagaccagcccccctgtgcctgtggaggtggcccctgaggccagcaccagcagcgccagccaggtgattgcccccacccaggtgacagagatcaatgaatgtactgtgaacccagacatctgtggggccggccactgcatcaacctgcctgtgcgctacacctgcatctgctatgagggctaccgcttcagcgagcagcagaggaaatgtgtggacattgatgagtgcacccaggtgcagcacctgtgcagccagggccgctgtgagaacacagagggcagcttcctgtgcatctgcccagctggcttcatggccagcgaggagggcaccaactgcattgatgtggatgagtgcctgcggccagatgtgtgtggggagggccactgtgtgaacacagtgggcgccttccgctgtgagtactgtgacagcggctacaggatgacccagaggggccgctgtgaagatattgatgaatgtctgaaccccagcacctgcccagatgagcagtgtgtgaacagccctggcagctaccagtgtgtgccctgcacagagggcttccggggctggaatggccagtgcctggatgtggatgaatgtctggagcccaacgtgtgtgccaacggggactgcagcaacctggagggcagctacatgtgcagctgccacaagggctacaccaggaccccagaccacaagcactgccgggacattgatgagtgccagcagggcaacctgtgtgtgaatggccagtgcaagaacacagagggcagcttccgctgcacctgtggccagggctaccagctgtctgctgccaaggaccagtgtgaagatattgatgagtgccagcaccgccacctgtgtgcccacggccagtgcaggaacacagagggcagcttccagtgtgtgtgtgaccagggctaccgggccagcggcctgggggaccactgtgaggacatcaatgaatgtctggaggacaagtctgtgtgccagagaggagactgcatcaacacagctggcagctatgactgcacctgcccagatggcttccagctggatgacaacaagacctgccaggacatcaatgaatgtgagcaccctggcctgtgtggcccccagggagaatgtctgaacacagagggcagcttccactgtgtgtgccagcagggcttcagcatctctgcagatggccgcacctgtgaagatattgatgaatgtgtgaacaacacagtgtgtgacagccacggcttctgtgacaacacagctggcagcttccgctgcctgtgctaccagggcttccaggccccccaggacggccagggctgtgtggatgtgaatgaatgtgagctgctgagcggcgtgtgtggggaggccttctgtgaaaatgtggagggcagcttcctgtgtgtgtgtgctgatgagaaccaggagtacagccccatgacaggccagtgccgcagcaggaccagcacagacctggatgtggatgtggaccagcccaaggaggagaagaaggagtgctactacaacctgaatgatgccagcctgtgtgacaacgtgctggcccccaacgtgaccaagcaggagtgctgctgcaccagcggcgtgggctggggagacaactgtgagatcttcccctgccctgtgctgggcacagctgagttcacagagatgtgccccaagggcaaaggatttgtgcctgctggggagagcagcagcgaggccggcggggagaactacaaggatgctgatgaatgtctgctgtttggccaggagatctgcaagaatggcttctgcctgaacacccggcccggctatgagtgctactgcaagcagggcacctactatgaccctgtgaagctgcagtgctttgacatggatgagtgccaggaccccagcagctgcattgatggccagtgtgtgaacacagagggcagctacaactgcttctgcacccaccccatggtgctggatgccagcgagaagcgctgcatccggcctgctgagagcaatgagcagatcgaggagacagatgtgtaccaggacctgtgctgggagcacctgagtgatgaatatgtgtgcagccggcccctggtgggcaagcagaccacctacacagagtgctgctgcctgtatggagaggcctggggcatgcagtgtgccctgtgccccctgaaggacagtgatgattatgcccagctgtgcaacatccctgtgacaggccggcggcagccctacggcagagatgccctggtggacttcagcgagcagtacaccccagaggccgacccctacttcatccaggaccgcttcctgaacagctttgaggagctgcaggccgaggagtgtggcatcctgaatggctgtgaaaatggccgctgtgtgcgggtgcaggagggctacacctgtgactgctttgatggctaccacctggacacagccaagatgacctgtgtggatgtgaatgaatgtgatgagctgaacaacaggatgagcctgtgcaagaatgccaagtgcatcaacacagatggcagctacaagtgcctgtgcctgcccggctacgtgcccagcgacaagcccaactactgcacccccctgaacacagccctgaacctggagaaggacagcgacctggagtag

SEQ ID NO: 157361 - DNA, 4188 bp, synthetic construct
  misc_feature 1..4188: note = Description of Artificial Sequence: Synthetic coding sequence
  source 1..4188: mol_type = other DNA
atggacaccaagctgatgtgcctgctcttcttcttcagcctgccccccctgctggtgagcaaccacacaggccgcatcaaggtggtgttcacccccagcatctgcaaggtgacctgcaccaagggcagctgccagaacagctgtgagaagggcaacaccaccaccctcatcagtgaaaatggacatgctgctgacaccctgacagccaccaacttccgggtggtgatctgccacctgccctgcatgaatggaggccagtgcagcagccgggacaagtgccagtgcccccccaacttcaccgggaagctgtgccagatccctgtgcatggagcctctgtgcccaagctgtaccagcacagccagcagcccgggaaggccctgggcacccacgtgatccacagcacccacaccctgcccctgactgtgaccagccagcagggcgtgaaggtgaagtttcctcccaacatcgtgaacatccacgtgaagcaccccccagaggcctctgtgcagatccaccaggtgtccagaattgatggccccaccggccagaagaccaaggaggcccagcccggccagagccaggtgtcctaccagggcctgcctgtgcagaagacccagaccatccacagcacctacagccaccagcaggtgatcccccacgtgtaccctgtggccgccaagacccagctgggccgctgcttccaggagaccatcggcagccagtgtgggaaggccctgcccggcctgagcaagcaggaggactgctgcggcaccgtgggcacctcctggggcttcaacaagtgccagaagtgccccaagaagcccagctaccacggctacaaccagatgatggagtgcctgcccggctacaagagggtgaacaacaccttctgccaggacatcaatgaatgccagctgcagggcgtgtgccccaacggggagtgcctgaacaccatgggcagctaccgctgcacctgcaagattggcttcggccctgaccccaccttcagcagctgtgtgcctgacccccctgtgatcagcgaggagaagggcccctgctaccgcctggtgagcagcggccggcagtgcatgcaccccctgtctgtgcacctgaccaagcagctgtgctgctgcagcgtgggcaaggcctggggcccccactgtgagaagtgccccctgcccggcacagctgccttcaaggagatctgccctgggggcatgggctacacagtgtctggagtgcacagaagaagacccatccaccaccacgtgggcaagggccctgtgtttgtgaagcccaagaacacccagcctgtggccaagagcacccaccccccacccctgcctgccaaggaggagcctgtggaggccctgaccttcagccgggagcacggccctggggtggccgagcctgaggtggccacagcccctcctgagaaggagatccccagcctggaccaggagaagaccaagctggagcccggccagccccagctgagccctggcatcagcaccatccacctgcacccccagtttcctgtggtgattgagaagaccagcccccctgtgcctgtggaggtggcccctgaggccagcaccagcagcgccagccaggtgattgcccccacccaggtgacagagatcaatgaatgtactgtgaacccagacatctgtggggccggccactgcatcaacctgcctgtgcgctacacctgcatctgctatgagggctaccgcttcagcgagcagcagaggaaatgtgtggacattgatgagtgcacccaggtgcagcacctgtgcagccagggccgctgtgagaacacagagggcagcttcctgtgcatctgcccagctggcttcatggccagcgaggagggcaccaactgcattgatgtggatgagtgcctgcggccagatgtgtgtggggagggccactgtgtgaacacagtgggcgccttccgctgtgagtactgtgacagcggctacaggatgacccagaggggccgctgtgaagatattgatgaatgtctgaaccccagcacctgcccagatgagcagtgtgtgaacagccctggcagctaccagtgtgtgccctgcacagagggcttccggggctggaatggccagtgcctggatgtggatgaatgtctggagcccaacgtgtgtgccaacggggactgcagcaacctggagggcagctacatgtgcagctgccacaagggctacaccaggaccccagaccacaagcactgccgggacattgatgagtgccagcagggcaacctgtgtgtgaatggccagtgcaagaacacagagggcagcttccgctgcacctgtggccagggctaccagctgtctgctgccaaggaccagtgtgaagatattgatgagtgccagcaccgccacctgtgtgcccacggccagtgcaggaacacagagggcagcttccagtgtgtgtgtgaccagggctaccgggccagcggcctgggggaccactgtgaggacatcaatgaatgtctggaggacaagtctgtgtgccagagaggagactgcatcaacacagctggcagctatgactgcacctgcccagatggcttccagctggatgacaacaagacctgccaggacatcaatgaatgtgagcaccctggcctgtgtggcccccagggagaatgtctgaacacagagggcagcttccactgtgtgtgccagcagggcttcagcatctctgcagatggccgcacctgtgaagatattgatgaatgtgtgaacaacacagtgtgtgacagccacggcttctgtgacaacacagctggcagcttccgctgcctgtgctaccagggcttccaggccccccaggacggccagggctgtgtggatgtgaatgaatgtgagctgctgagcggcgtgtgtggggaggccttctgtgaaaatgtggagggcagcttcctgtgtgtgtgtgctgatgagaaccaggagtacagccccatgacaggccagtgccgcagcaggaccagcacagacctggatgtggatgtggaccagcccaaggaggagaagaaggagtgctactacaacctgaatgatgccagcctgtgtgacaacgtgctggcccccaacgtgaccaagcaggagtgctgctgcaccagcggcgtgggctggggagacaactgtgagatcttcccctgccctgtgctgggcacagctgagttcacagagatgtgccccaagggcaaaggatttgtgcctgctggggagagcagcagcgaggccggcggggagaactacaaggatgctgatgaatgtctgctgtttggccaggagatctgcaagaatggcttctgcctgaacacccggcccggctatgagtgctactgcaagcagggcacctactatgaccctgtgaagctgcagtgctttgacatggatgagtgccaggaccccagcagctgcattgatggccagtgtgtgaacacagagggcagctacaactgcttctgcacccaccccatggtgctggatgccagcgagaagcgctgcatccggcctgctgagagcaatgagcagatcgaggagacagatgtgtaccaggacctgtgctgggagcacctgagtgatgaatatgtgtgcagccggcccctggtgggcaagcagaccacctacacagagtgctgctgcctgtatggagaggcctggggcatgcagtgtgccctgtgccccctgaaggacagtgatgattatgcccagctgtgcaacatccctgtgacaggccggcggcagccctacggcagagatgccctggtggacttcagcgagcagtacaccccagaggccgacccctacttcatccaggaccgcttcctgaacagctttgaggagctgcaggccgaggagtgtggcatcctgaatggctgtgaaaatggccgctgtgtgcgggtgcaggagggctacacctgtgactgctttgatggctaccacctggacacagccaagatgacctgtgtggatgtgaatgaatgtgatgagctgaacaacaggatgagcctgtgcaagaatgccaagtgcatcaacacagatggcagctacaagtgcctgtgcctgcccggctacgtgcccagcgacaagcccaactactgcacccccctgaacacagccctgaacctggagaaggacagcgacctggagtag

SEQ ID NO: 157362 - DNA, 4062 bp, synthetic construct
  misc_feature 1..4062: note = Description of Artificial Sequence: Synthetic coding sequence
  source 1..4062: mol_type = other DNA
atggacaccaagctgatgtgcctgctcttcttcttcagcctgccccccctgctggtgagcaaccacacaggccgcatcaaggtggtgttcacccccagcatctgcaaggtgacctgcaccaagggcagctgccagaacagctgtgagaagggcaacaccaccaccctcatcagtgaaaatggacatgctgctgacaccctgacagccaccaacttccgggtggtgatctgccacctgccctgcatgaatggaggccagtgcagcagccgggacaagtgccagtgcccccccaacttcaccgggaagctgtgccagatccctgtgcatggagcctctgtgcccaagctgtaccagcacagccagcagcccgggaaggccctgggcacccacgtgatccacagcacccacaccctgcccctgactgtgaccagccagcagggcgtgaaggtgaagtttcctcccaacatcgtgaacatccacgtgaagcaccccccagaggcctctgtgcagatccaccaggtgtccagaattgatggccccaccggccagaagaccaaggaggcccagcccggccagagccaggtgtcctaccagggcctgcctgtgcagaagacccagaccatccacagcacctacagccaccagcaggtgatcccccacgtgtaccctgtggccgccaagacccagctgggccgctgcttccaggagaccatcggcagccagtgtgggaaggccctgcccggcctgagcaagcaggaggactgctgcggcaccgtgggcacctcctggggcttcaacaagtgccagaagtgccccaagaagcccagctaccacggctacaaccagatgatggagtgcctgcccggctacaagagggtgaacaacaccttctgccaggacatcaatgaatgccagctgcagggcgtgtgccccaacggggagtgcctgaacaccatgggcagctaccgctgcacctgcaagattggcttcggccctgaccccaccttcagcagctgtgtgcctgacccccctgtgatcagcgaggagaagggcccctgctaccgcctggtgagcagcggccggcagtgcatgcaccccctgtctgtgcacctgaccaagcagctgtgctgctgcagcgtgggcaaggcctggggcccccactgtgagaagtgccccctgcccggcacagctgccttcaaggagatctgccctgggggcatgggctacacagtgtctggagtgcacagaagaagacccatccaccaccacgtgggcaagggccctgtgtttgtgaagcccaagaacacccagcctgtggccaagagcacccaccccccacccctgcctgccaaggaggagcctgtggaggccctgaccttcagccgggagcacggccctggggtggccgagcctgaggtggccacagcccctcctgagaaggagatccccagcctggaccaggagaagaccaagctggagcccggccagccccagctgagccctggcatcagcaccatccacctgcacccccagtttcctgtggtgattgagaagaccagcccccctgtgcctgtggaggtggcccctgaggccagcaccagcagcgccagccaggtgattgcccccacccaggtgacagagatcaatgaatgtactgtgaacccagacatctgtggggccggccactgcatcaacctgcctgtgcgctacacctgcatctgctatgagggctaccgcttcagcgagcagcagaggaaatgtgtggacattgatgagtgcacccaggtgcagcacctgtgcagccagggccgctgtgagaacacagagggcagcttcctgtgcatctgcccagctggcttcatggccagcgaggagggcaccaactgcattgatgtggatgagtgcctgcggccagatgtgtgtggggagggccactgtgtgaacacagtgggcgccttccgctgtgagtactgtgacagcggctacaggatgacccagaggggccgctgtgaagatattgatgaatgtctgaaccccagcacctgcccagatgagcagtgtgtgaacagccctggcagctaccagtgtgtgccctgcacagagggcttccggggctggaatggccagtgcctggatgtggatgaatgtctggagcccaacgtgtgtgccaacggggactgcagcaacctggagggcagctacatgtgcagctgccacaagggctacaccaggaccccagaccacaagcactgccgggacattgatgagtgccagcagggcaacctgtgtgtgaatggccagtgcaagaacacagagggcagcttccgctgcacctgtggccagggctaccagctgtctgctgccaaggaccagtgtgaagatattgatgagtgccagcaccgccacctgtgtgcccacggccagtgcaggaacacagagggcagcttccagtgtgtgtgtgaccagggctaccgggccagcggcctgggggaccactgtgaggacatcaatgaatgtctggaggacaagtctgtgtgccagagaggagactgcatcaacacagctggcagctatgactgcacctgcccagatggcttccagctggatgacaacaagacctgccaggacatcaatgaatgtgagcaccctggcctgtgtggcccccagggagaatgtctgaacacagagggcagcttccactgtgtgtgccagcagggcttcagcatctctgcagatggccgcacctgtgaagatgtgaatgaatgtgagctgctgagcggcgtgtgtggggaggccttctgtgaaaatgtggagggcagcttcctgtgtgtgtgtgctgatgagaaccaggagtacagccccatgacaggccagtgccgcagcaggaccagcacagacctggatgtggatgtggaccagcccaaggaggagaagaaggagtgctactacaacctgaatgatgccagcctgtgtgacaacgtgctggcccccaacgtgaccaagcaggagtgctgctgcaccagcggcgtgggctggggagacaactgtgagatcttcccctgccctgtgctgggcacagctgagttcacagagatgtgccccaagggcaaaggatttgtgcctgctggggagagcagcagcgaggccggcggggagaactacaaggatgctgatgaatgtctgctgtttggccaggagatctgcaagaatggcttctgcctgaacacccggcccggctatgagtgctactgcaagcagggcacctactatgaccctgtgaagctgcagtgctttgacatggatgagtgccaggaccccagcagctgcattgatggccagtgtgtgaacacagagggcagctacaactgcttctgcacccaccccatggtgctggatgccagcgagaagcgctgcatccggcctgctgagagcaatgagcagatcgaggagacagatgtgtaccaggacctgtgctgggagcacctgagtgatgaatatgtgtgcagccggcccctggtgggcaagcagaccacctacacagagtgctgctgcctgtatggagaggcctggggcatgcagtgtgccctgtgccccctgaaggacagtgatgattatgcccagctgtgcaacatccctgtgacaggccggcggcagccctacggcagagatgccctggtggacttcagcgagcagtacaccccagaggccgacccctacttcatccaggaccgcttcctgaacagctttgaggagctgcaggccgaggagtgtggcatcctgaatggctgtgaaaatggccgctgtgtgcgggtgcaggagggctacacctgtgactgctttgatggctaccacctggacacagccaagatgacctgtgtggatgtgaatgaatgtgatgagctgaacaacaggatgagcctgtgcaagaatgccaagtgcatcaacacagatggcagctacaagtgcctgtgcctgcccggctacgtgcccagcgacaagcccaactactgcacccccctgaacacagccctgaacctggagaaggacagcgacctggagtag

SEQ ID NO: 157363 - DNA, 4029 bp, synthetic construct
  misc_feature 1..4029: note = Description of Artificial Sequence: Synthetic coding sequence
  source 1..4029: mol_type = other DNA
atggacaccaagctgatgtgcctgctcttcttcttcagcctgccccccctgctggtgagcaaccacacaggccgcatcaaggtggtgttcacccccagcatctgcaaggtgacctgcaccaagggcagctgccagaacagctgtgagaagggcaacaccaccaccctcatcagtgaaaatggacatgctgctgacaccctgacagccaccaacttccgggtggtgatctgccacctgccctgcatgaatggaggccagtgcagcagccgggacaagtgccagtgcccccccaacttcaccgggaagctgtgccagatccctgtgcatggagcctctgtgcccaagctgtaccagcacagccagcagcccgggaaggccctgggcacccacgtgatccacagcacccacaccctgcccctgactgtgaccagccagcagggcgtgaaggtgaagtttcctcccaacatcgtgaacatccacgtgaagcaccccccagaggcctctgtgcagatccaccaggtgtccagaattgatggccccaccggccagaagaccaaggaggcccagcccggccagagccaggtgtcctaccagggcctgcctgtgcagaagacccagaccatccacagcacctacagccaccagcaggtgatcccccacgtgtaccctgtggccgccaagacccagctgggccgctgcttccaggagaccatcggcagccagtgtgggaaggccctgcccggcctgagcaagcaggaggactgctgcggcaccgtgggcacctcctggggcttcaacaagtgccagaagtgccccaagaagcccagctaccacggctacaaccagatgatggagtgcctgcccggctacaagagggtgaacaacaccttctgccaggacatcaatgaatgccagctgcagggcgtgtgccccaacggggagtgcctgaacaccatgggcagctaccgctgcacctgcaagattggcttcggccctgaccccaccttcagcagctgtgtgcctgacccccctgtgatcagcgaggagaagggcccctgctaccgcctggtgagcagcggccggcagtgcatgcaccccctgtctgtgcacctgaccaagcagctgtgctgctgcagcgtgggcaaggcctggggcccccactgtgagaagtgccccctgcccggcacagccaaggaggagcctgtggaggccctgaccttcagccgggagcacggccctggggtggccgagcctgaggtggccacagcccctcctgagaaggagatccccagcctggaccaggagaagaccaagctggagcccggccagccccagctgagccctggcatcagcaccatccacctgcacccccagtttcctgtggtgattgagaagaccagcccccctgtgcctgtggaggtggcccctgaggccagcaccagcagcgccagccaggtgattgcccccacccaggtgacagagatcaatgaatgtactgtgaacccagacatctgtggggccggccactgcatcaacctgcctgtgcgctacacctgcatctgctatgagggctaccgcttcagcgagcagcagaggaaatgtgtggacattgatgaatgtacccaggtgcagcacctgtgcagccagggccgctgtgaaaatacagagggcagcttcctgtgcatctgcccagctggcttcatggccagcgaggagggcaccaactgcattgatgtggatgaatgtctgcggccagatgtgtgtggggagggccactgtgtgaacacagtgggcgccttccgctgtgagtactgtgacagcggctacaggatgacccagaggggccgctgtgaggacattgatgagtgcctgaaccccagcacctgcccagatgagcagtgtgtgaacagccctggcagctaccagtgtgtgccctgcacagagggcttccggggctggaatggccagtgcctggatgtggatgagtgcctggagcccaacgtgtgtgccaatggagactgcagcaacctggagggcagctacatgtgcagctgccacaagggctacaccaggaccccagaccacaagcactgccgggacattgatgagtgccagcagggcaacctgtgtgtgaatggccagtgcaagaacacagagggcagcttccgctgcacctgtggccagggctaccagctgtctgctgccaaggaccagtgtgaggacattgatgagtgccagcaccgccacctgtgtgcccacggccagtgcaggaacacagagggcagcttccagtgtgtgtgtgaccagggctaccgggccagcggcctgggggaccactgtgaggacatcaatgaatgtctggaggacaagtctgtgtgccagagaggagactgcatcaacacagctggcagctatgactgcacctgcccagatggcttccagctggatgacaacaagacctgccaggacatcaatgaatgtgagcaccctggcctgtgtggcccccagggcgagtgcctgaacacagagggcagcttccactgtgtgtgccagcagggcttcagcatctctgcagatggccgcacctgtgaggacattgatgaatgtgtgaacaacacagtgtgtgacagccacggcttctgtgacaacacagctggcagcttccgctgcctgtgctaccagggcttccaggccccccaggacggccagggctgtgtggatgtgaatgaatgtgagctgctgtctggagtgtgtggggaggccttctgtgaaaatgtggagggcagcttcctgtgtgtgtgtgctgatgagaaccaggagtacagccccatgacaggccagtgccgcagcaggaccagcacagacctggatgtggatgtggaccagcccaaggaggagaagaaggagtgctactacaacctgaatgatgccagcctgtgtgacaacgtgctggccccaaatgtgaccaagcaggagtgctgctgcaccagcggcgtgggctggggagacaactgtgagatcttcccctgccctgtgctgggcacagctgagttcacagagatgtgccccaagggcaagggctttgtgcctgctggggagagcagcagcgaggccggaggagagaactacaaggatgctgatgagtgcctgctgtttggccaggagatctgcaagaatggcttctgcctgaacaccaggcctggctatgagtgctactgcaagcagggcacctactatgaccctgtgaagctgcagtgctttgacatggatgagtgccaggaccccagcagctgcattgatggccagtgtgtgaacacagagggcagctacaactgcttctgcacccaccccatggtgctggatgccagcgagaagcgctgcatccggcctgctgagagcaatgagcagatcgaggagacagatgtgtaccaggacctgtgctgggagcacctgagtgatgaatatgtgtgcagccggcccctggtgggcaagcagaccacctacacagagtgctgctgcctgtatggagaggcctggggcatgcagtgtgccctgtgccccctgaaggacagtgatgattatgcccagctgtgcaacatccctgtgactggaagacggcagccctacggcagagatgccctggtggacttcagcgagcagtacaccccagaggccgacccctacttcatccaggaccgcttcctgaacagctttgaggagctgcaggccgaggagtgtggcatcctgaatggctgtgaaaatggccgctgtgtgcgggtgcaggagggctacacctgtgactgctttgatggctaccacctggacacagccaagatgacctgtgtggatgtgaatgaatgtgatgagctgaacaacaggatgagcctgtgcaagaatgccaagtgcatcaacacagatggcagctacaagtgcctgtgcctgcccggctacgtgcccagcgacaagcccaactactgcacccccctgaacacagccctgaacctggagaaggacagcgacctggagtag

SEQ ID NO: 157364 - DNA, 5466 bp, synthetic construct
  misc_feature 1..5466: note = Description of Artificial Sequence: Synthetic coding sequence
  source 1..5466: mol_type = other DNA
atgaggcccaggaccaaggcccggagccctggccgggccctgaggaacccctggaggggcttcctgcccctgaccctggccctgtttgtgggcgccggccacgcccagagggaccctgtgggccgctatgagcctgctggaggagatgccaaccggctgcggcggcctgggggcagctacccagctgctgctgctgccaaggtgtacagcctcttccgggagcaggatgcccctgtggccggcctgcagcctgtggagcgggcccagcccggctggggcagcccccggcggcccacagaagctgaggcccggcggcccagccgggcccagcagagcagaagagtgcagcccccagcccagacccggcgcagcacccccctgggccagcagcagcctgcccccaggacccgggccgccccagccctgccccggctgggcaccccccagaggtctggagctgccccacccaccccaccccggggccgcctgaccggcagaaatgtgtgtggcggccagtgctgccccggctggaccacagccaacagcaccaaccactgcatcaagcctgtgtgtgagcccccctgccagaacagaggcagctgcagccggccccagctgtgtgtgtgccgcagcggcttccggggggcccgctgtgaggaggtgatcccagatgaggagtttgacccccagaacagccggctggccccccggcgctgggccgagaggagccccaacctgcggcgcagcagcgctgctggggagggcaccctggcccgggcccagcccccagccccccagagccccccagccccccagagccccccagctggcaccctgagcggcctgagccagacccaccccagccagcagcacgtgggcctgagcaggacagtgcggctgcaccccacagccacagccagcagccagctgagcagcaatgccctgcccccaggccctggcctggagcagagagatggcacccagcaggccgtgcccctggagcaccccagcagcccctggggcctgaacctgacagagaagatcaagaagatcaagatcgtgttcacccccaccatctgcaagcagacctgtgcccggggccactgtgccaacagctgtgagcggggggacaccaccaccctgtacagccagggcggccacggccatgaccccaagagcggcttccgcatctacttctgccagatcccctgcctgaatggaggccgctgcatcggcagagatgagtgctggtgcccagccaacagcacaggcaagttctgccacctgcccatcccccagcctgaccgggagcccccaggccggggcagccggccccgggccctgctggaggcccccctgaagcagagcaccttcaccctgcccctgagcaaccagctggcctctgtgaaccccagcctggtgaaggtgcacatccaccaccccccagaggcctctgtgcagatccaccaggtggcccaggtgcggggcggcgtggaggaggccctggtggagaacagcgtggagacccggcccccaccctggctgcctgccagccctggccacagcctgtgggacagcaacaacatcccagcccggtctggagagcccccccggcccctgcccccagctgccccccggccccggggcctgctgggccgctgctacctgaacacagtgaatggccagtgtgccaaccccctgctggagctgaccacccaggaggactgctgcggctctgtgggcgccttctggggcgtgaccctgtgtgccccctgcccccccaggcctgccagccctgtgattgaaaatggccagctggagtgcccccagggctacaagaggctgaacctgacccactgccaggacatcaatgaatgtctgaccctgggcctgtgcaaggatgctgaatgtgtgaacacccggggcagctacctgtgcacctgccggcccggcctgatgctggaccccagccgcagccgctgtgtgtctgacaaggccatctccatgctgcagggcctgtgctaccgcagcctgggccctggcacctgcaccctgcccctggcccagaggatcaccaagcagatctgctgctgcagccgggtgggcaaggcctggggctctgaatgtgagaagtgccccctgcctggaacagaggccttccgggagatctgcccagctggccacggctacacctacgccagcagtgacatccggctgtccatgaggaaggccgaggaggaggagctggcccggcccccccgggagcagggccagaggagcagcggggccctgcccggccctgctgagcggcagcccctgcgggtggtgacagacacctggctggaggccggcaccatcccagacaagggggacagccaggccggccaggtgaccacctctgtgacccacgccccagcctgggtgactggaaatgccaccaccccacccatgcctgagcagggcattgctgagatccaggaggagcaggtgacccccagcacagatgtgctggtgaccctgagcaccccaggcatcgacagatgtgccgccggggccaccaacgtgtgtggccctggcacctgtgtgaacctgcctgatggctaccgctgtgtgtgcagccctggctaccagctgcaccccagccaggcctactgcacagatgacaatgaatgtctgcgggacccctgcaagggcaagggccgctgcatcaacagagtgggcagctacagctgcttctgctacccaggctacaccctggccaccagcggggccacccaggagtgccaggacatcaatgaatgtgagcagcccggggtgtgcagcggcggccagtgcaccaacacagagggcagctaccactgtgaatgtgaccagggctacatcatggtgaggaagggccactgccaggacatcaatgaatgtcgccaccctggcacctgcccagatggccgctgtgtgaacagccctggcagctacacctgcctggcctgtgaggagggctaccggggccagagcggcagctgtgtggatgtgaatgaatgtctgaccccaggagtgtgtgcccacggcaagtgcaccaacctggagggcagcttccgctgcagctgtgagcagggctatgaggtgaccagtgatgagaagggctgccaggatgtggatgaatgtgccagccgggccagctgccccaccggcctgtgcctgaacacagagggcagctttgcctgcagcgcctgtgaaaatggctactgggtgaatgaagatggaacagcctgtgaggacctggatgaatgtgccttccctggggtgtgccccagcggcgtgtgcaccaacacagctggcagcttcagctgcaaggactgtgatggcggctaccggcccagccccctgggggacagctgtgaagatgtggatgaatgtgaggacccccagagcagctgcctgggcggggagtgcaagaacacagtgggcagctaccagtgcctgtgcccccagggcttccagctggccaacggcaccgtgtgtgaagatgtgaatgaatgcatgggagaggagcactgtgcccctcatggagaatgtctgaacagccacggcagcttcttctgcctgtgtgcccctggctttgtgtctgctgagggcggcaccagctgccaggatgtggatgaatgtgccaccacagacccctgtgtgggcggccactgtgtgaacacagagggcagcttcaactgcctgtgtgagaccggcttccagcccagccctgagagcggggagtgtgtggacattgatgaatgtgaggactatggagaccctgtgtgtggcacctggaagtgtgagaacagccctggcagctaccgctgtgtgctgggctgccagcccggcttccacatggcccccaacggggactgcatcgacattgatgaatgtgccaatgacaccatgtgtggcagccacggcttctgtgacaacacagatggcagcttccgctgcctgtgtgaccagggctttgagatcagccccagcggctgggactgtgtggatgtgaatgaatgtgagctgatgctggccgtgtgtggggccgccctgtgtgaaaatgtggagggcagcttcctgtgcctgtgtgccagtgacctggaggagtatgatgcccaggagggccactgccggcccagaggagctgggggccagagcatgtctgaggcccccactggagaccacgccccagcccccaccaggatggactgctacagcggccagaagggccacgccccctgcagctctgtgctgggcaggaacaccacccaggccgagtgctgctgcacccagggcgcctcctggggagatgcctgtgacctgtgccccagcgaggacagcgctgagttcagcgagatctgccccagcggcaagggctacatccctgtggagggcgcctggaccttcggccagaccatgtacacagatgctgatgaatgtgtgatcttcggccctggcctgtgccccaacggccgctgcctgaacacagtgcccggctacgtgtgcctgtgcaaccctggcttccactatgatgccagccacaagaagtgtgaagatcatgatgagtgccaggacctggcctgtgaaaatggagaatgtgtgaacacagagggcagcttccactgcttctgcagcccccccctgaccctggacctgagccagcagcgctgcatgaacagcaccagcagcacagaggacctgcctgaccatgacatccacatggacatctgctggaagaaggtgaccaatgatgtgtgcagcgagcccctgcggggccacaggaccacctacacagagtgctgctgccaggatggagaggcctggagccagcagtgtgccctgtgccccccaagaagcagcgaggtgtatgcccagctgtgcaatgtggccagaattgaagctgagcgggaggccggcgtgcacttccggcccggctatgaatatggccctggcccagatgacctgcactacagcatctacggcccagatggagcccccttctacaactacctgggcccagaagatactgtgcctgagcccgccttccccaacacagctggccacagcgctgacaggacccccatcctggagagccccctgcagcccagcgagctgcagccccactacgtggccagccaccctgagcccccagctggctttgagggcctgcaggccgaggagtgtggcatcctgaatggctgtgaaaatggccgctgtgtgcgggtgcgggagggctacacctgtgactgctttgagggcttccagctggatgctgcccacatggcctgtgtggatgtgaatgaatgtgatgacctgaatggacctgctgtgctgtgtgtgcacggctactgtgagaacacagagggcagctaccgctgccactgcagccctggctacgtggccgaggccggccccccccactgcacagccaaggagtag

SEQ ID NO: 157365 - DNA, 3912 bp, synthetic construct
  misc_feature 1..3912: note = Description of Artificial Sequence: Synthetic coding sequence
  source 1..3912: mol_type = other DNA
atgcctggccccagaggagctgctgggggcctggcccctgagatgagaggagctggagctgctggcctgctggccctgctgctgctgctgctgctgctgctgctgggcctgggcggccgggtggagggcggccctgctggggagagaggagctgggggcggcggggccctggcccgggagcgcttcaaggtggtgtttgcccctgtgatctgcaagaggacctgcctgaagggccagtgccgggacagctgccagcagggcagcaacatgaccctgattggagaaaatggccacagcacagacaccctgaccggcagcggcttccgggtggtggtgtgccccctgccctgcatgaatggaggccagtgcagcagcaggaaccagtgcctgtgccccccagacttcaccggccgcttctgccaggtgcctgctgggggcgccggcggcggcactggaggcagcggccctggcctgagcaggactggagccctgagcactggagccctgccccccctggcccctgagggggacagcgtggccagcaagcacgccatctatgctgtgcaggtgattgctgaccccccaggccctggagagggccccccagcccagcacgccgccttcctggtgcccctgggccctggccagatctctgctgaggtgcaggcccctcctcctgtggtgaatgtgcgggtgcaccaccccccagaggcctctgtgcaggtgcacagaattgagagcagcaatgctgagagcgctgcccccagccagcacctgctgccccaccccaagcccagccacccccggccccccacccagaagcccctgggccgctgcttccaggacaccctgcccaagcagccctgtggcagcaaccccctgcccggcctgaccaagcaggaggactgctgcggcagcattggaacagcctggggccagagcaagtgccacaagtgcccccagctgcagtacacaggagtgcagaagccaggccctgtgcggggggaggtgggcgctgactgcccccagggctacaagaggctgaacagcacccactgccaggacatcaatgaatgtgccatgcctggggtgtgcagacatggagactgcctgaacaaccctggcagctaccgctgtgtgtgccccccaggccacagcctgggccccagcaggacccagtgcatcgctgacaagccagaggagaagagcctgtgcttccggctggtgtccccagagcaccagtgccagcaccccctgaccacccggctgacccggcagctgtgctgctgcagcgtgggcaaggcctggggcgcccgctgccagcgctgccccacagatggaacagctgccttcaaggagatctgcccagctgggaagggctaccacatcctgaccagccaccagaccctgaccatccagggcgagagtgacttcagcctcttcctgcacccagatggcccccccaagccccagcagctgcctgagagccccagccaggcccctcctcctgaggacacagaggaggagcggggcgtgaccacagacagccctgtgtctgaggagaggtctgtgcagcagagccaccccacagccaccaccaccccagcccggccctacccagagctgatcagccggcccagcccccccaccatgcgctggttcctgcctgacctgccccccagccgctctgctgtggagatcgcccccacccaggtgacagaaacagatgaatgtcggctgaaccagaacatctgtggccatggagaatgtgtgcccggccccccagactacagctgccactgcaaccctggctaccgcagccacccccagcaccgctactgtgtggatgtgaatgaatgtgaggccgagccctgtggccctggccggggcatctgcatgaacacaggaggcagctacaactgccactgcaacagaggctaccgcctgcacgtgggcgccggcggccgcagctgtgtggacctgaatgaatgtgccaagccccacctgtgtggagatggcggcttctgcatcaacttccctggccactacaagtgcaactgctacccaggctaccgcctgaaggccagccggccccctgtgtgtgaggacattgatgagtgccgggaccccagcagctgcccagatggaaaatgtgagaacaagccaggcagcttcaagtgcatcgcctgccagcccggctaccgcagccagggcggcggggcctgcagagatgtgaatgaatgtgccgagggcagcccctgcagccctggctggtgtgagaacctgcccggcagcttccgctgcacctgtgcccagggctacgccccagccccagatggccgcagctgcctggatgtggatgaatgtgaggccggagatgtgtgtgacaatggcatctgcagcaacaccccaggcagcttccagtgccagtgcctgagcggctaccacctgagccgggacaggagccactgtgaagatattgatgaatgtgacttccctgctgcctgcattggaggagactgcatcaacaccaacggcagctaccgctgcctgtgcccccagggccaccggctggtgggcggcaggaagtgccaggacattgatgaatgttcccaggaccccagcctgtgcctgccccacggggcctgcaagaacctgcagggcagctatgtgtgtgtgtgtgatgagggcttcacccccacccaggaccagcacggctgtgaggaggtggagcagccccaccacaagaaggagtgctacctgaactttgatgacaccgtcttctgtgacagcgtgctggccaccaacgtgacccagcaggagtgctgctgcagcctgggcgccggctggggagaccactgtgagatctacccctgccctgtgtacagcagcgctgagttccacagcctgtgcccagatggcaagggctacacccaggacaacaacatcgtgaactacggcatcccagcccaccgggacattgatgagtgcatgctgtttggcagcgagatctgcaaggagggcaaatgtgtgaacacccagcccggctatgagtgctactgcaagcagggcttctactatgatggcaacctgctggagtgtgtggatgtggatgaatgtctggatgagagcaactgcagaaatggagtgtgtgagaacacccggggcggctaccgctgtgcctgcaccccacctgctgagtacagccctgcccagaggcagtgcctgagccctgaggagatggatgtggatgagtgccaggaccctgctgcctgccggcccggccgctgtgtgaacctgcccggcagctaccgctgtgaatgtcggcccccctgggtgcccggccccagcggccgggactgccagctgcctgagagccctgctgagcgggcccctgagaggagagatgtgtgctggagccagagaggagaagatggcatgtgtgccggccccctggccggccctgccctgacctttgatgactgctgctgccggcagggccggggctggggcgcccagtgccggccctgcccccccaggggggccggcagccactgccccaccagccagagcgagagcaacagcttctgggacaccagccccctgctgctgggcaagcccccaagagatgaggacagcagcgaggaggacagtgatgagtgccgctgtgtgtctggccgctgtgtgcccaggcctgggggcgctgtgtgtgagtgccctgggggcttccagctggatgccagccgggcccgctgtgtggacattgatgaatgtcgggagctgaaccagaggggcctgctgtgcaagtctgagcgctgtgtgaacaccagcggcagcttccgctgtgtgtgcaaggccggctttgcccggagccggccccacggggcctgtgtgccccagaggagaagatag

SEQ ID NO: 157366 - DNA, 792 bp, synthetic construct
  misc_feature 1..792: note = Description of Artificial Sequence: Synthetic coding sequence
  source 1..792: mol_type = other DNA
atgctgtttggaagtgagatctgcaaggagggcaaatgtgtgaacacccagcccggctatgagtgctactgcaagcagggcttctactatgatggcaacctgctggagtgtgtggatgtggatgagtgcctggatgagagcaactgcagaaatggagtgtgtgagaacacccggggcggctaccgctgtgcctgcaccccacctgctgagtacagccctgcccagaggcagtgcctgagccctgaggagatggatgtggatgagtgccaggaccctgctgcctgcaggcctggccgctgtgtgaacctgcccggcagctaccgctgtgagtgcaggcctccctgggtgcccggccccagcggccgggactgccagctgcctgagagccctgctgagcgggcccctgagaggagagatgtgtgctggagccagagaggagaagatggcatgtgtgccggccccctggccggccctgccctgacctttgatgactgctgctgccggcagggccggggctggggcgcccagtgccggccctgccccccaagaggagctggcagccactgccccaccagccagagcgagagcaacagcttctgggacaccagccccctgctgctgggcaagcccccaagagatgaggacagcagtgaagaagattctgatgaatgtcgctgtgtgtctgctgctgcctgccggggccgggccgccccctgtgcctctgtgcctgctgccagcagcagcaccccaccagccccagctgcctggatcagcaccagcgctgagagctag

SEQ ID NO: 157367 - DNA, 3771 bp, synthetic construct
  misc_feature 1..3771: note = Description of Artificial Sequence: Synthetic coding sequence
  source 1..3771: mol_type = other DNA
atgcctggccccagaggagctgctgggggcctggcccctgagatgagaggagctggagctgctggcctgctggccctgctgctgctgctgctgctgctgctgctgggcctgggcggccgggtggagggcggccctgctggggagagaggagctgggggcggcggggccctggcccgggagcgcttcaaggtggtgtttgcccctgtgatctgcaagaggacctgcctgaagggccagtgccgggacagctgccagcagggcagcaacatgaccctgattggagaaaatggccacagcacagacaccctgaccggcagcggcttccgggtggtggtgtgccccctgccctgcatgaatggaggccagtgcagcagcaggaaccagtgcctgtgccccccagacttcaccggccgcttctgccaggtgcctgctgggggcgccggcggcggcactggaggcagcggccctggcctgagcaggactggagccctgagcactggagccctgccccccctggcccctgagggggacagcgtggccagcaagcacgccatctatgctgtgcaggtgattgctgaccccccaggccctggagagggccccccagcccagcacgccgccttcctggtgcccctgggccctggccagatctctgctgaggtgcaggcccctcctcctgtggtgaatgtgcgggtgcaccaccccccagaggcctctgtgcaggtgcacagaattgagagcagcaatgctgagagcgctgcccccagccagcacctgctgccccaccccaagcccagccacccccggccccccacccagaagcccctgggccgctgcttccaggacaccctgcccaagcagccctgtggcagcaaccccctgcccggcctgaccaagcaggaggactgctgcggcagcattggaacagcctggggccagagcaagtgccacaagtgcccccagctgcagtacacaggagtgcagaagccaggccctgtgcggggggaggtgggcgctgactgcccccagggctacaagaggctgaacagcacccactgccaggacatcaatgaatgtgccatgcctggggtgtgcagacatggagactgcctgaacaaccctggcagctaccgctgtgtgtgccccccaggccacagcctgggccccagcaggacccagtgcatcgctgacaagccagaggagaagagcctgtgcttccggctggtgtccccagagcaccagtgccagcaccccctgaccacccggctgacccggcagctgtgctgctgcagcgtgggcaaggcctggggcgcccgctgccagcgctgccccacagatggaacagctgccttcaaggagatctgcccagctgggaagggctaccacatcctgaccagccaccagaccctgaccatccagggcgagagtgacttcagcctcttcctgcacccagatggcccccccaagccccagcagctgcctgagagccccagccaggcccctcctcctgaggacacagaggaggagcggggcgtgaccacagacagccctgtgtctgaggagaggtctgtgcagcagagccaccccacagccaccaccaccccagcccggccctacccagagctgatcagccggcccagcccccccaccatgcgctggttcctgcctgacctgccccccagccgctctgctgtggagatcgcccccacccaggtgacagaaacagatgaatgtcggctgaaccagaacatctgtggccatggagaatgtgtgcccggccccccagactacagctgccactgcaaccctggctaccgcagccacccccagcaccgctactgtgtggatgtgaatgaatgtgaggccgagccctgtggccctggccggggcatctgcatgaacacaggaggcagctacaactgccactgcaacagaggctaccgcctgcacgtgggcgccggcggccgcagctgtgtggacctgaatgaatgtgccaagccccacctgtgtggagatggcggcttctgcatcaacttccctggccactacaagtgcaactgctacccaggctaccgcctgaaggccagccggccccctgtgtgtgaggacattgatgagtgccgggaccccagcagctgcccagatggaaaatgtgagaacaagccaggcagcttcaagtgcatcgcctgccagcccggctaccgcagccagggcggcggggcctgcagagatgtgaatgaatgtgccgagggcagcccctgcagccctggctggtgtgagaacctgcccggcagcttccgctgcacctgtgcccagggctacgccccagccccagatggccgcagctgcctggatgtggatgaatgtgaggccggagatgtgtgtgacaatggcatctgcagcaacaccccaggcagcttccagtgccagtgcctgagcggctaccacctgagccgggacaggagccactgtgaagatattgatgaatgtgacttccctgctgcctgcattggaggagactgcatcaacaccaacggcagctaccgctgcctgtgcccccagggccaccggctggtgggcggcaggaagtgccaggacattgatgaatgttcccaggaccccagcctgtgcctgccccacggggcctgcaagaacctgcagggcagctatgtgtgtgtgtgtgatgagggcttcacccccacccaggaccagcacggctgtgaggaggtggagcagccccaccacaagaaggagtgctacctgaactttgatgacaccgtcttctgtgacagcgtgctggccaccaacgtgacccagcaggagtgctgctgcagcctgggcgccggctggggagaccactgtgagatctacccctgccctgtgtacagcagcgctgagttccacagcctgtgcccagatggcaagggctacacccaggacaacaacatcgtgaactacggcatcccagcccaccgggacattgatgagtgcatgctgtttggcagcgagatctgcaaggagggcaaatgtgtgaacacccagcccggctatgagtgctactgcaagcagggcttctactatgatggcaacctgctggagtgtgtggatgtggatgaatgtctggatgagagcaactgcagaaatggagtgtgtgagaacacccggggcggctaccgctgtgcctgcaccccacctgctgagtacagccctgcccagaggcagtgcctgagccctgaggagatggagcgggcccctgagaggagagatgtgtgctggagccagagaggagaagatggcatgtgtgccggccccctggccggccctgccctgacctttgatgactgctgctgccggcagggccggggctggggcgcccagtgccggccctgccccccaagaggagctggcagccactgccccaccagccagagcgagagcaacagcttctgggacaccagccccctgctgctgggcaagcccccaagagatgaggacagcagtgaagaagattctgatgaatgtcgctgtgtgtctggccgctgtgtgcccaggcctggaggagctgtgtgtgaatgtcctgggggcttccagctggatgccagccgggcccgctgtgtggacattgatgagtgccgggagctgaaccagaggggcctgctgtgcaagtctgagcgctgtgtgaacaccagcggcagcttccgctgtgtgtgcaaggccggctttgcccggagccggccccatggagcctgtgtgccccagaggagaagatag

SEQ ID NO: 157368 - DNA, 921 bp, synthetic construct
  misc_feature 1..921: note = Description of Artificial Sequence: Synthetic coding sequence
  source 1..921: mol_type = other DNA
atgctgtttggaagtgagatctgcaaggagggcaaatgtgtgaacacccagcccggctatgagtgctactgcaagcagggcttctactatgatggcaacctgctggagtgtgtggatgtggatgagtgcctggatgagagcaactgcagaaatggagtgtgtgagaacacccggggcggctaccgctgtgcctgcaccccacctgctgagtacagccctgcccagaggcagtgcctgagccctgaggagatggatgtggatgagtgccaggaccctgctgcctgcaggcctggccgctgtgtgaacctgcccggcagctaccgctgtgagtgcaggcctccctgggtgcccggccccagcggccgggactgccagctgcctgagagccctgctgagcgggcccctgagaggagagatgtgtgctggagccagagaggagaagatggcatgtgtgccggccccctggccggccctgccctgacctttgatgactgctgctgccggcagggccggggctggggcgcccagtgccggccctgccccccaagaggagctggcagccactgccccaccagccagagcgagagcaacagcttctgggacaccagccccctgctgctgggcaagcccccaagagatgaggacagcagtgaagaagattctgatgaatgtcgctgtgtgtctggccgctgtgtgcccaggcctggaggagctgtgtgtgaatgtcctgggggcttccagctggatgccagccgggcccgctgtgtggacattgatgagtgccgggagctgaaccagaggggcctgctgtgcaagtctgagcgctgtgtgaacaccagcggcagcttccgctgtgtgtgcaaggccggctttgcccggagccggccccatggagcctgtgtgccccagaggagaagatag

SEQ ID NO: 157369 - DNA, 3414 bp, synthetic construct
  misc_feature 1..3414: note = Description of Artificial Sequence: Synthetic coding sequence
  source 1..3414: mol_type = other DNA
atgaccctcatcggggagaatggccacagcacagacaccctgactggaagtggcttccgggtggtggtgtgccccctgccctgcatgaatggaggccagtgcagcagcaggaaccagtgcctgtgccccccagacttcaccggccgcttctgccaggtgcctgctggaggagctgggggcggcaccggcggcagcggccctggcctgagcaggactggagccctgagcactggagccctgccccccctggcccctgagggggacagcgtggccagcaagcacgccatctatgctgtgcaggtgattgctgaccccccaggccctggagagggccccccagcccagcacgccgccttcctggtgcccctgggccctggccagatctctgctgaggtgcaggcccctcctcctgtggtgaatgtgcgggtgcaccaccccccagaggcctctgtgcaggtgcaccgcatcgagagcagcaatgctgagagcgctgcccccagccagcacctgctgccccaccccaagcccagccaccccaggcctcccacccagaagcccctgggccgctgcttccaggacaccctgcccaagcagccctgtggcagcaaccccctgcccggcctgaccaagcaggaggactgctgcggcagcatcggcacagcctggggccagagcaagtgccacaagtgcccccagctgcagtacacaggagtgcagaagccaggccctgtgcggggggaggtgggcgctgactgcccccagggctacaagaggctgaacagcacccactgccaggacatcaatgaatgtgccatgcctggggtgtgccgccacggggactgcctgaacaaccctggcagctaccgctgtgtgtgccccccaggccacagcctgggccccagcaggacccagtgcatcgctgacaagccagaggagaagagcctgtgcttccggctggtgtccccagagcaccagtgccagcaccccctgaccacccggctgacccggcagctgtgctgctgcagcgtgggcaaggcctggggcgcccgctgccagcgctgccccacagatggaacagctgccttcaaggagatctgcccagctgggaagggctaccacatcctgaccagccaccagaccctgaccatccagggcgagagtgacttcagcctcttcctgcacccagatggcccccccaagccccagcagctgcctgagagccccagccaggcccctcctcctgaggacacagaggaggagcggggcgtgaccacagacagccctgtgtctgaggagaggtctgtgcagcagagccaccccacagccaccaccaccccagcccggccctacccagagctgatcagccggcccagcccccccaccatgcgctggttcctgcctgacctgccccccagccgctctgctgtggagatcgcccccacccaggtgacagaaacagatgagtgccgcctgaaccagaacatctgtggccacggggagtgtgtgcccggccccccagactacagctgccactgcaaccctggctaccgcagccacccccagcaccgctactgtgtggatgtgaatgaatgtgaggccgagccctgtggccctggccggggcatctgcatgaacacaggaggcagctacaactgccactgcaacagaggctaccgcctgcacgtgggcgctgggggccgcagctgtgtggacctgaatgaatgtgccaagccccacctgtgtggagatggcggcttctgcatcaacttccctggccactacaagtgcaactgctacccaggctaccgcctgaaggccagcaggcctcctgtgtgtgaagatattgatgaatgtcgggaccccagcagctgcccagatggaaaatgtgagaacaagccaggcagcttcaagtgcatcgcctgccagcccggctaccgcagccagggcggcggggcctgcagagatgtgaatgaatgtgccgagggcagcccctgcagccctggctggtgtgagaacctgcccggcagcttccgctgcacctgtgcccagggctacgccccagccccagatggccgcagctgcctggatgtggatgaatgtgaggccggagatgtgtgtgacaatggcatctgcagcaacaccccaggcagcttccagtgccagtgcctgagcggctaccacctgagccgggacaggagccactgtgaggacattgatgaatgtgacttccctgctgcctgcatcggcggggactgcatcaacaccaacggcagctaccgctgcctgtgcccccagggccaccggctggtgggcggcaggaagtgccaggacattgatgagtgcagccaggaccccagcctgtgcctgccccatggagcctgcaagaacctgcagggcagctatgtgtgtgtgtgtgatgagggcttcacccccacccaggaccagcacggctgtgaggaggtggagcagccccaccacaagaaggagtgctacctgaactttgatgacacagtgttctgtgacagcgtgctggccaccaacgtgacccagcaggagtgctgctgcagcctgggcgccggctggggagaccactgtgagatctacccctgccctgtgtacagcagcgctgagttccacagcctgtgcccagatggcaagggctacacccaggacaacaacatcgtgaactacggcatcccagcccaccgggacattgatgagtgcatgctgtttggaagtgagatctgcaaggagggcaaatgtgtgaacacccagcccggctatgagtgctactgcaagcagggcttctactatgatggcaacctgctggagtgtgtggatgtggatgagtgcctggatgagagcaactgcagaaatggagtgtgtgagaacacccggggcggctaccgctgtgcctgcaccccacctgctgagtacagccctgcccagaggcagtgcctgagccctgaggagatggatgtggatgagtgccaggaccctgctgcctgcaggcctggccgctgtgtgaacctgcccggcagctaccgctgtgagtgcaggcctccctgggtgcccggccccagcggccgggactgccagctgcctgagagccctgctgagcgggcccctgagaggagagatgtgtgctggagccagagaggagaagatggcatgtgtgccggccccctggccggccctgccctgacctttgatgactgctgctgccggcagggccggggctggggcgcccagtgccggccctgccccccaagaggagctggcagccactgccccaccagccagagcgagagcaacagcttctgggacaccagccccctgctgctgggcaagcccccaagagatgaggacagcagtgaagaagattctgatgaatgtcgctgtgtgtctggatag

SEQ ID NO: 157370 - DNA, 2202 bp, synthetic construct
  misc_feature 1..2202: note = Description of Artificial Sequence: Synthetic coding sequence
  source 1..2202: mol_type = other DNA
atgcctgctgagacagatgaatgtcggctgaaccagaacatctgtggccatggagaatgtgtgcccggccccccagactacagctgccactgcaaccctggctaccgcagccacccccagcaccgctactgtgtggatgtgaatgaatgtgaggccgagccctgtggccctggccggggcatctgcatgaacacaggaggcagctacaactgccactgcaacagaggctaccgcctgcacgtgggcgccggcggccgcagctgtgtggacctgaatgaatgtgccaagccccacctgtgtggagatggcggcttctgcatcaacttccctggccactacaagtgcaactgctacccaggctaccgcctgaaggccagccggccccctgtgtgtgaggacattgatgagtgccgggaccccagcagctgcccagatggaaaatgtgagaacaagccaggcagcttcaagtgcatcgcctgccagcccggctaccgcagccagggcggcggggcctgcagagatgtgaatgaatgtgccgagggcagcccctgcagccctggctggtgtgagaacctgcccggcagcttccgctgcacctgtgcccagggctacgccccagccccagatggccgcagctgcctggatgtggatgaatgtgaggccggagatgtgtgtgacaatggcatctgcagcaacaccccaggcagcttccagtgccagtgcctgagcggctaccacctgagccgggacaggagccactgtgaagatattgatgaatgtgacttccctgctgcctgcattggaggagactgcatcaacaccaacggcagctaccgctgcctgtgcccccagggccaccggctggtgggcggcaggaagtgccaggacattgatgaatgttcccaggaccccagcctgtgcctgccccacggggcctgcaagaacctgcagggcagctatgtgtgtgtgtgtgatgagggcttcacccccacccaggaccagcacggctgtgaggaggtggagcagccccaccacaagaaggagtgctacctgaactttgatgacaccgtcttctgtgacagcgtgctggccaccaacgtgacccagcaggagtgctgctgcagcctgggcgccggctggggagaccactgtgagatctacccctgccctgtgtacagcagcgctgagttccacagcctgtgcccagatggcaagggctacacccaggacaacaacatcgtgaactacggcatcccagcccaccgggacattgatgagtgcatgctgtttggcagcgagatctgcaaggagggcaaatgtgtgaacacccagcccggctatgagtgctactgcaagcagggcttctactatgatggcaacctgctggagtgtgtggatgtggatgaatgtctggatgagagcaactgcagaaatggagtgtgtgagaacacccggggcggctaccgctgtgcctgcaccccacctgctgagtacagccctgcccagaggcagtgcctgagccctgaggagatggatgtggatgagtgccaggaccctgctgcctgccggcccggccgctgtgtgaacctgcccggcagctaccgctgtgaatgtcggcccccctgggtgcccggccccagcggccgggactgccagctgcctgagagccctgctgagcgggcccctgagaggagagatgtgtgctggagccagagaggagaagatggcatgtgtgccggccccctggccggccctgccctgacctttgatgactgctgctgccggcagggccggggctggggcgcccagtgccggccctgcccccccaggggggccggcagccactgccccaccagccagagcgagagcaacagcttctgggacaccagccccctgctgctgggcaagcccccaagagatgaggacagcagcgaggaggacagtgatgagtgccgctgtgtgtctggccgctgtgtgcccaggcctgggggcgctgtgtgtgagtgccctgggggcttccagctggatgccagccgggcccgctgtgtggacattgatgaatgtcgggagctgaaccagaggggcctgctgtgcaagtctgagcgctgtgtgaacaccagcggcagcttccgctgtgtgtgcaaggccggctttgcccggagccggccccacggggcctgtgtgccccagaggagaagatag

SEQ ID NO: 157371 - DNA, 2649 bp, synthetic construct
  misc_feature 1..2649: note = Description of Artificial Sequence: Synthetic coding sequence
  source 1..2649: mol_type = other DNA
atgaccctcatcggggagaatggccacagcacagacaccctgactggaagtggcttccgggtggccgacaagccagaggagaagagcctgtgcttccggctggtgtccccagagcaccagtgccagcaccccctgaccacccggctgacccggcagctgtgctgctgcagcgtgggcaaggcctggggcgcccgctgccagcgctgccccacagatggaacagctgccttcaaggagatctgcccagctgggaagggctaccacatcctgaccagccaccagaccctgaccatccagggcgagagtgacttcagcctcttcctgcacccagatggcccccccaagccccagcagctgcctgagagccccagccaggcccctcctcctgaggacacagaggaggagcggggcgtgaccacagacagccctgtgtctgaggagaggtctgtgcagcagagccaccccacagccaccaccaccccagcccggccctacccagagctgatcagccggcccagcccccccaccatgcgctggttcctgcctgacctgccccccagccgctctgctgtggagatcgcccccacccaggtgacagaaacagatgaatgtcggctgaaccagaacatctgtggccatggagaatgtgtgcccggccccccagactacagctgccactgcaaccctggctaccgcagccacccccagcaccgctactgtgtggatgtgaatgaatgtgaggccgagccctgtggccctggccggggcatctgcatgaacacaggaggcagctacaactgccactgcaacagaggctaccgcctgcacgtgggcgccggcggccgcagctgtgtggacctgaatgaatgtgccaagccccacctgtgtggagatggcggcttctgcatcaacttccctggccactacaagtgcaactgctacccaggctaccgcctgaaggccagccggccccctgtgtgtgaggacattgatgagtgccgggaccccagcagctgcccagatggaaaatgtgagaacaagccaggcagcttcaagtgcatcgcctgccagcccggctaccgcagccagggcggcggggcctgcagagatgtgaatgaatgtgccgagggcagcccctgcagccctggctggtgtgagaacctgcccggcagcttccgctgcacctgtgcccagggctacgccccagccccagatggccgcagctgcctggatgtggatgaatgtgaggccggagatgtgtgtgacaatggcatctgcagcaacaccccaggcagcttccagtgccagtgcctgagcggctaccacctgagccgggacaggagccactgtgaagatattgatgaatgtgacttccctgctgcctgcattggaggagactgcatcaacaccaacggcagctaccgctgcctgtgcccccagggccaccggctggtgggcggcaggaagtgccaggacattgatgaatgttcccaggaccccagcctgtgcctgccccacggggcctgcaagaacctgcagggcagctatgtgtgtgtgtgtgatgagggcttcacccccacccaggaccagcacggctgtgaggaggtggagcagccccaccacaagaaggagtgctacctgaactttgatgacaccgtcttctgtgacagcgtgctggccaccaacgtgacccagcaggagtgctgctgcagcctgggcgccggctggggagaccactgtgagatctacccctgccctgtgtacagcagcgctgagttccacagcctgtgcccagatggcaagggctacacccaggacaacaacatcgtgaactacggcatcccagcccaccgggacattgatgagtgcatgctgtttggcagcgagatctgcaaggagggcaaatgtgtgaacacccagcccggctatgagtgctactgcaagcagggcttctactatgatggcaacctgctggagtgtgtggatgtggatgaatgtctggatgagagcaactgcagaaatggagtgtgtgagaacacccggggcggctaccgctgtgcctgcaccccacctgctgagtacagccctgcccagaggcagtgcctgagccctgaggagatggagcgggcccctgagaggagagatgtgtgctggagccagagaggagaagatggcatgtgtgccggccccctggccggccctgccctgacctttgatgactgctgctgccggcagggccggggctggggcgcccagtgccggccctgccccccaagaggagctggcagccactgccccaccagccagagcgagagcaacagcttctgggacaccagccccctgctgctgggcaagcccccaagagatgaggacagcagtgaagaagattctgatgaatgtcgctgtgtgtctggccgctgtgtgcccaggcctggaggagctgtgtgtgaatgtcctgggggcttccagctggatgccagccgggcccgctgtgtggacattgatgagtgccgggagctgaaccagaggggcctgctgtgcaagtctgagcgctgtgtgaacaccagcggcagcttccgctgtgtgtgcaaggccggctttgcccggagccggccccatggagcctgtgtgccccagaggagaagatag

SEQ ID NO: 157372 - DNA, 4761 bp, synthetic construct
  misc_feature 1..4761: note = Description of Artificial Sequence: Synthetic coding sequence
  source 1..4761: mol_type = other DNA
atgggagatgtgaaggccctgctgtttgtggccgccgcccgggcccggcggctgggcggggccgccgccagcgagagcctggccgtgtctgaggccttctgccgggtgcgcagctgccagcccaagaagtgtgccggcccccagcgctgcctgaaccctgtgcctgctgtgcccagccccagccccagcgtgaggaagaggcaggtgtccctgaactggcagcccctgaccctgcaggaggcccgggccctgctgaagagaagaagaccccggggccctgggggccggggcctgctgcggcggcggcccccccagagggccccagctgggaaggcccctgtgctgtgccccctcatctgccacaacggcggcgtgtgtgtgaagccagaccgctgcctgtgccccccagactttgctgggaagttctgccagctgcacagcagcggggcccggcccccagccccagctgtgcccggcctgaccaggtctgtgtacaccatgcccctggccaaccacagagatgatgaacatggagtggcctccatggtgtctgtgcacgtggagcacccccaggaggcctctgtggtggtgcaccaggtggagcgggtgtctggcccctgggaggaggctgatgctgaggccgtggcccgggcagaggccgccgcccgggcagaggccgccgccccctacacagtgctggcccagagcgccccccgggaggatggctacagtgatgccagcggcttcggctactgcttccgggagctgcggggcggggagtgtgccagccccctgcccggcctgcggacccaggaggtgtgctgccgcggggccggcctggcctggggcgtgcatgactgccagctgtgcagcgagcggctgggcaacagcgagcgggtgtctgccccagatggcccctgccccactggatttgagcgggtgaatggcagctgtgaagatgtggatgaatgtgccaccggcggccgctgccagcacggggagtgtgccaacacccggggcggctacacctgtgtgtgcccagatggcttcctgctggacagcagccgcagcagctgcatcagccagcacgtgatcagcgaggccaagggcccctgcttccgggtgctgagagatggcggctgcagcctgcccatcctgaggaacatcaccaagcagatctgctgctgcagccgggtgggcaaggcctggggccggggctgccagctgtgccccccatttggaagtgagggcttccgggagatctgcccagctggccctggctaccactacagcgccagtgacctgcgctacaacacccggcccctgggccaggagcccccccgggtgtccctgagccagcccaggaccctgcctgccaccagccggcccagcgctggcttcctgcccacccaccggctggagcccaggcctgagcccaggccagaccccaggcctggccctgagctgcccctgcccagcatcccagcctggacaggccctgagatccctgagagcggccccagcagcggcatgtgccagaggaacccccaggtgtgtggccctggccgctgcatcagccggcccagcggctacacctgtgcctgtgacagcggcttccggctgagcccccagggcacccgctgcattgatgtggatgaatgtagaagagtgcccccaccctgtgcccctggccgctgtgagaacagccctggcagcttccgctgtgtgtgtggccctggcttccgggccggccccagggctgctgaatgtctggatgtggatgagtgccaccgggtgcccccaccctgtgacctgggccgctgtgagaacaccccaggcagcttcctgtgtgtgtgcccagctggctaccaggccgccccccacggggccagctgccaggatgtggatgaatgtacccagagccctggcctgtgtggccgcggggcctgcaagaacctgcccggcagcttccgctgtgtgtgcccagctggcttccggggcagcgcctgtgaggaggatgtggatgaatgtgcccaggagcccccaccctgtggccctggccgctgtgacaacacagctggcagcttccactgtgcctgcccagctggcttccgcagccggggccctggggccccctgccaggatgtggatgaatgtgcccggagccccccaccctgcacctacggccgctgtgagaacacagagggcagcttccagtgtgtgtgccccatgggcttccagcccaacacagctggctctgaatgtgaagatgtggatgaatgtgagaaccacctggcctgccccggccaggagtgtgtgaacagccctggcagcttccagtgcaggacctgccccagcggccaccacctgcaccggggccgctgcacagatgtggatgagtgcagcagcggggccccaccctgtggcccccacggccactgcaccaacacagagggcagcttccgctgcagctgtgcccctggctaccgggcccccagcggccggcccggcccctgtgctgatgtgaatgaatgtctggagggggacttctgcttcccccacggggagtgcctgaacacagatggcagctttgcctgcacctgtgcccctggctaccggcccggccccaggggggccagctgcctggatgtggatgagtgcagcgaggaggacctgtgccagagcggcatctgcaccaacacagatggcagctttgagtgcatctgccccccaggccacagagctggccctgacctggccagctgcctggatgtggatgaatgtcgggagcggggccctgccctgtgtggcagccagagatgtgagaacagccctggcagctaccgctgtgtgcgggactgtgaccccggctaccacgccggccctgagggcacctgtgatgatgtggatgagtgccaggagtatggccctgagatctgtggggcccagagatgtgagaacaccccaggcagctaccgctgcaccccagcctgtgaccccggctaccagcccacccctgggggcggctgccaggatgtggatgaatgtagaaacagaagcttctgtggggcccatgctgtgtgccagaacctgcccggcagcttccagtgcctgtgtgaccagtatgagggcgccagagatggccgccactgtgtggatgtgaatgaatgtgagaccctgcagggcgtgtgtggggccgccctgtgtgaaaatgtggagggcagcttcctgtgtgtgtgccccaacagccctgaggagtttgaccccatgacaggccgctgtgtgccccccaggaccagcgctggcaccttccctggcagccagccccaggccccagccagccctgtgctgcctgcccggcccccacctccacccctgccccggcggcccagcaccccccggcagggccctgtgggcagcggccggcgggagtgctactttgacacagctgccccagatgcctgtgacaacatcctggccagaaatgtgacctggcaggagtgctgctgcaccgtgggggagggctggggcagcggctgccgcatccagcagtgccccggcacagaaacagctgagtaccagagcctgtgcccccacggccggggctacctggcccccagcggggacctgagcctgcggagagatgtggatgagtgccagctgttccgggaccaggtgtgcaagtctggagtgtgtgtgaacacagcccctggctacagctgctactgcagcaatggctactactaccacacccagaggctggagtgcatcgacaatgatgaatgtgctgatgaggagcccgcctgtgagggcggccgctgtgtgaacacagtgggcagctaccactgcacctgtgagccccccctggtgctggatggcagccagaggcgctgtgtgtccaatgaaagccagagcctggatgacaacctgggcgtgtgctggcaggaggtgggcgctgacctggtgtgcagccacccccggctggaccggcaggccacctacacagagtgctgctgcctgtatggagaggcctggggcatggactgtgccctgtgcccagcccaggacagtgatgactttgaggccctgtgcaatgtgctgcggcccccagcctacagcccccccaggcctgggggcttcggcctgccctatgaatatggccctgacctgggccccccctaccagggcctgccctacggccctgagctgtacccacctccagccctgccctatgacccctacccacctcctcctggcccctttgcccggcgggaggccccctacggggcccccaggtttgacatgccagactttgaagatgatggcggcccctatggagagagcgaggccccagcccctcctggccctggcacccgctggccctaccgcagccgggacacccggcgctccttccctgagcctgaggagcccccagagggcggcagctatgccggcagcctggccgagccctatgaggagctggaggccgaggagtgtggcatcctggatggctgcaccaacggccgctgtgtgcgggtgcctgagggcttcacctgccgctgctttgatggctaccgcctggacatgaccaggatggcctgtgtggacatcaatgaatgtgatgaagctgaggccgccagccccctgtgtgtgaatgcccgctgcctgaacacagatggcagcttccgctgcatctgccggcccggctttgcccccacccaccagccccaccactgtgccccagcccggccccgggcctag

SEQ ID NO: 157373 - DNA, 561 bp, synthetic construct
  misc_feature 1..561: note = Description of Artificial Sequence: Synthetic coding sequence
  source 1..561: mol_type = other DNA
atgctgggcggggccggcggcggccctggcctgcggaccccctgcccagcagatgtggatgaatgttctgaggaggacctgtgccagagcggcatctgcaccaacacagatggcagctttgagtgcatctgccccccaggccaccgggccggccctgacctggccagctgcctggatgtggatgagtgccgggagcggggccctgccctgtgtggcagccagagatgtgagaacagccctggcagctaccgctgtgtgcgggactgtgaccccggctaccacgccggccctgagggcacctgtgatgatgtggatgagtgcaggaacagaagcttctgtggggcccatgctgtgtgccagaacctgcccggcagcttccagtgcctgtgtgaccagtatgaaggagccagagatggccgccactgtgtggatgtgaatgaatgtgagaccctgcagggcgtgtgtggggccgccctgtgtgaaaatgtggagggcagcttcctgtgtgtgtgccccaacagccctgaggagtttgaccccatgacaggccgctgtgtgtag

SEQ ID NO: 157374 - DNA, 4872 bp, synthetic construct
  misc_feature 1..4872: note = Description of Artificial Sequence: Synthetic coding sequence
  source 1..4872: mol_type = other DNA
atgccccggcccggcaccagcggcagaagacccctgctgctggtgctgctgctgcccctgtttgctgctgccaccagcgctgccagccccagccccagccccagccaggtggtggaggtgcctggggtgcccagcaggcctgcctctgtggccgtgtgccgctgctgccccggccagaccagccgccgcagccgctgcatccgggccttctgccgggtgcgcagctgccagcccaagaagtgtgccggcccccagcgctgcctgaaccctgtgcctgctgtgcccagccccagccccagcgtgaggaagaggcaggtgtccctgaactggcagcccctgaccctgcaggaggcccgggccctgctgaagagaagaagaccccggggccctgggggccggggcctgctgcggcggcggcccccccagagggccccagctgggaaggcccctgtgctgtgccccctcatctgccacaatggaggagtgtgtgtgaagccagaccgctgcctgtgccccccagactttgctgggaagttctgccagctgcacagcagcggggcccggcccccagccccagctgtgcccggcctgaccaggtctgtgtacaccatgcccctggccaaccacagagatgatgagcacggcgtggcctccatggtgtctgtgcacgtggagcacccccaggaggcctctgtggtggtgcaccaggtggagcgggtgtctggcccctgggaggaggctgatgctgaggccgtggcccgggcagaggccgccgcccgggcagaggccgccgccccctacacagtgctggcccagagcgcccccagagaagatggctacagtgatgccagcggcttcggctactgcttccgggagctgcggggaggagaatgtgccagccccctgcccggcctgcggacccaggaggtgtgctgcagaggagctggcctggcctggggcgtgcatgactgccagctgtgcagcgagcggctgggcaacagcgagcgggtgtctgccccagatggcccctgccccaccggctttgagcgggtgaatggcagctgtgaagatgtggatgaatgtgccactggaggccgctgccagcacggagaatgtgccaacacccggggcggctacacctgtgtgtgcccagatggcttcctgctggacagcagccgcagcagctgcatcagccagcacgtgatcagcgaggccaagggcccctgcttccgggtgctgagagatggcggctgcagcctgcccatcctgaggaacatcaccaagcagatctgctgctgcagccgggtgggcaaggcctggggccggggctgccagctgtgcccccccttcggcagcgagggcttccgggagatctgcccagctggccctggctaccactacagcgccagtgacctgcgctacaacacccggcccctgggccaggagcccccccgggtgtccctgagccagcccaggaccctgcctgccaccagccggcccagcgctggcttcctgcccacccaccggctggagcccaggcctgagcccaggccagacccccggcccggccctgagctgcccctgcccagcatcccagcctggacaggccctgagatccctgagagcggccccagcagcggcatgtgccagaggaacccccaggtgtgtggccctggccgctgcatcagccggcccagcggctacacctgtgcctgtgacagcggcttccggctgagcccccagggcacccgctgcattgatgtggatgagtgccggcgggtgcccccaccctgtgcccctggccgctgtgagaacagccctggcagcttccgctgtgtgtgtggccctggcttccgggccggccccagggctgctgagtgcctggatgtggatgagtgccaccgggtgcccccaccctgtgacctgggccgctgtgagaacaccccaggcagcttcctgtgtgtgtgcccagctggctaccaggccgcccctcatggagccagctgccaggatgtggatgagtgcacccagagccctggcctgtgtggccgcggggcctgcaagaacctgcccggcagcttccgctgtgtgtgcccagctggcttccggggcagcgcctgtgaagaagatgtggatgaatgtgcccaggagcccccaccctgtggccctggccgctgtgacaacacagctggcagcttccactgtgcctgcccagctggcttccgcagccggggccctggggccccctgccaggatgtggatgaatgtgcccggagccccccaccctgcacctacggccgctgtgaaaatacagagggcagcttccagtgtgtgtgccccatgggcttccagcccaacacagctggctctgaatgtgaagatgtggatgaatgtgagaaccacctggcctgccccggccaggagtgtgtgaacagccctggcagcttccagtgcaggacctgccccagcggccaccacctgcaccggggccgctgcacagatgtggatgaatgtagcagcggggccccaccctgtggcccccacggccactgcaccaacacagagggcagcttccgctgcagctgtgcccctggctaccgggcccccagcggccggcccggcccctgtgctgatgtgaatgaatgtctggagggggacttctgcttcccccatggagaatgtctgaacacagatggcagctttgcctgcacctgtgcccctggctacagacctggccccaggggggccagctgcctggatgtggatgaatgttctgaggaggacctgtgccagagcggcatctgcaccaacacagatggcagctttgagtgcatctgccccccaggccaccgggccggccctgacctggccagctgcctggatgtggatgagtgccgggagcggggccctgccctgtgtggcagccagagatgtgagaacagccctggcagctaccgctgtgtgcgggactgtgaccccggctaccacgccggccctgagggcacctgtgatgatgtggatgagtgccaggagtatggccctgagatctgtggggcccagagatgtgagaacaccccaggcagctaccgctgcaccccagcctgtgaccccggctaccagcccaccccaggcggcggctgccaggatgtggatgagtgcaggaacagaagcttctgtggggcccatgctgtgtgccagaacctgcccggcagcttccagtgcctgtgtgaccagtatgaaggagccagagatggccgccactgtgtggatgtgaatgaatgtgagaccctgcagggcgtgtgtggggccgccctgtgtgaaaatgtggagggcagcttcctgtgtgtgtgccccaacagccctgaggagtttgaccccatgacaggccgctgtgtgccccccaggaccagcgctggcaccttccctggcagccagccccaggccccagccagccctgtgctgcctgcccggcccccacctccacccctgccccggcggcccagcaccccccggcagggccctgtgggcagcggcagaagagagtgctactttgacacagctgccccagatgcctgtgacaacatcctggccagaaatgtgacctggcaggagtgctgctgcaccgtgggggagggctggggcagcggctgccgcatccagcagtgccctggaacagaaacagctgagtaccagagcctgtgcccccacggccggggctacctggcccccagcggggacctgagcctgcggagagatgtggatgagtgccagctgttccgggaccaggtgtgcaagagcggcgtgtgtgtgaacacagcccctggctacagctgctactgcagcaatggctactactaccacacccagaggctggagtgcatcgacaatgatgaatgtgctgatgaggagcccgcctgtgagggcggccgctgtgtgaacacagtgggcagctaccactgcacctgtgagccccccctggtgctggatggcagccagaggcgctgtgtgtccaatgaaagccagagcctggatgacaacctgggcgtgtgctggcaggaggtgggcgctgacctggtgtgcagccacccccggctggaccggcaggccacctacacagagtgctgctgcctgtatggagaggcctggggcatggactgtgccctgtgcccagcccaggacagtgatgactttgaggccctgtgcaatgtgctgcggcccccagcctacagcccccccaggcctgggggcttcggcctgccctatgaatatggccctgacctgggccccccctaccagggcctgccctacggccctgagctgtacccacctccagccctgccctatgacccctacccacctcctcctggcccctttgcccggcgggaggccccctatggagcccccaggtttgacatgccagactttgaagatgatggcggcccctacggggagagcgaggccccagcccctcctggccctggcacccgctggccctaccgcagccgggacaccaggaggagcttccctgagcctgaggagcccccagagggcggcagctatgccggcagcctggccgagccctatgaggagctggaggccgaggagtgtggcatcctggatggctgcaccaacggccgctgtgtgcgggtgcctgagggcttcacctgccgctgctttgatggctaccgcctggacatgaccaggatggcctgtgtggacatcaatgaatgtgatgaggccgaggccgccagccccctgtgtgtgaatgcccgctgcctgaacacagatggcagcttccgctgcatctgcaggcctggctttgcccccacccaccagccccaccactgtgccccagcccggccccgggcctag

SEQ ID NO: 157375 - DNA, 1155 bp, synthetic construct
  misc_feature 1..1155: note = Description of Artificial Sequence: Synthetic coding sequence
  source 1..1155: mol_type = other DNA
atgacaggccgctgtgtgccccccaggaccagcgcagatgtggatgagtgccagctgttccgggaccaggtgtgcaagtctggagtgtgtgtgaacacagcccctggctacagctgctactgcagcaatggctactactaccacacccagaggctggagtgcatcgacaatgatgaatgtgctgatgaggagcccgcctgtgagggcggccgctgtgtgaacacagtgggcagctaccactgcacctgtgagccccccctggtgctggatggcagccagaggcgctgtgtgtccaatgaaagccagagcctggatgacaacctgggcgtgtgctggcaggaggtgggcgctgacctggtgtgcagccacccccggctggaccggcaggccacctacacagagtgctgctgcctgtatggagaggcctggggcatggactgtgccctgtgcccagcccaggacagtgatgactttgaggccctgtgcaatgtgctgcggcccccagcctacagcccccccaggcctgggggcttcggcctgccctatgaatatggccctgacctgggccccccctaccagggcctgccctacggccctgagctgtacccacctccagccctgccctatgacccctacccacctcctcctggcccctttgcccggcgggaggccccctacggggcccccaggtttgacatgccagactttgaagatgatggcggcccctatggagagagcgaggccccagcccctcctggccctggcacccgctggccctaccgcagccgggacacccggcgctccttccctgagcctgaggagcccccagagggcggcagctatgccggcagcctggccgagccctatgaggagctggaggccgaggagtgtggcatcctggatggctgcaccaacggccgctgtgtgcgggtgcctgagggcttcacctgccgctgctttgatggctaccgcctggacatgaccaggatggcctgtgtggacatcaatgaatgtgatgaagctgaggccgccagccccctgtgtgtgaatgcccgctgcctgaacacagatggcagcttccgctgcatctgccggcccggctttgcccccacccaccagccccaccactgtgccccagcccggccccgggcctag

SEQ ID NO: 157376 - DNA, 4671 bp, synthetic construct
  misc_feature 1..4671: note = Description of Artificial Sequence: Synthetic coding sequence
  source 1..4671: mol_type = other DNA
atggccggcggcgtgcggctgctgtgggtgtccctgctggtgctgctggcccagctgggcccccagcccggcctgggccgcctgggggagcggctgcgggtgcgcttcacccctgtggtgtgtggcctgcgctgtgtgcacggccccaccggcagccgctgcacccccacctgtgcccccagaaatgccacctctgtggacagcggggcccctggaggagctgcccctgggggccctggcttccgggccttcctgtgccccctcatctgccacaacggcggcgtgtgtgtgaagccagaccgctgcctgtgccccccagactttgctgggaagttctgccagctgcacagcagcggggcccggcccccagccccagctgtgcccggcctgaccaggtctgtgtacaccatgcccctggccaaccacagagatgatgaacatggagtggcctccatggtgtctgtgcacgtggagcacccccaggaggcctctgtggtggtgcaccaggtggagcgggtgtctggcccctgggaggaggctgatgctgaggccgtggcccgggcagaggccgccgcccgggcagaggccgccgccccctacacagtgctggcccagagcgccccccgggaggatggctacagtgatgccagcggcttcggctactgcttccgggagctgcggggcggggagtgtgccagccccctgcccggcctgcggacccaggaggtgtgctgccgcggggccggcctggcctggggcgtgcatgactgccagctgtgcagcgagcggctgggcaacagcgagcgggtgtctgccccagatggcccctgccccactggatttgagcgggtgaatggcagctgtgaagatgtggatgaatgtgccaccggcggccgctgccagcacggggagtgtgccaacacccggggcggctacacctgtgtgtgcccagatggcttcctgctggacagcagccgcagcagctgcatcagccagcacgtgatcagcgaggccaagggcccctgcttccgggtgctgagagatggcggctgcagcctgcccatcctgaggaacatcaccaagcagatctgctgctgcagccgggtgggcaaggcctggggccggggctgccagctgtgccccccatttggaagtgagggcttccgggagatctgcccagctggccctggctaccactacagcgccagtgacctgcgctacaacacccggcccctgggccaggagcccccccgggtgtccctgagccagcccaggaccctgcctgccaccagccggcccagcgctggcttcctgcccacccaccggctggagcccaggcctgagcccaggccagaccccaggcctggccctgagctgcccctgcccagcatcccagcctggacaggccctgagatccctgagagcggccccagcagcggcatgtgccagaggaacccccaggtgtgtggccctggccgctgcatcagccggcccagcggctacacctgtgcctgtgacagcggcttccggctgagcccccagggcacccgctgcattgatgtggatgaatgtagaagagtgcccccaccctgtgcccctggccgctgtgagaacagccctggcagcttccgctgtgtgtgtggccctggcttccgggccggccccagggctgctgaatgtctggatgtggatgagtgccaccgggtgcccccaccctgtgacctgggccgctgtgagaacaccccaggcagcttcctgtgtgtgtgcccagctggctaccaggccgccccccacggggccagctgccaggatgtggatgaatgtacccagagccctggcctgtgtggccgcggggcctgcaagaacctgcccggcagcttccgctgtgtgtgcccagctggcttccggggcagcgcctgtgaggaggatgtggatgaatgtgcccaggagcccccaccctgtggccctggccgctgtgacaacacagctggcagcttccactgtgcctgcccagctggcttccgcagccggggccctggggccccctgccaggatgtggatgaatgtgcccggagccccccaccctgcacctacggccgctgtgagaacacagagggcagcttccagtgtgtgtgccccatgggcttccagcccaacacagctggctctgaatgtgaagatgtggatgaatgtgagaaccacctggcctgccccggccaggagtgtgtgaacagccctggcagcttccagtgcaggacctgccccagcggccaccacctgcaccggggccgctgcacagatgtggatgagtgcagcagcggggccccaccctgtggcccccacggccactgcaccaacacagagggcagcttccgctgcagctgtgcccctggctaccgggcccccagcggccggcccggcccctgtgctgatgtgaatgaatgtctggagggggacttctgcttcccccacggggagtgcctgaacacagatggcagctttgcctgcacctgtgcccctggctaccggcccggccccaggggggccagctgcctggatgtggatgagtgcagcgaggaggacctgtgccagagcggcatctgcaccaacacagatggcagctttgagtgcatctgccccccaggccacagagctggccctgacctggccagctgcctggatgtggatgaatgtcgggagcggggccctgccctgtgtggcagccagagatgtgagaacagccctggcagctaccgctgtgtgcgggactgtgaccccggctaccacgccggccctgagggcacctgtgatgatgtggatgagtgccaggagtatggccctgagatctgtggggcccagagatgtgagaacaccccaggcagctaccgctgcaccccagcctgtgaccccggctaccagcccacccctgggggcggctgccaggatgtggatgaatgtagaaacagaagcttctgtggggcccatgctgtgtgccagaacctgcccggcagcttccagtgcctgtgtgaccagtatgagggcgccagagatggccgccactgtgtggatgtgaatgaatgtgagaccctgcagggcgtgtgtggggccgccctgtgtgaaaatgtggagggcagcttcctgtgtgtgtgccccaacagccctgaggagtttgaccccatgacaggccgctgtgtgccccccaggaccagcgctggcaccttccctggcagccagccccaggccccagccagccctgtgctgcctgcccggcccccacctccacccctgccccggcggcccagcaccccccggcagggccctgtgggcagcggccggcgggagtgctactttgacacagctgccccagatgcctgtgacaacatcctggccagaaatgtgacctggcaggagtgctgctgcaccgtgggggagggctggggcagcggctgccgcatccagcagtgccccggcacagaaacagctgagtaccagagcctgtgcccccacggccggggctacctggcccccagcggggacctgagcctgcggagagatgtggatgagtgccagctgttccgggaccaggtgtgcaagtctggagtgtgtgtgaacacagcccctggctacagctgctactgcagcaatggctactactaccacacccagaggctggagtgcatcgacaatgatgaatgtgctgatgaggagcccgcctgtgagggcggccgctgtgtgaacacagtgggcagctaccactgcacctgtgagccccccctggtgctggatggcagccagaggcgctgtgtgtccaatgaaagccagagcctggatgacaacctgggcgtgtgctggcaggaggtgggcgctgacctggtgtgcagccacccccggctggaccggcaggccacctacacagagtgctgctgcctgtatggagaggcctggggcatggactgtgccctgtgcccagcccaggacagtgatgactttgaggccctgtgcaatgtgctgcggcccccagcctacagcccccccaggcctgggggcttcggcctgccctatgaatatggccctgacctgggccccccctaccagggcctgccctacggccctgagctgtacccacctccagccctgccctatgacccctacccacctcctcctggcccctttgcccggcgggaggccccctacggggcccccaggtttgacatgccagactttgaagatgatggcggcccctatggagagagcgaggccccagcccctcctggccctggcacccgctggccctaccgcagccgggacacccggcgctccttccctgagcctgaggagcccccagagggcggcagctatgccggcagcctggccgagccctatgaggagctggaggccgaggagtgtggcatcctggatggctgcaccaacggccgctgtgtgcgggtgcctgagggcttcacctgccgctgctttgatggctaccgcctggacatgaccaggatggcctgtgtggacatcaatgaatgtgatgaagctgaggccgccagccccctgtgtgtgaatgcccgctgcctgaacacagatggcagcttccgctgcatctgccggcccggctttgcccccacccaccagccccaccactgtgccccagcccggccccgggcctag

SEQ ID NO: 157377 - DNA, 2700 bp, synthetic construct
  misc_feature 1..2700: note = Description of Artificial Sequence: Synthetic coding sequence
  source 1..2700: mol_type = other DNA
atgtgccagaggaacccccaggtgtgtggccctggccgctgcatcagccggcccagcggctacacctgtgcctgtgacagcggcttccggctgagcccccagggcacccgctgcattgatgtggatgaatgtagaagagtgcccccaccctgtgcccctggccgctgtgagaacagccctggcagcttccgctgtgtgtgtggccctggcttccgggccggccccagggctgctgaatgtctggatgtggatgagtgccaccgggtgcccccaccctgtgacctgggccgctgtgagaacaccccaggcagcttcctgtgtgtgtgcccagctggctaccaggccgccccccacggggccagctgccaggatgtggatgaatgtacccagagccctggcctgtgtggccgcggggcctgcaagaacctgcccggcagcttccgctgtgtgtgcccagctggcttccggggcagcgcctgtgaggaggatgtggatgaatgtgcccaggagcccccaccctgtggccctggccgctgtgacaacacagctggcagcttccactgtgcctgcccagctggcttccgcagccggggccctggggccccctgccaggatgtggatgaatgtgcccggagccccccaccctgcacctacggccgctgtgagaacacagagggcagcttccagtgtgtgtgccccatgggcttccagcccaacacagctggctctgaatgtgaagatgtggatgaatgtgagaaccacctggcctgccccggccaggagtgtgtgaacagccctggcagcttccagtgcaggacctgccccagcggccaccacctgcaccggggccgctgcacagatgtggatgagtgcagcagcggggccccaccctgtggcccccacggccactgcaccaacacagagggcagcttccgctgcagctgtgcccctggctaccgggcccccagcggccggcccggcccctgtgctgatgtgaatgaatgtctggagggggacttctgcttcccccacggggagtgcctgaacacagatggcagctttgcctgcacctgtgcccctggctaccggcccggccccaggggggccagctgcctggatgtggatgagtgcagcgaggaggacctgtgccagagcggcatctgcaccaacacagatggcagctttgagtgcatctgccccccaggccacagagctggccctgacctggccagctgcctggatgtggatgaatgtcgggagcggggccctgccctgtgtggcagccagagatgtgagaacagccctggcagctaccgctgtgtgcgggactgtgaccccggctaccacgccggccctgagggcacctgtgatgatgtgaatgaatgtgagaccctgcagggcgtgtgtggggccgccctgtgtgaaaatgtggagggcagcttcctgtgtgtgtgccccaacagccctgaggagtttgaccccatgacaggccgctgtgtgccccccaggaccagcgctggcaccttccctggcagccagccccaggccccagccagccctgtgctgcctgcccggcccccacctccacccctgccccggcggcccagcaccccccggcagggccctgtgggcagcggcagaagagagtgctactttgacacagctgccccagatgcctgtgacaacatcctggccagaaatgtgacctggcaggagtgctgctgcaccgtgggggagggctggggcagcggctgccgcatccagcagtgccctggaacagaaacagctgagtaccagagcctgtgcccccacggccggggctacctggcccccagcggggacctgagcctgcggagagatgtggatgagtgccagctgttccgggaccaggtgtgcaagagcggcgtgtgtgtgaacacagcccctggctacagctgctactgcagcaatggctactactaccacacccagaggctggagtgcatcgacaatgatgaatgtgctgatgaggagcccgcctgtgagggcggccgctgtgtgaacacagtgggcagctaccactgcacctgtgagccccccctggtgctggatggcagccagaggcgctgtgtgtccaatgaaagccagagcctggatgacaacctgggcgtgtgctggcaggaggtgggcgctgacctggtgtgcagccacccccggctggaccggcaggccacctacacagagtgctgctgcctgtatggagaggcctggggcatggactgtgccctgtgcccagcccaggacagtgatgactttgaggccctgtgcaatgtgctgcggcccccagcctacagcccccccaggcctgggggcttcggcctgccctatgaatatggccctgacctgggccccccctaccagggcctgccctacggccctgagctgtacccacctccagccctgccctatgacccctacccacctcctcctggcccctttgcccggcgggaggccccctatggagcccccaggtttgacatgccagactttgaagatgatggcggcccctacggggagagcgaggccccagcccctcctggccctggcacccgctggccctaccgcagccgggacaccaggaggagcttccctgagcctgaggagcccccagagggcggcagctatgccggcagcctggccgagccctatgaggagctgtag

SEQ ID NO: 157378 - DNA, 639 bp, synthetic construct
  misc_feature 1..639: note = Description of Artificial Sequence: Synthetic coding sequence
  source 1..639: mol_type = other DNA
atgtggaccagcgccacagcctgcagaagaagagtgaccagcggggccgcccggacccggcaggccgccagctgtgcctgtgcccctcctggcacccggctgcacaggacagagcctgctgccaggatgtggatgtctgtgcctgaggccccccacccagcccccacagctggggtgaggacccagaaggccgccagctctgtgtctgccccctgggccagcaaccccaccctgctggcccccaacgtggatgaatgtgagaaccacctggcctgccccggccaggagtgtgtgaacagccctggcagcttccagtgcaggacctgccccagcggccaccacctgcaccggggccgctgcacagatgtggatgaatgtagcagcggggccccaccctgtggcccccacggccactgcaccaacacagagggcagcttccgctgcagctgtgcccctggctaccgggcccccagcggccggcccggcccctgtgctgatgtgaatgaatgtctggagggggacttctgcttcccccatggagaatgtctgaacacagatggcagctttgcctgcacctgtgcccctggctacagacctggccccaggggggccagctgcctgggcagctacccaggatag

SEQ ID NO: 157379 - DNA, 669 bp, synthetic construct
  misc_feature 1..669: note = Description of Artificial Sequence: Synthetic coding sequence
  source 1..669: mol_type = other DNA
atggagatcccccccaccaactacccagccagcagagctgccctggtggcccagaactacatcaactaccagcagggcaccccccaccgggtgtttgaggtgcagaaggtgaagcaggcctccatggaggacatccctggccggggccacaagtaccacctgaagtttgctgtggaggagatcatccagaagcaggtgaaggtgaactgcacagctgaggtgctgtaccccagcacaggccaggagacagcccctgaggtgaacttcacctttgaaggagaaacaggcaagaacccagatgaggaggacaacaccttctaccagaggctgaagtccatgaaggagcccctggaggcccagaacatcccagacaactttggaaatgtgtccccagagatgaccctggtgctgcacctggcctgggtggcctgtggctacatcatctggcagaacagcacagaggacacctggtacaagatggtgaagatccagacagtgaagcaggtgcagagaaatgatgacttcatcgagctggactacaccatcctgctgcacaacatcgccagccaggagatcatcccctggcagatgcaggtgctgtggcacccccagtatggcaccaaggtgaagcacaacagccggctgcccaaggaggtgcagctggagtag

SEQ ID NO: 157380 - DNA, 888 bp, synthetic construct
  misc_feature 1..888: note = Description of Artificial Sequence: Synthetic coding sequence
  source 1..888: mol_type = other DNA
atgggcctgcctgtgtcctgggcccccccagccctgtgggtgctgggctgctgtgccctgctgctgagcctgtgggccctgtgcacagcctgccggcggccagaagatgctgtggcccccaggaagagggcccggcggcagagggcccggctgcagggcagcgccacagctgctgaggccagcctgctgcggaggacccacctgtgcagcctgagcaagagtgacacccggctgcacgagctgcaccggggccccaggagcagccgggccctgcggcctgcctccatggacctgctgcggccccactggctggaggtgtcccgggacatcaccggcccccaggccgcccccagcgccttcccccaccaggagctgccccgggccctgcctgctgctgctgccacagctggctgtgccggcctggaggccacctacagcaatgtgggcctggccgccctgcccggggtgtccctggccgccagccctgtggtggccgagtatgcccgggtgcagaagaggaagggcacccacaggagcccccaggagccccagcagggcaagacagaggtgaccccagctgcccaggtggatgtgctgtacagccgggtgtgcaagcccaagaggcgggaccccggccccaccacagaccccctggaccccaagggccagggcgccatcctggccctggccggggacctggcctaccagaccctgcccctgcgggccctggatgtggacagcggccccctggagaatgtgtatgagagcatccgggagctgggggaccctgctggccgcagcagcacctgtggggccggcaccccaccagccagcagctgccccagcctgggccggggctggaggcccctgcctgccagcctgccctag

SEQ ID NO: 157381 - DNA, 324 bp, synthetic construct
  misc_feature 1..324: note = Description of Artificial Sequence: Synthetic coding sequence
  source 1..324: mol_type = other DNA
atgggcctgcctgtgtcctgggcccccccagccctgtgggtgctgggctgctgtgccctgctgctgagcctgtgggccctgtgcacagcctgccggcggccagaagatgctgtggcccccaggaagagggcccggcggcagagggcccggctgcagggcagcgccacagctgctgaggccagcctgctgcggaggacccacctgtgcagcctgagcaagagtgacacccggctgcacgagctgcaccggggccccaggagcagccgggccctgcggcctgcctccatggacctgctgcggccccactggctggaggtgtcctag

SEQ ID NO: 157382 - DNA, 2094 bp, synthetic construct
  misc_feature 1..2094: note = Description of Artificial Sequence: Synthetic coding sequence
  source 1..2094: mol_type = other DNA
atgggagagagagctggcagccctggaacagaccaggagaggaaggccggcaagcaccactacagctacctgagtgactttgagaccccccagagcagcggccgcagcagcctggtgagcagcagccctgcctctgtgcggaggaagaaccccaagaggcagaccagtgatggccaggtgcaccaccaggcccccaggaagcccagccccaagggcctgcccaacagaaaaggagtgcgggtgggcttccgcagccagagcctgaaccgggagcccctgaggaaggacacagacctggtgaccaagaggatcctgagcgcccggctgctgaagatcaatgagctgcagaatgaggtgtctgagctgcaggtgaagctggccgagctgctgaaggagaacaagagcctgaagaggctgcagtaccggcaggagaaggccctgaacaagtttgaagatgctgaaaatgagatcagccagctgatcttccgccacaacaatgagatcacagccctgaaggagcggctgaggaagagccaggagaaggagcgggccacagagaagagggtgaaggacacagagagcgagctgttccgcaccaagttcagcctgcagaagctgaaggagatcagcgaggcccggcacctgcctgagagagatgacctggccaagaagctggtgtctgctgagctgaagctggatgacacagaaagacgcatcaaggagctgagcaagaacctggagctgagcaccaacagcttccagaggcagctgctggccgagaggaagagggcctatgaggcccatgatgagaacaaggtgctgcagaaggaggtgcagaggctgtaccacaagctgaaggagaaggagcgggagctggacatcaagaacatctacagcaaccggctgcccaagagcagccccaacaaggagaaggagctggccctgaggaagaatgctgcctgccagagcgactttgctgacctgtgcaccaagggcgtgcagaccatggaggacttcaagccagaggagtaccccctgaccccagagaccatcatgtgctatgagaacaagtgggaggagcccggccacctgaccctggacctgcagagccagaagcaggacagacatggagaggccggcatcctgaaccccatcatggagcgggaggagaagtttgtgacagatgaggagctgcacgtggtgaagcaggaggtggagaagctggaggatgagtgggagcgggaggagctggacaagaagcagaaggagaaggccagcctgctggagcgggaggagaagccagagtgggagaccggccgctaccagctgggcatgtaccccatccagaacatggacaagctgcagggcgaggaggaggagcggctgaagcgggagatgctgctggccaagctgaatgaaattgaccgggagctgcaggacagcaggaacctgaagtaccctgtgctgcccctgctgcctgactttgagagcaagctgcacagccctgagaggagccccaagacctaccgcttcagcgagagcagcgagcggctcttcaacggccaccacctgcaggacatctccttcagcacccccaagggggagggccagaacagcggaaatgtgcgcagccctgccagccccaatgaatttgccttcggcagctatgtgcccagctttgccaagaccagcgagaggagcaaccccttcagccagaagagcagcttcctggacttccagagaaattccatggagaagctgagcaaggatggagtggacctgatcaccaggaaggagaagaaggccaacctgatggagcagctgtttggagccagcggcagcagcaccatcagcagcaagagcagtgaccccaacagcgtggccagcagcaaaggagacatcgaccccctgaacttcctgcccggcaacaagggcagccgggaccaggagcatgatgaagatgagggcttcttcctgtctgagggccgctccttcaaccccaacagacaccggctgaagcatgctgatgacaagccagctgtgaaggctgctgacagcgtggaggatgaaattgaggaggtggccctgaggtag

SEQ ID NO: 157383 - DNA, 2094 bp, synthetic construct; identical to SEQ ID NO: 157382
  misc_feature 1..2094: note = Description of Artificial Sequence: Synthetic coding sequence
  source 1..2094: mol_type = other DNA

SEQ ID NO: 157384 - DNA, 693 bp, synthetic construct
  misc_feature 1..693: note = Description of Artificial Sequence: Synthetic coding sequence
  source 1..693: mol_type = other DNA
atgaagaaccccatgctggaggtggtgtccctgctgctggagaagctgctgctgatcagcaacttcaccctcttcagcagtggagctgctggggaggacaagggcaggaacagcttctatgagaccagcagcttccacagaggagatgtgctggaggtgcccaggacccacctgacccactacggcatctacctgggggacaacagagtggcccacatgatgccagacatcctgctggccctgacagatgacatgggccgcacccagaaggtggtgagcaacaagaggctcatcctgggcgtcatcgtgaaggtggccagcatccgggtggacacagtggaggactttgcctacggggccaacatcctggtgaaccacctggatgagagcctgcagaagaaggccctgctgaatgaggaggtggccaggagagctgagaagctgctgggcttcaccccctacagcctgctgtggaacaactgtgagcactttgtgacctactgccgctatggcacccccatcagcccccagagcgacaagttctgtgagaccgtgaagatcatcatccgggaccagaggtctgtgctggccagcgctgtgctgggcctggccagcatcgtgtgcaccggcctggtgtcctacaccaccctgcctgccatcttcatccccttcttcctgtggatggccggctag

SEQ ID NO: 157385 - DNA, 210 bp, synthetic construct
  misc_feature 1..210: note = Description of Artificial Sequence: Synthetic coding sequence
  source 1..210: mol_type = other DNA
atgaagaaccccatgctggaggtggtgtccctgctgctggagaagctgctgctgatcagcaacttcaccctcttcagcagtggagctgctggggaggacaagggcaggaacagcttctatgagaccagcagcttccacagaggagatgtgctggaggtgcccaggacccacctgacccactacggcatctacctgggggacaacagatag

SEQ ID NO: 157386 - DNA, 693 bp, synthetic construct; identical to SEQ ID NO: 157384
  misc_feature 1..693: note = Description of Artificial Sequence: Synthetic coding sequence
  source 1..693: mol_type = other DNA

SEQ ID NO: 157387 - DNA, 1110 bp, synthetic construct
  misc_feature 1..1110: note = Description of Artificial Sequence: Synthetic coding sequence
  source 1..1110: mol_type = other DNA
atggtgtgggcccccctgggcccccccaggacagactgcctgaccctgctgcacacccccagcaaggacagccccaagatgagcctggagtggctggtggcctggagctggagcctggatggcctgcgggactgcatcgccaccggcatccagagcgtgcgggactgtgacaccacagctgtgatcaccgtggcctgcctgctggtgctgtttgtgtggtactgctaccacgtgggccgggagcagccccggccctacgtgtctgtgaacagcctgatgcaggccgcagatgccaacggcctgcagaatggctacgtgtactgccagagcccagaatgtgtgcgctgcacccacaatgaaggcctgaaccagaagctgtaccacaacctgcaggagtatgccaagcgctacagctggagcggcatgggccgcatccacaagggcatccgggagcagggccgctacctgaacagccggcccagcatccagaagccagaggtgttcttcctgcctgacctgcccaccaccccctacttcagcagagatgcccagaagcatgatgtggaggtgctggagaggaacttccagaccatcctgtgtgaatttgagaccctgtacaaggccttcagcaactgcagcctgccccagggctggaagatgaacagcaccccatctggagagtggttcaccttctacctggtgaaccagggcgtgtgtgtgcccaggaactgcaggaagtgccccaggacctaccgcctgctgggcagcctgcggacctgcatcggcaacaacgtgtttggaaatgcctgcatctctgtgctgagccctggcaccgtcatcacagagcactacggccccaccaacatccgcatccgctgccacctgggcctgaagaccccaaatggctgtgagctggtggtgggcggggagccccagtgctgggccgagggccgctgcctgctgtttgatgacagcttcctgcatgctgccttccacgagggcagcgcagaagatggcccccgggtggtgttcatggtggacctgtggcaccccaacgtggccgctgctgagcggcaggccctggacttcatctttgcccctggaagatag

SEQ ID NO: 157388 - DNA, 984 bp, synthetic construct
  misc_feature 1..984: note = Description of Artificial Sequence: Synthetic coding sequence
  source 1..984: mol_type = other DNA
atgagccagcccagcggcggccgggcccctggcacccgcatctacagctggagctgccccaccgtgatgagccctggagagaagctggaccccatcccagacagcttcatcctgcagccccctgtgttccaccctgtggtgccctacgtgaccaccatctttggaggcctgcatgctgggaagatggtgatgctgcagggcgtggtgcccctggatgcccaccgcttccaggtggacttccagtgtggctgcagcctgtgccccaggccagacatcgccttccacttcaacccccgcttccacaccaccaagccccacgtgatctgcaacaccctgcatggaggccgctggcagcgggaggcccgctggccccacctggccctgcggcggggcagcagcttcctgatcctcttcctgtttggaaatgaggaggtgaaggtgtctgtgaatggccagcacttcctgcacttccgctaccgcctgcccctgagccacgtggacaccctgggcatctttggagacatcctggtggaggccgtgggcttcctgaacatcaacccctttgtggagggcagccgggagtacccagctggccacgaggtgccctgcagccacgccctgccccagggcctgagccctggccaggtgatcatcgtgcggggcctggtgctgcaggagcccaagcacttcaccgtgtccctgcgggaccaggccgcccacgcccctgtgaccctgcgggccagctttgctgacaggaccctggcctggatcagccgctggggccagaagaagctgatcagcgcccccttcctgttctacccccagcgcttctttgaggtgctgctgctcttccaggagggcggcctgaagctggccctgaatggccagggcctgggcgccacctccatgaaccagcaggccctggagcagctgcgggagctgcgcatcagcggctctgtgcagctgtactgtgtgcacagctag

SEQ ID NO: 157389 - DNA, 1014 bp, synthetic construct
  misc_feature 1..1014: note = Description of Artificial Sequence: Synthetic coding sequence
  source 1..1014: mol_type = other DNA
atgagccagcccagcggcggccgggcccctggcacccgcatctacagctggagctgccccaccgtgatgagccctggagagaagctggaccccatcccagacagcttcatcctgcagccccctgtgttccaccctgtggtgccctacgtgaccaccatctttggaggcctgcatgctgggaagatggtgatgctgcagggcgtggtgcccctggatgcccacagccgcttccaggtggacttccagtgtggctgcagcctgtgccccaggccagacatcgccttccacttcaacccccgcttccacaccaccaagccccacgtgatctgcaacaccctgcacggcggccgctggcagcgggaggcccgctggccccacctggccctgcggcggggcagcagcttcctgatcctcttcctgtttggaaatgaggaggtgaaggtgtctgtgaatggccagcacttcctgcacttccgctaccgcctgcccctgagccacgtggacaccctgggcatctttggagacatcctggtggaggccgtgggcttcctgaacatcaacccctttgtggagggcagccgggagtacccagctggccaccccttcctgctgatgagcccccggctggaggtgccctgcagccacgccctgccccagggcctgagccctggccaggtgatcatcgtgcggggcctggtgctgcaggagcccaagcacttcaccgtgtccctgcgggaccaggccgcccacgcccctgtgaccctgcgggccagctttgctgacaggaccctggcctggatcagccgctggggccagaagaagctgatcagcgcccccttcctgttctacccccagcgcttctttgaggtgctgctgctcttccaggagggcggcctgaagctggccctgaatggccagggcctgggcgccacctccatgaaccagcaggccctggagcagctgcgggagctgcgcatcagcggctctgtgcagctgtactgtgtgcacagctag

SEQ ID NO: 157390 - DNA, 1011 bp, synthetic construct
  misc_feature 1..1011: note = Description of Artificial Sequence: Synthetic coding sequence
  source 1..1011: mol_type = other DNA
atgagccagcccagcggcggccgggcccctggcacccgcatctacagctggagctgccccaccgtgatgagccctggagagaagctggaccccatcccagacagcttcatcctgcagccccctgtgttccaccctgtggtgccctacgtgaccaccatctttggaggcctgcatgctgggaagatggtgatgctgcagggcgtggtgcccctggatgcccaccgcttccaggtggacttccagtgtggctgcagcctgtgccccaggccagacatcgccttccacttcaacccccgcttccacaccaccaagccccacgtgatctgcaacaccctgcatggaggccgctggcagcgggaggcccgctggccccacctggccctgcggcggggcagcagcttcctgatcctcttcctgtttggaaatgaggaggtgaaggtgtctgtgaatggccagcacttcctgcacttccgctaccgcctgcccctgagccacgtggacaccctgggcatctttggagacatcctggtggaggccgtgggcttcctgaacatcaacccctttgtggagggcagccgggagtacccagctggccaccccttcctgctgatgagcccccggctggaggtgccctgcagccacgccctgccccagggcctgagccctggccaggtgatcatcgtgcggggcctggtgctgcaggagcccaagcacttcaccgtgtccctgcgggaccaggccgcccacgcccctgtgaccctgcgggccagctttgctgacaggaccctggcctggatcagccgctggggccagaagaagctgatcagcgcccccttcctgttctacccccagcgcttctttgaggtgctgctgctcttccaggagggcggcctgaagctggccctgaatggccagggcctgggcgccacctccatgaaccagcaggccctggagcagctgcgggagctgcgcatcagcggctctgtgcagctgtactgtgtgcacagctag

SEQ ID NO: 157391 - DNA, 828 bp, synthetic construct
  misc_feature 1..828: note = Description of Artificial Sequence: Synthetic coding sequence
  source 1..828: mol_type = other DNA
atggtgatgctgcagggcgtggtgcccctggatgcccaccgcttccaggtggacttccagtgtggctgcagcctgtgccccaggccagacatcgccttccacttcaacccccgcttccacaccaccaagccccacgtgatctgcaacaccctgcacggcggccgctggcagcgggaggcccgctggccccacctggccctgcggcggggcagcagcttcctgatcctcttcctgtttggaaatgaggaggtgaaggtgtctgtgaatggccagcacttcctgcacttccgctaccgcctgcccctgagccacgtggacaccctgggcatctttggagacatcctggtggaggccgtgggcttcctgaacatcaacccctttgtggagggcagccgggagtacccagctggccaccccttcctgctgatgagcccccggctggaggtgccctgcagccacgccctgccccagggcctgagccctggccaggtgatcatcgtgcggggcctggtgctgcaggagcccaagcacttcaccgtgtccctgcgggaccaggccgcccacgcccctgtgaccctgcgggccagctttgctgacaggaccctggcctggatcagccgctggggccagaagaagctgatcagcgcccccttcctgttctacccccagcgcttctttgaggtgctgctgctcttccaggagggcggcctgaagctggccctgaatggccagggcctgggcgccacctccatgaaccagcaggccctggagcagctgcgggagctgcgcatcagcggctctgtgcagctgtactgtgtgcacagctag

SEQ ID NO: 157392 - DNA, 801 bp, synthetic construct
  misc_feature 1..801: note = Description of Artificial Sequence: Synthetic coding sequence
  source 1..801: mol_type = other DNA
atggtgatgctgcagggcgtggtgcccctggatgcccaccgcttccaggtggacttccagtgtggctgcagcctgtgccccaggccagacatcgccttccacttcaacccccgcttccacaccaccaagccccacgtgatctgcaacaccctgcacggcggccgctggcagcgggaggcccgctggccccacctggccctgcggcggggcagcagcttcctgatcctcttcctgtttggaaatgaggaggtgaaggtgtctgtgaatggccagcacttcctgcacttccgctaccgcctgcccctgagccacgtggacaccctgggcatctttggagacatcctggtggaggccgtgggcttcctgaacatcaacccctttgtggagggcagccgggagtacccagctggccacgaggtgccctgcagccacgccctgccccagggcctgagccctggccaggtgatcatcgtgcggggcctggtgctgcaggagcccaagcacttcaccgtgtccctgcgggaccaggccgcccacgcccctgtgaccctgcgggccagctttgctgacaggaccctggcctggatcagccgctggggccagaagaagctgatcagcgcccccttcctgttctacccccagcgcttctttgaggtgctgctgctcttccaggagggcggcctgaagctggccctgaatggccagggcctgggcgccacctccatgaaccagcaggccctggagcagctgcgggagctgcgcatcagcggctctgtgcagctgtactgtgtgcacagctag

SEQ ID NO: 157393 - DNA, 378 bp, synthetic construct
  misc_feature 1..378: note = Description of Artificial Sequence: Synthetic coding sequence
  source 1..378: mol_type = other DNA
atggctgatgaggagctggaggccctgcggcggcagaggctggccgagctgcaggccaagcatggagaccctggagatgctgcccagcaggaggccaagcaccgggaggccgagatgaggaacagcatcctggcccaggtgctggaccagagcgcccgggcccggctgagcaacctggccctggtgaagccagagaagaccaaggctgtggagaactacctgatccagatggcccgctatggccagctgtctgagaaggtgtctgagcagggcctgattgagatcctgaagaaggtgtcccagcagacagagaagaccaccaccgtgaagttcaacagaaggaaggtgatggacagtgatgaagatgatgactactag

SEQ ID NO: 157394 - DNA, 1530 bp, synthetic construct
  misc_feature 1..1530: note = Description of Artificial Sequence: Synthetic coding sequence
  source 1..1530: mol_type = other DNA
atgggcgtgcaggccggcctgtttggcatgctgggcttcctgggcgtggccctgggcggcagccctgccctgcgctggtaccgcaccagctgccacctgaccaaggctgtgcccggcaaccccctgggctacctgtccttcctggccaaggatgcccagggcctggccctgattcatgcccgctgggatgcccaccggcggctgcagagctgctcctgggaggatgagcctgagctgacagctgcctatggagccctgtgtgcccatgaaacagcctggggcagcttcatccacaccccaggccctgagctgcagagggccctggccaccctgcagagccagtgggaggcctgccgggccctggaggagagccctgctggggccaggaagaagagagctgctggccagagcggcgtgcctgggggcggccaccagcgggagaagaggggctggaccatgcctggcaccctgtggtgtggggtgggggacagcgctggcaacagcagcgagctgggcgtcttccagggccctgacctgtgctgccgggagcatgaccgctgcccccagaacatcagccccctgcagtacaactacggcatccggaactaccgcttccacaccatcagccactgtgactgtgacacccgcttccagcagtgcctgcagaaccagcacgacagcatcagtgacatcgtgggcgtggccttcttcaacgtgctggagatcccctgctttgtgctggaggagcaggaggcctgtgtggcctggtactggtggggcggctgcaggatgtatggaacagtgcccctggcccggctgcagcccaggaccttctacaatgcctcctggagcagccgggccaccagccccacccccagcagccgcagccctgccccacccaagccccggcagaagcagcacctgaggaagggccccccccaccagaagggcagcaagaggcccagcaaggccaacaccacagccctgcaggaccccatggtgagcccccggctggatgtggcccccaccggcctgcagggcccccagggcggcctgaagccccagggcgcccgctgggtgtgccgctccttcagaagacacctggaccagtgtgagcaccagatcggcccccgggagattgagttccagctgctgaacagcgcccaggagcccctcttccactgcaactgcacccggcggctggcccgcttcctgcggctgcacagccccccagaggtgaccaacatgctgtgggagctgctgggcaccacctgcttcaagctggccccacccctggactgtgtggagggcaagaactgcagccgggacccccgggccatccgggtgtctgcccggcacctgcggcggctgcagcagaggaggcaccagctgcaggacaagggcacagatgagcggcagccctggcccagcgagcccctgcggggccccatgtccttctacaaccagtgcctgcagctgacccaggccgcccggcggccagaccggcagcagaagtcctggagccagtag

SEQ ID NO: 157395 - DNA, 93 bp, synthetic construct
  misc_feature 1..93: note = Description of Artificial Sequence: Synthetic coding sequence
  source 1..93: mol_type = other DNA
atgaccggggagctggaggtgaagaacatggacatgaagccaggcagcaccctgaagatcaccggcagcattgctgatggaacagatggatag

SEQ ID NO: 157396 - DNA, 1758 bp, synthetic construct
  misc_feature 1..1758: note = Description of Artificial Sequence: Synthetic coding sequence
  source 1..1758: mol_type = other DNA
atgaccccacccaggctcttctgggtgtggctgctggtggccggcacccagggcgtgaatgatggagacatgaggctggctgatggaggagccaccaaccagggccgggtggagatcttctaccggggccagtggggcaccgtgtgtgacaacctgtgggacctgacagatgcctctgtggtgtgccgggccctgggctttgaaaatgccacccaggccctgggccgggccgccttcggccagggcagcggccccatcatgctggatgaggtgcagtgcaccggcacagaggccagcctggccgactgcaagagcctgggctggctgaagagcaactgcagacatgaaagagatgctggggtggtgtgcaccaatgagaccaggagcacccacaccctggacctgagccgggagctgtctgaggccctgggccagatctttgacagccagaggggctgtgacctgagcatctctgtgaatgtgcagggagaagatgccctgggcttctgtggccacacagtcatcctgacagccaacctggaggcccaggccctgtggaaggagcccggcagcaatgtgaccatgtctgtggatgctgaatgtgtgcccatggtgcgggacctgctgcgctacttctacagcagaagaattgacatcaccctgagctctgtgaagtgcttccacaagctggccagcgcctacggggcccggcagctgcagggctactgtgccagcctgtttgccatcctgctgccccaggaccccagcttccagatgcccctggacctgtatgcctatgctgtggccactggagatgccctgctggagaagctgtgcctgcagttcctggcctggaactttgaggccctgacccaggccgaggcctggcccagcgtgcccacagacctgctgcagctgctgctgcccaggagtgacctggccgtgcccagcgagctggccctgctgaaggctgtggacacctggagctggggcgagcgggccagccatgaggaggtggagggcctggtggagaagatccgcttccccatgatgctgcctgaggagctgtttgagctgcagttcaacctgagcctgtactggagccatgaggccctcttccagaagaagaccctgcaggccctggagttccacacagtgcccttccagctgctggcccgctacaagggcctgaacctgacagaggacacctacaagccccgcatctacaccagccccacctggagcgcctttgtgacagacagctcctggagcgccaggaagagccagctggtgtaccagagcagaagaggccccctggtgaagtacagcagtgactacttccaggcccccagcgactaccgctactacccctaccagagcttccagaccccccagcaccccagcttcctgttccaggacaagagggtgtcctggagcctggtgtacctgcccaccatccagagctgctggaactacggcttcagctgcagcagtgatgagctgcctgtgctgggcctgaccaagagcggcggcagtgacaggaccatcgcctatgagaacaaggccctgatgctgtgtgagggcctgtttgtggctgatgtgacagactttgagggctggaaggccgccatccccagcgccctggacaccaacagcagcaagagcaccagcagcttcccctgcccagctggccacttcaacggcttcagaactgtcatccggcccttctacctgaccaacagcagcggcgtggactag

SEQ ID NO: 157397 - DNA, 1722 bp, synthetic construct
  misc_feature 1..1722: note = Description of Artificial Sequence: Synthetic coding sequence
  source 1..1722: mol_type = other DNA
atgaccccacccaggctcttctgggtgtggctgctggtggccggcacccagggcgtgaatgatggagacatgaggctggctgatggaggagccaccaaccagggccgggtggagatcttctaccggggccagtggggcaccgtgtgtgacaacctgtgggacctgacagatgcctctgtggtgtgccgggccctgggctttgaaaatgccacccaggccctgggccgggccgccttcggccagggcagcggccccatcatgctggccgactgcaagagcctgggctggctgaagagcaactgcagacatgaaagagatgctggggtggtgtgcaccaatgagaccaggagcacccacaccctggacctgagccgggagctgtctgaggccctgggccagatctttgacagccagaggggctgtgacctgagcatctctgtgaatgtgcagggagaagatgccctgggcttctgtggccacacagtcatcctgacagccaacctggaggcccaggccctgtggaaggagcccggcagcaatgtgaccatgtctgtggatgctgaatgtgtgcccatggtgcgggacctgctgcgctacttctacagcagaagaattgacatcaccctgagctctgtgaagtgcttccacaagctggccagcgcctacggggcccggcagctgcagggctactgtgccagcctgtttgccatcctgctgccccaggaccccagcttccagatgcccctggacctgtatgcctatgctgtggccactggagatgccctgctggagaagctgtgcctgcagttcctggcctggaactttgaggccctgacccaggccgaggcctggcccagcgtgcccacagacctgctgcagctgctgctgcccaggagtgacctggccgtgcccagcgagctggccctgctgaaggctgtggacacctggagctggggcgagcgggccagccatgaggaggtggagggcctggtggagaagatccgcttccccatgatgctgcctgaggagctgtttgagctgcagttcaacctgagcctgtactggagccatgaggccctcttccagaagaagaccctgcaggccctggagttccacacagtgcccttccagctgctggcccgctacaagggcctgaacctgacagaggacacctacaagccccgcatctacaccagccccacctggagcgcctttgtgacagacagctcctggagcgccaggaagagccagctggtgtaccagagcagaagaggccccctggtgaagtacagcagtgactacttccaggcccccagcgactaccgctactacccctaccagagcttccagaccccccagcaccccagcttcctgttccaggacaagagggtgtcctggagcctggtgtacctgcccaccatccagagctgctggaactacggcttcagctgcagcagtgatgagctgcctgtgctgggcctgaccaagagcggcggcagtgacaggaccatcgcctatgagaacaaggccctgatgctgtgtgagggcctgtttgtggctgatgtgacagactttgagggctggaaggccgccatccccagcgccctggacaccaacagcagcaagagcaccagcagcttcccctgcccagctggccacttcaacggcttcagaactgtcatccggcccttctacctgaccaacagcagcggcgtggactag

SEQ ID NO: 157398 - DNA, 411 bp, synthetic construct
  misc_feature 1..411: note = Description of Artificial Sequence: Synthetic coding sequence
  source 1..411: mol_type = other DNA
atgagcaatgtgccccacaagagcagcctgcctgagggcatccggcccggcaccgtgctgcgcatccggggcctggtgcccccaaatgccagccgcttccacgtgaacctgctgtgtggggaggagcagggcagtgatgctgccctgcacttcaacccccggctggacaccagcgaggtggtgttcaacagcaaggagcagggctcctggggccgggaggagcggggccctggggtgcccttccagaggggccagccctttgaggtgctgatcatcgccagtgatgatggcttcaaggctgtggtgggagatgcccagtaccaccacttccgccaccggctgcccctggcccgggtgcggctggtggaggtgggcggagatgtgcagctggacagcgtgcgcatcttctag

SEQ ID NO: 157399 - DNA, 954 bp, synthetic construct
  misc_feature 1..954: note = Description of Artificial Sequence: Synthetic coding sequence
  source 1..954: mol_type = other DNA
atgatgctgagcctgaacaacctgcagaacatcatctacaaccctgtgatcccctttgtgggcaccatcccagaccagctggaccccggcaccctgattgtcatccggggccacgtgcccagtgatgctgaccgcttccaggtggacctgcagaatggcagctccatgaagcccagggcagatgtggccttccacttcaacccccgcttcaagagagctggctgcatcgtgtgcaacaccctcatcaatgagaagtggggccgggaggagatcacctatgacacccccttcaagcgggagaagagctttgaaattgtcatcatggtgctgaaggacaagttccaggtggccgtgaatggcaagcacaccctgctgtatggccaccgcatcggccctgagaagattgacaccctgggcatctacggcaaggtgaacatccacagcatcggcttctccttcagcagtgacctgcagagcacccaggccagcagcctggagctgacagagatcagcagagaaaatgtgcccaagagcggcaccccccagctgcggctgccctttgctgcccggctgaacacccccatgggccctggccgcacagtggtggtgaagggggaggtgaatgccaatgccaagagcttcaacgtggacctgctggccggcaagagcaaggacatcgccctgcacctgaacccccggctgaacatcaaggcctttgtgagaaattccttcctgcaggagagctggggcgaggaggagaggaacatcaccagcttccccttcagccctggcatgtactttgagatgatcatctactgtgatgtgcgggagttcaaggtggccgtgaatggagtgcacagcctggagtacaagcaccgcttcaaggagctgagcagcattgacaccctggagatcaacggggacatccacctgctggaggtgcgctcctggtag

SEQ ID NO: 157400 - DNA, 1080 bp, synthetic construct
  misc_feature 1..1080: note = Description of Artificial Sequence: Synthetic coding sequence
  source 1..1080: mol_type = other DNA
atgatgctgagcctgaacaacctgcagaacatcatctacaaccctgtgatcccctttgtgggcaccatcccagaccagctggaccccggcaccctgattgtcatccggggccacgtgcccagtgatgctgaccgcttccaggtggacctgcagaatggcagctccatgaagcccagggcagatgtggccttccacttcaacccccgcttcaagagagctggctgcatcgtgtgcaacaccctcatcaatgagaagtggggccgggaggagatcacctatgacacccccttcaagcgggagaagagctttgaaattgtcatcatggtgctgaaggacaagttccaggtggccgtgaatggcaagcacaccctgctgtatggccaccgcatcggccctgagaagattgacaccctgggcatctacggcaaggtgaacatccacagcatcggcttctccttcagcagtgacctgcagagcacccaggccagcagcctggagctgacagagatcagcagagaaaatgtgcccaagagcggcaccccccagctgcccagcaacagaggaggagacatcagcaagatcgcccccaggacagtgtacaccaagagcaaggacagcacagtgaaccacaccctgacctgcaccaagatcccccccatgaactacgtgtccaagaggctgccctttgctgcccggctgaacacccccatgggccctggccgcacagtggtggtgaagggggaggtgaatgccaatgccaagagcttcaacgtggacctgctggccggcaagagcaaggacatcgccctgcacctgaacccccggctgaacatcaaggcctttgtgagaaattccttcctgcaggagagctggggcgaggaggagaggaacatcaccagcttccccttcagccctggcatgtactttgagatgatcatctactgtgatgtgcgggagttcaaggtggccgtgaatggagtgcacagcctggagtacaagcaccgcttcaaggagctgagcagcattgacaccctggagatcaacggggacatccacctgctggaggtgcgctcctggtag

SEQ ID NO: 157401 - DNA, 1077 bp, synthetic construct
  misc_feature 1..1077: note = Description of Artificial Sequence: Synthetic coding sequence
  source 1..1077: mol_type = other DNA
atgatgctgagcctgaacaacctgcagaacatcatctacaaccctgtgatcccctttgtgggcaccatcccagaccagctggaccccggcaccctgattgtcatccggggccacgtgcccagtgatgctgaccgcttccaggtggacctgcagaatggcagctccatgaagcccagggcagatgtggccttccacttcaacccccgcttcaagagagctggctgcatcgtgtgcaacaccctcatcaatgagaagtggggccgggaggagatcacctatgacacccccttcaagcgggagaagagctttgaaattgtcatcatggtgctgaaggacaagttccaggtggccgtgaatggcaagcacaccctgctgtatggccaccgcatcggccctgagaagattgacaccctgggcatctacggcaaggtgaacatccacagcatcggcttctccttcagcagtgacctgcagagcacccaggccagcagcctggagctgacagagatcagcagagaaaatgtgcccaagagcggcaccccccagctgcggctgagcctgcccagctgggacctgcagggccacggcagcgagaccttccgctctgtgctgtggaccagggtgtttgaaattgccttctgccggcccctgggcaccgtggccagcttccagaggctgccctttgctgcccggctgaacacccccatgggccctggccgcacagtggtggtgaagggggaggtgaatgccaatgccaagagcttcaacgtggacctgctggccggcaagagcaaggacatcgccctgcacctgaacccccggctgaacatcaaggcctttgtgaggaacagcttcctgcaggagagctggggcgaggaggagaggaacatcaccagcttccccttcagccctggcatgtactttgagatgatcatctactgtgatgtgcgggagttcaaggtggccgtgaatggagtgcacagcctggagtacaagcaccgcttcaaggagctgagcagcattgacaccctggagatcaatggagacatccacctgctggaggtgcgctcctggtag

SEQ ID NO: 157402 - DNA, 954 bp, synthetic construct; identical to SEQ ID NO: 157399
  misc_feature 1..954: note = Description of Artificial Sequence: Synthetic coding sequence
  source 1..954: mol_type = other DNA

SEQ ID NO: 157403 - DNA, 627 bp, synthetic construct
  misc_feature 1..627: note = Description of Artificial Sequence: Synthetic coding sequence
  source 1..627: mol_type = other DNA
atgatgctgagcctgaacaacctgcagaacatcatctacaaccctgtgatcccctttgtgggcaccatcccagaccagctggaccccggcaccctgattgtcatccggggccacgtgcccagtgatgctgaccgcttccaggtggacctgcagaatggcagctccatgaagcccagggcagatgtggccttccacttcaacccccgcttcaagagagctggctgcatcgtgtgcaacaccctcatcaatgagaagtggggccgggaggagatcacctatgacacccccttcaagcgggagaagagctttgaaattgtcatcatggtgctgaaggacaagttccaggtggccgtgaatggcaagcacaccctgctgtatggccaccgcatcggccctgagaagattgacaccctgggcatctacggcaaggtgaacatccacagcatcggcttctccttcagcagtgacctgcagagcacccaggccagcagcctggagctgacagagatcagcagagaaaatgtgcccaagagcggcaccccccagctgcccagcaacagaggaggagacatcagcaagatcgcccccaggacagtgtacaccaagagcaaggacagcacagtgtag

SEQ ID NO: 157404 - DNA, 903 bp, synthetic construct
  misc_feature 1..903: note = Description of Artificial Sequence: Synthetic coding sequence
  source 1..903: mol_type = other DNA
atgatgctgagcctgaacaacctgcagaacatcatctacaaccctgtgatcccctttgtgggcaccatcccagaccagctggaccccggcaccctgattgtcatccggggccacgtgcccagtgatgctgaccgcttccaggtggacctgcagaatggcagctccatgaagcccagggcagatgtggccttccacttcaacccccgcttcaagagagctggctgcatcgtgtgcaacaccctcatcaatgagaagtggggccgggaggagatcacctatgacacccccttcaagcgggagaagagctttgaaattgtcatcatggtgctgaaggacaagttccaggtgcccaagagcggcaccccccagctgcccagcaacagaggaggagacatcagcaagatcgcccccaggacagtgtacaccaagagcaaggacagcacagtgaaccacaccctgacctgcaccaagatcccccccatgaactacgtgtccaagaggctgccctttgctgcccggctgaacacccccatgggccctggccgcacagtggtggtgaagggggaggtgaatgccaatgccaagagcttcaacgtggacctgctggccggcaagagcaaggacatcgccctgcacctgaacccccggctgaacatcaaggcctttgtgaggaacagcttcctgcaggagagctggggcgaggaggagaggaacatcaccagcttccccttcagccctggcatgtactttgagatgatcatctactgtgatgtgcgggagttcaaggtggccgtgaatggagtgcacagcctggagtacaagcaccgcttcaaggagctgagcagcattgacaccctggagatcaatggagacatccacctgctggaggtgcgctcctggtag

SEQ ID NO: 157405 - DNA, 1080 bp, synthetic construct; identical to SEQ ID NO: 157400
  misc_feature 1..1080: note = Description of Artificial Sequence: Synthetic coding sequence
  source 1..1080: mol_type = other DNA

SEQ ID NO: 157406 - DNA, 507 bp, synthetic construct
  misc_feature 1..507: note = Description of Artificial Sequence: Synthetic coding sequence
  source 1..507: mol_type = other DNA
atgatgctgagcctgaacaacctgcagaacatcatctacaaccctgtgatcccctttgtgggcaccatcccagaccagctggaccccggcaccctgattgtcatccggggccacgtgcccagtgatgctgaccgcttccaggtggacctgcagaatggcagctccatgaagcccagggcagatgtggccttccacttcaacccccgcttcaagagagctggctgcatcgtgtgcaacaccctcatcaatgagaagtggggccgggaggagatcacctatgacacccccttcaagcgggagaagagctttgaaattgtcatcatggtgctgaaggacaagttccaggtggccgtgaatggcaagcacaccctgctgtatggccaccgcatcggccctgagaagattgacaccctgggcatctacggcaaggtgaacatccacagcatcggcttctccttcagcagtgacctgcagagcacccaggccagcagcctggagctgacctag

SEQ ID NO: 157407 - DNA, 321 bp, synthetic construct
  misc_feature 1..321: note = Description of Artificial Sequence: Synthetic coding sequence
  source 1..321: mol_type = other DNA
atgatgctgagcctgaacaacctgcagaacatcatctacaaccctgtgatcccctttgtgggcaccatcccagaccagctggaccccggcaccctgattgtcatccggggccacgtgcccagtgatgctgaccgcttccaggtggacctgcagaatggcagctccatgaagcccagggcagatgtggccttccacttcaacccccgcttcaagagagctggctgcatcgtgtgcaacaccctcatcaatgagaagtggggccgggaggagatcacctatgacacccccttcaagcgggagaagagctttgaaattgtgtag

SEQ ID NO: 157408 - DNA, 1080 bp, synthetic construct; identical to SEQ ID NO: 157400
  misc_feature 1..1080: note = Description of Artificial Sequence: Synthetic coding sequence
  source 1..1080: mol_type = other DNA

SEQ ID NO: 157409 - DNA, 954 bp, synthetic construct; identical to SEQ ID NO: 157399
  misc_feature 1..954: note = Description of Artificial Sequence: Synthetic coding sequence
  source 1..954: mol_type = other DNA

SEQ ID NO: 157410 - DNA, 1080 bp, synthetic construct; identical to SEQ ID NO: 157400
  misc_feature 1..1080: note = Description of Artificial Sequence: Synthetic coding sequence
  source 1..1080: mol_type = other DNA

SEQ ID NO: 157411 - DNA, 132 bp, synthetic construct
  misc_feature 1..132: note = Description of Artificial Sequence: Synthetic coding sequence
  source 1..132: mol_type = other DNA
atgatgctgagcctgaacaacctgcagaacatcatctacaaccctgtgatcccctttgtgggcaccatcccagaccagctggaccccggcaccctgattgtcatccggggccacgtgcccagtgatgcctag

SEQ ID NO: 157412 - DNA, 972 bp, synthetic construct
  misc_feature 1..972: note = Description of Artificial Sequence: Synthetic coding sequence
  source 1..972: mol_type = other DNA
atggccttcagcggcagccaggccccctacctgagccctgctgtgcccttcagcggcaccatccagggcggcctgcaggacggcctgcagatcaccgtgaatggcaccgtgctgagcagcagcggcaccaggtttgctgtgaacttccagacaggcttctctggaaatgacatcgccttccacttcaaccccaggtttgaagatggcggctacgtggtgtgcaacacccggcagaatggctcctggggccctgaggagaggaagacccacatgcccttccagaagggcatgccctttgacctgtgcttcctggtgcagagcagtgacttcaaggtgatggtgaatggcatcctgtttgtgcagtacttccaccgggtgcccttccaccgggtggacaccatctctgtgaatggatctgtgcagctgagctacatctccttccagcccccaggagtgtggccagccaacccagcccccatcacccagaccgtcatccacacagtgcagagcgcccctggccagatgttcagcaccccagccatcccccccatgatgtacccccacccagcctaccccatgcccttcatcaccaccatcctgggcggcctgtaccccagcaagagcatcctgctgagcggcaccgtgctgcccagcgcccagcgcttccacatcaacctgtgcagcggcaaccacatcgccttccacctgaaccccaggtttgatgaaaatgctgtggtgaggaacacccagattgacaacagctggggcagcgaggagaggagcctgcccaggaagatgccctttgtgcggggccagagcttctctgtgtggatcctgtgtgaggcccactgcctgaaggtggccgtggatggccagcacctgtttgagtactaccaccggctgaggaacctgcccaccatcaaccggctggaggtgggcggggacatccagctgacccacgtgcagacctag

SEQ ID NO: 157413 - DNA, 936 bp, synthetic construct
  misc_feature 1..936: note = Description of Artificial Sequence: Synthetic coding sequence
  source 1..936: mol_type = other DNA
atggccttcagcggcagccaggccccctacctgagccctgctgtgcccttcagcggcaccatccagggcggcctgcaggacggcctgcagatcaccgtgaatggcaccgtgctgagcagcagcggcaccaggtttgctgtgaacttccagacaggcttctctggaaatgacatcgccttccacttcaaccccaggtttgaagatggcggctacgtggtgtgcaacacccggcagaatggctcctggggccctgaggagaggaagacccacatgcccttccagaagggcatgccctttgacctgtgcttcctggtgcagagcagtgacttcaaggtgatggtgaatggcatcctgtttgtgcagtacttccaccgggtgcccttccaccgggtggacaccatctctgtgaatggatctgtgcagctgagctacatctccttccagacccagaccgtcatccacacagtgcagagcgcccctggccagatgttcagcaccccagccatcccccccatgatgtacccccacccagcctaccccatgcccttcatcaccaccatcctgggcggcctgtaccccagcaagagcatcctgctgagcggcaccgtgctgcccagcgcccagcgcttccacatcaacctgtgcagcggcaaccacatcgccttccacctgaaccccaggtttgatgaaaatgctgtggtgaggaacacccagattgacaacagctggggcagcgaggagaggagcctgcccaggaagatgccctttgtgcggggccagagcttctctgtgtggatcctgtgtgaggcccactgcctgaaggtggccgtggatggccagcacctgtttgagtactaccaccggctgaggaacctgcccaccatcaaccggctggaggtgggcggggacatccagctgacccacgtgcagacctag

SEQ ID NO: 157414 - DNA, 741 bp, synthetic construct
  misc_feature 1..741: note = Description of Artificial Sequence: Synthetic coding sequence
  source 1..741: mol_type = other DNA
atggccttcagcggcagccaggccccctacctgagccctgctgtgcccttcagcggcaccatccagggcggcctgcaggacggcctgcagatcaccgtgaatggcaccgtgctgagcagcagcggcaccaggtttgctgtgaacttccagacaggcttctctggaaatgacatcgccttccacttcaaccccaggtttgaagatggcggctacgtggtgtgcaacacccggcagaatggctcctggggccctgaggagaggaagacccacatgcccttccagaagggcatgccctttgacctgtgcttcctggtgcagagcagtgacttcaaggtgatggtgaatggcatcctgtttgtgcagtacttccaccgggtgcccttccaccgggtggacaccatctctgtgaatggatctgtgcagctgagctacatctccttccagcccccaggagtgtggccagccaacccagcccccatcacccagaccgtcatccacacagtgcagagcgcccctggccagatgttcagcaccccagccatcccccccatgatgtacccccacccagcctaccccatgcccttcatcaccaccatcctgggcggcctgtaccccagcaagagcatcctgctgagcggcaccgtgctgcccagcgcccagagatgtggcagctgtgtgaagctgacagccagccgctggccctggatggtgtccacctgcctgaacaccaccatcgcctag

SEQ ID NO: 157415 - DNA, 1068 bp, synthetic construct
  misc_feature 1..1068: note = Description of Artificial Sequence: Synthetic coding sequence
  source 1..1068: mol_type = other DNA
atggccttcagcggcagccaggccccctacctgagccctgctgtgcccttcagcggcaccatccagggcggcctgcaggacggcctgcagatcaccgtgaatggcaccgtgctgagcagcagcggcaccaggtttgctgtgaacttccagacaggcttctctggaaatgacatcgccttccacttcaaccccaggtttgaagatggcggctacgtggtgtgcaacacccggcagaatggctcctggggccctgaggagaggaagacccacatgcccttccagaagggcatgccctttgacctgtgcttcctggtgcagagcagtgacttcaaggtgatggtgaatggcatcctgtttgtgcagtacttccaccgggtgcccttccaccgggtggacaccatctctgtgaatggatctgtgcagctgagctacatctccttccagaaccccaggacagtgcctgtgcagcctgccttcagcacagtgcccttcagccagcctgtgtgcttccccccccggccccggggccggcggcagaagcccccaggagtgtggccagccaacccagcccccatcacccagaccgtcatccacacagtgcagagcgcccctggccagatgttcagcaccccagccatcccccccatgatgtacccccacccagcctaccccatgcccttcatcaccaccatcctgggcggcctgtaccccagcaagagcatcctgctgagcggcaccgtgctgcccagcgcccagcgcttccacatcaacctgtgcagcggcaaccacatcgccttccacctgaaccccaggtttgatgaaaatgctgtggtgaggaacacccagattgacaacagctggggcagcgaggagaggagcctgcccaggaagatgccctttgtgcggggccagagcttctctgtgtggatcctgtgtgaggcccactgcctgaaggtggccgtggatggccagcacctgtttgagtactaccaccggctgaggaacctgcccaccatcaaccggctggaggtgggcggggacatccagctgacccacgtgcagacctag

SEQ ID NO: 157416 - DNA, 666 bp, synthetic construct
  misc_feature 1..666: note = Description of Artificial Sequence: Synthetic coding sequence
  source 1..666: mol_type = other DNA
atgggccccttcagcgcccctgtggagccagatggcggctacgtggtgtgcaacacccggcagaatggctcctggggccctgaggagaggaagacccacatgcccttccagaagggcatgccctttgacctgtgcttcctggtgcagagcagtgacttcaaggtgatggtgaatggcatcctgtttgtgcagtacttccaccgggtgcccttccaccgggtggacaccatctctgtgaatggatctgtgcagctgagctacatctccttccagaaccccaggacagtgcctgtgcagcctgccttcagcacagtgcccttcagccagcctgtgtgcttccccccccggccccggggccggcggcagaagcccccaggagtgtggccagccaacccagcccccatcacccagaccgtcatccacacagtgcagagcgcccctggccagatgttcagcaccccagccatcccccccatgatgtacccccacccagcctaccccatgcccttcatcaccaccatcctgggcggcctgtaccccagcaagagcatcctgctgtctggaacagtgctgcccagcgcccagagatgtggcagctgtgtgaagctgacagccagccgctggccctggatggtgtccacctgcctgaacaccaccatcgcctag

SEQ ID NO: 157417 - DNA, 360 bp, synthetic construct
  misc_feature 1..360: note = Description of Artificial Sequence: Synthetic coding sequence
  source 1..360: mol_type = other DNA
atggccttcagcggcagccaggccccctacctgagccctgctgtgcccttcagcggcaccatccagggcggcctgcaggacggcctgcagatcaccgtgaatggcaccgtgctgagcagcagcggcaccaggtttgctgtgaacttccagacaggcttctctggaaatgacatcgccttccacttcaaccccaggtttgaagatggcggctacgtggtgtgcaacacccggcagaatggctcctggggccctgaggagaggaagacccacatgcccttccagaagggcatgccctttgacctgtgcttcctggtgcagagcagtgacttcaaggtgcacctgctgctgctgctgctgtag

SEQ ID NO: 157418 - DNA, 1533 bp, synthetic construct
  misc_feature 1..1533: note = Description of Artificial Sequence: Synthetic coding sequence
  source 1..1533: mol_type = other DNA
atggccggcagccggcagaggggcctgcgggcccgggtgcggcccctcttctgtgccctgctgctgagcctgggccgctttgtgagaggagatggagtgggcggggaccctgctgtggccctgccccacagaagatttgagtacaagtacagcttcaagggcccccacctggtgcagagtgatggcaccgtgcccttctgggcccacgccggaaatgccatccccagcagtgaccagatccgggtggcccccagcctgaagagccagaggggctctgtgtggaccaagaccaaggccgcctttgagaactgggaggtggaggtgaccttccgggtgacaggccggggccgcatcggggctgatggcctggccatctggtatgcagagaaccagggcctggagggccctgtgtttggcagcgctgacctgtggaatggagtgggcatcttctttgacagctttgacaatgatggcaagaagaacaacccagccatcgtcatcatcggcaacaacggccagatccactatgaccaccagaatgatggagccagccaggccctggccagctgccagagggacttcaggaacaagccctaccctgtgcgggccaagatcacctactaccagaacaccctgactgtgatgatcaacaacggcttcaccccagacaagaatgactatgagttctgtgccaaggtggagaacatgatcatcccagcccagggccacttcggcatctctgctgccaccggcggcctggctgatgaccatgatgtgctgtccttcctgaccttccagctgacagagcccgggaaggagccccccaccccagacaaggagatcagcgagaaggagaaggagaagtaccaggaggagtttgagcacttccagcaggagctggacaagaagaaggaggagttccagaagggccacccagacctgcagggccagcctgctgaggagatctttgaatctgtgggggaccgggagctgcggcaggtgtttgagggccagaaccgcatccacctggagatcaagcagctgaaccggcagctggacatgatcctggatgagcagaggcgctacgtgagcagcctgacagaggagatcagcaagagaggagctggcatgcctggccagcacggccagatcacccagcaggagctggacacagtggtgaagacccagcacgagatcctgcggcaggtgaatgagatgaagaacagcatgtctgaaacagtgcggctggtgtctggcatgcagcaccctggcagcgctgggggcgtgtatgagaccacccagcacttcatcgacatcaaggagcacctgcacatcgtgaagagggacatcgacaacctggtgcagaggaacatgcccagcaatgagaagcccaagtgcccagagctgccccccttccccagctgcctgagcacagtgcacttcatcatctttgtggtggtgcagacagtgctcttcatcggctacatcatgtaccgcagccagcaggaggccgccgccaagaagttcttctag

SEQ ID NO: 157419 - DNA, 1101 bp, synthetic construct
  misc_feature 1..1101: note = Description of Artificial Sequence: Synthetic coding sequence
  source 1..1101: mol_type = other DNA
atgcagcccctgtggctgtgctgggccctgtgggtgctgcccctggccagccctggggccgccctgactggagagcagctgctgggcagcctgctgcggcagctgcagctgaaggaggtgcccaccctggacagagctgacatggaggagctggtgatccccacccacgtgcgggcccagtatgtggccctgctgcagaggagccatggagacaggagccggggcaagcgcttcagccagagcttccgggaggtggccggccgcttcctggccctggaggccagcacccacctgctggtgtttggcatggagcagaggctgccccccaacagcgagctggtgcaggccgtgctgcggctcttccaggagcctgtgcccaaggccgccctgcacagacatggccgcctgagccccaggtctgcccgggcccgggtgacagtggagtggctgcgggtgagagatgatggcagcaacagaaccagcctgattgacagccggctggtgtctgtgcatgaaagtggctggaaggcctttgatgtgacagaagctgtgaacttctggcagcagctgagccggccccggcagcccctgctgctgcaggtgtctgtgcagcgggagcacctgggccccctggccagcggggcccacaagctggtgcgctttgccagccagggcgccccagctggcctgggggagccccagctggagctgcacaccctggacctgggggactatggagcccagggcgactgtgaccctgaggcccccatgacagagggcacccgctgctgccggcaggagatgtacatcgacctgcagggcatgaagtgggccgagaactgggtgctggagcccccaggcttcctggcctatgaatgtgtgggcacctgccggcagcccccagaggccctggccttcaagtggcccttcctgggcccccggcagtgcatcgccagcgagacagacagcctgcccatgattgtgtccatcaaggagggcggccgcacccggccccaggtggtgtccctgcccaacatgagggtgcagaagtgcagctgtgccagtgatggagccctggtgccccggcggctgcagccctag

SEQ ID NO: 157420 - DNA, 1101 bp, synthetic construct
  misc_feature 1..1101: note = Description of Artificial Sequence: Synthetic coding sequence
  source 1..1101: mol_type = other DNA
atgtggcccctgtggctgtgctgggccctgtgggtgctgcccctggccggccctggggccgccctgacagaggagcagctgctgggcagcctgctgcggcagctgcagctgtctgaggtgcctgtgctggacagagctgacatggagaagctggtgatcccagcccacgtgcgggcccagtatgtggtgctgctgcggcgcagccatggagacaggagccggggcaagcgcttcagccagagcttccgggaggtggccggccgcttcctggccagcgaggccagcacccacctgctggtgtttggcatggagcagaggctgccccccaacagcgagctggtgcaggccgtgctgcggctcttccaggagcctgtgcccaaggccgccctgcacagacatggccgcctgagccccaggtctgcccaggcccgggtgacagtggagtggctgcgggtgagagatgatggcagcaacagaaccagcctgattgacagccggctggtgtctgtgcatgaaagtggctggaaggcctttgatgtgacagaagctgtgaacttctggcagcagctgagccggccccggcagcccctgctgctgcaggtgtctgtgcagcgggagcacctgggccccctggccagcggggcccacaagctggtgcgctttgccagccagggcgccccagctggcctgggggagccccagctggagctgcacaccctggacctgcgggactatggagcccagggcgactgtgaccctgaggcccccatgacagagggcacccgctgctgccggcaggagatgtacatcgacctgcagggcatgaagtgggccaagaactgggtgctggagcccccaggcttcctggcctatgaatgtgtgggcacctgccagcagcccccagaggccctggccttcaactggcccttcctgggcccccggcagtgcatcgccagcgagacagccagcctgcccatgattgtgtccatcaaggagggcggccgcacccggccccaggtggtgtccctgcccaacatgagggtgcagaagtgcagctgtgccagtgatggagccctggtgccccggcggctgcagccctag

SEQ ID NO: 157421 - DNA, 999 bp, synthetic construct
  misc_feature 1..999: note = Description of Artificial Sequence: Synthetic coding sequence
  source 1..999: mol_type = other DNA
atgtggcccctgtggctgtgctgggccctgtgggtgctgcccctggccggccctggggccgccctgacagaggagcagctgctgggcagcctgctgcggcagctgcagctgtctgaggtgcctgtgctggacagagctgacatggagaagctggtgatcccagcccacgtgcgggcccagtatgtggtgctgctgcggcgcagccatggagacaggagccggggcaagcgcttcagccagagcttccgggaggtggccggccgcttcctggccagcgaggccgccctgcacagacatggccgcctgagccccaggtctgcccaggcccgggtgacagtggagtggctgcgggtgagagatgatggcagcaacagaaccagcctgattgacagccggctggtgtctgtgcatgaaagtggctggaaggcctttgatgtgacagaagctgtgaacttctggcagcagctgagccggccccggcagcccctgctgctgcaggtgtctgtgcagcgggagcacctgggccccctggccagcggggcccacaagctggtgcgctttgccagccagggcgccccagctggcctgggggagccccagctggagctgcacaccctggacctgcgggactatggagcccagggcgactgtgaccctgaggcccccatgacagagggcacccgctgctgccggcaggagatgtacatcgacctgcagggcatgaagtgggccaagaactgggtgctggagcccccaggcttcctggcctatgaatgtgtgggcacctgccagcagcccccagaggccctggccttcaactggcccttcctgggcccccggcagtgcatcgccagcgagacagccagcctgcccatgattgtgtccatcaaggagggcggccgcacccggccccaggtggtgtccctgcccaacatgagggtgcagaagtgcagctgtgccagtgatggagccctggtgccccggcggctgcagccctag

SEQ ID NO: 157422 - DNA, 1131 bp, synthetic construct
  misc_feature 1..1131: note = Description of Artificial Sequence: Synthetic coding sequence
  source 1..1131: mol_type = other DNA
atggtgtggaaggtggccgtgttcctgtctgtggccctgggcattggagctgtgcccattgatgatcctgaagatggcggcaagcactgggtggtgattgtggccggcagcaatggctggtacaactaccgccaccaggctgatgcctgccacgcctaccagatcatccacagaaatggcatcccagatgagcagatcgtggtgatgatgtatgatgacatcgcctacagcgaggacaaccccaccccaggcatcgtcatcaaccggcccaatggaacagatgtgtaccagggcgtgcccaaggactacaccggggaggatgtgaccccccagaacttcctggccgtgctgcggggagatgctgaggccgtgaagggcatcggcagcggcaaggtgctgaagagcggcccccaggaccacgtgttcatctacttcacagaccacggcagcacaggcatcctggtgttccccaatgaagacctgcacgtgaaggacctgaatgagaccatccactacatgtacaagcacaagatgtacaggaagatggtgttctacatcgaggcctgtgagagcggctccatgatgaaccacctgcctgacaacatcaacgtgtatgccaccacagctgccaacccccgggagagcagctatgcctgctactatgatgagaagaggagcacctacctgggggactggtacagcgtgaactggatggaggacagtgatgtggaggacctgaccaaggagaccctgcacaagcagtaccacctggtgaagagccacaccaacaccagccacgtgatgcagtatggcaacaagaccatcagcaccatgaaggtgatgcagttccagggcatgaagaggaaggccagcagccctgtgcccctgccccctgtgacccacctggacctgacccccagcccagatgtgcccctgaccatcatgaagaggaagctgatgaacaccaatgacctggaggagagccggcagctgacagaggagatccagaggcacctggactatgaatatgccctgcggcacctgtatgtgctggtgaacctgtgtgagaagccctaccccctgcaccgcatcaagctgtccatggaccacgtgtgcctgggccactactag

SEQ ID NO: 157423 - DNA, 1119 bp, synthetic construct
  misc_feature 1..1119: note = Description of Artificial Sequence: Synthetic coding sequence
  source 1..1119: mol_type = other DNA
atggtgtggaaggtggccgtgttcctgtctgtggccctgggcattggagctgtgcccattgatgatcctgaagatggcggcaagcactgggtggtgattgtggccggcagcaatggctggtacaactaccgccaccaggctgatgcctgccacgcctaccagatcatccacagaaatggcatcccagatgagcagatcgtggtgatgatgtatgatgacatcgcctacagcgaggacaaccccaccccaggcatcgtcatcaaccggcccaatggaacagatgtgtaccagggcgtgcccaaggactacaccggggaggatgtgaccccccagaacttcctggccgtgctgcggggagatgctgaggccgtgaagggcatcggcagcggcaaggtgctgaagagcggcccccaggaccacgtgttcatctacttcacagaccacggcagcacaggcatcctggtgttccccaatgaagacctgcacgtgaaggacctgaatgagaccatccactacatgtacaagcacaagatgtacaggaagatggtgttctacatcgaggcctgtgagagcggctccatgatgaaccacctgcctgacaacatcaacgtgtatgccaccacagctgccaacccccgggagagcagctatgcctgctactatgatgagaagaggagcacctacctgggggactggtacagcgtgaactggatggaggacagtgatgtggaggacctgaccaaggagaccctgcacaagcagtaccacctggtgaagagccacaccaacaccagccacgtgatgcagtatggcaacaagaccatcagcaccatgaaggtgatgcagttccagggcatgaagaggaaggccagcagccctgtgcccctgccccctgtgacccacctggacctgacccccagcccagatgtgcccctgaccatcatgaagaggaagctgatgaacaccaatgacctggaggagagccggcagctgacagaggagatccagaggcacctggatgacaagatcgtgcacggcccccgggtgccctggagcctgctgaagagctgcctgctggaggccttccccagcgtgtctgccccacccaccgtgtgctag

SEQ ID NO: 157424 - DNA, 1302 bp, synthetic construct
  misc_feature 1..1302: note = Description of Artificial Sequence: Synthetic coding sequence
  source 1..1302: mol_type = other DNA
atggtgtggaaggtggccgtgttcctgtctgtggccctgggcattggagctgtgcccattgatgatcctgaagatggcggcaagcactgggtggtgattgtggccggcagcaatggctggtacaactaccgccaccaggctgatgcctgccacgcctaccagatcatccacagaaatggcatcccagatgagcagatcgtggtgatgatgtatgatgacatcgcctacagcgaggacaaccccaccccaggcatcgtcatcaaccggcccaatggaacagatgtgtaccagggcgtgcccaaggactacaccggggaggatgtgaccccccagaacttcctggccgtgctgcggggagatgctgaggccgtgaagggcatcggcagcggcaaggtgctgaagagcggcccccaggaccacgtgttcatctacttcacagaccacggcagcacaggcatcctggtgttccccaatgaagacctgcacgtgaaggacctgaatgagaccatccactacatgtacaagcacaagatgtacaggaagatggtgttctacatcgaggcctgtgagagcggctccatgatgaaccacctgcctgacaacatcaacgtgtatgccaccacagctgccaacccccgggagagcagctatgcctgctactatgatgagaagaggagcacctacctgggggactggtacagcgtgaactggatggaggacagtgatgtggaggacctgaccaaggagaccctgcacaagcagtaccacctggtgaagagccacaccaacaccagccacgtgatgcagtatggcaacaagaccatcagcaccatgaaggtgatgcagttccagggcatgaagaggaaggccagcagccctgtgcccctgccccctgtgacccacctggacctgacccccagcccagatgtgcccctgaccatcatgaagaggaagctgatgaacaccaatgacctggaggagagccggcagctgacagaggagatccagaggcacctggatgcccggcacctgattgagaagtctgtgaggaagatcgtgtccctgctggccgccagcgaggccgaggtggagcagctgctgtctgagcgggcccccctgaccggccacagctgctacccagaggccctgctgcacttccgcacccactgcttcaactggcacagccccacctatgaatatgccctgcggcacctgtatgtgctggtgaacctgtgtgagaagccctaccccctgcaccgcatcaagctgtccatggaccacgtgtgcctgggccactactag

SEQ ID NO: 157425 - DNA, 1302 bp, synthetic construct; identical to SEQ ID NO: 157424
  misc_feature 1..1302: note = Description of Artificial Sequence: Synthetic coding sequence
  source 1..1302: mol_type = other DNA

SEQ ID NO: 157426 - DNA, 1197 bp, synthetic construct
  misc_feature 1..1197: note = Description of Artificial Sequence: Synthetic coding sequence
  source 1..1197: mol_type = other DNA
atggtgtggaaggtggccgtgttcctgtctgtggccctgggcattggagctgtgcccattgatgatcctgaagatggcggcaagcactgggtggtgattgtggccggcagcaatggctggtacaactaccgccaccaggctgatgcctgccacgcctaccagatcatccacagaaatggcatcccagatgagcagatcgtggtgatgatgtatgatgtgaccccccagaacttcctggccgtgctgcggggagatgctgaggccgtgaagggcatcggcagcggcaaggtgctgaagagcggcccccaggaccacgtgttcatctacttcacagaccacggcagcacaggcatcctggtgttccccaatgaagacctgcacgtgaaggacctgaatgagaccatccactacatgtacaagcacaagatgtacaggaagatggtgttctacatcgaggcctgtgagagcggctccatgatgaaccacctgcctgacaacatcaacgtgtatgccaccacagctgccaacccccgggagagcagctatgcctgctactatgatgagaagaggagcacctacctgggggactggtacagcgtgaactggatggaggacagtgatgtggaggacctgaccaaggagaccctgcacaagcagtaccacctggtgaagagccacaccaacaccagccacgtgatgcagtatggcaacaagaccatcagcaccatgaaggtgatgcagttccagggcatgaagaggaaggccagcagccctgtgcccctgccccctgtgacccacctggacctgacccccagcccagatgtgcccctgaccatcatgaagaggaagctgatgaacaccaatgacctggaggagagccggcagctgacagaggagatccagaggcacctggatgcccggcacctgattgagaagtctgtgaggaagatcgtgtccctgctggccgccagcgaggccgaggtggagcagctgctgtctgagcgggcccccctgaccggccacagctgctacccagaggccctgctgcacttccgcacccactgcttcaactggcacagccccacctatgaatatgccctgcggcacctgtatgtgctggtgaacctgtgtgagaagccctaccccctgcaccgcatcaagctgtccatggaccacgtgtgcctgggccactactag

SEQ ID NO: 157427 - DNA, 1233 bp, synthetic construct
  misc_feature 1..1233: note = Description of Artificial Sequence: Synthetic coding sequence
  source 1..1233: mol_type = other DNA
atggtgtggaaggtggccgtgttcctgtctgtggccggcagcaatggctggtacaactaccgccaccaggctgatgcctgccacgcctaccagatcatccacagaaatggcatcccagatgagcagatcgtggtgatgatgtatgatgacatcgcctacagcgaggacaaccccaccccaggcatcgtcatcaaccggcccaacggcacagatgtgtaccagggcgtgcccaaggactacacaggagaagatgtgaccccccagaacttcctggccgtgctgcggggagatgctgaggccgtgaagggcatcggcagcggcaaggtgctgaagagcggcccccaggaccacgtgttcatctacttcacagaccacggcagcacaggcatcctggtgttccccaatgaagacctgcacgtgaaggacctgaatgagaccatccactacatgtacaagcacaagatgtacaggaagatggtgttctacatcgaggcctgtgagagcggctccatgatgaaccacctgcctgacaacatcaacgtgtatgccaccacagctgccaacccccgggagagcagctatgcctgctactatgatgagaagaggagcacctacctgggggactggtacagcgtgaactggatggaggacagtgatgtggaggacctgaccaaggagaccctgcacaagcagtaccacctggtgaagagccacaccaacaccagccacgtgatgcagtatggcaacaagaccatcagcaccatgaaggtgatgcagttccagggcatgaagaggaaggccagcagccctgtgcccctgccccctgtgacccacctggacctgacccccagcccagatgtgcccctgaccatcatgaagaggaagctgatgaacaccaatgacctggaggagagccggcagctgacagaggagatccagaggcacctggatgcccggcacctgattgagaagtctgtgaggaagatcgtgtccctgctggccgccagcgaggccgaggtggagcagctgctgtctgagcgggcccccctgaccggccacagctgctacccagaggccctgctgcacttccgcacccactgcttcaactggcacagccccacctatgaatatgccctgcggcacctgtatgtgctggtgaacctgtgtgagaagccctaccccctgcaccgcatcaagctgtccatggaccacgtgtgcctgggccactactag

SEQ ID NO: 157428 - DNA, 174 bp, synthetic construct
  misc_feature 1..174: note = Description of Artificial Sequence: Synthetic coding sequence
  source 1..174: mol_type = other DNA
atggtgtggaaggtggccgtgttcctgtctgtggccctgggcattggagctgtgcccattgatgatcctgaagatggcggcaagcactgggtggtgattgtggccggcagcaatggctggtacaactaccgccaccaggctgatgcctgccacgcctaccagatcatccactag

SEQ ID NO: 157429 - DNA, 60 bp, synthetic construct
  misc_feature 1..60: note = Description of Artificial Sequence: Synthetic coding sequence
  source 1..60: mol_type = other DNA
atggtgtggaaggtggccgtgttcctgtctgtggccctgggcattggagctgtgccctag

SEQ ID NO: 157430 - DNA, 177 bp, synthetic construct
  misc_feature 1..177: note = Description of Artificial Sequence: Synthetic coding sequence
  source 1..177: mol_type = other DNA
atggtgtggaaggtggccgtgttcctgtctgtggccctgggcattggagctgtgcccattgatgatcctgaagatggcggcaagcactgggtggtgattgtggccggcagcaatggctggtacaactaccgccaccaggctgatgcctgccacgcctaccagatcatccacaggtag

SEQ ID NO: 157431 - DNA, 237 bp, synthetic construct
  misc_feature 1..237: note = Description of Artificial Sequence: Synthetic coding sequence
  source 1..237: mol_type = other DNA
atggtgtggaaggtggccgtgttcctgtctgtggccctgggcattggagctgtgcccattgatgatcctgaagatggcggcaagcactgggtggtgattgtggccggcagcaatggctggtacaactaccgccaccaggctgatgcctgccacgcctaccagatcatccacagaaatggcatcccagatgagcagatcgtggtgatgatgtatgatgacatcgcctacagcgagtag

SEQ ID NO: 157432 - DNA, 237 bp, synthetic construct; identical to SEQ ID NO: 157431
  misc_feature 1..237: note = Description of Artificial Sequence: Synthetic coding sequence
  source 1..237: mol_type = other DNA

SEQ ID NO: 157433 - DNA, 2736 bp, synthetic construct
  misc_feature 1..2736: note = Description of Artificial Sequence: Synthetic coding sequence
  source 1..2736: mol_type = other DNA
atggctgctgctgctgccagcgccccccagcagctgagtgatgaggagctgttcagccagctgcggcgctatggcctgagccctggccctgtgacagagagcaccaggcctgtgtacctgaagaagctgaagaagctgcgggaggaggagcagcagcagcacaggtctgggggccggggcaacaagaccaggaacagcaacaacaacaacacagctgctgccaccgtggccgctgctggccctgctgctgctgctgctgctggcatgggcgtgcggcctgtgtctggggacctgagctacctgcggacccctgggggcctgtgccgcatcagcgccagcggccctgagagcctgctgggcggccctgggggcgccagcgctgccccagctgctggcagcaaggtgctgctgggcttcagcagtgatgaaagtgatgtggaggccagcccccgggaccaggccggcggcggcggcaggaaggaccgggccagcctgcagtaccggggcctgaaggcccccccagcccccctggccgccagcgaggtgaccaacagcaacagcgctgagaggaggaagccccacagctggtggggcgcccggcggcctgctggccctgagctgcagaccccacctgggaaggatggagctgtggaggatgaggagggggagggagaagatggagaggagcgggaccctgagacagaggagcccctgtgggccagcaggacagtgaatggcagccggctggtgccctacagctgccgggagaactacagcgacagcgaggaggaggatgatgatgatgtggccagcagccggcaggtgctgaaggatgacagcctgagccgccaccggcccaggaggacccacagcaagcccctgccccccctgacagccaagtctgctgggggccgcctggagacctctgtgcagggcggcggcggcctggccatgaatgacagagctgctgctgctggcagcctggacaggagcaggaacctggaggaggccgctgctgctgagcagggcggcggctgtgaccaggtggacagcagccctgtgccccgctacagagtgaatgccaagaagctgacccccctgctgcccccacccctgacagacatggacagcaccctggacagcagcacaggcagcctgctgaagaccaacaaccacatcggcggcggggccttctctgtggacagcccccgcatctacagcaacagcctgcccccatctgctgctgtggccgccagcagcagcctgcgcatcaaccacgccaaccacacaggcagcaaccacacctacctgaagaacacctacaacaagcccaagctgtctgagcctgaggaggagctgctgcagcagttcaagcgggaggaggtgagccccaccggcagcttcagcgcccactacctgtccatgttcctgctgacagctgcctgcctcttcttcctgatcctgggcctgacctacctgggcatgaggggcaccggggtgtctgaagatggagagctgagcattgagaacccctttggagagaccttcggcaagatccaggagagcgagaagaccctgatgatgaacaccctgtacaagctgcatgaccggctggcccagctggccggggaccatgaatgtggcagcagcagccagaggaccctgtctgtgcaggaggccgccgcctacctgaaggacctgggcccagaatatgagggcatcttcaacaccagcctgcagtggatcctggagaatggcaaggatgtgggcatccgctgtgtgggcttcggccctgaggaggagctgaccaacatcacagatgtgcagttcctgcagagcacccggcccctgatgtccttctggtgccgcttcagaagagcctttgtgacagtgacccaccggctgctgctgctgtgcctgggcgtggtgatggtgtgtgtggtgctgcgctacatgaagtaccgctggaccaaggaggaggaggagacccggcagatgtatgacatggtggtgaagatcattgatgtgctgcggagccacaatgaggcctgccaggagaacaaggacctgcagccctacatgcccatcccccacgtgcgggacagcctcatccagccccatgacaggaagaagatgaagaaggtgtgggacagagctgtggacttcctggccgccaatgaaagccgggtgaggacagagaccaggagaattggaggagctgacttcctggtgtggcgctggatccagcccagcgccagctgtgacaagatcctggtgatccccagcaaggtgtggcagggccaggccttccacctggacagaagaaacagcccccccaacagcctgaccccctgcctgaagatccggaacatgtttgatcctgtgatggagatcggggaccagtggcacctggccatccaggaggccatcctggagaagtgcagcgacaatgatggcatcgtgcacatcgctgtggacaagaacagccgggagggctgtgtgtatgtgaagtgcctgagcccagaatatgctgggaaggccttcaaggccctgcacggctcctggtttgatggcaagctggtgacagtgaagtacctgcggctggaccgctaccaccaccgcttcccccaggccctgaccagcaacacccccctgaagcccagcaacaagcacatgaacagcatgagccacctgcggctgaggacaggcctgaccaacagccagggcagcagctag

SEQ ID NO: 157434 - DNA, 4512 bp, synthetic construct
  misc_feature 1..4512: note = Description of Artificial Sequence: Synthetic coding sequence
  source 1..4512: mol_type = other DNA
atgcctggccccccagccctgcggcggcggctgctgctgctgctgctggtgctgctgattgctggcagcgctggggccgcccccctgccccagacaggagctggggaggcccccccagctgctgaggtgagcagcagctttgtgatcctgtgtgtgtgcagcctcatcatcctgattgtgctgattgccaactgtgtgtcctgctgcaaggaccctgagattgacttcaaggagtttgaggacaactttgatgatgaaattgacttcaccccacctgctgaggacacccccagcgtgcagagccctgctgaggtgttcaccctgtctgtgcccaacatcagcctgcctgcccccagccagttccagcccagcgtggagggcctgaagagccaggtggcccggcacagcctgaactacatccaggagattggaaatggctggtttgggaaggtgctgctgggggagatctacacaggcacctctgtggcccgggtcatcgtgaaggagctgaaggccagcgccaaccccaaggagcaggacaccttcctgaagaatggagagccctactacatcctgcagcaccccaacatcctgcagtgtgtgggccagtgtgtggaggccatcccctacctgctggtgtttgagttctgtgacctgggggacctgaaggcctacctgcggtctgagcaggagcacatgagaggagacagccagaccatgctgctgcagaggatggcctgtgaggtggccgccggcctggccgccatgcacaagctgcacttcctgcacagcgacctggccctgaggaactgcttcctgaccagtgacctgaatgtgaaggtgggggactatggcatcggcttcagccgctacaaggaggactacatcgagacagatgacaagaaggtgttccccctgcgctggacagcccctgagctggtgaccagcttccaggaccggctgctgacagctgaccagaccaagtacagcaacatctggagcctgggcgtgaccctgtgggagctgtttgacaatgctgcccagccctacagcaacctgagcaacctggatgtgctgaaccaggtgatccgggagcgggacaccaagctgcccaagccccagctggagcagccctacagcgaccgctggtatgaggtgctgcagttctgctggctgagccctgagaagaggcctgctgctgaagatgtgcaccggctgctgacctacctgcggctgcagagccagagggacagcgaggtggactttgagcagcagtggaatgccctgaagcccaacaccaacagccgggacagcagcaacaatgctgccttccccatcctggaccactttgcccgggaccggctgggccgggagatggaggaggtgctgactgtgacagagaccagccagggcctgagctttgaatatgtgtgggaggccgccaagcatgaccactttgatgagaggagccggggccacctggatgagggcctgagctacaccagcatcttctaccctgtggaggtgtttgagagcagcctgagtgaccccggccctgggaagcaggatgattctggccaggatgtgcccctgcgggtgcctggggtggtgcctgtgtttgatgcccacaacctgtctgtgggcagtgactactacatccagctggaggagaagagcggcagcaacctggagctggactaccccccagccctgctgaccacagacatggacaaccctgagaggacaggccctgagctgagccagctgacagccctgcggtctgtggagctggaggagagcagcacagatgaggacttcttccagagcagcacagaccccaaggacagcagcctgcccggggacctgcacgtgaccagcggccctgagagccccttcaacaacatcttcaatgatgtggacaagtctgaggacctgcccagccaccagaagatctttgacctgatggagctgaatggagtgcaggccgacttcaagccagccaccctgagcagcagcctggacaaccccaaggagagcgtcatcaccggccactttgagaaggagaagcccaggaagatctttgacagcgagcccctgtgcctgagtgacaacctgatgcaccaggacaactttgaccccctgaatgtgcaggagctgtctgagaacttcctgttcctgcaggagaagaacctgctgaagggcagcctgagcagcaaggagcacatcaatgacctgcagacagagctgaagaatgccggcttcacagaggccatgctggagaccagctgcaggaacagcctggacacagagctgcagtttgctgagaacaagccaggcctgagcctgctgcaggagaatgtgtccaccaagggagatgacacagatgtgatgctgactggagacaccctgagcaccagcctgcagagcagccctgaggtgcaggtgccccccaccagctttgaaacagaggagaccccaagaagagtgcccccagacagcctgcccacccagggcgagacccagcccacctgcctggatgtgattgtgcctgaggactgcctgcaccaggacatcagcccagatgctgtgacagtgcctgtggagatcctgagcacagatgcccggacccacagcctggacaacagaagccaggacagccctggagagagcgaggagaccctgcggctgacagaaagtgacagcgtgctggctgatgacatcctggccagccgggtgtctgtgggcagcagcctgcctgagctgggccaggagctgcacaacaagcccttcagcgaggaccaccacagccaccggcggctggagaagaacctggaggccgtggagaccctgaaccagctgaacagcaaggatgctgccaaggaggccggcctggtgtctgccctgagcagtgacagcaccagccaggacagcctgctggaggacagcctgagcgcccccttccctgccagcgagcccagcctggagaccccagacagcctggagagcgtggatgtgcatgaggccctgctggacagcctgggcagccacaccccccagaagctggtgcccccagacaagccagctgacagcggctatgaaacagagaacctggagagccctgagtggaccctgcacccagcccctgagggcacagctgacagcgagcccgccaccactggagatggcggccacagcggcctgccccccaaccctgtgattgtcatcagtgatgctggagatggccaccggggcacagaggtgaccccagagaccttcaccgctggcagccagggcagctacagagattctgcctacttcagtgacaatgattctgagcctgagaagaggtctgaggaggtgcccggcaccagccccagcgccctggtgctggtgcaggagcagcccctgcctgagcctgtgctgcctgagcagagccctgctgcccaggacagctgcctggaggccaggaagagccagccagatgagagctgcctgagcgccctgcacaacagcagtgacctggagctgcgggccaccccagagcccgcccagacaggagtgccccagcaggtgcaccccacagaagatgaggccagcagcccctggagcgtgctgaatgctgagctgagcagtggagatgactttgagacccaggatgaccggccctgcaccctggccagcacaggcaccaacaccaatgagctgctggcctacaccaacagcgccctggacaagagcctgagcagccacagcgagggccccaagctgaaggagccagacatcgagggcaagtacctgggcaagctgggcgtgtctggcatgctggacctgtctgaagatggcatggatgctgatgaagaagatgaaaattctgatgacagtgatgaggacctgcgggccttcaacctgcacagcctgagcagcgagagtgaagatgaaacagagcaccctgtgcccatcatcctgagcaatgaagatggccgccacctgcggagcctgctgaagcccacagctgccaatgccccagaccccctgcctgaggactggaagaaggagaagaaggctgtgaccttctttgatgatgtgacagtgtacctgtttgaccaggagacccccaccaaggagctgggcccctgtggcggggaggcctgtggccctgacctgagcggccctgccccagccagcggcagcccctacctgagccgctgcatcaacagcgagagcagcacagatgaggagggcggcggctttgagtgggatgatgacttctccccagaccccttcatgagcaagaccaccagcaacctgctgagcagcaagcccagcctgcagaccagcaagtacttcagccccccacctccagcccggagcacagagcagagctggccccacagcgccccctacagccgcttcagcatcagccctgccaacatcgccagcttcagcctgacccacctgacagacagcgacatcgagcagggcggcagcagtgaagatggagagaaggactag

SEQ ID NO: 157435 - DNA, 186 bp, synthetic construct
  misc_feature 1..186: note = Description of Artificial Sequence: Synthetic coding sequence
  source 1..186: mol_type = other DNA
atgcagcccaggacccagcccctggcccagaccctgcccttcttcctgggcggggccccccgggacaccggcctgcgggtgcctgtgatcaagatgggcaccggctgggagggcttccagaggaccctgaaggaggtggcctacatcctgctgtgctgctggtgcatcaaggagctgctggactag

SEQ ID NO: 157436 - DNA, 186 bp, synthetic construct; identical to SEQ ID NO: 157435
  misc_feature 1..186: note = Description of Artificial Sequence: Synthetic coding sequence
  source 1..186: mol_type = other DNA

SEQ ID NO: 157437 - DNA, 522 bp, synthetic construct
  misc_feature 1..522: note = Description of Artificial Sequence: Synthetic coding sequence
  source 1..522: mol_type = other DNA
atgtacagcttcatgggcggcggcctcttctgtgcctgggtgggcaccatcctgctggtggtggccatggccacagaccactggatgcagtaccgcctgagcggcagctttgcccaccagggcctgtggagatactgcctgggcaacaagtgctacctgcagacagacagcatcgcctactggaatgccacccgggccttcatgatcctgagcgccctgtgtgccatcagcggcatcatcatgggcatcatggcctttgcccaccagcccaccttcagccgcatcagccggcccttctctgctggcatcatgttcttcagcagcaccctgtttgtggtgctggccctggccatctacacaggagtgacagtgtccttcctgggcagaagatttggagactggaggttctcctggagctacatcctgggctgggtggccgtgctgatgaccttctttgctggcatcttctacatgtgtgcctacagagtgcatgaatgtagaaggctgagcaccccaagatag

SEQ ID NO: 157438 - DNA, 681 bp, synthetic construct
  misc_feature 1..681: note = Description of Artificial Sequence: Synthetic coding sequence
  source 1..681: mol_type = other DNA
atgcctgggggccctggggtgctgcaggccctgcctgccaccatcttcctgctcttcctgctgtctgctgtgtacctgggccctggctgccaggccctgtggatgcacaaggtgcctgccagcctgatggtgtccctgggggaggatgcccacttccagtgcccccacaacagcagcaacaatgccaacgtgacctggtggagggtgctgcacggcaactacacctggcccccagagttcctgggccctggagaggaccccaacggcaccctcatcatccagaatgtgaacaagagccacggcggcatctacgtgtgccgggtgcaggagggcaatgaaagctaccagcagagctgtggcacctacctgcgggtgcggcagcccccaccccggcccttcctggacatgggagagggcaccaagaaccgcatcatcacagctgagggcatcatcctgctcttctgtgctgtggtgcccggcaccctgctgctcttcaggaagcgctggcagaatgagaagctgggcctggatgctggagatgaatatgaagatgagaacctgtatgagggcctgaacctggatgactgcagcatgtatgaggacatcagccggggcctgcagggcacctaccaggatgtgggcagcctgaacattggagatgtgcagctggagaagccctag

SEQ ID NO: 157439 - DNA, 2001 bp, synthetic construct
  misc_feature 1..2001: note = Description of Artificial Sequence: Synthetic coding sequence
  source 1..2001: mol_type = other DNA
atggctgacatggaggacctgtttggaagtgatgctgacagcgaggccgagaggaaggacagcgacagcggcagtgacagcgacagcgaccaggagaatgctgccagcggcagcaatgccagcggcagcgagagtgaccaggatgagcggggggacagcggccagcccagcaacaaggagctgtttggagatgacagtgaagatgagggcgccagccaccacagcggcagtgacaaccacagcgagaggagtgacaacagaagtgaggccagcgagaggagtgaccatgaagataatgaccccagtgatgtggaccagcacagcggcagcgaggccccaaatgatgatgaagatgagggccacagaagtgatggcggcagccaccacagcgaggccgagggcagcgagaaggcccacagtgatgatgagaagtggggccgggaggacaagagtgaccagagtgatgatgagaagatccagaacagtgatgatgaggagcgggcccagggcagtgatgaggacaagctgcagaacagtgatgatgatgagaagatgcagaacacagatgatgaggagcggccccagctgagtgatgatgagcggcagcagctgtctgaggaggagaaggccaacagtgatgatgagaggcctgtggccagtgacaatgatgatgagaagcagaacagtgatgatgaggagcagccccagctgagtgatgaggagaagatgcagaacagtgatgatgagcggccccaggccagtgatgaggagcaccgccacagtgatgatgaggaggagcaggaccacaagtctgagagcgcccggggcagtgacagtgaagatgaggtgctgaggatgaagaggaagaatgccatcgccagtgacagcgaggccgacagcgacacagaggtgcccaaggacaacagcggcaccatggacctgtttggaggagcagatgacatcagcagcggcagtgatggagaggacaagccacccaccccaggccagcctgtggatgaaaatggcctgccccaggaccagcaggaggaggagcccatccctgagacccgcatcgaggtggagatccccaaggtgaacacagacctgggcaatgacctgtactttgtgaagctgcccaacttcctgtctgtggagccccggccctttgacccccagtactatgaagatgaatttgaagatgaggagatgctggatgaggagggccgcacccggctgaagctgaaggtggagaacaccatccgctggaggatcagaagagatgaggagggcaatgagatcaaggagagcaatgcccgcatcgtgaagtggagcgatggctccatgagcctgcacctgggcaatgaggtgtttgatgtgtacaaggcccccctgcagggcgaccacaaccacctgttcatccggcagggcaccggcctgcagggccaggccgtgttcaagaccaagctgaccttccggccccacagcacagacagcgccacccacaggaagatgaccctgagcctggccgaccgctgcagcaagacccagaagatccgcatcctgcccatggccggccgggaccctgagtgccagaggacagagatgatcaagaaggaggaggagcggctgcgggccagcatccggcgggagagccagcagaggaggatgagggagaagcagcaccagaggggcctgagcgccagctacctggagccagacagatatgatgaggaggaggagggggaggagagcatcagcctggccgccatcaagaaccgctacaagggcggcatccgggaggagcgggcccgcatctacagcagtgacagtgatgagggcagcgaggaggacaaggcccagaggctgctgaaggccaagaagctgaccagtgatgaggagggggagcccagcggcaagaggaaggcagaagatgatgacaaggccaacaagaagcacaagaagtatgtgatcagtgatgaggaggaggaggatgatgactag

SEQ ID NO: 157440 - DNA, 1821 bp, synthetic construct
  misc_feature 1..1821: note = Description of Artificial Sequence: Synthetic coding sequence
  source 1..1821: mol_type = other DNA
atggctgacatggaggacctgtttggaagtgatgctgacagcgaggccgagaggaaggacagcgacagcggcagtgacagcgacagcgaccaggagaatgctgccagcggcagcaatgccagcggcagcgagagtgaccaggatgagcggggggacagcggccagcccagcaacaaggagctgtttggagatgacagtgaagatgagggcgccagccaccacagcggcagtgacaaccacagcgagaggagtgacaacagaagtgaggccagcgagaggagtgaccatgaagataatgaccccagtgatgtggaccagcacagcggcagcgaggccccaaatgatgatgaagatgagggccacagaagtgatggcggcagccaccacagcgaggccgagggcagcgagaaggcccacagtgatgatgagaagtggggccgggaggacaagagtgaccagagtgatgatgagaagatccagaacagtgatgatgaggagcgggcccagggcagtgatgaggacaagctgcagaacagtgatgatgatgagaagatgcagaacacagatgatgaggagcggccccagctgagtgatgatgagcggcagcagctgtctgaggaggagaaggccaacagtgatgatgagaggcctgtggccagtgacaatgatgatgagaagcagaacagtgatgatgaggagcagccccagctgagtgatgaggagaagatgcagaacagtgatgatgagcggccccaggccagtgatgaggagcaccgccacagtgatgatgaggaggagcaggaccacaagtctgagagcgcccggggcagtgacagtgaagatgaggtgctgaggatgaagaggaagaatgccatcgccagtgacagcgaggccgacagcgacacagaggtgcccaaggacaacagcggcaccatggacctgtttggaggagcagatgacatcagcagcggcagtgatggagaggacaagccacccaccccaggccagcctgtggatgaaaatggcctgccccaggaccagcaggaggaggagcccatccctgagacccgcatcgaggtggagatccccaaggtgaacacagacctgggcaatgacctgtactttgtgaagctgcccaacttcctgtctgtggagcccagcatgagcctgcacctgggcaatgaggtgtttgatgtgtacaaggcccccctgcagggcgaccacaaccacctgttcatccggcagggcaccggcctgcagggccaggccgtgttcaagaccaagctgaccttccggccccacagcacagacagcgccacccacaggaagatgaccctgagcctggccgaccgctgcagcaagacccagaagatccgcatcctgcccatggccggccgggaccctgagtgccagaggacagagatgatcaagaaggaggaggagcggctgcgggccagcatccggcgggagagccagcagaggaggatgagggagaagcagcaccagaggggcctgagcgccagctacctggagccagacagatatgatgaggaggaggagggggaggagagcatcagcctggccgccatcaagaaccgctacaagggcggcatccgggaggagcgggcccgcatctacagcagtgacagtgatgagggcagcgaggaggacaaggcccagaggctgctgaaggccaagaagctgaccagtgatgaggagggggagcccagcggcaagaggaaggcagaagatgatgacaaggccaacaagaagcacaagaagtatgtgatcagtgatgaggaggaggaggatgatgactag

SEQ ID NO: 157441 - DNA, 1935 bp, synthetic construct
  misc_feature 1..1935: note = Description of Artificial Sequence: Synthetic coding sequence
  source 1..1935: mol_type = other DNA
atggctgacatggaggacctgtttggaagtgatgctgacagcgaggccgagaggaaggacagcgacagcggcagtgacagcgacagcgaccaggagaatgctgccagcggcagcaatgccagcggcagcgagagtgaccaggatgagcggggggacagcggccagcccagcaacaaggagctgtttggagatgacagtgaagatgagggcgccagccaccacagcggcagtgacaaccacagcgagaggagtgacaacagaagtgaggccagcgagaggagtgaccatgaagataatgaccccagtgatgtggaccagcacagcggcagcgaggccccaaatgatgatgaagatgagggccacagaagtgatggcggcagccaccacagcgaggccgagggcagcgagaaggcccacagtgatgatgagaagtggggccgggaggacaagagtgaccagagtgatgatgagaagatccagaacagtgatgatgaggagcgggcccagggcagtgatgaggacaagctgcagaacagtgatgatgatgagaagatgcagaacacagatgatgaggagcggccccagctgagtgatgatgagcggcagcagctgtctgaggaggagaaggccaacagtgatgatgagaggcctgtggccagtgacaatgatgatgatgatgagcggccccaggccagtgatgaggagcaccgccacagtgatgatgaggaggagcaggaccacaagtctgagagcgcccggggcagtgacagtgaagatgaggtgctgaggatgaagaggaagaatgccatcgccagtgacagcgaggccgacagcgacacagaggtgcccaaggacaacagcggcaccatggacctgtttggaggagcagatgacatcagcagcggcagtgatggagaggacaagccacccaccccaggccagcctgtggatgaaaatggcctgccccaggaccagcaggaggaggagcccatccctgagacccgcatcgaggtggagatccccaaggtgaacacagacctgggcaatgacctgtactttgtgaagctgcccaacttcctgtctgtggagccccggccctttgacccccagtactatgaagatgaatttgaagatgaggagatgctggatgaggagggccgcacccggctgaagctgaaggtggagaacaccatccgctggaggatcagaagagatgaggagggcaatgagatcaaggagagcaatgcccgcatcgtgaagtggagcgatggctccatgagcctgcacctgggcaatgaggtgtttgatgtgtacaaggcccccctgcagggcgaccacaaccacctgttcatccggcagggcaccggcctgcagggccaggccgtgttcaagaccaagctgaccttccggccccacagcacagacagcgccacccacaggaagatgaccctgagcctggccgaccgctgcagcaagacccagaagatccgcatcctgcccatggccggccgggaccctgagtgccagaggacagagatgatcaagaaggaggaggagcggctgcgggccagcatccggcgggagagccagcagaggaggatgagggagaagcagcaccagaggggcctgagcgccagctacctggagccagacagatatgatgaggaggaggagggggaggagagcatcagcctggccgccatcaagaaccgctacaagggcggcatccgggaggagcgggcccgcatctacagcagtgacagtgatgagggcagcgaggaggacaaggcccagaggctgctgaaggccaagaagctgaccagtgatgaggagggggagcccagcggcaagaggaaggcagaagatgatgacaaggccaacaagaagcacaagaagtatgtgatcagtgatgaggaggaggaggatgatgactag

SEQ ID NO: 157442 - DNA, 2127 bp, synthetic construct
  misc_feature 1..2127: note = Description of Artificial Sequence: Synthetic coding sequence
  source 1..2127: mol_type = other DNA
atgagggagcgcatctgggccccacccctgctgctgctgctgcccctgctgctgcccccacccctgtggggcggccccccagacagcccccggcgggagctggagctggagcccggccccctgcagccctttgacctgctgtatgccagcggggctgctgcctactacagcggggactatgaaagagctgtgcgggacctggaggccgccctgcggagccaccggcggctgcgggagatccgcacccgctgtgcccggcactgtgccgcccggcaccccctgcccccacctcctcctggagagggccctggagctgagctgcccctcttccgcagcctgctgggccgggcccgctgctaccgcagctgtgagacccagaggctgggcggccctgccagccgccaccgggtgtctgaagatgtgcggagtgacttccagaggagagtgccctacaactacctgcagagggcctacatcaagctgaaccagctggagaaggctgtggaggccgcccacaccttctttgtggccaaccctgagcacatggagatgcagcagaacatcgagaactaccgggccacagctggggtggaggccctgcagctggtggaccgggaggccaagccccacatggagagctacaatgctggggtgaagcactatgaagcagatgactttgagatggccatccgccactttgagcaggccctgcgggagtactttgtggaggacacagagtgcaggaccctgtgtgagggcccccagagatttgaggagtatgagtacctgggctacaaggccggcctgtatgaggccatcgctgaccactacatgcaggtgctggtgtgccagcatgaatgtgtgcgggagctggccaccaggcctggccgcctgagccccatcgagaacttcctgcccctgcactatgactacctgcagtttgcctactacagagtgggggagtatgtgaaggccctggagtgtgccaaggcctacctgctgtgccacccagatgatgaagatgtgctggacaacgtggactactatgagagcctgctggatgacagcattgatcctgccagcattgaggcccgggaggacctgaccatgtttgtgaagaggcacaagctggagagcgagctgatcaagtctgctgctgagggcctgggcttctcctacacagagcccaactactggatccgctatggaggccggcaggatgagaacagagtgcccagcggcgtgaatgtggagggcgctgaggtgcacggcttctccatgggcaagaagctgagccccaagattgaccgggacctgcgggagggcggccccctgctgtatgagaacatcacctttgtgtacaacagcgagcagctgaatggcacccagagggtgctgctggacaacgtgctgtctgaggagcagtgccgggagctgcacagcgtggccagcggcatcatgctggtgggagatggctaccggggcaagaccagcccccacaccccaaatgagaagtttgagggcgccaccgtgctgaaggccctgaagagcggctatgagggccgggtgcccctgaagagcgcccggctcttctatgacatcagcgagaaggccaggagaattgtggagagctacttcatgctgaacagcaccctgtacttctcctacacccacatggtgtgcaggacagccctgagcggccagcaggacagaagaaatgacctgagccaccccatccatgctgacaactgcctgctggaccctgaggccaatgaatgctggaaggagcccccagcctacaccttccgggactacagcgccctgctgtacatgaatgatgactttgaaggaggagagttcatcttcacagagatggatgccaagacagtgacagccagcatcaagcccaagtgtggccgcatgatctccttcagcagtggaggagagaacccccacggcgtgaaggctgtgaccaagggcaagagatgtgctgtggccctgtggttcaccctggaccccctgtaccgggagctggagcgcatccaggctgatgaggtgattgccatcctggaccaggagcagcagggcaagcatgagctgaacatcaaccccaaggatgagctgtag

SEQ ID NO: 157443 - DNA, 1584 bp, synthetic construct
  misc_feature 1..1584: note = Description of Artificial Sequence: Synthetic coding sequence
  source 1..1584: mol_type = other DNA
atggagatgcagcagaacatcgagaactaccgggccacagctggggtggaggccctgcagctggtggaccgggaggccaagccccacatggagagctacaatgccggcgtgaagcactatgaagcagatgactttgagatggccatccgccactttgagcaggccctgcgggagtactttgtggaggacacagaatgtaggaccctgtgtgagggcccccagagatttgaggagtatgagtacctgggctacaaggccggcctgtatgaggccatcgctgaccactacatgcaggtgctggtgtgccagcatgaatgtgtgcgggagctggccacccggcccggccgcctgagccccatcgagaacttcctgcccctgcactatgactacctgcagtttgcctactacagagtgggggagtatgtgaaggccctggagtgtgccaaggcctacctgctgtgccacccagatgatgaagatgtgctggacaacgtggactactatgagagcctgctggatgacagcattgatcctgccagcattgaggcccgggaggacctgaccatgtttgtgaagaggcacaagctggagagcgagctgatcaagtctgctgctgagggcctgggcttctcctacacagagcccaactactggatccgctatggaggccggcaggatgaaaatagagtgcccagcggcgtgaatgtggagggcgctgaggtgcacggcttctccatgggcaagaagctgagccccaagattgaccgggacctgcgggagggcggccccctgctgtatgagaacatcacctttgtgtacaacagcgagcagctgaatggcacccagagggtgctgctggacaacgtgctgtctgaggagcagtgccgggagctgcacagcgtggccagcggcatcatgctggtgggagatggctaccggggcaagaccagcccccacaccccaaatgagaagtttgaaggagccaccgtgctgaaggccctgaagagcggctatgagggccgggtgcccctgaagagcgcccggctcttctatgacatcagcgagaaggcccggcgcatcgtggagagctacttcatgctgaacagcaccctgtacttctcctacacccacatggtgtgcaggacagccctgagcggccagcaggacagaagaaatgacctgagccaccccatccacgccgacaactgcctgctggaccctgaggccaatgaatgctggaaggagcccccagcctacaccttccgggactacagcgccctgctgtacatgaatgatgactttgagggcggggagttcatcttcacagagatggatgccaagacagtgacagccagcatcaagcccaagtgtggccgcatgatctccttcagcagtggaggagagaacccccatggagtgaaggctgtgaccaagggcaagagatgtgctgtggccctgtggttcaccctggaccccctgtaccgggagctggagcgcatccaggctgatgaagtcatcgccatcctggaccaggagcagcagggcaagcatgagctgaacatcaaccccaaggatgagctgtag

SEQ ID NO: 157444 - DNA, 2721 bp, synthetic construct
  misc_feature 1..2721: note = Description of Artificial Sequence: Synthetic coding sequence
  source 1..2721: mol_type = other DNA
atgatctgccagaagttctgtgtggtgctgctgcactgggagttcatctacgtgatcacagccttcaacctgagctaccccatcaccccctggaggttcaagctgagctgcatgccacccaacagcacctatgactacttcctgctgcctgctggcctgagcaagaacaccagcaacagcaatggccactatgaaacagctgtggagcccaagttcaacagcagcggcacccacttcagcaacctgagcaagaccaccttccactgctgcttccgctctgagcaggacaggaactgcagcctgtgtgccgacaacatcgagggcaagacctttgtgtccacagtgaacagcctggtgttccagcagattgatgccaactggaacatccagtgctggctgaagggggacctgaagctgttcatctgctacgtggagagcctcttcaagaacctcttcaggaactacaactacaaggtgcacctgctgtatgtgctgcctgaggtgctggaggacagccccctggtgccccagaagggcagcttccagatggtgcactgcaactgcagcgtgcatgagtgctgtgaatgtctggtgcctgtgcccacagccaagctgaatgacaccctgctgatgtgcctgaagatcaccagcggaggagtcatcttccagagccccctgatgtctgtgcagcccatcaacatggtgaagccagacccccccctgggcctgcacatggagatcacagatgatggcaacctgaagatctcctggagcagcccccccctggtgcccttccccctgcagtaccaggtgaagtacagcgagaacagcaccaccgtcatccgggaggccgacaagatcgtgtctgccaccagcctgctggtggacagcatcctgcccggcagcagctatgaggtgcaggtgcggggcaagaggctggatggccctggcatctggagcgactggagcacccccagggtcttcaccacccaggacgtcatctacttcccccccaagatcctgacctctgtgggcagcaatgtgtccttccactgcatctacaagaaggagaacaagatcgtgcccagcaaggagatcgtgtggtggatgaacctggccgagaagatcccccagagccagtatgatgtggtgtctgaccacgtgtccaaggtgaccttcttcaacctgaatgagaccaagccccggggcaagttcacctatgatgctgtgtactgctgcaatgaacatgagtgccaccacagatatgcagagctgtatgtgattgatgtgaacatcaacatcagctgtgaaacagatggctacctgaccaagatgacctgccgctggagcaccagcaccatccagagcctggccgagagcaccctgcagctgcgctaccacaggagcagcctgtactgcagcgacatccccagcatccaccccatcagcgagcccaaggactgctacctgcagagtgatggcttctatgagtgcatcttccagcccatcttcctgctgagcggctacaccatgtggatccgcatcaaccacagcctgggcagcctggacagcccccccacctgtgtgctgcctgattctgtggtgaagcccctgccccccagctctgtgaaggccgagatcaccatcaacatcggcctgctgaagatctcctgggagaagcctgtgtttcctgagaacaacctgcagttccagatccgctatggcctgagcggcaaggaggtgcagtggaagatgtatgaggtgtatgatgccaagagcaagtctgtgtccctgcctgtgcctgacctgtgtgctgtgtatgctgtgcaggtgcgctgcaagaggctggatggcctgggctactggagcaactggagcaacccagcctacacagtggtgatggacatcaaggtgcccatgaggggccctgagttctggaggatcatcaacggggacaccatgaagaaggagaagaatgtgaccctgctgtggaagcccctgatgaagaatgacagcctgtgcagcgtgcagagatatgtgatcaaccaccacaccagctgcaatggcacctggagcgaagatgtgggcaaccacaccaagttcaccttcctgtggacagagcaggcccacacagtgacagtgctggccatcaacagcatcggggcctctgtggccaacttcaacctgaccttctcctggcccatgagcaaggtgaacatcgtgcagagcctgagcgcctaccccctgaacagcagctgtgtgattgtgtcctggatcctgagccccagcgactacaagctgatgtacttcatcatcgagtggaagaacctgaatgaagatggagagatcaagtggctgcgcatcagcagctctgtgaagaagtactacatccatgaccacttcatccccatcgagaagtaccagttcagcctgtaccccatcttcatggagggcgtgggcaagcccaagatcatcaacagcttcacccaggatgacatcgagaagcaccagagtgatgctggcctgtatgtgattgtgcctgtgatcatcagcagcagcatcctgctgctgggcaccctgctgatcagccaccagaggatgaagaagctgttctgggaggatgtgcccaaccccaagaactgctcctgggcccagggcctgaacttccagaagaagatgcctggcaccaaggagctgctgggcggcggctggctgacctag

SEQ ID NO: 157445 - DNA, 3498 bp, synthetic construct
  misc_feature 1..3498: note = Description of Artificial Sequence: Synthetic coding sequence
  source 1..3498: mol_type = other DNA
atgatctgccagaagttctgtgtggtgctgctgcactgggagttcatctacgtgatcacagccttcaacctgagctaccccatcaccccctggaggttcaagctgagctgcatgccacccaacagcacctatgactacttcctgctgcctgctggcctgagcaagaacaccagcaacagcaatggccactatgaaacagctgtggagcccaagttcaacagcagcggcacccacttcagcaacctgagcaagaccaccttccactgctgcttccgctctgagcaggacaggaactgcagcctgtgtgccgacaacatcgagggcaagacctttgtgtccacagtgaacagcctggtgttccagcagattgatgccaactggaacatccagtgctggctgaagggggacctgaagctgttcatctgctacgtggagagcctcttcaagaacctcttcaggaactacaactacaaggtgcacctgctgtatgtgctgcctgaggtgctggaggacagccccctggtgccccagaagggcagcttccagatggtgcactgcaactgcagcgtgcatgagtgctgtgaatgtctggtgcctgtgcccacagccaagctgaatgacaccctgctgatgtgcctgaagatcaccagcggaggagtcatcttccagagccccctgatgtctgtgcagcccatcaacatggtgaagccagacccccccctgggcctgcacatggagatcacagatgatggcaacctgaagatctcctggagcagcccccccctggtgcccttccccctgcagtaccaggtgaagtacagcgagaacagcaccaccgtcatccgggaggccgacaagatcgtgtctgccaccagcctgctggtggacagcatcctgcccggcagcagctatgaggtgcaggtgcggggcaagaggctggatggccctggcatctggagcgactggagcacccccagggtcttcaccacccaggacgtcatctacttcccccccaagatcctgacctctgtgggcagcaatgtgtccttccactgcatctacaagaaggagaacaagatcgtgcccagcaaggagatcgtgtggtggatgaacctggccgagaagatcccccagagccagtatgatgtggtgtctgaccacgtgtccaaggtgaccttcttcaacctgaatgagaccaagccccggggcaagttcacctatgatgctgtgtactgctgcaatgaacatgagtgccaccacagatatgcagagctgtatgtgattgatgtgaacatcaacatcagctgtgaaacagatggctacctgaccaagatgacctgccgctggagcaccagcaccatccagagcctggccgagagcaccctgcagctgcgctaccacaggagcagcctgtactgcagcgacatccccagcatccaccccatcagcgagcccaaggactgctacctgcagagtgatggcttctatgagtgcatcttccagcccatcttcctgctgagcggctacaccatgtggatccgcatcaaccacagcctgggcagcctggacagcccccccacctgtgtgctgcctgattctgtggtgaagcccctgccccccagctctgtgaaggccgagatcaccatcaacatcggcctgctgaagatctcctgggagaagcctgtgtttcctgagaacaacctgcagttccagatccgctatggcctgagcggcaaggaggtgcagtggaagatgtatgaggtgtatgatgccaagagcaagtctgtgtccctgcctgtgcctgacctgtgtgctgtgtatgctgtgcaggtgcgctgcaagaggctggatggcctgggctactggagcaactggagcaacccagcctacacagtggtgatggacatcaaggtgcccatgaggggccctgagttctggaggatcatcaacggggacaccatgaagaaggagaagaatgtgaccctgctgtggaagcccctgatgaagaatgacagcctgtgcagcgtgcagagatatgtgatcaaccaccacaccagctgcaatggcacctggagcgaagatgtgggcaaccacaccaagttcaccttcctgtggacagagcaggcccacacagtgacagtgctggccatcaacagcatcggggcctctgtggccaacttcaacctgaccttctcctggcccatgagcaaggtgaacatcgtgcagagcctgagcgcctaccccctgaacagcagctgtgtgattgtgtcctggatcctgagccccagcgactacaagctgatgtacttcatcatcgagtggaagaacctgaatgaagatggagagatcaagtggctgcgcatcagcagctctgtgaagaagtactacatccatgaccacttcatccccatcgagaagtaccagttcagcctgtaccccatcttcatggagggcgtgggcaagcccaagatcatcaacagcttcacccaggatgacatcgagaagcaccagagtgatgctggcctgtatgtgattgtgcctgtgatcatcagcagcagcatcctgctgctgggcaccctgctgatcagccaccagaggatgaagaagctgttctgggaggatgtgcccaaccccaagaactgctcctgggcccagggcctgaacttccagaagccagagacctttgagcacctgttcatcaagcacacagcctctgtgacctgtggccccctgctgctggagcctgagaccatcagcgaggacatctctgtggacacctcctggaagaacaaggatgagatgatgcccaccaccgtggtgtccctgctgagcaccacagacctggagaagggctctgtgtgcatcagtgaccagttcaacagcgtgaacttcagcgaggccgagggcacagaggtgacctatgaagatgagagccagaggcagccctttgtgaagtatgccaccctcatcagcaacagcaagcccagcgagaccggggaggagcagggcctcatcaacagctctgtgaccaagtgcttcagcagcaagaacagccccctgaaggacagcttcagcaacagctcctgggagattgaggcccaggccttcttcatcctgagtgaccagcaccccaacatcatcagcccccacctgaccttcagcgagggcctggatgagctgctgaagctggagggcaacttccctgaggagaacaatgacaagaagagcatctactacctgggcgtgaccagcatcaagaagcgggagagcggcgtgctgctgacagacaagagccgggtgtcctgccccttccctgccccctgcctcttcacagacatccgggtgctgcaggacagctgcagccactttgtggagaacaacatcaacctgggcaccagcagcaagaagacctttgccagctacatgccccagttccagacctgcagcacccagacccacaagatcatggagaacaagatgtgtgacctgactgtgtag

SEQ ID NO: 157446 - DNA, 2721 bp, synthetic construct; identical to SEQ ID NO: 157444
  misc_feature 1..2721: note = Description of Artificial Sequence: Synthetic coding sequence
  source 1..2721: mol_type = other DNA

SEQ ID NO: 157447 - DNA, 2877 bp, synthetic construct
  misc_feature 1..2877: note = Description of Artificial Sequence: Synthetic coding sequence
  source 1..2877: mol_type = other DNA
atgatctgccagaagttctgtgtggtgctgctgcactgggagttcatctacgtgatcacagccttcaacctgagctaccccatcaccccctggaggttcaagctgagctgcatgccacccaacagcacctatgactacttcctgctgcctgctggcctgagcaagaacaccagcaacagcaatggccactatgaaacagctgtggagcccaagttcaacagcagcggcacccacttcagcaacctgagcaagaccaccttccactgctgcttccgctctgagcaggacaggaactgcagcctgtgtgccgacaacatcgagggcaagacctttgtgtccacagtgaacagcctggtgttccagcagattgatgccaactggaacatccagtgctggctgaagggggacctgaagctgttcatctgctacgtggagagcctcttcaagaacctcttcaggaactacaactacaaggtgcacctgctgtatgtgctgcctgaggtgctggaggacagccccctggtgccccagaagggcagcttccagatggtgcactgcaactgcagcgtgcatgagtgctgtgaatgtctggtgcctgtgcccacagccaagctgaatgacaccctgctgatgtgcctgaagatcaccagcggaggagtcatcttccagagccccctgatgtctgtgcagcccatcaacatggtgaagccagacccccccctgggcctgcacatggagatcacagatgatggcaacctgaagatctcctggagcagcccccccctggtgcccttccccctgcagtaccaggtgaagtacagcgagaacagcaccaccgtcatccgggaggccgacaagatcgtgtctgccaccagcctgctggtggacagcatcctgcccggcagcagctatgaggtgcaggtgcggggcaagaggctggatggccctggcatctggagcgactggagcacccccagggtcttcaccacccaggacgtcatctacttcccccccaagatcctgacctctgtgggcagcaatgtgtccttccactgcatctacaagaaggagaacaagatcgtgcccagcaaggagatcgtgtggtggatgaacctggccgagaagatcccccagagccagtatgatgtggtgtctgaccacgtgtccaaggtgaccttcttcaacctgaatgagaccaagccccggggcaagttcacctatgatgctgtgtactgctgcaatgaacatgagtgccaccacagatatgcagagctgtatgtgattgatgtgaacatcaacatcagctgtgaaacagatggctacctgaccaagatgacctgccgctggagcaccagcaccatccagagcctggccgagagcaccctgcagctgcgctaccacaggagcagcctgtactgcagcgacatccccagcatccaccccatcagcgagcccaaggactgctacctgcagagtgatggcttctatgagtgcatcttccagcccatcttcctgctgagcggctacaccatgtggatccgcatcaaccacagcctgggcagcctggacagcccccccacctgtgtgctgcctgattctgtggtgaagcccctgccccccagctctgtgaaggccgagatcaccatcaacatcggcctgctgaagatctcctgggagaagcctgtgtttcctgagaacaacctgcagttccagatccgctatggcctgagcggcaaggaggtgcagtggaagatgtatgaggtgtatgatgccaagagcaagtctgtgtccctgcctgtgcctgacctgtgtgctgtgtatgctgtgcaggtgcgctgcaagaggctggatggcctgggctactggagcaactggagcaacccagcctacacagtggtgatggacatcaaggtgcccatgaggggccctgagttctggaggatcatcaacggggacaccatgaagaaggagaagaatgtgaccctgctgtggaagcccctgatgaagaatgacagcctgtgcagcgtgcagagatatgtgatcaaccaccacaccagctgcaatggcacctggagcgaagatgtgggcaaccacaccaagttcaccttcctgtggacagagcaggcccacacagtgacagtgctggccatcaacagcatcggggcctctgtggccaacttcaacctgaccttctcctggcccatgagcaaggtgaacatcgtgcagagcctgagcgcctaccccctgaacagcagctgtgtgattgtgtcctggatcctgagccccagcgactacaagctgatgtacttcatcatcgagtggaagaacctgaatgaagatggagagatcaagtggctgcgcatcagcagctctgtgaagaagtactacatccatgaccacttcatccccatcgagaagtaccagttcagcctgtaccccatcttcatggagggcgtgggcaagcccaagatcatcaacagcttcacccaggatgacatcgagaagcaccagagtgatgctggcctgtatgtgattgtgcctgtgatcatcagcagcagcatcctgctgctgggcaccctgctgatcagccaccagaggatgaagaagctgttctgggaggatgtgcccaaccccaagaactgctcctgggcccagggcctgaacttccagaagatgctggagggctccatgtttgtgaagagccaccaccacagcctcatcagcagcacccagggccacaagcactgcggccggccccagggccccctgcacaggaagacccgggacctgtgcagcctggtgtacctgctgaccctgccccccctgctgtcctatgaccctgccaagagccccagcgtgaggaacacccaggagtag

SEQ ID NO: 157448 - DNA, 2691 bp, synthetic construct
  misc_feature 1..2691: note = Description of Artificial Sequence: Synthetic coding sequence
  source 1..2691: mol_type = other DNA
atgatctgccagaagttctgtgtggtgctgctgcactgggagttcatctacgtgatcacagccttcaacctgagctaccccatcaccccctggaggttcaagctgagctgcatgccacccaacagcacctatgactacttcctgctgcctgctggcctgagcaagaacaccagcaacagcaatggccactatgaaacagctgtggagcccaagttcaacagcagcggcacccacttcagcaacctgagcaagaccaccttccactgctgcttccgctctgagcaggacaggaactgcagcctgtgtgccgacaacatcgagggcaagacctttgtgtccacagtgaacagcctggtgttccagcagattgatgccaactggaacatccagtgctggctgaagggggacctgaagctgttcatctgctacgtggagagcctcttcaagaacctcttcaggaactacaactacaaggtgcacctgctgtatgtgctgcctgaggtgctggaggacagccccctggtgccccagaagggcagcttccagatggtgcactgcaactgcagcgtgcatgagtgctgtgaatgtctggtgcctgtgcccacagccaagctgaatgacaccctgctgatgtgcctgaagatcaccagcggaggagtcatcttccagagccccctgatgtctgtgcagcccatcaacatggtgaagccagacccccccctgggcctgcacatggagatcacagatgatggcaacctgaagatctcctggagcagcccccccctggtgcccttccccctgcagtaccaggtgaagtacagcgagaacagcaccaccgtcatccgggaggccgacaagatcgtgtctgccaccagcctgctggtggacagcatcctgcccggcagcagctatgaggtgcaggtgcggggcaagaggctggatggccctggcatctggagcgactggagcacccccagggtcttcaccacccaggacgtcatctacttcccccccaagatcctgacctctgtgggcagcaatgtgtccttccactgcatctacaagaaggagaacaagatcgtgcccagcaaggagatcgtgtggtggatgaacctggccgagaagatcccccagagccagtatgatgtggtgtctgaccacgtgtccaaggtgaccttcttcaacctgaatgagaccaagccccggggcaagttcacctatgatgctgtgtactgctgcaatgaacatgagtgccaccacagatatgcagagctgtatgtgattgatgtgaacatcaacatcagctgtgaaacagatggctacctgaccaagatgacctgccgctggagcaccagcaccatccagagcctggccgagagcaccctgcagctgcgctaccacaggagcagcctgtactgcagcgacatccccagcatccaccccatcagcgagcccaaggactgctacctgcagagtgatggcttctatgagtgcatcttccagcccatcttcctgctgagcggctacaccatgtggatccgcatcaaccacagcctgggcagcctggacagcccccccacctgtgtgctgcctgattctgtggtgaagcccctgccccccagctctgtgaaggccgagatcaccatcaacatcggcctgctgaagatctcctgggagaagcctgtgtttcctgagaacaacctgcagttccagatccgctatggcctgagcggcaaggaggtgcagtggaagatgtatgaggtgtatgatgccaagagcaagtctgtgtccctgcctgtgcctgacctgtgtgctgtgtatgctgtgcaggtgcgctgcaagaggctggatggcctgggctactggagcaactggagcaacccagcctacacagtggtgatggacatcaaggtgcccatgaggggccctgagttctggaggatcatcaacggggacaccatgaagaaggagaagaatgtgaccctgctgtggaagcccctgatgaagaatgacagcctgtgcagcgtgcagagatatgtgatcaaccaccacaccagctgcaatggcacctggagcgaagatgtgggcaaccacaccaagttcaccttcctgtggacagagcaggcccacacagtgacagtgctggccatcaacagcatcggggcctctgtggccaacttcaacctgaccttctcctggcccatgagcaaggtgaacatcgtgcagagcctgagcgcctaccccctgaacagcagctgtgtgattgtgtcctggatcctgagccccagcgactacaagctgatgtacttcatcatcgagtggaagaacctgaatgaagatggagagatcaagtggctgcgcatcagcagctctgtgaagaagtactacatccatgaccacttcatccccatcgagaagtaccagttcagcctgtaccccatcttcatggagggcgtgggcaagcccaagatcatcaacagcttcacccaggatgacatcgagaagcaccagagtgatgctggcctgtatgtgattgtgcctgtgatcatcagcagcagcatcctgctgctgggcaccctgctgatcagccaccagaggatgaagaagctgttctgggaggatgtgcccaaccccaagaactgctcctgggcccagggcctgaacttccagaagaggacagacatcctgtag

SEQ ID NO: 157449 - DNA, 699 bp, synthetic construct
  misc_feature 1..699: note = Description of Artificial Sequence: Synthetic coding sequence
  source 1..699: mol_type = other DNA
atgatgcccaccaccgtggtgtccctgctgagcaccacagacctggagaagggctctgtgtgcatcagtgaccagttcaacagcgtgaacttcagcgaggccgagggcacagaggtgacctatgaagatgagagccagaggcagccctttgtgaagtatgccaccctcatcagcaacagcaagcccagcgagactggagaggagcagggcctcatcaacagctctgtgaccaagtgcttcagcagcaagaacagccccctgaaggacagcttcagcaacagctcctgggagattgaggcccaggccttcttcatcctgagtgaccagcaccccaacatcatcagcccccacctgaccttcagcgagggcctggatgagctgctgaagctggagggcaacttcccagaagaaaataatgacaagaagagcatctactacctgggcgtgaccagcatcaagaagcgggagagcggcgtgctgctgacagacaagagccgggtgtcctgccccttccctgccccctgcctcttcacagacatccgggtgctgcaggacagctgcagccactttgtggagaacaacatcaacctgggcaccagcagcaagaagacctttgccagctacatgccccagttccagacctgcagcacccagacccacaagatcatggagaacaagatgtgtgacctgactgtgtag

SEQ ID NO: 157450 - DNA, 396 bp, synthetic construct
  misc_feature 1..396: note = Description of Artificial Sequence: Synthetic coding sequence
  source 1..396: mol_type = other DNA
atggccggcgtgaaggccctggtggccctgtccttcagcggggccatcggcctgaccttcctgatgctgggctgtgccctggaggactatggagtgtactggcccctgtttgtgctgatcttccacgccatcagccccatcccccacttcatcgccaagagggtgacctatgacagtgatgccaccagcagcgcctgccgggagctggcctacttcttcaccactggaattgtggtgtctgccttcggcttccctgtgatcctggcccgggtggccgtcatcaagtggggcgcctgtggcctggtgctggccggaaatgctgtgatcttcctgaccatccagggcttcttcctgatcttcggcagaggagatgacttctcctgggagcagtggtag

SEQ ID NO: 157451 - DNA, 396 bp, synthetic construct
  misc_feature 1..396: note = Description of Artificial Sequence: Synthetic coding sequence
  source 1..396: mol_type = other DNA
atggccggcatcaaggccctgatcagcctgagctttggaggagccatcggcctgatgttcctgatgctgggctgtgccctgcccatctacaacaagtactggcccctgtttgtgctcttcttctacatcctgagccccatcccctactgcatcgcccggcggctggtggatgacacagatgccatgagcaatgcctgcaaggagctggccatcttcctgaccactggaattgtggtgtctgccttcggcctgcccatcgtgtttgcccgggcccacctgattgagtggggcgcctgtgccctggtgctgaccggcaacacagtcatctttgccaccatcctgggcttcttcctggtgtttggcagcaatgatgacttctcctggcagcagtggtag

SEQ ID NO: 157452 - DNA, 510 bp, synthetic construct
  misc_feature 1..510: note = Description of Artificial Sequence: Synthetic coding sequence
  source 1..510: mol_type = other DNA
atggccggcatcaaggccctgatcagcctgagctttggaggagccatcggcctgatgttcctgatgctgggctgtgccctgcccatctacaacaagtactggcccctgtttgtgctcttcttctacatcctgagccccatcccctactgcatcgcccggcggctggtggatgacacagatgccatgagcaatgcctgcaaggagctggccatcttcctgaccactggaattgtggtgtctgccttcggcctgcccatcgtgtttgcccgggcccacctgatgggccgcctgcccttcttcagcaagatgggcacagctgagagcgagggccgggagaccctgacccagcagctgcccctgcctgctgctgccatgaggcggctgctgcctgccagccgggtgtccacccagcctgtgctgcggctggccgacagcgctgagagcctgctgggccgcccagccctgtgggccctgggcttcctgctgtgcccccccagccaggcccagtag

SEQ ID NO: 157453 - DNA, 3195 bp, synthetic construct
  misc_feature 1..3195: note = Description of Artificial Sequence: Synthetic coding sequence
  source 1..3195: mol_type = other DNA
atgatgaagttccgcttccggcggcagggcgctgacccccagcgggagaagctgaagcaggagctgtttgccttcaacaagacagtggagcacggcttccccaaccagcccagcgccctggcctttgatcctgagctgcgcatcatggccatcggcaccaggtctggagctgtgaagatctatggagcccctggggtggagttcaccggcctgcacagagatgctgccaccgtgacccagatgcacttcctgaccggccagggccgcctgctgagcctgctggatgacagcagcctgcacctgtgggagatcgtgcaccacaacggctgtgcccacctggaggaggccctgtccttccagctgcccagcaggcctggctttgatggagccagcgcccccctgagcctgaccagggtgacagtggtgctgctggtggccgccagtgacattgctgccctgggcacagagggcagctctgtgttcttcctggatgtgaccaccctgaccctgctggagggccagaccctggcccctggagaggtgctgcggtctgtgcctgatgactaccgctgtgggaaggccctgggccctgtggagagcctgcagggccacctgcgggaccccaccaagatcctgattggctacagccggggcctgctggtgatctggaaccaggccagccagtgtgtggaccacatcttcctgggcaaccagcagctggagagcctgtgctggggccgggacagcagcacagtggtgagcagccacagtgatggcagctatgctgtgtggagcgtggatgctggcagcttccccaccctgcagcccaccgtggccaccaccccctacggccccttcccctgcaaggccatcaacaagatcctgtggaggaactgtgagagcggcggccacttcatcatcttcagcggcggcatgccccgggccagctatggagacagacactgtgtgtctgtgctgcgggcagagaccctggtgaccctggacttcaccagccgcatcatcgacttcttcaccgtgcacagcaccaggccagaagatgaatttgatgacccccaggccctggccgtgctgctggaggaggagctggtggtgctggacctgcagaccccaggctggccagctgtgcctgccccctacctggcccccctgcacagcagcgccatcacctgcagcgcccacgtggcctctgtgcctgccaagctgtgggcccgcatcgtgtctgctggggagcagcagagcccccagcctgtgagcagcgccctgtcctggcccatcactggaggcaggaacctggcccaggagcccagccagaggggcctgctgctgaccggccatgaagatggcaccgtgcgcttctgggatgccagcggcgtggccctgcggcccctgtacaagctgagcacagctggcctcttccagacagactgtgaacatgctgacagcctggcccaggccgcagaagatgactggccacccttcaggaaggtgggctgctttgacccctacagtgatgacccccggctgggcgtgcagaaggtggccctgtgcaagtacacagcccagatggtggtggccggcacagctggccaggtgctggtgctggagctgagtgatgtgcctgtggagcaggccgtgtctgtggccatcatcgacctgctgcaggaccgggagggcttcacctggaagggccacgagcggctgagccccaggacaggccccctgccctggccagctggcttccagccccgggtgctggtgcagtgcctgcccccagctgctgtgacagctgtgaccctgcacacagagtggagcctggtggccttcggcaccagccacggcttcggcctgtttgactaccagaggaagagccctgtgctggcccgctgcaccctgcaccccaatgacagcctggccatggagggccccctgagccgggtgaagagcctgaagaagagcctgcggcagagcttccgccgcatcaggaagagccgggtgtctgggaagaagagagctgccaatgccagcagcaagctgcaggaggccaatgcccagctggccgagcaggcctgcccccatgatgtggagatgacccctgtgcagaggcgcatcgagcccaggtctgcagatgacagcctgagcggcgtggtgcgctgcctgtactttgctgacaccttcctgagagatggagcccaccacggccccaccatgtgggccggcaccaacagcggctctgtgtttgcctatgccctggaggtgcctgctgctgctgtgggcggggagaagaggcctgagcaggccgtggaggccgtgctgggcaaggaggtgcagctgatgcaccgggcccctgtggtggccatcgctgtgctggatggccggggccggcccctgcctgagccctatgaggccagccgggacctggcccaggccccagacatgcagggcggccatgctgtgctgattgccagcgaggagcagttcaaggtgttcaccctgcccaaggtgtctgccaagaccaagttcaagctgacagcccacgagggctgccgggtgaggaaggtggccctggccacctttgcctctgtggcctgtgaagattatgcagagacctgcctggcctgcctgaccaacctgggagatgtgcacgtgttttctgtgcccggcctgcggccccaggtgcactacagctgcatcagaaaagaagacatcagcggcatcgccagctgtgtgttcaccaggcatggccagggcttctacctgatcagccccagcgagtttgagcgcttcagcctgagcgccaggaacatcacagagcccctgtgcagcctggacatcaactggcccagagatgccacccaggccagctaccgcatccgggagagccccaagctgagccaggccaacggcacccccagcatcctgctggccccccagagcctggatggcagcccagaccctgcccacagcatgggccctgacaccccagagcccccagaggccgccctgagccccatgagcattgattctgccaccagcgctgacaccaccctggacaccactggagatgtgacagtggaggatgtgaaggacttcctgggcagcagcgaggagagcgagaagaacctgaggaacctggctgaagatgaggcccacgcctgtgccatcctgatcaagtag

SEQ ID NO: 157454 - DNA, 1056 bp, synthetic construct
  misc_feature 1..1056: note = Description of Artificial Sequence: Synthetic coding sequence
  source 1..1056: mol_type = other DNA
gagctgcccagcgctgccccagacagcaccctgctgctgacagcccagcactgggtggccaacctcttcatcctggccaccctgattggctggacagtgcgctccttcttcctgggccgcatggagacctgctgcagccacctgggcctgcggagcggccgccgctttgctgtgtccatcggctactggcatgacccctacatccagcactttgtgcggctgagcaaggagaggaaggcccctgagatcaacagaggctactttgcccgggtgcacggcgtgtcccagctgatcaaggccttcctgaggaagacagagtgccactgccagatcgtgaacctgggcgccggcatggacaccaccttctggaggctgaaggatgaggacctgctgcccagcaagtactttgaggtggacttccccatgattgtgaccaggaagctgcacagcatcaagtgcaagccacccctgagcagccccatcctggagctgcacagcgaggacaccctgcagatggatggccacatcctggacagcaagagatatgctgtgattggagctgacctgcgggacctgtctgagctggaggagaagctgaagaagtgcaacatgaacacccagctgcccaccctgctgattgctgaatgtgtgctggtgtacatgaccccagagcagagcgccaacctgctgaagtgggccgccaacagctttgagcgggccatgttcatcaactatgagcaggtgaacatgggagaccgcttcggccagatcatgattgagaacctgcggcggcggcagtgtgacctggccggcgtggagacctgcaagagcctggagagccagaaggagcggctgctgagcaatggctgggagacagccagcgctgtggacatgatggagctgtacaaccggctgcccagggctgaggtgtccagaattgagagcctggagttcctggatgagatggagctgctggagcagctgatgaggcactactgcctgtgctgggccaccaagggcggcaatgagctgggcctgaaggagatcacctactag

SEQ ID NO: 157455 - DNA, 840 bp, synthetic construct
  misc_feature 1..840: note = Description of Artificial Sequence: Synthetic coding sequence
  source 1..840: mol_type = other DNA
atggccacccggcagcgggagagcagcatcaccagctgctgcagcaccagcagctgtgatgctgatgatgaaggagtgcggggcacctgtgaagatgccagcctgtgcaagagatttgctgtgtccatcggctactggcatgacccctacatccagcactttgtgcggctgagcaaggagaggaaggcccctgagatcaacagaggctactttgcccgggtgcatggagtgtcccagctgatcaaggccttcctgaggaagacagagtgccactgccagatcgtgaacctgggcgccggcatggacaccaccttctggaggctgaaggatgaggacctgctgcccagcaagtactttgaggtggacttccccatgattgtgaccaggaagctgcacagcatcaagctgcccaccctgctgattgctgaatgtgtgctggtgtacatgaccccagagcagagcgccaacctgctgaagtgggccgccaacagctttgagcgggccatgttcatcaactatgagcaggtgaacatgggagaccgcttcggccagatcatgattgagaacctgcggcggcggcagtgtgacctggccggcgtggagacctgcaagagcctggagagccagaaggagcggctgctgagcaatggctgggagacagccagcgctgtggacatgatggagctgtacaaccggctgcccagggctgaggtgtccagaattgagagcctggagttcctggatgagatggagctgctggagcagctgatgaggcactactgcctgtgctgggccaccaagggcggcaatgagctgggcctgaaggagatcacctactag

SEQ ID NO: 157456 - DNA, 1005 bp, synthetic construct
  misc_feature 1..1005: note = Description of Artificial Sequence: Synthetic coding sequence
  source 1..1005: mol_type = other DNA
atggccacccggcagcgggagagcagcatcaccagctgctgcagcaccagcagctgtgatgctgatgatgaaggagtgcggggcacctgtgaagatgccagcctgtgcaagagatttgctgtgtccatcggctactggcatgacccctacatccagcactttgtgcggctgagcaaggagaggaaggcccctgagatcaacagaggctactttgcccgggtgcatggagtgtcccagctgatcaaggccttcctgaggaagacagagtgccactgccagatcgtgaacctgggcgccggcatggacaccaccttctggaggctgaaggatgaggacctgctgcccagcaagtactttgaggtggacttccccatgattgtgaccaggaagctgcacagcatcaagtgcaagccacccctgagcagccccatcctggagctgcacagcgaggacaccctgcagatggatggccacatcctggacagcaagagatatgctgtgattggagctgacctgcgggacctgtctgagctggaggagaagctgaagaagtgcaacatgaacacccagctgcccaccctgctgattgctgaatgtgtgctggtgtacatgaccccagagcagagcgccaacctgctgaagtgggccgccaacagctttgagcgggccatgttcatcaactatgagcaggtgaacatgggagacagatttggccagatcatgattgagaacctgcggcggcggcagtgtgacctggccggcgtggagacctgcaagagcctggagagccagaaggagcggctgctgagcaatggctgggagacagccagcgctgtggacatgatggagctgtacaaccggctgcccagggctgaggtgagccgcatcgagagcctggagttcctggatgagatggagctgctggagcagctgatgaggcactactgcctgtgctgggccaccaagggcggcaatgagctgggcctgaaggagatcacctactag

SEQ ID NO: 157457 - DNA, 2415 bp, synthetic construct
  misc_feature 1..2415: note = Description of Artificial Sequence: Synthetic coding sequence
  source 1..2415: mol_type = other DNA
atggctgtgcgggccctgaagctgctgaccaccctgctggccgtggtggccgccgccagccaggccgaggtggagagcgaggccggctggggcatggtgaccccagacctgctgtttgctgagggcacagctgcctatgcccggggggactggccaggagtggtgctgtccatggagcgggccctgcggagccgggccgccctgcgggccctgcggctgcgctgcaggacccagtgtgccgctgacttcccctgggagctggaccctgactggagccccagccctgcccaggccagcggggccgccgccctgcgggacctgtccttcttcggcggcctgctgcggcgggccgcctgcctgcggcgctgcctgggccccccagctgcccacagcctgtctgaggagatggagctggagttcaggaagaggagcccctacaactacctgcaggtggcctacttcaagatcaacaagctggagaaggctgtggccgccgcccacaccttctttgtgggcaaccctgagcacatggagatgcagcagaacctggactactaccagaccatgtctggagtgaaggaggccgacttcaaggacctggagacccagccccacatgcaggagttccggctgggcgtgcggctgtacagcgaggagcagccccaggaggccgtgccccacctggaggccgccctgcaggagtactttgtggcctatgaagaatgtcgggccctgtgtgagggcccctatgactatgatggctacaactacctggagtacaatgctgacctcttccaggccatcacagaccactacatccaggtgctgaactgcaagcagaactgtgtgacagagctggccagccaccccagccgggagaagccctttgaggacttcctgcccagccactacaactacctgcagtttgcctactacaacatcggcaactacacccaggccgtggagtgtgccaagacctacctgctcttcttccccaatgatgaggtgatgaaccagaacctggcctactatgctgccatgctgggggaggagcacaccaggagcatcggcccccgggagagcgccaaggagtaccggcagaggagcctgctggagaaggagctgctcttctttgcctatgatgtgtttggcatcccctttgtggaccctgacagctggaccccagaggaggtgatccccaagaggctgcaggagaagcagaagtctgagcgggagacagctgtgcgcatcagccaggagatcggcaacctgatgaaggagattgagaccctggtggaggagaagaccaaggagagcctggatgtgtcccggctgacccgggagggcggccccctgctgtatgagggcatcagcctgaccatgaacagcaagctgctgaatggcagccagagggtggtgatggatggagtcatcagtgaccacgagtgccaggagctgcagaggctgaccaacgtggccgccaccagcggagatggctaccggggccagaccagcccccacaccccaaatgagaagttctacggcgtgacagtgttcaaggccctgaagctgggccaggagggcaaggtgcccctgcagagcgcccacctgtactacaacgtgacagagaaggtgcggcgcatcatggagagctacttccggctggacacccccctgtacttctcctacagccacctggtgtgcaggacagccatcgaggaggtgcaggccgagaggaaggatgacagccaccctgtgcacgtggacaactgcatcctgaatgctgagaccctggtgtgtgtgaaggagcccccagcctacaccttccgggactacagcgccatcctgtacctgaatggagactttgatggcggcaacttctacttcacagagctggatgccaagacagtgacagctgaggtgcagccccagtgtggccgggctgtgggcttcagcagcggcacagagaacccccatggagtgaaggctgtgacccggggccagagatgtgccatcgccctgtggttcaccctggaccccaggcacagcgagcgggtgcgggccgcccgggccggggagagctcctggtgctgcggggaccccttccctgagcggccctggtttgccttcctgttccccaagagccactgccagtggctgcggcatgagaggagcacctgggacaccagcagcaatgccctgagcctgtggagccactgcctggtgctgcccggccctgctgtgaatggcatccaggtgggcaaggaggtgaagacaggcagtgatgctgagttcctggtgcccagcctgggccccaccagcgctgtgctcttccagagggtgggccctgctgggaaggagatgagcctgggccccctgaggaacctgccctgccccctgggcagcagcagctag

SEQ ID NO: 157458 - DNA, 2211 bp, synthetic construct
  misc_feature 1..2211: note = Description of Artificial Sequence: Synthetic coding sequence
  source 1..2211: mol_type = other DNA
atggctgtgcgggccctgaagctgctgaccaccctgctggccgtggtggccgccgccagccaggccgaggtggagagcgaggccggctggggcatggtgaccccagacctgctgtttgctgagggcacagctgcctatgcccggggggactggccaggagtggtgctgtccatggagcgggccctgcggagccgggccgccctgcgggccctgcggctgcgctgcaggacccagtgtgccgctgacttcccctgggagctggaccctgactggagccccagccctgcccaggccagcggggccgccgccctgcgggacctgtccttcttcggcggcctgctgcggcgggccgcctgcctgcggcgctgcctgggccccccagctgcccacagcctgtctgaggagatggagctggagttcaggaagaggagcccctacaactacctgcaggtggcctacttcaagatcaacaagctggagaaggctgtggccgccgcccacaccttctttgtgggcaaccctgagcacatggagatgcagcagaacctggactactaccagaccatgtctggagtgaaggaggccgacttcaaggacctggagacccagccccacatgcaggagttccggctgggcgtgcggctgtacagcgaggagcagccccaggaggccgtgccccacctggaggccgccctgcaggagtactttgtggcctatgaagaatgtcgggccctgtgtgagggcccctatgactatgatggctacaactacctggagtacaatgctgacctcttccaggccatcacagaccactacatccaggtgctgaactgcaagcagaactgtgtgacagagctggccagccaccccagccgggagaagccctttgaggacttcctgcccagccactacaactacctgcagtttgcctactacaacatcggcaactacacccaggccgtggagtgtgccaagacctacctgctcttcttccccaatgatgaggtgatgaaccagaacctggcctactatgctgccatgctgggggaggagcacaccaggagcatcggcccccgggagagcgccaaggagtaccggcagaggagcctgctggagaaggagctgctcttctttgcctatgatgtgtttggcatcccctttgtggaccctgacagctggaccccagaggaggtgatccccaagaggctgcaggagaagcagaagtctgagcgggagacagctgtgcgcatcagccaggagatcggcaacctgatgaaggagattgagaccctggtggaggagaagaccaaggagagcctggatgtgtcccggctgacccgggagggcggccccctgctgtatgagggcatcagcctgaccatgaacagcaagctgctgaatggcagccagagggtggtgatggatggagtcatcagtgaccacgagtgccaggagctgcagaggctgaccaacgtggccgccaccagcggagatggctaccggggccagaccagcccccacaccccaaatgagaagttctacggcgtgacagtgttcaaggccctgaagctgggccaggagggcaaggtgcccctgcagagcgcccacctgtactacaacgtgacagagaaggtgcggcgcatcatggagagctacttccggctggacacccccctgtacttctcctacagccacctggtgtgcaggacagccatcgaggaggtgcaggccgagaggaaggatgacagccaccctgtgcacgtggacaactgcatcctgaatgctgagaccctggtgtgtgtgaaggagcccccagcctacaccttccgggactacagcgccatcctgtacctgaatggagactttgatggcggcaacttctacttcacagagctggatgccaagacagtgacagctgaggtgcagccccagtgtggccgggctgtgggcttcagcagcggcacagagaacccccatggagtgaaggctgtgacccggggccagagatgtgccatcgccctgtggttcaccctggaccccaggcacagcgagcgggacagagtgcaggctgatgacctggtgaagatgctgttcagccctgaggagatggacctgagccaggagcagcccctggatgcccagcagggccccccagagcccgcccaggagagcctgagcggcagcgagagcaagcccaaggatgagctgtag

SEQ ID NO: 157459 - DNA, 2094 bp, synthetic construct
  misc_feature 1..2094: note = Description of Artificial Sequence: Synthetic coding sequence
  source 1..2094: mol_type = other DNA
atggctgtgcgggccctgaagctgctgaccaccctgctggccgtggtggccgccgccagccaggccgaggtggagagcgaggccggctggggcatggtgaccccagacctgctgtttgctgagggcacagctgcctatgcccggggggactggccaggagtggtgctgtccatggagcgggccctgcggagccgggccgccctgcgggccctgcggctgcgctgcaggacccagtgtgccgctgacttcccctgggagctggaccctgactggagccccagccctgcccaggccagcggggccgccgccctgcgggacctgtccttcttcggcggcctgctgcggcgggccgcctgcctgcggcgctgcctgggccccccagctgcccacagcctgtctgaggagatggagctggagttcaggaagaggagcccctacaactacctgcaggtggcctacttcaagatcaacaagctggagaaggctgtggccgccgcccacaccttctttgtgggcaaccctgagcacatggagatgcagcagaacctggactactaccagaccatgtctggagtgaaggaggccgacttcaaggacctggagacccagccccacatgcaggagttccggctgggcgtgcggctgtacagcgaggagcagccccaggaggccgtgccccacctggaggccgccctgcaggagtactttgtggcctatgaagaatgtcgggccctgtgtgagggcccctatgactatgatggctacaactacctggagtacaatgctgacctcttccaggccatcacagaccactacatccaggtgctgaactgcaagcagaactgtgtgacagagctggccagccaccccagccgggagaagccctttgaggacttcctgcccagccactacaactacctgcagtttgcctactacaacatcggcaactacacccaggccgtggagtgtgccaagacctacctgctcttcttccccaatgatgaggtgatgaaccagaacctggcctactatgctgccatgctgggggaggagcacaccaggagcatcggcccccgggagagcgccaaggagtaccggcagaggagcctgctggagaaggagctgctcttctttgcctatgatgtgtttggcatcccctttgtggaccctgacagctggaccccagaggaggtgatccccaagaggctgcaggagaagcagaagtctgagcgggagacagctgtgcgcatcagccaggagatcggcaacctgatgaaggagattgagaccctggtggaggagaagaccaaggagagcctggatgtgtcccggctgacccgggagggcggccccctgctgtatgagggcatcagcctgaccatgaacagcaagctgctgaatggcagccagagggtggtgatggatggagtcatcagtgaccacgagtgccaggagctgcagaggctgaccaacgtggccgccaccagcggagatggctaccggggccagaccagcccccacaccccaaatgagaagttctacggcgtgacagtgttcaaggccctgaagctgggccaggagggcaaggtgcccctgcagagcgcccacctgtactacaacgtgacagagaaggtgcggcgcatcatggagagctacttccggctggacacccccctgtacttctcctacagccacctggtgtgcaggacagccatcgaggaggtgcaggccgagaggaaggatgacagccaccctgtgcacgtggacaactgcatcctgaatgctgagaccctggtgtgtgtgaaggagcccccagcctacaccttccgggactacagcgccatcctgtacctgaatggagactttgatggcggcaacttctacttcacagagctggatgccaagacagtgacagctgaggtgcagccccagtgtggccgggctgtgggcttcagcagcggcacagagaacccccatggagtgaaggctgtgacccggggccagagatgtgccatcgccctgtggttcaccctggaccccaggcacagcgagcgggtgcgggccgcccgggccggccagggcgccggccgctag

SEQ ID NO: 157460 - DNA, 459 bp, synthetic construct
  misc_feature 1..459: note = Description of Artificial Sequence: Synthetic coding sequence
  source 1..459: mol_type = other DNA
tgagaaagagaaacagctgtgcgcatcagccaggagatcggcaacctgatgaaggagattgagaccctggtggaggagaagaccaaggagagcctggatgtgtcccggctgacccgggagggcggccccctgctgtatgagggcatcagcctgaccatgaacagcaagctgctgaatggcagccagagggtggtgatggatggagtcatcagtgaccacgagtgccaggagctgcagaggctgaccaacgtggccgccaccagcggagatggctaccggggccagaccagcccccacaccccaaatgagaagttctacggcgtgacagtgttcaaggccctgaagaggggcgtggtgctggtgcgcttccacacagctgacaaggatgtgcctgagaccggccagttcaccaaggagcggggcctgctgggcctgactgtgccctgtggctggggctag

SEQ ID NO: 157461 - DNA, 1806 bp, synthetic construct
  misc_feature 1..1806: note = Description of Artificial Sequence: Synthetic coding sequence
  source 1..1806: mol_type = other DNA
atggagctggagttcaggaagaggagcccctacaactacctgcaggtggcctacttcaagatcaacaagctggagaaggctgtggccgccgcccacaccttctttgtgggcaaccctgagcacatggagatgcagcagaacctggactactaccagaccatgtctggagtgaaggaggccgacttcaaggacctggagacccagccccacatgcaggagttccggctgggcgtgcggctgtacagcgaggagcagccccaggaggccgtgccccacctggaggccgccctgcaggagtactttgtggcctatgaggagtgccgggccctgtgtgagggcccctatgactatgatggctacaactacctggagtacaatgctgacctcttccaggccatcacagaccactacatccaggtgctgaactgcaagcagaactgtgtgacagagctggccagccaccccagccgggagaagccctttgaggacttcctgcccagccactacaactacctgcagtttgcctactacaacatcggcaactacacccaggccgtggagtgtgccaagacctacctgctcttcttccccaatgatgaggtgatgaaccagaacctggcctactatgctgccatgctgggggaggagcacaccaggagcatcggcccccgggagagcgccaaggagtaccggcagaggagcctgctggagaaggagctgctcttctttgcctatgatgtgtttggcatcccctttgtggaccctgacagctggaccccagaggaggtgatccccaagaggctgcaggagaagcagaagtctgagcgggagacagctgtgcgcatcagccaggagatcggcaacctgatgaaggagattgagaccctggtggaggagaagaccaaggagagcctggatgtgtcccggctgacccgggagggcggccccctgctgtatgagggcatcagcctgaccatgaacagcaagctgctgaatggcagccagagggtggtgatggatggagtcatcagtgaccacgagtgccaggagctgcagaggctgaccaacgtggccgccaccagcggagatggctaccggggccagaccagcccccacaccccaaatgagaagttctatggagtgaccgtcttcaaggccctgaagctgggccaggagggcaaggtgcccctgcagagcgcccacctgtactacaacgtgacagagaaggtgcggcgcatcatggagagctacttccggctggacacccccctgtacttctcctacagccacctggtgtgcaggacagccatcgaggaggtgcaggccgagaggaaggatgacagccaccctgtgcacgtggacaactgcatcctgaatgctgagaccctggtgtgtgtgaaggagcccccagcctacaccttccgggactacagcgccatcctgtacctgaatggagactttgatggcggcaacttctacttcacagagctggatgccaagacagtgacagctgaggtgcagccccagtgtggccgggctgtgggcttcagcagcggcacagagaacccccacggcgtgaaggctgtgacccggggccagagatgtgccatcgccctgtggttcaccctggaccccaggcacagcgagcgggacagagtgcaggctgatgacctggtgaagatgctgttcagccctgaggagatggacctgagccaggagcagcccctggatgcccagcagggccccccagagcccgcccaggagagcctgagcggcagcgagagcaagcccaaggatgagctgtag

SEQ ID NO: 157462 - DNA, 2355 bp, synthetic construct
  misc_feature 1..2355: note = Description of Artificial Sequence: Synthetic coding sequence
  source 1..2355: mol_type = other DNA
atgaccagccctgctgctgcccagagccgggagattgactgcctgagccctgaggcccagaagctggccgaggcccggctggccgccaagagagctgcccgggcagaggcccgggagatccgcatgaaggagctggagcggcagcagaaggaggaggacagcgagcgctacagcagaagaagcagaagaaacaccagcgccagtgatgaagatgagaggatgtctgtgggcagccggggcagcctgcgggtggaggagaggcctgagaaggacttcacagagaagggcagcaggaacatgcctggcctgtctgctgccaccctggccagcctgggcggcaccagcagcagaagaggcagcggggacaccagcatcagcattgacacagaggccagcatccgggagatcaaggacagcctggccgaggtggaggagaagtacaagaaggccatggtgtccaatgcccagctggacaatgagaagaccaacttcatgtaccaggtggacaccctgaaggacatgctgctggagctggaggagcagctggccgagagccggcggcagtatgaggagaagaacaaggagtttgagcgggagaagcacgcccacagcatcctgcagttccagtttgctgaggtgaaggaggccctgaagcagcgggaggagatgctggagaagcacggcatcatcctgaacagcgagatcgccaccaacggggagaccagtgacaccctgaacaacgtgggctaccagggccccaccaagatgaccaaggaggagctgaatgccctgaagagcactggagatggcaccctgggccgggccagcgaggtggaggtgaagaatgagatcgtggccaacgtgggcaagcgggagatcctgcacaacacagagaaggagcagcacacagaggacacagtgaaggactgtgtggacatcgaggtgtttcctgctggggagaacacagaggaccagaagagcagcgaggacacagcccccttcctgggcaccctggccggggccacctatgaggagcaggtgcagagccagatcctggagagcagcagcctgcctgaaaatacagtgcaggtggagagcaatgaggtgatgggcgccccagatgacaggaccaggacccccctggagcccagcaactgctggagcgacctggatggcggcaaccacacagaaaatgtgggggaggccgctgtgacccaggtggaggagcaggccggcaccgtggccagctgccccctgggccacagtgatgacacagtgtaccatgatgacaagtgcatggtggaggtgccccaggagctggagaccagcacaggccacagcctggagaaggagttcaccaaccaggaggccgctgagcccaaggaggtgcctgcccacagcacagaggtgggccgggaccacaatgaggaggagggggaggagaccggcctgagagatgagaagcccatcaagacagaggtgcccggcagccctgctggaacagagggcaactgccaggaggccaccggccccagcacagtggacacccagaatgagcccctggacatgaaggagccagatgaggagaagagtgaccagcagggcgaggccctggacagcagccagaagaagaccaagaacaagaagaagaagaacaagaagaagaagagccctgtgcctgtggagaccctgaaggatgtgaagaaggagctgacctaccagaacacagacctgtctgagatcaaggaggaggagcaggtgaagagcacagacaggaagtctgctgtggaggcccagaatgaggtgacagagaaccccaagcagaagattgctgctgagagcagtgaaaatgtggactgcccagagaaccccaagatcaagctggatggcaagctggaccaggagggagatgatgtgcagacagctgctgaggaggtgctggctgatggagacaccctggactttgaagatgacacagtgcagagcagcggccccagggctggaggagaggagctggatgaaggagtggccaaggacaatgccaagattgatggagccacccagagcagccctgctgagcccaagtcagaagatgctgaccgctgcaccctgcctgagcacgagagccccagccaggacatcagtgatgcctgtgaggccgagagcacagagcgctgtgagatgtctgagcaccccagccagacagtgaggaaggccctggacagcaacagcctggagaatgatgacctgagcgcccctggccgggagcccggccacttcaaccctgagagccgggaggacacccggggcggcaatgagaagggcaagagcaaagaagactgcaccatgtcctag

SEQ ID NO: 157463 - DNA, 2259 bp, synthetic construct
  misc_feature 1..2259: note = Description of Artificial Sequence: Synthetic coding sequence
  source 1..2259: mol_type = other DNA
atgaccagccctgctgctgcccagagccgggagattgactgcctgagccctgaggcccagaagctggccgaggcccggctggccgccaagagagctgcccgggcagaggcccgggagatccgcatgaaggagctggagcggcagcagaaggaggtggaggagaggcctgagaaggacttcacagagaagggcagcaggaacatgcctggcctgtctgctgccaccctggccagcctgggcggcaccagcagcagaagaggcagcggggacaccagcatcagcattgacacagaggccagcatccgggagatcaaggacagcctggccgaggtggaggagaagtacaagaaggccatggtgtccaatgcccagctggacaatgagaagaccaacttcatgtaccaggtggacaccctgaaggacatgctgctggagctggaggagcagctggccgagagccggcggcagtatgaggagaagaacaaggagtttgagcgggagaagcacgcccacagcatcctgcagttccagtttgctgaggtgaaggaggccctgaagcagcgggaggagatgctggagaagcacggcatcatcctgaacagcgagatcgccaccaacggggagaccagtgacaccctgaacaacgtgggctaccagggccccaccaagatgaccaaggaggagctgaatgccctgaagagcactggagatggcaccctgggccgggccagcgaggtggaggtgaagaatgagatcgtggccaacgtgggcaagcgggagatcctgcacaacacagagaaggagcagcacacagaggacacagtgaaggactgtgtggacatcgaggtgtttcctgctggggagaacacagaggaccagaagagcagcgaggacacagcccccttcctgggcaccctggccggggccacctatgaggagcaggtgcagagccagatcctggagagcagcagcctgcctgaaaatacagtgcaggtggagagcaatgaggtgatgggcgccccagatgacaggaccaggacccccctggagcccagcaactgctggagcgacctggatggcggcaaccacacagaaaatgtgggggaggccgctgtgacccaggtggaggagcaggccggcaccgtggccagctgccccctgggccacagtgatgacacagtgtaccatgatgacaagtgcatggtggaggtgccccaggagctggagaccagcacaggccacagcctggagaaggagttcaccaaccaggaggccgctgagcccaaggaggtgcctgcccacagcacagaggtgggccgggaccacaatgaggaggagggggaggagaccggcctgagagatgagaagcccatcaagacagaggtgcccggcagccctgctggaacagagggcaactgccaggaggccaccggccccagcacagtggacacccagaatgagcccctggacatgaaggagccagatgaggagaagagtgaccagcagggcgaggccctggacagcagccagaagaagaccaagaacaagaagaagaagaacaagaagaagaagagccctgtgcctgtggagaccctgaaggatgtgaagaaggagctgacctaccagaacacagacctgtctgagatcaaggaggaggagcaggtgaagagcacagacaggaagtctgctgtggaggcccagaatgaggtgacagagaaccccaagcagaagattgctgctgagagcagtgaaaatgtggactgcccagagaaccccaagatcaagctggatggcaagctggaccaggagggagatgatgtgcagacagctgctgaggaggtgctggctgatggagacaccctggactttgaagatgacacagtgcagagcagcggccccagggctggaggagaggagctggatgaaggagtggccaaggacaatgccaagattgatggagccacccagagcagccctgctgagcccaagtcagaagatgctgaccgctgcaccctgcctgagcacgagagccccagccaggacatcagtgatgcctgtgaggccgagagcacagagcgctgtgagatgtctgagcaccccagccagacagtgaggaaggccctggacagcaacagcctggagaatgatgacctgagcgcccctggccgggagcccggccacttcaaccctgagagccgggaggacacccggggcggcaatgagaagggcaagagcaaagaagactgcaccatgtcctag

SEQ ID NO: 157464 - DNA, 1893 bp, synthetic construct
  misc_feature 1..1893: note = Description of Artificial Sequence: Synthetic coding sequence
  source 1..1893: mol_type = other DNA
atgaccagccctgctgctgcccagagccgggagattgactgcctgagccctgaggcccagaagctggccgaggcccggctggccgccaagagagctgcccgggcagaggcccgggagatccgcatgaaggagctggagcggcagcagaaggaggtgaccagcgcccaggagaagtactacggcctggacaccaagtggggagacatcgagcagtggatggaggacagcgagcgctacagcagaagaagcagaagaaacaccagcgccagtgatgaagatgagaggatgtctgtgggcagccggggcagcctgcggagccagcctgacctggagtatggaggcccctatgcctggaccaacggctatgatggagagctgtatggcagccagagcctgaacagaagaagtggccggcccagctgcctgtacagcgctgcccggcccagcggcagctaccgggcctctgtgctggatgagggcagctttggaggcacccggcggggcagcaccagcggcagccgggcccccagcgagtacagcggccacctgaacagcagcagccgggccagcagccgggccagcagcgcccgggccagccctgtggtggaggagaggcctgagaaggacttcacagagaagggcagcaggaacatgcctggcctgtctgctgccaccctggccagcctgggcggcaccagcagcagaagaggcagcggggacaccagcatcagcattgacacagaggccagcatccgggagatcaaggagctgaatgagctgaaggaccagatccaggatgtggagggcaagtacatgcagggcctgaaggagatgaaggacagcctggccgaggtggaggagaagtacaagaaggccatggtgtccaatgcccagctggacaatgagaagaccaacttcatgtaccaggtggacaccctgaaggacatgctgctggagctggaggagcagctggccgagagccggcggcagtatgaggagaagaacaaggagtttgagcgggagaagcacgcccacagcatcctgcagttccagtttgctgaggtgaaggaggccctgaagcagcgggaggagatgctggaggagatccggcagctgcagcagaagcaggccagcagcatccgggagatcagtgacctgcaggagaccatcgagtggaaggacaagaagattggagccctggagcggcagaaggagttctttgattctgtgcgctcagaaagagatgacctgcgggaggaggtggtgatgctgaaggaggagctgaagaagcacggcatcatcctgaacagcgagatcgccaccaacggggagaccagtgacaccctgaacaacgtgggctaccagggccccaccaagatgaccaaggaggagctgaatgccctgaagagcactggagatggcaccctggacatccggctgaagaagctggtggatgagcgggagtgcctgctggagcagatcaagaagctgaagggccagctggaggagcggcagaagattggcaagctggacaacctgcggagtgaagatgatgtgctggagaatggaacagacatgcacgtgatggacctgcagagagatgccaaccggcagatcagtgacctgaagttcaagctggccaagtctgagcaggagatcacagccctggagcagaatgtcatccggctggagagccaggtgagccgctacaagtctgctgctgaaaatgctgagaagattgaagatgagctgaaggccgagaagaggaagctgcagcgggagctgcggagcgccctggacaagacagaggagctggaggtgtccaatggccacctggtgaagaggctggagaagatgaaggccaacagaagtgccctgctgagccagcagtag

SEQ ID NO: 157465 - DNA, 2427 bp, synthetic construct
  misc_feature 1..2427: note = Description of Artificial Sequence: Synthetic coding sequence
  source 1..2427: mol_type = other DNA
atgaccagccctgctgctgcccagagccgggagattgactgcctgagccctgaggcccagaagctggccgaggcccggctggccgccaagagagctgcccgggcagaggcccgggagatccgcatgaaggagctggagcggcagcagaaggaggaggacagcgagcgctacagcagaagaagcagaagaaacaccagcgccagtgatgaagatgagaggatgtctgtgggcagccggggcagcctgcgggtggaggagaggcctgagaaggacttcacagagaagggcagcaggaacatgcctggcctgtctgctgccaccctggccagcctgggcggcaccagcagcagaagaggcagcggggacaccagcatcagcattgacacagaggccagcatccgggagatcaaggagctgaatgagctgaaggaccagatccaggatgtggagggcaagtacatgcagggcctgaaggagatgaaggacagcctggccgaggtggaggagaagtacaagaaggccatggtgtccaatgcccagctggacaatgagaagaccaacttcatgtaccaggtggacaccctgaaggacatgctgctggagctggaggagcagctggccgagagccggcggcagtatgaggagaagaacaaggagtttgagcgggagaagcacgcccacagcatcctgcagttccagtttgctgaggtgaaggaggccctgaagcagcgggaggagatgctggagaagcacggcatcatcctgaacagcgagatcgccaccaacggggagaccagtgacaccctgaacaacgtgggctaccagggccccaccaagatgaccaaggaggagctgaatgccctgaagagcactggagatggcaccctgggccgggccagcgaggtggaggtgaagaatgagatcgtggccaacgtgggcaagcgggagatcctgcacaacacagagaaggagcagcacacagaggacacagtgaaggactgtgtggacatcgaggtgtttcctgctggggagaacacagaggaccagaagagcagcgaggacacagcccccttcctgggcaccctggccggggccacctatgaggagcaggtgcagagccagatcctggagagcagcagcctgcctgaaaatacagtgcaggtggagagcaatgaggtgatgggcgccccagatgacaggaccaggacccccctggagcccagcaactgctggagcgacctggatggcggcaaccacacagaaaatgtgggggaggccgctgtgacccaggtggaggagcaggccggcaccgtggccagctgccccctgggccacagtgatgacacagtgtaccatgatgacaagtgcatggtggaggtgccccaggagctggagaccagcacaggccacagcctggagaaggagttcaccaaccaggaggccgctgagcccaaggaggtgcctgcccacagcacagaggtgggccgggaccacaatgaggaggagggggaggagaccggcctgagagatgagaagcccatcaagacagaggtgcccggcagccctgctggaacagagggcaactgccaggaggccaccggccccagcacagtggacacccagaatgagcccctggacatgaaggagccagatgaggagaagagtgaccagcagggcgaggccctggacagcagccagaagaagaccaagaacaagaagaagaagaacaagaagaagaagagccctgtgcctgtggagaccctgaaggatgtgaagaaggagctgacctaccagaacacagacctgtctgagatcaaggaggaggagcaggtgaagagcacagacaggaagtctgctgtggaggcccagaatgaggtgacagagaaccccaagcagaagattgctgctgagagcagtgaaaatgtggactgcccagagaaccccaagatcaagctggatggcaagctggaccaggagggagatgatgtgcagacagctgctgaggaggtgctggctgatggagacaccctggactttgaagatgacacagtgcagagcagcggccccagggctggaggagaggagctggatgaaggagtggccaaggacaatgccaagattgatggagccacccagagcagccctgctgagcccaagtcagaagatgctgaccgctgcaccctgcctgagcacgagagccccagccaggacatcagtgatgcctgtgaggccgagagcacagagcgctgtgagatgtctgagcaccccagccagacagtgaggaaggccctggacagcaacagcctggagaatgatgacctgagcgcccctggccgggagcccggccacttcaaccctgagagccgggaggacacccggggcggcaatgagaagggcaagagcaaagaagactgcaccatgtcctag

SEQ ID NO: 157466 - DNA, 1923 bp, synthetic construct
  misc_feature 1..1923: note = Description of Artificial Sequence: Synthetic coding sequence
  source 1..1923: mol_type = other DNA
atggacatgggcacccagggcagcggcaggaagaggctgcccaaccgggagcggctgacagcagaagatgatgccctgaaccagatcgcccgggaggccgaggcccggctggccgccaagagagctgcccgggcagaggcccgggagatccgcatgaaggagctggagcggcagcagaaggagatctaccaggtgcagaagaagtactacggcctggacaccaagtggggagacatcgagcagtggatggaggacagcgagcgctacagcagaagaagcagaagaaacaccagcgccagtgatgaagatgagaggatgtctgtgggcagccggggcagcctgcggagccagcctgacctggagtatggaggcccctatgcctggaccaacggctatgatggagagctgtatggcagccagagcctgaacagaagaagtggccggcccagctgcctgtacagcgctgcccggcccagcggcagctaccgggcctctgtgctggatgagggcagctttggaggcacccggcggggcagcaccagcggcagccgggcccccagcgagtacagcggccacctgaacagcagcagccgggccagcagccgggccagcagcgcccgggccagccctgtggtggaggagaggcctgagaaggacttcacagagaagggcagcaggaacatgcctggcctgtctgctgccaccctggccagcctgggcggcaccagcagcagaagaggcagcggggacaccagcatcagcattgacacagaggccagcatccgggagatcaaggagctgaatgagctgaaggaccagatccaggatgtggagggcaagtacatgcagggcctgaaggagatgaaggacagcctggccgaggtggaggagaagtacaagaaggccatggtgtccaatgcccagctggacaatgagaagaccaacttcatgtaccaggtggacaccctgaaggacatgctgctggagctggaggagcagctggccgagagccggcggcagtatgaggagaagaacaaggagtttgagcgggagaagcacgcccacagcatcctgcagttccagtttgctgaggtgaaggaggccctgaagcagcgggaggagatgctggaggagatccggcagctgcagcagaagcaggccagcagcatccgggagatcagtgacctgcaggagaccatcgagtggaaggacaagaagattggagccctggagcggcagaaggagttctttgattctgtgcgctcagaaagagatgacctgcgggaggaggtggtgatgctgaaggaggagctgaagaagcacggcatcatcctgaacagcgagatcgccaccaacggggagaccagtgacaccctgaacaacgtgggctaccagggccccaccaagatgaccaaggaggagctgaatgccctgaagagcactggagatggcaccctggacatccggctgaagaagctggtggatgagcgggagtgcctgctggagcagatcaagaagctgaagggccagctggaggagcggcagaagattggcaagctggacaacctgcggagtgaagatgatgtgctggagaatggaacagacatgcacgtgatggacctgcagagagatgccaaccggcagatcagtgacctgaagttcaagctggccaagtctgagcaggagatcacagccctggagcagaatgtcatccggctggagagccaggtgagccgctacaagtctgctgctgaaaatgctgagaagattgaagatgagctgaaggccgagaagaggaagctgcagcgggagctgcggagcgccctggacaagacagaggagctggaggtgtccaatggccacctggtgaagaggctggagaagatgaaggccaacagaagtgccctgctgagccagcagtag

SEQ ID NO: 157467 - DNA, 2166 bp, synthetic construct
  misc_feature 1..2166: note = Description of Artificial Sequence: Synthetic coding sequence
  source 1..2166: mol_type = other DNA
atgggcaccccagccagcggcaggaagaggacccctgtgaaggaccgcttcagcgcagaagatgaggccctgagcaacatcgcccgggaggccgaggcccggctggccgccaagagagctgcccgggcagaggcccgggacatccgcatgagggagctggagcggcagcagaaggagtacagcctgcacagctttgacaggaagtggggccagatccagaagtggctggaggacagcgagcgggcccgctacagccacaggagcagccaccaccggccctacctgggcgtggaggatgccctgagcatccgctctgtgggcagccacagatatgacatgttcaaggacaggagcagccggctgagcagcctgaaccacagctacagccacagccacggcatgaagaagaggagcagtgacagccacaaggacctgctgagcggcctgtactttgaccagaggaactacagcagcctgcggcacagcaagcccaccagcgcctactacacccggcagagcagcagcctgtacagcgaccccctggccacctacaagagtgaccgggccagccccacagccaacagcggcctgctgcggagcgccagcctggccagcctgtacaacggcggcctgtacaacccctacggccccaggaccccatctgagtgcagctactacagcagccgcatcagcagcgcccggagcagccctggcttcaccaatgatgacacagccagcatcgtgtccagtgaccgggccagccggggcagaagagagagcgtggtgtctgctgctgactacttcagccgcagcaacagaagaggctctgtggtgtctgaggtggatgacatcagcatcccagacctgagcagcctggatgagaagagtgacaagcagtatgcagagaactacacccggcccagcagcaggaacagcgccagcgccaccacccccctgagcggcaacagcagcagaagaggcagcggggacaccagcagcctgattgatcctgacaccagcctgtctgagctgcgggacatctatgacctgaaggaccagatccaggatgtggagggccgctacatgcagggcctgaaggagctgaaggagagcctgtctgaggtggaggagaagtacaagaaggccatggtgtccaatgcccagctggacaatgagaagaacaacctgatctaccaggtggacaccctgaaggatgtgattgaggagcaggaggagcagatggccgagttctaccgggagaatgaggagaagagcaaggagctggagcggcagaagcacatgtgcagcgtgctgcagcacaagatggaggagctgaaggagggcctgcggcagagagatgagctgattgaggagaagcagaggatgcagcagaagattgacaccatgaccaaggaggtgtttgacctgcaggagaccctgctgtggaaggacaagaagattggagccctggagaagcagaaggagtacatcgcctgcctgagaaatgaaagagacatgctgcgggaggagctggccgacctgcaggagaccgtgaagacaggagagaagcacggcctggtgatcatcccagatggcaccccaaatggagatgtgtcccatgagcctgtggccggggccatcaccgtggtgtcccaggaggccgcccaggtgctggagagcgctggggagggccccctggatgtgcggctgaggaagctggccggggagaaggaggagctgctgagccagatcaggaagctgaagctgcagctggaggaggagcggcagaagtgcagcagaaatgatggcaccgtgggggacctggccggcctgcagaatggaagtgacctgcagttcatcgagatgcagagagatgccaaccggcagatcagcgagtacaagttcaagctgagcaaggccgagcaggacatcaccaccctggagcagagcatcagccggctggagggccaggtgctgcgctacaagacagctgctgaaaatgctgagaaggtggaggatgagctgaaggccgagaagaggaagctgcagcgggagctgaggacagccctggacaagattgaggagatggagatgaccaacagccacctggccaagaggctggagaagatgaaggccaacagaacagccctgctggcccagcagtag

SEQ ID NO: 157468 - DNA, 1203 bp, synthetic construct
  misc_feature 1..1203: note = Description of Artificial Sequence: Synthetic coding sequence
  source 1..1203: mol_type = other DNA
atgggcaccccagccagcggcaggaagaggacccctgtgaaggaccgcttcagcgcagaagatgaggccctgagcaacatcgcccgggaggccgaggcccggctggccgccaagagagctgcccgggcagaggcccgggacatccgcatgagggagctggagcggcagcagaaggagctggatgagaagagtgacaagcagtatgcagagaactacacccggcccagcagcaggaacagcgccagcgccaccacccccctgagcggcaacagcagcagaagaggcagcggggacaccagcagcctgattgatcctgacaccagcctgtctgagctgcgggagagcctgtctgaggtggaggagaagtacaagaaggccatggtgtccaatgcccagctggacaatgagaagaacaacctgatctaccaggtggacaccctgaaggatgtgattgaggagcaggaggagcagatggccgagttctaccgggagaatgaggagaagagcaaggagctggagcggcagaagcacatgtgcagcgtgctgcagcacaagatggaggagctgaaggagggcctgcggcagagagatgagctgattgagaagcacggcctggtgatcatcccagatggcaccccaaatggagatgtgtcccatgagcctgtggccggggccatcaccgtggtgtcccaggaggccgcccaggtgctggagagcgctggggagggccccctggatgtgcggctgaggaagctggccggggagaaggaggagctgctgagccagatcaggaagctgaagctgcagctggaggaggagcggcagaagtgcagcagaaatgatggcaccgtgggggacctggccggcctgcagaatggaagtgacctgcagttcatcgagatgcagagagatgccaaccggcagatcagcgagtacaagttcaagctgagcaaggccgagcaggacatcaccaccctggagcagagcatcagccggctggagggccaggtgctgcgctacaagacagctgctgaaaatgctgagaaggtggaggatgagctgaaggccgagaagaggaagctgcagcgggagctgaggacagccctggacaagattgaggagatggagatgaccaacagccacctggccaagaggctggagaagatgaaggccaacagaacagccctgctggcccagcagtag

SEQ ID NO: 157469 - DNA, 2166 bp, synthetic construct; identical to SEQ ID NO: 157467
  misc_feature 1..2166: note = Description of Artificial Sequence: Synthetic coding sequence
  source 1..2166: mol_type = other DNA

SEQ ID NO: 157470 - DNA, 180 bp, synthetic construct
  misc_feature 1..180: note = Description of Artificial Sequence: Synthetic coding sequence
  source 1..180: mol_type = other DNA
atgggcaccccagccagcggcaggaagaggacccctgtgaaggaccgcttcagcgcagaagatgaggccctgagcaacatcgcccgggaggccgaggcccggctggccgccaagagagctgcccgggcagaggcccgggacatccgcatgagggagctggagcggcagcagaaggagtag

SEQ ID NO: 157471 - DNA, 180 bp, synthetic construct; identical to SEQ ID NO: 157470
  misc_feature 1..180: note = Description of Artificial Sequence: Synthetic coding sequence
  source 1..180: mol_type = other DNA

SEQ ID NO: 157472 - DNA, 180 bp, synthetic construct; identical to SEQ ID NO: 157470
  misc_feature 1..180: note = Description of Artificial Sequence: Synthetic coding sequence
  source 1..180: mol_type = other DNA

SEQ ID NO: 157473 - DNA, 1275 bp, synthetic construct
  misc_feature 1..1275: note = Description of Artificial Sequence: Synthetic coding sequence
  source 1..1275: mol_type = other DNA
atgggcaccccagccagcggcaggaagaggacccctgtgaaggaccgcttcagcgcagaagatgaggccctgagcaacatcgcccgggaggccgaggcccggctggccgccaagagagctgcccgggcagaggcccgggacatccgcatgagggagctggagcggcagcagaaggagctggatgagaagagtgacaagcagtatgcagagaactacacccggcccagcagcaggaacagcgccagcgccaccacccccctgagcggcaacagcagcagaagaggcagcggggacaccagcagcctgattgatcctgacaccagcctgtctgagctgcgggacatctatgacctgaaggaccagatccaggatgtggagggccgctacatgcagggcctgaaggagctgaaggagagcctgtctgaggtggaggagaagtacaagaaggccatggtgtccaatgcccagctggacaatgagaagaacaacctgatctaccaggtggacaccctgaaggatgtgattgaggagcaggaggagcagatggccgagttctaccgggagaatgaggagaagagcaaggagctggagcggcagaagcacatgtgcagcgtgctgcagcacaagatggaggagctgaaggagggcctgcggcagagagatgagctgattgagaagcacggcctggtgatcatcccagatggcaccccaaatggagatgtgtcccatgagcctgtggccggggccatcaccgtggtgtcccaggaggccgcccaggtgctggagagcgctggggagggccccctggatgtgcggctgaggaagctggccggggagaaggaggagctgctgagccagatcaggaagctgaagctgcagctggaggaggagcggcagaagtgcagcagaaatgatggcaccgtgggggacctggccggcctgcagaatggaagtgacctgcagttcatcgagatgcagagagatgccaaccggcagatcagcgagtacaagttcaagctgagcaaggccgagcaggacatcaccaccctggagcagagcatcagccggctggagggccaggtgctgcgctacaagacagctgctgaaaatgctgagaaggtggaggatgagctgaaggccgagaagaggaagctgcagcgggagctgaggacagccctggacaagattgaggagatggagatgaccaacagccacctggccaagaggctggagaagatgaaggccaacagaacagccctgctggcccagcagtag

SEQ ID NO: 157474 - DNA, 2316 bp, synthetic construct
  misc_feature 1..2316: note = Description of Artificial Sequence: Synthetic coding sequence
  source 1..2316: mol_type = other DNA
atggcccctggccccttcagcagcgccctgctgagccccccacctgctgccctgcccttcctgctgctgctgtgggccggggccagccggggccagccctgccccggccgctgcatctgccagaatgtggcccccaccctgaccatgctgtgtgccaagacaggcctgctgtttgtgcccccagccatcgacagaagagtggtggagctgcggctgacagacaacttcatcgctgctgtgagaagaagagactttgccaacatgaccagcctggtgcacctgaccctgagcaggaacaccatcggccaggtggccgccggggcctttgctgacctgcgggccctgcgggccctgcacctggacagcaaccggctggccgaggtgcggggggaccagctgcggggcctgggcaacctgcggcacctgatcctgggcaacaaccagatccggcgggtggagagcgctgcctttgatgccttcctgagcacagtggaggacctggacctgagctacaacaacctggaggccctgccctgggaggccgtgggccagatggtgaacctgaacaccctgaccctggaccacaacctgattgaccacatcgccgagggcacctttgtgcagctgcacaagctggtgcggctggacatgaccagcaaccggctgcacaagctgcccccagatggcctcttcctgcggagccagggcaccggccccaagccacccacccccctgactgtgtcctttggaggcaaccccctgcactgcaactgtgagctgctgtggctgcggcggctgaccagagaagatgacctggagacctgtgccaccccagagcacctgacagaccgctacttctggagcatccctgaggaggagttcctgtgtgagcccccactcatcacccggcaggccggcggccgggccctggtggtggagggccaggccgtgtccctgcgctgcagagctgtgggggaccctgagcctgtggtgcactgggtggccccagatggccgcctgctgggcaacagcagcaggaccagggtgagaggagatggcaccctggatgtgaccatcaccaccctgcgggacagcggcaccttcacctgcatcgccagcaatgctgctggggaggccacagcccctgtggaggtgtgtgtggtgcccctgcccctgatggcccctcctcctgctgcccccccacccctgacagagcccggcagcagtgacatcgccaccccaggccggcctggggccaatgacagcgctgctgagcggcggctggtggccgctgagctgaccagcaacagcgtgctgatccgctggccagcccagaggcctgtgcccggcatccgcatgtaccaggtgcagtacaacagctctgtggatgacagcctggtgtacaggatgatccccagcaccagccagaccttcctggtgaatgacctggccgccggccgggcctatgacctgtgtgtgctggccgtgtatgatgatggagccacagccctgcctgccaccagggtggtgggctgtgtgcagttcaccacagctggggaccctgccccctgccggcccctgcgggcccacttcctgggcggcaccatgatcatcgccatcggcggcgtcatcgtggcctctgtgctggtgttcatcgtgctgctgatgatccgctacaaggtgtatggagatggagacagccggcgggtgaagggcagccgcagcctgccccgggtgagccacgtgtgcagccagaccaatggagctggcactggagctgcccaggccccagccctgcctgcccaggaccactatgaggccctgcgggaggtggagagccaggccgccccagctgtggccgtggaggccaaggccatggaggccgagacagccagcgctgagcctgaggtggtgctgggccgcagcctgggcggcagcgccaccagcctgtgcctgctgcccagcgaggagaccagcggggaggagagcagagctgctgtgggcccccggcgcagccgcagcggggccctggagccccccaccagcgccccacccaccctggccctggtgcctggaggagctgctgcccggccccggccccagcagcgctacagctttgatggagactatggagccctcttccagagccacagctacccccggcgggcccggaggaccaagaggcacaggagcaccccccacctggatggagctgggggcggcgctgctggagaagatggagacctgggcctgggcagcgcccgggcctgcctggccttcaccagcacagagtggatgctggagagcacagtgtag

SEQ ID NO: 157475 - DNA, 2370 bp, synthetic construct
  misc_feature 1..2370: note = Description of Artificial Sequence: Synthetic coding sequence
  source 1..2370: mol_type = other DNA
atggagaccctgctgggcggcctgctggccttcggcatggcctttgctgtggtggatgcctgccccaagtactgtgtgtgccagaacctgtctgagagcctgggcaccctgtgccccagcaagggcctgctgtttgtgcccccagacatcgacagaagaacagtggagctgcggctgggcggcaacttcatcatccacatcagccggcaggactttgccaacatgacaggcctggtggacctgaccctgagcaggaacaccatcagccacatccagcccttctccttcctggacctggagagcctgcggagcctgcacctggacagcaaccggctgcccagcctgggggaggacaccctgcggggcctggtgaacctgcagcacctgattgtgaacaacaaccagctgggcggcattgctgatgaggcctttgaggacttcctgctgaccctggaggacctggacctgagctacaacaacctgcacggcctgccctgggacagcgtgcggaggatggtgaacctgcaccagctgagcctggaccacaacctgctggaccacatcgccgagggcacctttgctgacctgcagaagctggcccggctggacctgaccagcaaccggctgcagaagctgcccccagaccccatctttgcccggagccaggccagcgccctgacagccaccccatttgccccacccctgtccttctcctttggaggcaaccccctgcactgcaactgtgagctgctgtggctgcggcggctggagagagatgatgacctggagacctgtggcagccctgggggcctgaagggccgctacttctggcacgtgcgggaggaggagtttgtgtgtgagcccccactcatcacccagcacacccacaagctgctggtgctggagggccaggccgccaccctgaagtgcaaggccatcggggaccccagccccctcatccactgggtggccccagatgaccggctggtgggcaacagcagcaggacagctgtgtatgacaatggcaccctggacatcttcatcaccaccagccaggacagcggggccttcacctgcatcgccgccaatgctgctggggaggccacagccatggtggaggtgtccatcgtgcagctgccccacctgagcaacagcaccagcaggacagccccacccaagagccggctgagtgacatcaccggcagcagcaagaccagccggggcggcggcggcagcggcggcggggagccccccaagagccccccagagagagctgtgctggtgtctgaggtgaccaccaccagcgccctggtgaagtggagcgtgtccaagagcgccccccgggtgaagatgtaccagctgcagtacaactgcagtgatgatgaggtgctgatctacaggatgatcccagccagcaacaaggcctttgtggtgaacaacctggtgtctggaacaggctatgacctgtgtgtgctggccatgtgggatgacacagccaccaccctgacagccaccaacatcgtgggctgtgcccagttcttcaccaaggctgactacccccagtgccagagcatgcacagccagatcctgggcggcaccatgatcctggtgattggaggcatcatcgtggccaccctgctggtgttcatcgtcatcctgatggtgcgctacaaggtgtgcaaccacgaggcccccagcaagatggctgctgctgtgtccaatgtgtacagccagaccaacggggcccagcccccaccacccagcagcgccccagctggggccccaccccagggcccccccaaggtggtggtgagaaatgagctgctggacttcaccgccagcctggcccgggccagtgacagcagcagcagcagcagcctgggcagcggggaggccgccggcctgggccgggccccctggagaattcctccttctgccccccggcccaagcccagcctggaccggctgatgggcgcctttgccagcctggacctgaagagccagaggaaggaggagctgctggacagcaggaccccagctggccgcggggccggcaccagcgcccggggccaccacagcgaccgggagcccctgctgggccccccagctgcccgggcccggagcctgctgcccctgcccctggagggcaaggccaagaggagccacagctttgacatgggagactttgctgctgctgctgctgggggcgtggtgcctgggggctacagcccccccaggaaggtgagcaacatctggaccaagaggagcctgtctgtgaatggcatgctgctgccctttgaggagagtgacctggtgggcgcccggggcaccttcggcagcagcgagtgggtgatggagagcacagtgtag

SEQ ID NO: 157476 - DNA, 1887 bp, synthetic construct
  misc_feature 1..1887: note = Description of Artificial Sequence: Synthetic coding sequence
  source 1..1887: mol_type = other DNA
atggccatcctgcccctgctgctgtgcctgctgcccctggccccagccagcagccccccccagagcgccacccccagcccctgcccccggcgctgccgctgccagacccagagcctgcccctgtctgtgctgtgccctggggccggcctgctgtttgtgccccccagcctggacagaagagctgctgagctgcggctggccgacaacttcatcgcctctgtgagaagaagagacctggccaacatgacaggcctgctgcacctgagcctgagcaggaacaccatcagacatgtggccgccggggcctttgctgacctgcgggccctgcgggccctgcacctggatggcaaccggctgaccagcctgggggagggccagctgcggggcctggtgaacctgcggcacctgatcctgagcaacaaccagctggccgccctggccgccggggccctggatgactgtgccgagaccctggaggacctggacctgagctacaacaacctggagcagctgccctgggaggccctgggccgcctgggcaatgtgaacaccctgggcctggaccacaacctgctggcctctgtgcctgctggggccttcagccggctgcacaagctggcccggctggacatgaccagcaaccggctgaccaccatccccccagaccccctcttcagccggctgcccctgctggcccggccccggggcagccctgccagcgccctggtgctggccttcggcggcaaccccctgcactgcaactgtgagctggtgtggctgcggcggctggcccgggaggatgacctggaggcctgtgccagccccccagccctgggcggccgctacttctgggccgtgggggaggaggagtttgtgtgtgagccccctgtggtgacccacaggagcccccccctggccgtgcctgctggccggcctgctgccctgcgctgcagagctgtgggggaccctgagccccgggtgcgctgggtgagcccccagggccgcctgctgggcaacagcagccgggcccgggccttccccaacggcaccctggagctgctggtgacagagcctggagatggcggcatcttcacctgcatcgccgccaatgctgctggggaggccacagctgctgtggagctgactgtgggccccccacctccaccccagctggccaacagcaccagctgtgaccccccaagagatggagaccctgatgccctgaccccacccagcgctgccagcgccagcgccaaggtggccgacaccggccccccaacagaccggggcgtgcaggtgacagagcacggggccacagctgccctggtgcagtggccagaccagaggcccatccctggcatccgcatgtaccagatccagtacaacagcagcgcagatgacatcctggtgtacaggatgatcccagctgagagccgctccttcctgctgacagacctggccagcggccgcacctatgacctgtgtgtgctggccgtgtatgaagattctgccaccggcctgacagccaccaggcctgtgggctgtgcccgcttcagcacagagcccgccctgcggccctgtggggcccctcatgcccccttcctgggcggcaccatgatcatcgccctgggcggcgtgattgtggcctctgtgctggtgttcatctttgtgctgctgatgagatacaaggtgcatggaggccagcccccaggcaaggccaagatcccagcccctgtgtcctctgtgtgcagccagaccaatggagccctgggccccacccccaccccagcccccccagcccctgagcctgctgccctgcgggcccacacagtggtgcagctggactgtgagccctggggccctggccacgagcctgtgggcccctag

SEQ ID NO: 157477 - DNA, 1887 bp, synthetic construct; identical to SEQ ID NO: 157476
  misc_feature 1..1887: note = Description of Artificial Sequence: Synthetic coding sequence
  source 1..1887: mol_type = other DNA

SEQ ID NO: 157478 - DNA, 1908 bp, synthetic construct
  misc_feature 1..1908: note = Description of Artificial Sequence: Synthetic coding sequence
  source 1..1908: mol_type = other DNA
atggccccacccctgctgctgctgctgctggccagcggggctgctgcctgccccctgccctgtgtgtgccagaacctgtctgagagcctgagcaccctgtgtgcccaccggggcctgctgtttgtgcccccaaatgtggacagaagaacagtggagctgcggctggccgacaacttcatccaggccctgggccccccagacttcaggaacatgacaggcctggtggacctgaccctgagcagaaatgccatcaccagaattggagcccgggccttcggggacctggagagcctgcggagcctgcacctggatggcaaccggctggtggagctgggcaccggcagcctgcggggccctgtgaacctgcagcacctgatcctgagcggcaaccagctgggcagaattgcccctggggcctttgatgacttcctggagagcctggaggacctggacctgagctacaacaacctgcggcaggtgccctgggccggcattggagccatgcctgccctgcacaccctgaacctggaccacaacctgattgatgccctgcccccaggggcctttgcccagctgggccagctgagccggctggacctgaccagcaaccggctggccaccctggccccagaccccctcttcagccggggcagagatgctgaggccagccctgcccccctggtgctgtccttcagcggcaaccccctgcactgcaactgtgagctgctgtggctgcggcggctggcccggccagatgacctggagacctgtgccagccccccaggcctggccggccgctacttctgggccgtgcctgagggggagttcagctgtgagccccccctgattgcccggcacacccagaggctgtgggtgctggagggccagagggccaccctgcgctgccgggccctgggggaccctgcccccaccatgcactgggtgggcccagatgaccggctggtgggcaacagcagccgggcccgggccttccccaacggcaccctggagattggagtgactggagctggagatgctgggggctacacctgcatcgccaccaacccagctggggaggccacagcccgggtggagctgcgggtgctggccctgccccatggaggcaacagcagcgctgagggcggccggcccggccccagcgacattgctgccagcgccaggacagctgctgagggggagggcaccctggagagcgagcctgctgtgcaggtgacagaggtgacagccaccagcggcctggtgtcctggggccctggccggcctgctgaccctgtgtggatgttccagatccagtacaacagcagtgaagatgagaccctcatctacagaattgtgcctgccagcagccaccacttcctgctgaagcacctggtgcctggagctgactatgacctgtgcctgctggccctgagccctgctgctggccccagcgacctgacagccacccggctgctgggctgtgcccacttcagcaccctgcctgccagccccctgtgccacgccctgcaggcccacgtgctgggcggcaccctgactgtggccgtgggcggcgtgctggtggccgccctgctggtgttcaccgtggccctgctggtgcggggccgcggggctggaaatggccgcctgcccctgaagctgagccacgtgcagagccagaccaatggaggccccagccccacccccaaggcccacccccccaggagccccccaccccggccccagaggagctgcagcctggacctgggagatgctggctgctacggctacgcccggcggctgggcggggcctgggcccggcgcagccacagcgtgcacggcggcctgctgggcgccggctgccggggcgtgggcggcagcgctgagcggctggaggagagcgtggtgtag

SEQ ID NO: 157479 - DNA, 2160 bp, synthetic construct
  misc_feature 1..2160: note = Description of Artificial Sequence: Synthetic coding sequence
  source 1..2160: mol_type = other DNA
atggagaagatcctcttctacctgttcctgattggaattgctgtgaaggcccagatctgccccaagagatgtgtgtgccagatcctgagccccaacctggccaccctgtgtgccaagaagggcctgctgtttgtgccccccaacatcgacagaagaacagtggagctgcggctggccgacaactttgtgaccaacatcaagaggaaggactttgccaacatgaccagcctggtggacctgaccctgagcaggaacaccatctccttcatcacccctcatgcctttgctgacctgaggaacctgcgggccctgcacctgaacagcaaccggctgaccaagatcaccaatgacatgttcagcggcctgagcaacctgcaccacctgatcctgaacaacaaccagctgaccctcatcagcagcacagcctttgatgatgtgtttgccctggaggagctggacctgagctacaacaacctggagaccatcccctgggatgctgtggagaagatggtgtccctgcacaccctgagcctggaccacaacatgattgacaacatccccaagggcaccttcagccacctgcacaagatgacccggctggatgtgaccagcaacaagctgcagaagctgcccccagaccccctcttccagagggcccaggtgctggccaccagcggcatcatcagccccagcacctttgccctgagctttggaggcaaccccctgcactgcaactgtgagctgctgtggctgcggcggctgagcagagaagatgacctggagacctgtgccagcccccccctgctgaccggccgctacttctggagcatccctgaggaggagttcctgtgtgagcccccactcatcaccaggcacacccatgagatgagggtgctggagggccagagggccaccctgcgctgcaaggcccggggggaccctgagcccgccatccactggatcagccctgagggcaagctgatcagcaatgccaccaggagcctggtgtatgacaatggcaccctggacatcctgatcaccaccgtgaaggacaccggggccttcacctgcatcgccagcaacccagctggggaggccacccagatcgtggacctgcacatcatcaagctgccccacctgctgaacagcaccaaccacatccacgagccagaccccggcagcagtgacatcagcaccagcaccaagagcggcagcaacaccagcagcagcaatggagacaccaagctgagccaggacaagatcgtggtggccgaggccaccagcagcacagccctgctgaagttcaacttccagaggaacatccctggcatccgcatgttccagatccagtacaacggcacctatgatgacaccctggtgtacaggatgatcccccccaccagcaagaccttcctggtgaacaacctggccgccggcaccatgtatgacctgtgtgtgctggccatctatgatgatggcatcaccagcctgacagccaccagggtggtgggctgcatccagttcaccacagagcaggactatgtgcgctgccacttcatgcagagccagttcctgggcggcaccatgatcatcatcattggaggcatcatcgtggcctctgtgctggtgttcatcatcatcctgatgatccgctacaaggtgtgcaacaacaacggccagcacaaggtgaccaaggtgtccaatgtgtacagccagaccaacggggcccagatccagggctgcagcgtgaccctgccccagagcgtgtccaagcaggccgtgggccacgaggagaatgcccagtgctgcaaggccaccagtgacaacgtcatccagagcagcgagacctgcagcagccaggacagcagcaccaccaccagcgccctgccccccagctggaccagcagcacctctgtgtcccagaagcagaagaggaagacaggcaccaagcccagcacagagccccagaatgaagctgtgaccaacgtggagagccagaacaccaacagaaacaacagcacagccctgcagctggccagccggcccccagattctgtgacagagggccccaccagcaagagggcccacatcaagcccaatgccctgctgaccaacgtggaccagatcgtgcaggagacccagaggctggagctgatctag

SEQ ID NO: 157480 - DNA, 1863 bp, synthetic construct
  misc_feature 1..1863: note = Description of Artificial Sequence: Synthetic coding sequence
  source 1..1863: mol_type = other DNA
atgcaggtgtccaagaggatgctggccggcggcgtgcgctccatgcccagccccctgctggcctgctggcagcccatcctgctgctggtgctgggctctgtgctgagcggcagcgccaccggctgccccccaagatgtgaatgttctgcccaggacagagctgtgctgtgccacaggaagagatttgtggccgtgcctgagggcatccccacagagacccggctgctggacctgggcaagaaccgcatcaagaccctgaaccaggatgaatttgccagcttcccccacctggaggagctggagctgaatgaaaacatcgtgtctgctgtggagcccggggccttcaacaacctcttcaacctgcggaccctgggcctgcggagcaaccggctgaagctgatccccctgggcgtcttcaccggcctgagcaacctgaccaagctggacatcagcgagaacaagatcgtcatcctgctggactacatgttccaggacctgtacaacctgaagagcctggaggtgggggacaatgacctggtgtacatcagccaccgggccttcagcggcctgaacagcctggagcagctgaccctggagaagtgcaacctgaccagcatccccacagaggccctgagccacctgcacggcctcatcgtgctgcggctgcggcacctgaacatcaatgccatccgggactacagcttcaagaggctgtaccgcctgaaggtgctggagatcagccactggccctacctggacaccatgacccccaactgcctgtatggcctgaacctgaccagcctgagcatcacccactgcaacctgacagctgtgccctacctggccgtgcgccacctggtgtacctgcgcttcctgaacctgagctacaaccccatcagcaccatcgagggctccatgctgcacgagctgctgcggctgcaggagatccagctggtgggcggccagctggccgtggtggagccctatgccttccggggcctgaactacctgcgggtgctgaatgtgtctggcaaccagctgaccaccctggaggagagcgtcttccacagcgtgggcaacctggagaccctcatcctggacagcaaccccctggcctgtgactgccgcctgctgtgggtgttcagaagacgctggaggctgaacttcaaccggcagcagcccacctgtgccaccccagagtttgtgcagggcaaggagttcaaggacttcccagatgtgctgctgcccaactacttcacctgccggcgggcccgcatccgggacaggaaggcccagcaggtgtttgtggatgagggccacacagtgcagtttgtgtgcagagcagatggagaccccccaccagccatcctgtggctgagccccaggaagcacctggtgtctgccaagagcaatggccgcctgactgtgtttcctgatggcaccctggaggtgcgctatgcccaggtgcaggacaatggcacctacctgtgcatcgccgccaatgctggaggaaatgacagcatgcctgcccacctgcacgtgcgcagctacagcccagactggccccaccagcccaacaagacctttgccttcatcagcaaccagcccggggagggggaggccaacagcacccgggccaccgtgcccttcccctttgacatcaagaccctcatcatcgccaccaccatgggcttcatctccttcctgggcgtggtgctcttctgcctggtgctgctcttcctgtggagccggggcaagggcaacaccaagcacaacattgaaattgaatatgtgcccaggaagagtgatgctggcatcagcagcgcagatgcccccaggaagttcaacatgaagatgatctag

SEQ ID NO: 157481 - DNA, 168 bp, synthetic construct
  misc_feature 1..168: note = Description of Artificial Sequence: Synthetic coding sequence
  source 1..168: mol_type = other DNA
atgctggccggcggcgtgcgctccatgcccagccccctgctggcctgctggcagcccatcctgctgctggtgctgggctctgtgctgagcggcagcgccaccggctgccccccaagatgtgaatgttctgcccaggacagagctgtgctgtgccacaggaagaggtag

SEQ ID NO: 157482 - DNA, 1845 bp, synthetic construct
  misc_feature 1..1845: note = Description of Artificial Sequence: Synthetic coding sequence
  source 1..1845: mol_type = other DNA
atgctggccggcggcgtgcgctccatgcccagccccctgctggcctgctggcagcccatcctgctgctggtgctgggctctgtgctgagcggcagcgccaccggctgccccccaagatgtgaatgttctgcccaggacagagctgtgctgtgccacaggaagagatttgtggccgtgcctgagggcatccccacagagacccggctgctggacctgggcaagaaccgcatcaagaccctgaaccaggatgaatttgccagcttcccccacctggaggagctggagctgaatgaaaacatcgtgtctgctgtggagcccggggccttcaacaacctcttcaacctgcggaccctgggcctgcggagcaaccggctgaagctgatccccctgggcgtcttcaccggcctgagcaacctgaccaagctggacatcagcgagaacaagatcgtcatcctgctggactacatgttccaggacctgtacaacctgaagagcctggaggtgggggacaatgacctggtgtacatcagccaccgggccttcagcggcctgaacagcctggagcagctgaccctggagaagtgcaacctgaccagcatccccacagaggccctgagccacctgcacggcctcatcgtgctgcggctgcggcacctgaacatcaatgccatccgggactacagcttcaagaggctgtaccgcctgaaggtgctggagatcagccactggccctacctggacaccatgacccccaactgcctgtatggcctgaacctgaccagcctgagcatcacccactgcaacctgacagctgtgccctacctggccgtgcgccacctggtgtacctgcgcttcctgaacctgagctacaaccccatcagcaccatcgagggctccatgctgcacgagctgctgcggctgcaggagatccagctggtgggcggccagctggccgtggtggagccctatgccttccggggcctgaactacctgcgggtgctgaatgtgtctggcaaccagctgaccaccctggaggagagcgtcttccacagcgtgggcaacctggagaccctcatcctggacagcaaccccctggcctgtgactgccgcctgctgtgggtgttcagaagacgctggaggctgaacttcaaccggcagcagcccacctgtgccaccccagagtttgtgcagggcaaggagttcaaggacttcccagatgtgctgctgcccaactacttcacctgccggcgggcccgcatccgggacaggaaggcccagcaggtgtttgtggatgagggccacacagtgcagtttgtgtgcagagcagatggagaccccccaccagccatcctgtggctgagccccaggaagcacctggtgtctgccaagagcaatggccgcctgactgtgtttcctgatggcaccctggaggtgcgctatgcccaggtgcaggacaatggcacctacctgtgcatcgccgccaatgctggaggaaatgacagcatgcctgcccacctgcacgtgcgcagctacagcccagactggccccaccagcccaacaagacctttgccttcatcagcaaccagcccggggagggggaggccaacagcacccgggccaccgtgcccttcccctttgacatcaagaccctcatcatcgccaccaccatgggcttcatctccttcctgggcgtggtgctcttctgcctggtgctgctcttcctgtggagccggggcaagggcaacaccaagcacaacattgaaattgaatatgtgcccaggaagagtgatgctggcatcagcagcgcagatgcccccaggaagttcaacatgaagatgatctag

SEQ ID NO: 157483 - DNA, 1821 bp, synthetic construct
  misc_feature 1..1821: note = Description of Artificial Sequence: Synthetic coding sequence
  source 1..1821: mol_type = other DNA
atgctgcacacagccatcagctgctggcagcccttcctgggcctggccgtggtgctgatcttcatgggcagcaccatcggctgcccagcccgctgtgaatgttctgcccagaacaagtctgtgtcctgccacagaagaaggctgattgccatccctgagggcatccccatcgagaccaagatcctggacctgagcaagaaccggctgaagtctgtgaaccctgaggagttcatctcctaccccctgctggaggagattgacctgagtgacaacatcatcgccaacgtggagcccggggccttcaacaacctcttcaacctgcggagcctgcggctgaagggcaaccggctgaagctggtgcccctgggcgtcttcaccggcctgagcaacctgaccaagctggacatcagcgagaacaagatcgtcatcctgctggactacatgttccaggacctgcacaacctgaagagcctggaggtgggggacaatgacctggtgtacatcagccaccgggccttcagcggcctgctgagcctggagcagctgaccctggagaagtgcaacctgacagctgtgcccacagaggccctgagccacctgcggagcctcatcagcctgcacctgaagcacctgaacatcaacaacatgcctgtgtatgccttcaagaggctcttccacctgaagcacctggagattgactactggcccctgctggacatgatgcctgccaacagcctgtatggcctgaacctgaccagcctgtctgtgaccaacaccaacctgagcacagtgcccttcctggccttcaagcacctggtgtacctgacccacctgaacctgagctacaaccccatcagcaccatcgaggccggcatgttcagtgacctgatccggctgcaggagctgcacatcgtgggcgcccagctgcggaccatcgagccccacagcttccagggcctgcgcttcctgcgggtgctgaatgtgtcccagaacctgctggagaccctggaggagaatgtgttcagcagcccccgggccctggaggtgctgagcatcaacaacaaccccctggcctgtgactgccgcctgctgtggatcctgcagaggcagcccaccctgcagtttggaggccagcagcccatgtgtgccggccctgacaccatccgggagaggagcttcaaggacttccacagcacagccctgtccttctacttcacctgcaagaagcccaagatccgggagaagaagctgcagcacctgctggtggatgagggccagacagtgcagctggagtgcagcgcagatggagacccccagcccgtcatctcctgggtgaccccccggcggcgcttcatcaccaccaagagcaatggccgggccaccgtgctgggagatggcaccctggagatccgctttgcccaggaccaggacagcggcatgtatgtgtgcatcgccagcaatgctgctggaaatgacaccttcaccgccagcctgactgtgaagggctttgccagtgaccgcttcctgtatgccaacagaacacccatgtacatgacagacagcaatgacaccatcagcaatggcaccaatgccaacaccttcagcctggacctgaagaccatcctggtgtccacagccatgggctgcttcaccttcctgggcgtggtgctcttctgcttcctgctgctgtttgtgtggagccggggcaagggcaagcacaagaacagcattgacctggagtatgtgcccaggaagaacaatggagctgtggtggagggggaggtggccggcccccggcgcttcaacatgaagatgatctag

SEQ ID NO: 157484 - DNA, 1821 bp, synthetic construct; identical to SEQ ID NO: 157483
  misc_feature 1..1821: note = Description of Artificial Sequence: Synthetic coding sequence
  source 1..1821: mol_type = other DNA

SEQ ID NO: 157485 - DNA, 1779 bp, synthetic construct
  misc_feature 1..1779: note = Description of Artificial Sequence: Synthetic coding sequence
  source 1..1779: mol_type = other DNA
atgacctgctggctgtgtgtgctgagcctgcccctgctgctgctgcctgctgcccctcctcctgctgggggctgcccagcccgctgtgagtgcaccgtgcagaccagggctgtggcctgcacccggcggcggctgacagctgtgcctgatggcatcccagctgagacccggctgctggagctgagcaggaaccgcatccgctgcctgaaccctggggacctggccgccctgcctgccctggaggagctggacctgtctgaaaatgccatcgcccacgtggagcccggggcctttgccaacctgccccggctgcgggtgctgcggctgcggggcaaccagctgaagctgatccccccaggagtcttcacccggctggacaacctgaccctgctggacctgtctgagaacaagctggtgatcctgctggactacaccttccaggacctgcacagcctgcggcggctggaggtgggggacaatgacctggtgtttgtgtccagaagagcctttgctggcctgctggccctggaggagctgaccctggagcgctgcaacctgacagccctgagcggggagagcctgggccacctgcggagcctgggcgccctgcggctgcggcacctggccatcgccagcctggaggaccagaacttccggcggctgcccggcctgctgcacctggagattgacaactggcccctgctggaggaggtggccgccggcagcctgcggggcctgaacctgaccagcctgtctgtgacccacaccaacatcacagctgtgcctgctgctgccctgcggcaccaggcccacctgacctgcctgaacctgagccacaaccccatcagcacagtgccccggggcagcttccgggacctggtgcggctgcgggagctgcacctggccggggccctgctggccgtggtggagccccaggccttcctgggcctgcggcagatccggctgctgaacctgagcaacaacctgctgagcaccctggaggagagcaccttccacagcgtgaacaccctggagaccctgcgggtggatggcaaccccctggcctgtgactgccgcctgctgtggatcgtgcagaggaggaagaccctgaactttgatggccgcctgcctgcctgtgccaccccagctgaggtgagaggagatgccctgaggaacctgcctgacagcgtgctgtttgagtactttgtgtgcaggaagcccaagatccgggagcggcggctgcagagggtgacagccacagctggagaagatgtgcgcttcctgtgcagagctgagggggagcccgcccccaccgtggcctgggtgaccccccagcacaggcctgtgacagccaccagcgctggccgggcccgggtgctgcccggcggcaccctggagatccaggatgcccggccccaggacagcggcacctacacctgtgtggccagcaatgccggcggcaatgacacctactttgccaccctgactgtgcggcctgagcctgctgccaacagaacacctggagaggcccacaatgagaccctggccgccctgcgggcccccctggacctgaccaccatcctggtgtccacagccatgggctgcatcaccttcctgggcgtggtgctcttctgctttgtgctgctgtttgtgtggagccggggccggggccagcacaagaacaacttctctgtggagtacagcttcaggaaggtggatggccctgctgctgctgctggccagggcggggccaggaagttcaacatgaagatgatctag

SEQ ID NO: 157486 - DNA, 2172 bp, synthetic construct
  misc_feature 1..2172: note = Description of Artificial Sequence: Synthetic coding sequence
  source 1..2172: mol_type = other DNA
atgcccctcttcttcaggaagaggaagcccagcgaggaggccaggaagaggctggagtaccagatgtgcctggccaaggaggccggggctgatgacatcctggacatcagcaaatgtgagctgtctgagatcccctttggagcctttgccacctgcaaggtgctgcagaagaaggtgctgattgtgcacaccaaccacctgaccagcctgctgcccaagagctgcagcctgctgagcctggccaccatcaaggtgctggacctgcatgacaaccagctgacagccctgcctgatgacctgggccagctgacagccctgcaggtgctgaatgtggagaggaaccagctgatgcagctgcccaggagcatcggcaacctgacccagctgcagaccctgaatgtgaaggacaacaagctgaaggagctgcctgacacagtgggggagctgcggagcctgcggaccctgaacatctctggaaatgagatccagaggctgccccagatgctggcccacgtgaggaccctggagatgctgagcctggatgccagcgccatggtgtacccaccccgggaggtgtgtggggccggcacagctgccatcctgcagttcctgtgcaaggagagcggcctggagtactacccacccagccagtacctgctgcccatcctggagcaggacggcatcgagaacagccgggacagcccagatggccccacagaccgcttcagccgggaggagctggagtggcagaaccgcttcagtgactatgagaagaggaaggagcagaagatgctggagaagctggagtttgagcggcggctggagctgggccagcgggagcacacccagctgctgcagcagagcagcagccagaaggatgagatcctgcagacagtgaaggaggagcagagccggctggagcagggcctgtctgagcaccagaggcacctgaatgctgagcggcagaggctgcaggagcagctgaagcagacagagcagaacatcagcagccgcatccagaagctgctgcaggacaaccagaggcagaagaagagcagcgagatcctgaagagcctggagaatgaaagaatccgcatggagcagctgatgagcatcacccaggaggagacagagagcctgcggaggagagatgtggccagcgccatgcagcagatgctgacagagagctgcaagaacagactcatccagatggcctatgagagccagaggcagaacctggtgcagcaggcctgcagctccatggccgagatggatgagcgcttccagcagatcctgtcctggcagcagatggaccagaacaaggccatcagccagatcctgcaggagagcgccatgcagaaggccgcctttgaggccctgcaggtgaagaaggacctgatgcaccggcagatccgcagccagatcaagctgattgaaacagagctgctgcagctgacccagctggagctgaagaggaagagcctggacacagagagcctgcaggagatgatcagcgagcagcgctgggccctgagcagcctgctgcagcagctgctgaaggagaagcagcagcgggaggaggagctgcgggagatcctgacagagctggaggccaagtctgagacccggcaggagaactactggctgatccagtaccagaggctgctgaaccagaagcccctgagcctgaagctgcaggaggagggcatggagcggcagctggtggccctgctggaggagctgtctgctgagcactacctgcccatctttgcccaccaccggctgagcctggacctgctgagccagatgagccctggggacctggccaaggtgggcgtgtctgaggccggcctgcagcacgagatcctgcggcgggtgcaggagctgctggatgctgcccgcatccagcctgagctgaagccacccatgggagaggtggtgacccccacagccccccaggagcccccagagagcgtgcggcccagcgcccccccagctgagctggaggtgcaggcctctgaatgtgtggtgtgcctggagcgggaggcccagatgatcttcctgaactgtggccacgtgtgctgctgccagcagtgctgccagcccctgcggacctgccccctgtgccggcaggacatcgcccagaggctgcgcatctaccacagcagctag

SEQ ID NO: 157487 - DNA, 2172 bp, synthetic construct; identical to SEQ ID NO: 157486
  misc_feature 1..2172: note = Description of Artificial Sequence: Synthetic coding sequence
  source 1..2172: mol_type = other DNA

SEQ ID NO: 157488 - DNA, 2172 bp, synthetic construct; identical to SEQ ID NO: 157486
  misc_feature 1..2172: note = Description of Artificial Sequence: Synthetic coding sequence
  source 1..2172: mol_type = other DNA

SEQ ID NO: 157489 - DNA, 2091 bp, synthetic construct
  misc_feature 1..2091: note = Description of Artificial Sequence: Synthetic coding sequence
  source 1..2091: mol_type = other DNA
atgcccctcttcttcaggaagaggaagcccagcgaggaggccaggaagaggctggagtaccagatgtgcctggccaaggaggccggggctgatgacatcctggacatcagcaaatgtgagctgtctgagatcccctttggagcctttgccacctgcaaggtgctgcagaagaaggtgctgattgtgcacaccaaccacctgaccagcctgctgcccaagagctgcagcctgctgagcctggccaccatcaaggtgctggacctgcatgacaaccagctgacagccctgcctgatgacctgggccagctgacagccctgcaggtgctgaatgtggagaggaaccagctgatgcagctgcccaggagcatcggcaacctgacccagctgcagaccctgaatgtgaaggacaacaagctgaaggagctgcctgacacagtgggggagctgcggagcctgcggaccctgaacatctctggaaatgagatccagaggctgccccagatgctggcccacgtgaggaccctggagatgctgagcctggatgccagcgccatggtgtacccaccccgggaggtgtgtggggccggcacagctgccatcctgcagttcctgtgcaaggagagcggcctggagtactacccacccagccagtacctgctgcccatcctggagcaggacggcatcgagaacagccgggacagcccagatggccccacagaccgcttcagccgggaggagctggagtggcagaaccgcttcagtgactatgagaagaggaaggagcagaagatgctggagaagctggagtttgagcggcggctggagctgggccagcgggagcacacccagctgctgcagcagagcagcagccagaaggatgagatcctgcagacagtgaaggaggagcagagccggctggagcagggcctgtctgagcaccagaggcacctgaatgctgagcggcagaggctgcaggagcagctgaagcagacagagcagaacatcagcagccgcatccagaagctgctgcaggacaaccagaggcagaagaagagcagcgagatcctgaagagcctggagaatgaaagaatccgcatggagcagctgatgagcatcacccaggaggagacagagagcctgcggaggagagatgtggccagcgccatgcagcagatgctgacagagagctgcaagaacagactcatccagatggcctatgagagccagaggcagaacctggtgcagcaggcctgcagctccatggccgagatggatgagcgcttccagcagatcctgtcctggcagcagatggaccagaacaaggccatcagccagatcctgcaggagagcgccatgcagaaggccgcctttgaggccctgcaggtgaagaaggacctgatgcaccggcagatccgcagccaggagatgatcagcgagcagcgctgggccctgagcagcctgctgcagcagctgctgaaggagaagcagcagcgggaggaggagctgcgggagatcctgacagagctggaggccaagtctgagacccggcaggagaactactggctgatccagtaccagaggctgctgaaccagaagcccctgagcctgaagctgcaggaggagggcatggagcggcagctggtggccctgctggaggagctgtctgctgagcactacctgcccatctttgcccaccaccggctgagcctggacctgctgagccagatgagccctggggacctggccaaggtgggcgtgtctgaggccggcctgcagcacgagatcctgcggcgggtgcaggagctgctggatgctgcccgcatccagcctgagctgaagccacccatgggagaggtggtgacccccacagccccccaggagcccccagagagcgtgcggcccagcgcccctcctgctgagctggaggtgcaggcctctgaatgtgtggtgtgcctggagcgggaggcccagatgatcttcctgaactgtggccacgtgtgctgctgccagcagtgctgccagcccctgcggacctgccccctgtgccggcaggacatcgcccagaggctgcgcatctaccacagcagctag

SEQ ID NO: 157490 - DNA, 465 bp, synthetic construct
  misc_feature 1..465: note = Description of Artificial Sequence: Synthetic coding sequence
  source 1..465: mol_type = other DNA
atgttccactgcatccccctgtggcgctgcaacagacatgtggagagcattgacaagaggcactgcagcctggtgtatgtgcctgaggagatctaccgctatgcccggagcctggaggagctgctgctggatgccaaccagctgcgggagctgcctgagcagttcttccagctggtgaagctgaggaagctgggcctgagtgacaatgagatccagaggctgcccccagagatcgccaacttcatgcagctggtggagctggatgtgtccagaaatgagatccctgagatccctgagagcatctccttctgcaaggccctgcaggtggccgacttcagcggcaaccccctgacccggctgcctgagagcttccctgagctgcagaacctgacctgcctgtctgtgaatgacatcagcctgcagagcctgcctgaaaatattggcaagcagaagaccaccagctag

SEQ ID NO: 157491 - DNA, 1575 bp, synthetic construct
  misc_feature 1..1575: note = Description of Artificial Sequence: Synthetic coding sequence
  source 1..1575: mol_type = other DNA
atgttccactgcatccccctgtggcgctgcaacagacatgtggagagcattgacaagaggcactgcagcctggtgtatgtgcctgaggagatctaccgctatgcccggagcctggaggagctgctgctggatgccaaccagctgcgggagctgcctgagcagttcttccagctggtgaagctgaggaagctgggcctgagtgacaatgagatccagaggctgcccccagagatcgccaacttcatgcagctggtggagctggatgtgtccagaaatgagatccctgagatccctgagagcatctccttctgcaaggccctgcaggtggccgacttcagcggcaaccccctgacccggctgcctgagagcttccctgagctgcagaacctgacctgcctgtctgtgaatgacatcagcctgcagagcctgcctgaaaatattggcaacctgtacaacctggccagcctggagctgcgggagaacctgctgacctacctgcctgacagcctgacccagctgcggcggctggaggagctggacctgggcaacaatgagatctacaacctgcctgagagcattggagccctgctgcacctgaaggacctgtggctggatggcaaccagctgtctgagctgccccaggagatcggcaacctgaagaacctgctgtgcctggatgtgtctgaaaatcggctggagcggctgcctgaggagatcagcggcctgaccagcctgacagacctggtgatcagccagaacctgctggagaccatcccagatggcatcggcaagctgaagaagctgagcatcctgaaggtggaccagaaccggctgacccagctgcctgaggccgtgggagaatgtgagagcctgacagagctggtgctgacagagaaccagctgctgaccctgcccaagagcatcggcaagctgaagaagctgagcaacctgaatgctgacaggaacaagctggtgtccctgcccaaggagattggaggctgctgcagcctgaccgtcttctgtgtgcgggacaaccggctgacccgcatcccagctgaggtgtcccaggccacagagctgcacgtgctggatgtggccggcaaccggctgctgcacctgcccctgagcctgacagccctgaagctgaaggccctgtggctgagtgacaaccagagccagcccctgctgaccttccagacagacacagactacaccaccggggagaagatcctgacctgtgtgctgctgccccagctgcccagcgagcccacctgccaggagaacctgccccgctgtggggccctggagaacctggtgaatgatgtgtctgatgaggcctggaatgaaagagctgtgaacagagtgtctgccatccgctttgtggaggatgagaaggatgaggaggacaatgagaccaggaccctgctgcggcgggccaccccccaccctggagagctgaagcacatgaagaagacagtggagaacctgagaaatgacatgaatgctgccaagggcctggacagcaacaagaatgaggtgaaccacgccatcgacagagtgaccacctctgtgtag

SEQ ID NO: 157492 - DNA, 834 bp, synthetic construct
  misc_feature 1..834: note = Description of Artificial Sequence: Synthetic coding sequence
  source 1..834: mol_type = other DNA
atgggcaacaccatccgggccctggtggccttcatcccagctgaccgctgccagaactacgtggtgcgggacctgcgggagatgcccctggacaagatggtggacctgagcggcagccagctgcggcgcttccccctgcacgtgtgcagcttccgggagctggtgaagctgtacctgagtgacaaccacctgaacagcctgcccccagagctgggccagctgcagaacctgcagatcctggccctggacttcaacaacttcaaggccctgccccaggtggtgtgcaccctgaagcagctgtgcatcctgtacctgggcaacaacaagctgtgtgacctgcccagcgagctgagcctgctgcagaacctgcggaccctgtggattgaggccaactgcctgacccagctgcctgatgtggtgtgtgagctgagcctgctgaagaccctgcatgctggcagcaatgccctgcggctgctgcccggccagctgcggcggctgcaggagctgcggaccatctggctgagcggcaaccggctgacagacttccccaccgtgctgctgcacatgcccttcctggaggtgattgatgtggactggaacagcatccgctacttccccagcctggcccacctgagcagcctgaagctggtgatctatgaccacaacccctgcagaaatgcccccaaggtggccaagggcgtgagaagagtgggccgctgggccgaggagaccccagagccagaccccaggaaggccaggagatatgccctggtgcgggaggagagccaggagctgcaggcccctgtgcccctgctgccccccaccaacagctag

SEQ ID NO: 157493 - DNA, 4116 bp, synthetic construct
  misc_feature 1..4116: note = Description of Artificial Sequence: Synthetic coding sequence
  source 1..4116: mol_type = other DNA
atgacagaggagagcagtgatgtgccccgggagctgattgagagcatcaaggatgtgattggaaggaagatcaagatctctgtgaagaagaaggtgaagctggaggtgaagggggacaaggtggagaacaaggtgctggtgctgaccagctgccgggccttcctggtgacagcccgcatccccaccaagctggagctgaccttctcctacctggagatccacggcgtggtgtgcagcaagagcgcccagatgattgtggagacagagaagtgcagcatctccatgaagatggccagcccagaagatgtgtctgaggtgctggcccacatcggcacctgcctgaggaagatcttccctggcctgagccctgtgcgcatcatgaagaaggtgtccatggagcccagcgagcggctggccagcctgcaggccctgtgggacagccagacagtggccgagcagggcccctgtggcggcttcagccagatgtatgcctgtgtgtgtgactggctgggcttctcctaccgggaggaggtgcagtgggatgtggacaccatctacctgacccaggacacccgggagctgaacctgcaggacttcagccacctggaccaccgggacctgatccccatcatcgccgccctggagtacaaccagtggttcaccaagctgagcagcaaggacctgaagctgagcacagatgtgtgtgagcagatcctgcgggtggtgagccgcagcaaccggctggaggagctggtgctggagaatgccggcctgaggacagactttgcccagaagctggccagcgccctggcccacaaccccaacagcggcctgcacaccatcaacctggccggcaaccccctggaggaccggggcgtgagcagcctgagcatccagtttgccaagctgcccaagggcctgaagcacctgaacctgagcaagaccagcctgagccccaagggcgtgaacagcctgagccagagcctgagcgccaaccccctgacagccagcaccctggtgcacctggacctgtctggaaatgtgctgcggggagatgacctgagccacatgtacaacttcctggcccagcccaatgccatcgtgcacctggacctgagcaacacagagtgcagcctggacatggtgtgtggggccctgctgcggggctgcctgcagtacctggccgtgctgaacctgagcaggacagtgttcagccacaggaagggcaaggaggtgcccccatccttcaagcagttcttcagcagcagcctggccctgatgcacatcaacctgagcggcaccaagctgagccctgagcccctgaaggccctgctgctgggcctggcctgcaaccacaacctgaagggcgtgtccctggacctgagcaactgtgagctgcggagcggcggggcccaggtgctggagggctgcatcgccgagatccacaacatcaccagcctggacatcagtgacaatggcctggagagtgacctgagcaccctcatcgtgtggctgagcaagaacagaagcatccagcacctggccctgggcaagaacttcaacaacatgaagagcaagaacctgacccctgtgctggacaacctggtgcagatgatccaggatgaggagagccccctgcagagcctgagcctggccgacagcaagctgaagacagaggtgaccatcatcatcaatgccctgggcagcaacaccagcctgaccaaggtggacatctctggaaatggcatgggagacatgggcgccaagatgctggccaaggccctgcagatcaacaccaagctgaggacagtcatctgggacaagaacaacatcacagcccagggcttccaggacattgctgtggccatggagaagaactacaccctgcgcttcatgcccatccccatgtatgatgccagccaggccctgaagaccaaccctgagaagacagaagatgccctgcagaagattgagaactacctgctgagaaatcatgagaccaggaagtacctgcaggagcaggcctaccgcctgcagcagggcatcgtgaccagcaccacccagcagatgattgaccgcatctgtgtgaaggtgcaggaccacctgaacagcctgaggaactgtggaggagatgccatccaggaggacctgaagtctgctgagcggctgatgagagatgccaagaacagcaagaccctgctgcccaacctgtaccacgtgggcggggcctcctgggccggggccagcggcctgctgagcagccccatccaggagaccctggagagcatggccggggaggtgaccagggtggtggatgagcagctgaaggccctgctggagagcatggtggatgctgctgagaacctgtgccccaacgtgatgaagaaggcccacatccggcaggacctgattcatgccagcacagagaagatcagcatccccaggacctttgtgaagaatgtgctgctggagcagagcggcatcgacatcctgaacaagatcagcgaggtgaagctgactgtggccagcttcctgagtgacagaattgtggatgagatcctggatgccctgagccactgccaccacaagctggccgaccacttcagccggcggggcaagaccctgccccagcaggagagcctggagattgagctggccgaggagaagcctgtgaagaggagcatcatcaccgtggaggagctgacagaaattgaaaggctggaggacctggacacctgcatgatgacccccaagagcaagaggaagagcatccacagcaggatgctgcggcctgtgtcccgggcctttgagatggagtttgacctggacaaggccctggaggaggtgcccatccacatcgaggacccccccttccccagcctgcggcaggagaagaggagcagcggcttcatcagcgagctgcccagcgaggagggcaagaagctggagcacttcaccaagctgcggcccaagaggaacaagaagcagcagcccacccaggccgctgtgtgtgccgccaacatcgtgtcccaggatggagagcagaatggcctgatgggccgggtggatgaaggagtggatgagttcttcaccaagaaggtgaccaagatggacagcaagaagtggagcacccggggcagcgagagccatgagctgaatgaaggaggagatgagaagaagaagagggacagcaggaagagcagcggcttcctgaacctgatcaagagccgcagcaagtctgagaggcctcccaccatcctgatgacagaggagcccagcagccccaagggagctgtgcgcagcccccctgtggactgccccaggaaggacaccaaggctgctgagcacaatggaaacagcgagagaattgaggagatcaagaccccagacagctttgaggagagccagggcgaggagatcggcaaggtggagaggagtgacagcaagagcagcccccaggccggccgccgctatggagtgcaggtgatgggcagcggcctgctggccgagatgaaggccaagcaggagaagagagctgcctgtgcccagaagaagctgggcaatgatgctgtgtcccaggacagcagcagccctgccctgtctggagtggagaggagtgatggcggcggcgctgtgcccaagctgcaccctggcctgcctgaaaatcgcttcggcctgggcaccccagagaagaacaccaaggccgagcccaaggccgaggccggcagccgcagccgcagcagcagcagcacccccaccagccccaagcccctgctgcagagccccaagcccagcctggccgcccggcctgtgatcccccagaagcccaggacagccagcaggccagatgacatcccagacagccccagcagccccaaggtggccctgctgccccctgtgctgaagaaggtgcccagcgacaaggagagagatggccagagcagcccccagcccagccccaggaccttcagccaggaggtgtccagaagatcctggggccagcaggcccaggagtaccaggagcagaagcagaggagcagcagcaaggatggccaccagggcagcaagagcaatgacagcggggaggaggccgagaaggagttcatctttgtgtag

SEQ ID NO: 157494 - DNA, 531 bp, synthetic construct
  misc_feature 1..531: note = Description of Artificial Sequence: Synthetic coding sequence
  source 1..531: mol_type = other DNA
atgtatgcctgtgtgtgtgactggctgggcttctcctaccgggaggaggtgcagtgggatgtggacaccatctacctgacccaggacacccgggagctgaacctgcaggacttcagccacctggaccaccgggacctgatccccatcatcgccgccctggagtacaaccagtggttcaccaagctgagcagcaaggacctgaagctgagcacagatgtgtgtgagcagatcctgcgggtggtgagccgcagcaaccggctggaggagctggtgctggagaatgccggcctgaggacagactttgcccagaagctggccagcgccctggcccacaaccccaacagcggcctgcacaccatcaacctggccggcaaccccctggaggaccgggagaccaccaccaagatcaagaggcagaatgtgcccaccgtgctgcagacctacctggtggtgtgccccagcgactaccagccctgccccctgcccctgggcaaggacaactactacagcgacttcagccatgatggatag

SEQ ID NO: 157495 - DNA, 3981 bp, synthetic construct
  misc_feature 1..3981: note = Description of Artificial Sequence: Synthetic coding sequence
  source 1..3981: mol_type = other DNA
atgacagaggagagcagtgatgtgccccgggagctgattgagagcatcaaggatgtgattggaaggaagatcaagatctctgtgaagaagaaggtgaagctggaggtgaagggggacaaggtggagaacaaggtgctggtgctgaccagctgccgggccttcctggtgacagcccgcatccccaccaagctggagctgaccttctcctacctggagatccacggcgtggtgtgcagcaagagcgcccagatgattgtggagacagagaagtgcagcatctccatgaagatggccagcccagaagatgtgtctgaggtgctggcccacatcggcacctgcctgaggaagatcttccctggcctgagccctgtgcgcatcatgaagaaggtgtccatggagcccagcgagcggctggccagcctgcaggccctgtgggacagccagacagtggccgagcagggcccctgtggcggcttcagccagatgtatgcctgtgtgtgtgactggctgggcttctcctaccgggaggaggtgcagtgggatgtggacaccatctacctgacccaggacacccgggagctgaacctgcaggacttcagccacctggaccaccgggacctgatccccatcatcgccgccctggagtacaaccagtggttcaccaagctgagcagcaaggacctgaagctgagcacagatgtgtgtgagcagatcctgcgggtggtgagccgcagcaaccggctggaggagctggtgctggagaatgccggcctgaggacagactttgcccagaagctggccagcgccctggcccacaaccccaacagcggcctgcacaccatcaacctggccggcaaccccctggaggaccggggcgtgagcagcctgagcatccagtttgccaagctgcccaagggcctgaagcacctgaacctgagcaagaccagcctgagccccaagggcgtgaacagcctgagccagagcctgagcgccaaccccctgacagccagcaccctggtgcacctggacctgtctggaaatgtgctgcggggagatgacctgagccacatgtacaacttcctggcccagcccaatgccatcgtgcacctggacctgagcaacacagagtgcagcctggacatggtgtgtggggccctgctgcggggctgcctgcagtacctggccgtgctgaacctgagcaggacagtgttcagccacaggaagggcaaggaggtgcccccatccttcaagcagttcttcagcagcagcctggccctgatgcacatcaacctgagcggcaccaagctgagccctgagcccctgaaggccctgctgctgggcctggcctgcaaccacaacctgaagggcgtgtccctggacctgagcaactgtgagctgcggagcggcggggcccaggtgctggagggctgcatcgccgagatccacaacatcaccagcctggacatcagtgacaatggcctggagagtgacctgagcaccctcatcgtgtggctgagcaagaacagaagcatccagcacctggccctgggcaagaacttcaacaacatgaagagcaagaacctgacccctgtgctggacaacctggtgcagatgatccaggatgaggagagccccctgcagagcctgagcctggccgacagcaagctgaagacagaggtgaccatcatcatcaatgccctgggcagcaacaccagcctgaccaaggtggacatctctggaaatggcatgggagacatgggcgccaagatgctggccaaggccctgcagatcaacaccaagctgaggacagtcatctgggacaagaacaacatcacagcccagggcttccaggacattgctgtggccatggagaagaactacaccctgcgcttcatgcccatccccatgtatgatgccagccaggccctgaagaccaaccctgagaagacagaagatgccctgcagaagattgagaactacctgctgagaaatcatgagaccaggaagtacctgcaggagcaggcctaccgcctgcagcagggcatcgtgaccagcaccacccagcagatgattgaccgcatctgtgtgaaggtgcaggaccacctgaacagcctgaggaactgtggaggagatgccatccaggaggacctgaagtctgctgagcggctgatgagagatgccaagaacagcaagaccctgctgcccaacctgtaccacgtgggcggggcctcctgggccggggccagcggcctgctgagcagccccatccaggagaccctggagagcatggccggggaggtgaccagggtggtggatgagcagctgaaggccctgctggagagcatggtggatgctgctgagaacctgtgccccaacgtgatgaagaaggcccacatccggcaggacctgattcatgccagcacagagaagatcagcatccccaggacctttgtgaagaatgtgctgctggagcagagcggcatcgacatcctgaacaagatcagcgaggtgaagctgactgtggccagcttcctgagtgacagaattgtggatgagatcctggatgccctgagccactgccaccacaagctggccgaccacttcagccggcggggcaagaccctgccccagcaggagagcctggagattgagctggccgaggagaagcctgtgaagaggagcatcatcaccgtggaggagctgacagaaattgaaaggctggaggacctggacacctgcatgatgacccccaagagcaagaggaagagcatccacagcaggatgctgcggcctgtgtcccgggcctttgagatggagtttgacctggacaaggccctggaggaggtgcccatccacatcgaggacccccccttccccagcctgcggcaggagaagaggagcagcggcttcatcagcgagctgcccagcgaggagggcaagaagctggagcacttcaccaagctgcggcccaagaggaacaagaagcagcagcccacccaggccgctgtgtgtgccgccaacatcgtgtcccaggatggagagcagaatggcctgatgggccgggtggatgaaggagtggatgagttcttcaccaagaaggtgaccaagatggacagcaagaagtggagcacccggggcagcgagagccatgagctgaatgaaggaggagatgagaagaagaagagggacagcaggaagagcagcggcttcctgaacctgatcaagagccgcagcaagtctgagaggcctcccaccatcctgatgacagaggagcccagcagccccaagggagctgtgcgcagcccccctgtggactgccccaggaaggacaccaaggctgctgagcacaatggaaacagcgagagaattgaggagatcaagaccccagacagctttgaggagagccagggcgaggagatcggcaaggtggagaggagtgacagcaagagcagcccccaggccggccgccgctatggagtgcaggtgatgggcagcggcctgctggccgagatgaaggccaagcaggagaacagatttggcctgggcaccccagagaagaacaccaaggccgagcccaaggccgaggccggcagccgcagccgcagcagcagcagcacccccaccagccccaagcccctgctgcagagccccaagcccagcctggccgcccggcctgtgatcccccagaagcccaggacagccagcaggccagatgacatcccagacagccccagcagccccaaggtggccctgctgccccctgtgctgaagaaggtgcccagcgacaaggagagagatggccagagcagcccccagcccagccccaggaccttcagccaggaggtgagccgccgctcctggggccagcaggcccaggagtaccaggagcagaagcagaggagcagcagcaaggatggccaccagggcagcaagagcaatgattctggagaggaggccgagaaggagttcatctttgtgtag

SEQ ID NO: 157496 - DNA, 1116 bp, synthetic construct
  misc_feature 1..1116: note = Description of Artificial Sequence: Synthetic coding sequence
  source 1..1116: mol_type = other DNA
atgggccacaaggtggtggtgtttgacatcagcgtcatccgggccctgtgggagaccagggtgaagaagcacaaggcctggcagaagaaggaggtggagcggctggagaagagcgccctggagaagatcaaggaggagtggaactttgtggccgagtgcaggaggaagggcatcccccaggccgtgtactgcaagaatggcttcatcgacacctctgtgcggctgctggacaagattgaaagaaacaccctgacccggcagagcagcctgcccaaggaccggggcaagaggagcagcgcctttgtgtttgagctgagcggggagcactggacagagctgcctgacagcctgaaggagcagacccacctgcgggagtggtacatcagcaacaccctcatccagatcatccccacctacatccagctgttccaggccatgaggatcctggacctgcccaagaaccagatcagccacctgcctgctgagatcggctgcctgaagaacctgaaggagctgaatgtgggcttcaactacctgaagagcatccccccagagctgggggactgtgagaacctggagcggctggactgcagcggcaacctggagctgatggagctgccctttgagctgagcaacctgaagcaggtgacctttgtggacatcagcgccaacaagttcagctctgtgcccatctgtgtgctgaggatgagcaacctgcagtggctggacatcagcagcaacaacctgacagacctgccccaggacatcgaccggctggaggagctgcagagcttcctgctgtacaagaacaagctgacctacctgccctacagcatgctgaacctgaagaagctgaccctgctggtggtgtctggggaccacctggtggagctgcccacagccctgtgtgacagcagcacccccctgaagtttgtgtccctgatggacaaccccatcgacaatgcccagtgtgaagatggaaatgagatcatggagagcgagcgggaccggcagcactttgacaaggaggtgatgaaggcctacatcgaggacctgaaggagcgggagagcgtgcccagctacaccaccaaggtgtccttcagcctgcagctgtag

SEQ ID NO: 157497 - DNA, 1116 bp, synthetic construct; identical to SEQ ID NO: 157496
  misc_feature 1..1116: note = Description of Artificial Sequence: Synthetic coding sequence
  source 1..1116: mol_type = other DNA

SEQ ID NO: 157498 - DNA, 918 bp, synthetic construct
  misc_feature 1..918: note = Description of Artificial Sequence: Synthetic coding sequence
  source 1..918: mol_type = other DNA
atgggcggcaccctggcctggaccctgctgctgcccctgctgctgcgggagagtgacagcctggagcccagctgcaccgtgtcctctgcagatgtggactggaatgctgagttcagcgccacctgcctgaacttcagcggcctgagcctgagcctgccccacaaccagagcctgcgggccagcaatgtcatcctgctggacctgtctggaaatggcctgcgggagctgcctgtgaccttctttgcccacctgcagaagctggaggtgctgaatgtgctgaggaaccccctgagccgggtggatggagccctggccgcccgctgtgacctggacctgcaggccgactgcaactgtgccctggagagctggcatgacatcagaagagacaactgcagcggccagaagcccctgctgtgctgggacaccaccagcagccagcacaacctgagcgccttcctggaggtgtcctgtgcccctggcctggccagcgccaccatcggggctgtggtggtgtctggctgcctgctgctgggcctggccatcgccggccctgtgctggcctggaggctgtggcgctgccgggtggcccggagccgggagctgaacaagccctgggccgcccaggacggccccaagccaggcctgggcctgcagcccaggtatggcagccgcagcgcccccaagccccaggtggccgtgcccagctgccccagcaccccagactatgagaacatgtttgtgggccagcctgctgctgagcaccagtgggatgagcagggcgcccaccccagtgaagataatgacttctacatcaactacaaggacatcgacctggccagccagcctgtgtactgcaacctgcagagcctgggccaggcccccatggatgaggaggagtatgtgattcctggccactag

SEQ ID NO: 157499 - DNA, 1005 bp, synthetic construct
  misc_feature 1..1005: note = Description of Artificial Sequence: Synthetic coding sequence
  source 1..1005: mol_type = other DNA
atgaggggccccagctggagccggccccggcccctgctgctgctgctgctgctgctgagcccctggcctgtgtgggcccaggtgtctgccacagccagccccagcggcagcctgggcgccccagactgcccagaggtgtgcacctgtgtgcctgggggcctggccagctgcagcgccctgagcctgcctgctgtgcccccaggcctgagcctgcggctgcgggccctgctgctggaccacaacagagtgcgggccctgcccccaggggcctttgctggggccggggccctgcagaggctggacctgcgggagaatggcctgcacagcgtgcacgtgcgggccttctggggcctgggcgccctgcagctgctggacctgagcgccaaccagctggaggccctggcccctggcacctttgcccccctgcgggccctgaggaacctgagcctggccggcaaccggctggcccggctggagcctgctgccctgggcgccctgcccctgctgcggagcctgagcctgcaggacaatgagctggccgccctggcccctggcctgctgggccgcctgcctgccctggatgccctgcacctgcggggcaacccctggggctgcggctgtgccctgcggcccctgtgtgcctggctgcggcggcaccccctgcctgccagcgaggccgagaccgtgctgtgtgtgtggccaggccgcctgaccctgagccccctgacagccttcagtgatgctgccttcagccactgtgcccagcccctggccctgcgggacctggccgtggtgtacaccctgggccctgccagcttcctggtgtccctggccagctgcctggccctgggcagcggcctgacagcctgccgggccaggagaagaaggctgaggacagctgccctgcggcccccccggcccccagaccccaacccagaccctgacccccacggctgtgccagccctgctgaccccggcagccctgctgctgctgcccaggcctag

SEQ ID NO: 157500 - DNA, 1923 bp, synthetic construct
  misc_feature 1..1923: note = Description of Artificial Sequence: Synthetic coding sequence
  source 1..1923: mol_type = other DNA
atgctgaacaagatgaccctgcacccccagcagatcatgattggcccccgcttcaacagagccctgtttgaccccctgctggtggtgctgctggccctgcagctgctggtggtggccggcctggtgcgggcccagacctgccccagcgtgtgcagctgcagcaaccagttcagcaaggtgatctgtgtgaggaagaacctgcgggaggtgcctgatggcatcagcaccaacacccggctgctgaacctgcacgagaaccagatccagatcatcaaggtgaacagcttcaagcacctgcggcacctggagatcctgcagctgagcaggaaccacatccgcaccattgaaattggagccttcaacggcctggccaacctgaacaccctggagctgtttgacaaccggctgaccaccatccccaatggagcctttgtgtacctgagcaagctgaaggagctgtggctgaggaacaaccccatcgagagcatccccagctatgccttcaaccgcatccccagcctgcggcggctggacctgggggagctgaagaggctgagctacatcagcgagggcgcctttgagggcctgagcaacctgcgctacctgaacctggccatgtgcaacctgcgggagatccccaacctgacccccctcatcaagctggatgagctggacctgagcggcaaccacctgagcgccatccggcccggcagcttccagggcctgatgcacctgcagaagctgtggatgatccagagccagatccaggtgattgaaagaaatgcctttgacaacctgcagagcctggtggagatcaacctggcccacaacaacctgaccctgctgccccatgacctcttcacccccctgcaccacctggagcgcatccacctgcaccacaacccctggaactgcaactgtgacatcctgtggctgtcctggtggatcaaggacatggcccccagcaacacagcctgctgtgcccgctgcaacaccccacccaacctgaagggccgctacatcggggagctggaccagaactacttcacctgctacgcccctgtgattgtggagcccccagctgacctgaatgtgacagagggcatggctgctgagctgaagtgccgggccagcaccagcctgacctctgtgtcctggatcacccccaacggcaccgtgatgacccacggggcctacaaggtgagaattgctgtgctgagtgatggcaccctgaacttcaccaacgtgacagtgcaggacaccggcatgtacacctgcatggtgagcaacagcgtgggcaacaccacagccagcgccaccctgaatgtgacagctgccaccaccacccccttctcctacttcagcacagtgacagtggagaccatggagcccagccaggatgaggcccggaccacagacaacaacgtgggccccacccctgtggtggactgggagaccaccaacgtgaccaccagcctgaccccccagagcaccaggagcacagagaagaccttcaccatccctgtgacagacatcaacagcggcatccctggcattgatgaggtgatgaagaccaccaagatcatcatcggctgctttgtggccatcaccctgatggctgctgtgatgctggtgatcttctacaagatgaggaagcagcaccaccggcagaaccaccacgcccccaccaggacagtggagatcatcaacgtggatgatgagatcaccggggacacccccatggagagccacctgcccatgcctgccatcgagcacgagcacctgaaccactacaacagctacaagagccccttcaaccacaccaccaccgtgaacaccatcaacagcatccacagctctgtgcatgagcccctgctgatccgcatgaacagcaaggacaacgtgcaggagacccagatctag

SEQ ID NO: 157501 - DNA, 1923 bp, synthetic construct; identical to SEQ ID NO: 157500
  misc_feature 1..1923: note = Description of Artificial Sequence: Synthetic coding sequence
  source 1..1923: mol_type = other DNA

SEQ ID NO: 157502 - DNA, 1923 bp, synthetic construct; identical to SEQ ID NO: 157500
  misc_feature 1..1923: note = Description of Artificial Sequence: Synthetic coding sequence
  source 1..1923: mol_type = other DNA

SEQ ID NO: 157503 - DNA, 1923 bp, synthetic construct; identical to SEQ ID NO: 157500
  misc_feature 1..1923: note = Description of Artificial Sequence: Synthetic coding sequence
  source 1..1923: mol_type = other DNA

SEQ ID NO: 157504 - DNA, 126 bp, synthetic construct
  misc_feature 1..126: note = Description of Artificial Sequence: Synthetic coding sequence
  source 1..126: mol_type = other DNA
atgctgaacaagatgaccctgcacccccagcagatcatgattggcccccgcttcaacagagccctgtttgaccccctgctggtggtgctgctggccctgcagctgctggtggtggccggcctgtag

SEQ ID NO: 157505 - DNA, 4614 bp, synthetic construct
  misc_feature 1..4614: note = Description of Artificial Sequence: Synthetic coding sequence
  source 1..4614: mol_type = other DNA
atgaccaccaagaggaagatcatcggccgcctggtgccctgccgctgcttccggggggaggaggagatcatctctgtgctggactacagccactgcagcctgcagcaggtgcccaaggaggtgttcaactttgagaggaccctggaggagctgtacctggatgccaaccagatcgaggagctgcccaagcagctgttcaactgccaggccctgaggaagctgagcatcccagacaatgacctgagcaacctgcccaccaccatcgccagcctggtgaacctgaaggagctggacatcagcaagaatggagtgcaggagttccctgagaacatcaagtgctgcaagtgcctgaccatcatcgaggcctctgtgaaccccatcagcaagctgcctgatggcttcacccagctgctgaacctgacccagctgtacctgaatgatgccttcctggagttcctgcctgccaactttggccgcctggtgaagctgcgcatcctggagctgcgggagaaccacctgaagaccctgcccaagtccatgcacaagctggcccagctggagcggctggacctgggcaacaatgaatttggagagctgcctgaggtgctggaccagatccagaacctgcgggagctgtggatggacaacaatgccctgcaggtgctgcccggcagcatcggcaagctgaagatgctggtgtacctggacatgagcaagaaccgcatcgagaccgtggacatggacatcagcggctgtgaggccctggaggacctgctgctgagcagcaacatgctgcagcagctgcctgacagcatcggcctgctgaagaagctgaccaccctgaaggtggatgacaaccagctgaccatgctgcccaacaccatcggcaacctgagcctgctggaggagtttgactgcagctgcaatgagctggagagcctgcccagcaccatcggctacctgcacagcctgcggaccctggccgtggatgagaacttcctgcctgagctgccccgggagatcggcagctgcaagaatgtgacagtgatgagcctgcggagcaacaagctggagttcctgcctgaggagatcggccagatgcagaagctgcgggtgctgaacctgagtgacaaccggctgaagaacctgcccttctccttcaccaagctgaaggagctggccgccctgtggctgagtgacaaccagagcaaggccctgatccccctgcagacagaggcccaccctgagaccaagcagagggtgctgaccaactacatgttcccccagcagcccagaggagatgaggacttccagagcgacagcgacagcttcaaccccaccctgtgggaggagcagaggcagcagaggatgacagtggcctttgaatttgaggacaagaaggaggatgatgaaaatgccggcaaggtgaaggacctgagctgccaggccccctgggagcggggccagaggggcatcaccctgcagcctgcccggctgagcggggactgctgcaccccctgggcccgctgtgaccagcagatccaggacatgcctgtgccccagaatgacccccagctggcctggggctgcatcagcggcctgcagcaggagaggtccatgtgcacccccctgcctgtggccgcccagagcaccaccctgcccagcctgagcggccggcaggtggagatcaacctgaagcgctaccccaccccctacccagaggacctgaagaacatggtgaagtctgtgcagaacctggtgggcaagcccagccacggcgtgcgggtggagaacagcaaccccacagccaacacagagcagacagtgaaggagaagtatgagcacaagtggcctgtggcccccaaggagatcaccgtggaggacagctttgtgcacccagccaatgagatgagaattggagagctgcaccccagcctggccgagacccccctgtacccacccaagctggtgctgctgggcaaggacaagaaggagagcacagatgagagcgaggtggacaagacccactgcctgaacaacagcgtgagcagcggcacctacagcgactacagccccagccaggccagcagcggcagcagcaacaccagggtgaaggtgggcagcctgcagaccacagccaaggatgctgtgcacaacagcctgtggggcaaccgcatcgcccccagcttcccccagcccctggacagcaagcccctgctgagccagcgggaggccgtgcccccaggcaacatcccccagaggccagaccggctgcccatgtctgacaccttcacagacaactggacagatggcagccactatgacaacacaggctttgtggccgaggagaccacagcagaaaatgccaacagcaaccccctgctgagcagcaagagccgcagcaccagcagccatggaagaagacccctcatccggcaggaccgcatcgtgggcgtgcccctggagctggagcagagcacccaccgccacaccccagagacagaggtgccccccagcaacccctggcagaactggaccaggacccccagcccctttgaggacagaacagccttccccagcaagctggagaccacccccaccaccagccccctgcctgagaggaaggagcacatcaaggagagcacagagatccccagccccttcagccctggggtgccctgggagtaccatgacagcaaccccaacagaagcctgagcaatgtgttcagccagatccactgcaggcctgagagcagcaagggcgtcatcagcatcagcaagagcacagagcggctgagccccctgatgaaggacatcaagagcaacaagttcaagaagagccagagcattgatgaaattgatattggcacctacaaggtgtacaacatccccctggagaactatgccagcggcagtgaccacctgggcagccatgagaggccagacaagatgctgggccctgagcacggcatgagctccatgagccgcagccagagcgtgcccatgctggatgatgagatgctgacctacggcagcagcaagggcccccagcagcagaaggcctccatgaccaagaaggtgtaccagtttgaccagagcttcaacccccagggctctgtggaggtgaaggccgagaagagaattcctccacccttccagcacaacccagaatatgtgcagcaggccagcaagaacatcgccaaggacctgatcagcccccgggcctaccggggctacccacccatggagcagatgttctccttcagccagcccagcgtgaatgaagatgctgtggtgaatgcccagtttgccagccagggcgcccgggccggcttcctgcggcgggctgacagcctggtgtctgccacagagatggccatgttcagaagagtgaatgagccccatgagctgcccccaacagacagatatggccggcccccctaccggggcggcctggaccggcagagctctgtgacagtgacagagagccagttcctgaagagaaatggccgctatgaagatgagcaccccagctaccaggaggtgaaggcccaggccggcagcttccctgtgaagaacctgacccagaggcggcccctgagcgcccggagctacagcacagagagctatggagccagccagaccaggcctgtgtctgcccggcccaccatggccgccctgctggagaagatccccagcgactacaacctgggcaactacggggacaagcccagcgacaacagcgacctgaagacccggcccacccctgtgaagggggaggagagctgtgggaagatgcctgctgactggaggcagcagctgctgcggcacatcgaggcccggcggctggacagaaatgctgcctacaagcacaacacagtgaacctgggcatgctgccctatggaggcatcagcgccatgcatgctggccgctccatgaccctgaacctgcagaccaagagcaagtttgaccaccaggagctgcccctgcagaagacccccagccagcagagcaacatcctggacaatggccaggaggatgtgagccccagcggccagtggaacccctaccccctgggcagaagagatgtgcccccagacaccatcaccaagaaggccggcagccacatccagaccctgatgggcagccagagcctgcagcacaggagccgggagcagcagccctatgagggcaacatcaacaaggtgaccatccagcagttccagagccccctgcccatccagatccccagcagccaggccacccggggcccccagcccggccgctgcctgatccagaccaagggccagaggtccatggatggctacccagagcagttctgtgtgagaattgagaagaaccctggcctgggcttcagcatcagcggcggcatcagcggccagggcaaccccttcaagcccagcgacaagggcatctttgtgaccagggtgcagccagatggccctgccagcaacctgctgcagcccggggacaagatcctgcaggccaacggccacagctttgtgcacatggagcacgagaaggctgtgctgctgctgaagagcttccagaacacagtggacctggtgatccagcgggagctgactgtgtag

SEQ ID NO: 157506 - DNA, 4488 bp, synthetic construct
  misc_feature 1..4488: note = Description of Artificial Sequence: Synthetic coding sequence
  source 1..4488: mol_type = other DNA
atgcagtgcctggagatgaccaccaagaggaagatcatcggccgcctggtgccctgccgctgcttccggggggaggaggagatcatctctgtgctggactacagccactgcagcctgcagcaggtgcccaaggaggtgttcaactttgagaggaccctggaggagctgtacctggatgccaaccagatcgaggagctgcccaagcagctgttcaactgccaggccctgaggaagctgagcatcccagacaatgacctgagcaacctgcccaccaccatcgccagcctggtgaacctgaaggagctggacatcagcaagaatggagtgcaggagttccctgagaacatcaagtgctgcaagtgcctgaccatcatcgaggcctctgtgaaccccatcagcaagctgcctgatggcttcacccagctgctgaacctgacccagctgtacctgaatgatgccttcctggagttcctgcctgccaactttggccgcctggtgaagctgcgcatcctggagctgcgggagaaccacctgaagaccctgcccaagtccatgcacaagctggcccagctggagcggctggacctgggcaacaatgaatttggagagctgcctgaggtgctggaccagatccagaacctgcgggagctgtggatggacaacaatgccctgcaggtgctgcccggcagcatcggcaagctgaagatgctggtgtacctggacatgagcaagaacagaattgaaacagtggacatggacatcagcggctgtgaggccctggaggacctgctgctgagcagcaacatgctgcagcagctgcctgacagcatcggcctgctgaagaagctgaccaccctgaaggtggatgacaaccagctgaccatgctgcccaacaccatcggcaacctgagcctgctggaggagtttgactgcagctgcaatgagctggagagcctgcccagcaccatcggctacctgcacagcctgcggaccctggccgtggatgagaacttcctgcctgagctgccccgggagatcggcagctgcaagaatgtgacagtgatgagcctgcggagcaacaagctggagttcctgcctgaggagatcggccagatgcagaagctgcgggtgctgaacctgagtgacaaccggctgaagaacctgcccttctccttcaccaagctgaaggagctggccgccctgtggctgagtgacaaccagagcaaggccctgatccccctgcagacagaggcccaccctgagaccaagcagagggtgctgaccaactacatgttcccccagcagcccagaggagatgaggacttccagagcgacagcgacagcttcaaccccaccctgtgggaggagcagaggcagcagaggatgacagtggcctttgaatttgaggacaagaaggaggatgatgaaaatgctgggaaggtgaaggacctgagctgccaggccccctgggagcggggccagaggggcatcaccctgcagcctgcccggctgagcggggactgctgcaccccctgggcccgctgtgaccagcagatccaggacatgcctgtgccccagaatgacccccagctggcctggggctgcatcagcggcctgcagcaggagaggtccatgtgcacccccctgcctgtggccgcccagagcaccaccctgcccagcctgagcggccggcaggtggagatcaacctgaagcgctaccccaccccctacccagaggacctgaagaacatggtgaagtctgtgcagaacctggtgggcaagcccagccatggagtgcgggtggagaacagcaaccccacagccaacacagagcagacagtgaaggagaagtatgagcacaagtggcctgtggcccccaaggagatcaccgtggaggacagctttgtgcacccagccaatgagatgagaattggagagctgcaccccagcctggccgagacccccctgtacccacccaagctggtgctgctgggcaaggacaagaaggagagcacagatgaaagtgaggtggacaagacccactgcctgaacaacagcgtgagcagcggcacctacagcgactacagccccagccaggccagcagcggcagcagcaacaccagggtgaaggtgggcagcctgcagaccacagccaaggatgctgtgcacaacagcctgtggggcaacagaattgcccccagcttcccccagcccctggacagcaagcccctgctgagccagcgggaggccgtgcccccaggcaacatcccccagaggccagaccggctgcccatgtctgacaccttcacagacaactggacagatggcagccactatgacaacacaggctttgtggccgaggagaccacagcagaaaatgccaacagcaaccccctgctgagcagcaagagccgcagcaccagcagccacggccggcggcccctcatccggcaggacagaattgtgggcgtgcccctggagctggagcagagcacccaccgccacaccccagagacagaggtgccccccagcaacccctggcagaactggaccaggacccccagcccctttgaggacagaacagccttccccagcaagctggagaccacccccaccaccagccccctgcctgagaggaaggagcacatcaaggagagcacagagatccccagccccttcagccctggggtgccctgggagtaccatgacagcaaccccaacagaagcctgagcaatgtgttcagccagatccactgcaggcctgagagcagcaaaggagtcatcagcatcagcaagagcacagagcggctgagccccctgatgaaggacatcaagagcaacaagttcaagaagagccagagcattgatgaaattgacatcggcacctacaaggtgtacaacatccccctggagaactatgccagcggcagtgaccacctgggcagccatgagaggccagacaagatgctgggccctgagcacggcatgagctccatgagccgcagccagagcgtgcccatgctggatgatgagatgctgacctacggcagcagcaagggcccccagcagcagaaggcctccatgaccaagaaggtgtaccagtttgaccagagcttcaacccccagggctctgtggaggtgaaggccgagaagaggatccccccacccttccagcacaacccagaatatgtgcagcaggccagcaagaacatcgccaaggacctgatcagcccccgggcctaccggggctacccacccatggagcagatgttctccttcagccagcccagcgtgaatgaagatgctgtggtgaatgcccagtttgccagccagggcgcccgggccggcttcctgcggcgggctgacagcctggtgtctgccacagagatggccatgttccggcgggtgaatgagccccatgagctgcccccaacagacagatatggccggcccccctacagaggaggcctggaccggcagagctctgtgacagtgacagagagccagttcctgaagagaaatggccgctatgaagatgagcaccccagctaccaggaggtgaaggcccaggccggcagcttccctgtgaagaacctgacccagaggcggcccctgagcgcccggagctacagcacagagagctatggagccagccagaccaggcctgtgtctgcccggcccaccatggccgccctgctggagaagatccccagcgactacaacctgggcaactatggagacaagcccagcgacaacagcgacctgaagacccggcccacccctgtgaagggggaggagagctgtgggaagatgcctgctgactggaggcagcagctgctgcggcacatcgaggcccggcggctggacaggacccccagccagcagagcaacatcctggacaatggccaggaggatgtgagccccagcggccagtggaacccctaccccctgggcagaagagatgtgcccccagacaccatcaccaagaaggccggcagccacatccagaccctgatgggcagccagagcctgcagcacaggagccgggagcagcagccctatgagggcaacatcaacaaggtgaccatccagcagttccagagccccctgcccatccagatccccagcagccaggccacccggggcccccagcccggccgctgcctgatccagaccaagggccagaggtccatggatggctacccagagcagttctgtgtgagaattgagaagaaccctggcctgggcttcagcatcagcggcggcatcagcggccagggcaaccccttcaagcccagcgacaagggcatctttgtgaccagggtgcagccagatggccctgccagcaacctgctgcagcccggggacaagatcctgcaggccaacggccacagctttgtgcacatggagcacgagaaggctgtgctgctgctgaagagcttccagaacacagtggacctggtgatccagcgggagctgactgtgtag

SEQ ID NO: 157507 - DNA, 540 bp, synthetic construct
  misc_feature 1..540: note = Description of Artificial Sequence: Synthetic coding sequence
  source 1..540: mol_type = other DNA
atgaccaccaagaggaagatcatcggccgcctggtgccctgccgctgcttccggggggaggaggagatcatctctgtgctggactacagccactgcagcctgcagcaggtgcccaaggaggtgttcaactttgagaggaccctggaggagctgtacctggatgccaaccagatcgaggagctgcccaagcagctgttcaactgccaggccctgaggaagctgagcatcccagacaatgacctgagcaacctgcccaccaccatcgccagcctggtgaacctgaaggagctggacatcagcaagaatggagtgcaggagttccctgagaacatcaagtgctgcaagtgcctgaccatcatcgaggcctctgtgaaccccatcagcaagctgcctgatggcttcacccagctgctgaacctgacccagctgtacctgaatgatgccttcctggagttcctgcctgccaactttggccgcctggtgaagctgcgcatcctggagctgcgggagaaccacctgaagaccctgcccaagatctag

SEQ ID NO: 157508 - DNA, 3942 bp, synthetic construct
  misc_feature 1..3942: note = Description of Artificial Sequence: Synthetic coding sequence
  source 1..3942: mol_type = other DNA
cgctccatgcacaagctggcccagctggagcggctggacctgggcaacaatgaatttggagagctgcctgaggtgctggaccagatccagaacctgcgggagctgtggatggacaacaatgccctgcaggtgctgcccggcagcatcggcaagctgaagatgctggtgtacctggacatgagcaagaacagaattgaaacagtggacatggacatcagcggctgtgaggccctggaggacctgctgctgagcagcaacatgctgcagcagctgcctgacagcatcggcctgctgaagaagctgaccaccctgaaggtggatgacaaccagctgaccatgctgcccaacaccatcggcaacctgagcctgctggaggagtttgactgcagctgcaatgagctggagagcctgcccagcaccatcggctacctgcacagcctgcggaccctggccgtggatgagaacttcctgcctgagctgccccgggagatcggcagctgcaagaatgtgacagtgatgagcctgcggagcaacaagctggagttcctgcctgaggagatcggccagatgcagaagctgcgggtgctgaacctgagtgacaaccggctgaagaacctgcccttctccttcaccaagctgaaggagctggccgccctgtggctgagtgacaaccagagcaaggccctgatccccctgcagacagaggcccaccctgagaccaagcagagggtgctgaccaactacatgttcccccagcagcccagaggagatgaggacttccagagcgacagcgacagcttcaaccccaccctgtgggaggagcagaggcagcagaggatgacagtggcctttgaatttgaggacaagaaggaggatgatgaaaatgctgggaaggtgaaggacctgagctgccaggccccctgggagcggggccagaggggcatcaccctgcagcctgcccggctgagcggggactgctgcaccccctgggcccgctgtgaccagcagatccaggacatgcctgtgccccagaatgacccccagctggcctggggctgcatcagcggcctgcagcaggagaggtccatgtgcacccccctgcctgtggccgcccagagcaccaccctgcccagcctgagcggccggcaggtggagatcaacctgaagcgctaccccaccccctacccagaggacctgaagaacatggtgaagtctgtgcagaacctggtgggcaagcccagccatggagtgcgggtggagaacagcaaccccacagccaacacagagcagacagtgaaggagaagtatgagcacaagtggcctgtggcccccaaggagatcaccgtggaggacagctttgtgcacccagccaatgagatgagaattggagagctgcaccccagcctggccgagacccccctgtacccacccaagctggtgctgctgggcaaggacaagaaggagagcacagatgaaagtgaggtggacaagacccactgcctgaacaacagcgtgagcagcggcacctacagcgactacagccccagccaggccagcagcggcagcagcaacaccagggtgaaggtgggcagcctgcagaccacagccaaggatgctgtgcacaacagcctgtggggcaacagaattgcccccagcttcccccagcccctggacagcaagcccctgctgagccagcgggaggccgtgcccccaggcaacatcccccagaggccagaccggctgcccatgtctgacaccttcacagacaactggacagatggcagccactatgacaacacaggctttgtggccgaggagaccacagcagaaaatgccaacagcaaccccctgctgagcagcaagagccgcagcaccagcagccacggccggcggcccctcatccggcaggacagaattgtgggcgtgcccctggagctggagcagagcacccaccgccacaccccagagacagaggtgccccccagcaacccctggcagaactggaccaggacccccagcccctttgaggacagaacagccttccccagcaagctggagaccacccccaccaccagccccctgcctgagaggaaggagcacatcaaggagagcacagagatccccagccccttcagccctggggtgccctgggagtaccatgacagcaaccccaacagaagcctgagcaatgtgttcagccagatccactgcaggcctgagagcagcaaaggagtcatcagcatcagcaagagcacagagcggctgagccccctgatgaaggacatcaagagcaacaagttcaagaagagccagagcattgatgaaattgacatcggcacctacaaggtgtacaacatccccctggagaactatgccagcggcagtgaccacctgggcagccatgagaggccagacaagatgctgggccctgagcacggcatgagctccatgagccgcagccagagcgtgcccatgctggatgatgagatgctgacctacggcagcagcaagggcccccagcagcagaaggcctccatgaccaagaaggtgtaccagtttgaccagagcttcaacccccagggctctgtggaggtgaaggccgagaagaggatccccccacccttccagcacaacccagaatatgtgcagcaggccagcaagaacatcgccaaggacctgatcagcccccgggcctaccggggctacccacccatggagcagatgttctccttcagccagcccagcgtgaatgaagatgctgtggtgaatgcccagtttgccagccagggcgcccgggccggcttcctgcggcgggctgacagcctggtgtctgccacagagatggccatgttccggcgggtgaatgagccccatgagctgcccccaacagacagatatggccggcccccctacagaggaggcctggaccggcagagctctgtgacagtgacagagagccagttcctgaagagaaatggccgctatgaagatgagcaccccagctaccaggaggtgaaggcccaggccggcagcttccctgtgaagaacctgacccagaggcggcccctgagcgcccggagctacagcacagagagctatggagccagccagaccaggcctgtgtctgcccggcccaccatggccgccctgctggagaagatccccagcgactacaacctgggcaactatggagacaagcccagcgacaacagcgacctgaagacccggcccacccctgtgaagggggaggagagctgtgggaagatgcctgctgactggaggcagcagctgctgcggcacatcgaggcccggcggctggacaggacccccagccagcagagcaacatcctggacaatggccaggaggatgtgagccccagcggccagtggaacccctaccccctgggcagaagagatgtgcccccagacaccatcaccaagaaggccggcagccacatccagaccctgatgggcagccagagcctgcagcacaggagccgggagcagcagccctatgagggcaacatcaacaaggtgaccatccagcagttccagagccccctgcccatccagatccccagcagccaggccacccggggcccccagcccggccgctgcctgatccagaccaagggccagaggtccatggatggctacccagagcagttctgtgtgagaattgagaagaaccctggcctgggcttcagcatcagcggcggcatcagcggccagggcaaccccttcaagcccagcgacaagggcatctttgtgaccagggtgcagccagatggccctgccagcaacctgctgcagcccggggacaagatcctgcaggccaacggccacagctttgtgcacatggagcacgagaaggctgtgctgctgctgaagagcttccagaacacagtggacctggtgatccagcgggagctgactgtgtag

SEQ ID NO: 157509 - DNA, 654 bp, synthetic construct
  misc_feature 1..654: note = Description of Artificial Sequence: Synthetic coding sequence
  source 1..654: mol_type = other DNA
atgatggagaacctgatccggggcagaaatccaccccagtaccagaggagcccctgcaaggaggtgcgggccgccctgaggaagaggcctgaggaggagctgcagtgcctggagatgaccaccaagaggaagatcatcggccgcctggtgccctgccgctgcttccggggggaggaggagatcatctctgtgctggactacagccactgcagcctgcagcaggtgcccaaggaggtgttcaactttgagaggaccctggaggagctgtacctggatgccaaccagatcgaggagctgcccaagcagctgttcaactgccaggccctgaggaagctgagcatcccagacaatgacctgagcaacctgcccaccaccatcgccagcctggtgaacctgaaggagctggacatcagcaagaatggagtgcaggagttccctgagaacatcaagtgctgcaagtgcctgaccatcatcgaggcctctgtgaaccccatcagcaagctgcctgatggcttcacccagctgctgaacctgacccagctgtacctgaatgatgccttcctggagttcctgcctgccaactttggccgcctggtgaagctgcgcatcctggagctgcgggagaaccacctgaagaccctgcccaacatctag

SEQ ID NO: 157510 - DNA, 2466 bp, synthetic construct
  misc_feature 1..2466: note = Description of Artificial Sequence: Synthetic coding sequence
  source 1..2466: mol_type = other DNA
atgaccaagatgctgggcaagctgcgcatcgcccccagcttcccccagcccctggacagcaagcccctgctgagccagcgggaggccgtgcccccaggcaacatcccccagaggccagaccggctgcccatgtctgacaccttcacagacaactggacagatggcagccactatgacaacacaggctttgtggccgaggagaccacagcagaaaatgccaacagcaaccccctgctgagcagcaagagccgcagcaccagcagccatggaagaagacccctcatccggcaggaccgcatcgtgggcgtgcccctggagctggagcagagcacccaccgccacaccccagagacagaggtgccccccagcaacccctggcagaactggaccaggacccccagcccctttgaggacagaacagccttccccagcaagctggagaccacccccaccaccagccccctgcctgagaggaaggagcacatcaaggagagcacagagatccccagccccttcagccctggggtgccctgggagtaccatgacagcaaccccaacagaagcctgagcaatgtgttcagccagatccactgcaggcctgagagcagcaagggcgtcatcagcatcagcaagagcacagagcggctgagccccctgatgaaggacatcaagagcaacaagttcaagaagagccagagcattgatgaaattgatattggcacctacaaggtgtacaacatccccctggagaactatgccagcggcagtgaccacctgggcagccatgagaggccagacaagatgctgggccctgagcacggcatgagctccatgagccgcagccagagcgtgcccatgctggatgatgagatgctgacctacggcagcagcaagggcccccagcagcagaaggcctccatgaccaagaaggtgtaccagtttgaccagagcttcaacccccagggctctgtggaggtgaaggccgagaagagaattcctccacccttccagcacaacccagaatatgtgcagcaggccagcaagaacatcgccaaggacctgatcagcccccgggcctaccggggctacccacccatggagcagatgttctccttcagccagcccagcgtgaatgaagatgctgtggtgaatgcccagtttgccagccagggcgcccgggccggcttcctgcggcgggctgacagcctggtgtctgccacagagatggccatgttcagaagagtgaatgagccccatgagctgcccccaacagacagatatggccggcccccctaccggggcggcctggaccggcagagctctgtgacagtgacagagagccagttcctgaagagaaatggccgctatgaagatgagcaccccagctaccaggaggtgaaggcccaggccggcagcttccctgtgaagaacctgacccagaggcggcccctgagcgcccggagctacagcacagagagctatggagccagccagaccaggcctgtgtctgcccggcccaccatggccgccctgctggagaagatccccagcgactacaacctgggcaactacggggacaagcccagcgacaacagcgacctgaagacccggcccacccctgtgaagggggaggagagctgtgggaagatgcctgctgactggaggcagcagctgctgcggcacatcgaggcccggcggctggacagaaatgctgcctacaagcacaacacagtgaacctgggcatgctgccctatggaggcatcagcgccatgcatgctggccgctccatgaccctgaacctgcagaccaagagcaagtttgaccaccaggagctgcccctgcagaagacccccagccagcagagcaacatcctggacaatggccaggaggatgtgagccccagcggccagtggaacccctaccccctgggcagaagagatgtgcccccagacaccatcaccaagaaggccggcagccacatccagaccctgatgggcagccagagcctgcagcacaggagccgggagcagcagccctatgagggcaacatcaacaaggtgaccatccagcagttccagagccccctgcccatccagatccccagcagccaggccacccggggcccccagcccggccgctgcctgatccagaccaagggccagaggtccatggatggctacccagagcagttctgtgtgagaattgagaagaaccctggcctgggcttcagcatcagcggcggcatcagcggccagggcaaccccttcaagcccagcgacaagggcatctttgtgaccagggtgcagccagatggccctgccagcaacctgctgcagcccggggacaagatcctgcaggccaacggccacagctttgtgcacatggagcacgagaaggctgtgctgctgctgaagagcttccagaacacagtggacctggtgatccagcgggagctgactgtgtag

SEQ ID NO: 157511 - DNA, 2433 bp, synthetic construct
  misc_feature 1..2433: note = Description of Artificial Sequence: Synthetic coding sequence
  source 1..2433: mol_type = other DNA
atgatccctgtgacagagctgcgctactttgctgacacccagcctgcctaccgcatcctgaagccctggtgggatgtgttcacagactacatcagcatcgtgatgctgatgattgctgtgtttggaggcaccctgcaggtgacccaggacaagatgatctgcctgccctgcaagtgggtgaccaaggacagctgcaatgacagcttccggggctgggccgcccctggccctgagcccacctaccccaacagcaccatcctgcccaccccagacaccggccccaccggcatcaagtatgacctggacagacaccagtacaactacgtggatgctgtgtgctatgaaaatcggctgcactggtttgccaagtacttcccctacctggtgctgctgcacaccctcatcttcctggcctgcagcaacttctggttcaagttccccaggaccagcagcaagctggagcactttgtgtccatcctgctgaagtgctttgacagcccctggaccacccgggccctgtctgagaccgtggtggaggagagtgaccccaagccagccttcagcaagatgaatggctccatggacaagaagagcagcacagtgtctgaagatgtggaggccaccgtgcccatgctgcagaggaccaagagcagaattgagcagggcatcgtggacagaagtgaaacaggagtgctggacaagaaggagggggagcaggccaaggccctgtttgagaaggtgaagaagttccgcacccacgtggaggagggggacatcgtgtaccgcctgtacatgaggcagaccatcatcaaggtgatcaagttcatcctgatcatctgctacacagtgtactacgtgcacaacatcaagtttgatgtggactgcaccgtggacatcgagagcctgaccggctaccgcacctaccgctgtgcccaccccctggccaccctcttcaagatcctggccagcttctacatcagcctggtgatcttctacggcctcatctgcatgtacaccctgtggtggatgctgcggcgcagcctgaagaagtacagctttgagagcatccgggaggagagcagctacagcgacatcccagatgtgaagaatgactttgccttcatgctgcacctgattgaccagtatgaccccctgtacagcaagagatttgctgtgttcctgtctgaggtgtctgagaacaagctgcggcagctgaacctgaacaatgagtggaccctggacaagctgcggcagaggctgaccaagaatgcccaggacaagctggagctgcacctgttcatgctgagcggcatcccagacacagtgtttgacctggtggagctggaggtgctgaagctggagctgatcccagatgtgaccatcccccccagcatcgcccagctgaccggcctgaaggagctgtggctgtaccacacagctgccaagattgaggccccagccctggccttcctgcgggagaacctgcgggccctgcacatcaagttcacagacatcaaggagatccccctgtggatctacagcctgaagaccctggaggagctgcacctgaccggcaacctgtctgctgagaacaaccgctacatcgtgattgatggcctgcgggagctgaagaggctgaaggtgctgcggctgaagagcaacctgagcaagctgccccaggtggtgacagatgtgggcgtgcacctgcagaagctgagcatcaacaatgaaggcaccaagctgattgtgctgaacagcctgaagaagatggccaacctgacagagctggagctgatccgctgtgacctggagcgcatcccccacagcatcttcagcctgcacaacctgcaggagattgacctgaaggacaacaacctgaagaccatcgaggagatcatctccttccagcacctgcaccggctgacctgcctgaagctgtggtacaaccacatcgcctacatccccatccagatcggcaacctgaccaacctggagcggctgtacctgaacagaaacaagattgagaagatccccacccagctgttctactgcaggaagctgcgctacctggacctgagccacaacaacctgaccttcctgcctgctgacatcggcctgctgcagaacctgcagaacctggccatcacagccaaccgcatcgagaccctgcccccagagctgttccagtgcaggaagctgcgggccctgcacctgggcaacaacgtgctgcagagcctgcccagccgggtgggggagctgaccaacctgacccagatcgagctgcggggcaaccggctggagtgcctgcctgtggagctgggagaatgtcccctgctgaagaggagcggcctggtggtggaggaggacctcttcaacaccctgcccccagaggtgaaggagcggctgtggagggctgacaaggagcaggcctag

SEQ ID NO: 157512 - DNA, 2433 bp, synthetic construct; identical to SEQ ID NO: 157511
  misc_feature 1..2433: note = Description of Artificial Sequence: Synthetic coding sequence
  source 1..2433: mol_type = other DNA

SEQ ID NO: 157513 - DNA, 2433 bp, synthetic construct; identical to SEQ ID NO: 157511
  misc_feature 1..2433: note = Description of Artificial Sequence: Synthetic coding sequence
  source 1..2433: mol_type = other DNA

SEQ ID NO: 157514 - DNA, 2412 bp, synthetic construct
  misc_feature 1..2412: note = Description of Artificial Sequence: Synthetic coding sequence
  source 1..2412: mol_type = other DNA
atgatcaccctgacagagctgaagtgcctggctgatgcccagagcagctaccacatcctgaagccctggtgggatgtgttctggtactacatcaccctcatcatgctgctggtggccgtgctggccggggccctgcagctgacccagagccgggtgctgtgctgcctgccctgcaaggtggagtttgacaaccactgtgctgtgccctgggacatcctgaaggcctccatgaacaccagcagcaaccctggcacccccctgcccctgcccctgcgcatccagaatgacctgcaccggcagcagtacagctacattgatgctgtgtgctatgagaagcagctgcactggtttgccaagttcttcccctacctggtgctgctgcacaccctcatctttgctgcctgcagcaacttctggctgcactaccccagcaccagcagccggctggagcactttgtggccatcctgcacaagtgctttgacagcccctggaccacccgggccctgtctgagaccgtggccgagcagagcgtgcggcccctgaagctgagcaagagcaagatcctgctgagcagcagcggctgcagcgctgacattgattctgggaagcagagcctgccctacccccagcccggcctggagagcgctggcatcgagagccccaccagctctgtgctggacaagaaggagggggagcaggccaaggccatctttgagaaggtgaagcgcttcaggatgcacgtggagcagaaggacatcatctacagagtgtacctgaagcagatcatcgtgaaggtgatcctgtttgtgctgatcatcacctacgtgccctacttcctgacccacatcaccctggagattgactgcagcgtggatgtgcaggccttcaccggctacaagcgctaccagtgtgtgtacagcctggccgagatcttcaaggtgctggccagcttctacgtgatcctggtgatcctgtatggcctgaccagcagctacagcctgtggtggatgctgcggagcagcctgaagcagtacagctttgaggccctgcgggagaagagcaactacagcgacatcccagatgtgaagaatgactttgccttcatcctgcacctggccgaccagtatgaccccctgtacagcaagcgcttcagcatcttcctgtctgaggtgtctgagaacaagctgaagcagatcaacctgaacaatgagtggacagtggagaagctgaagagcaagctggtgaagaatgcccaggacaagattgagctgcacctgttcatgctgaatggcctgcctgacaacgtgtttgagctgacagagatggaggtgctgagcctggagctgatccctgaggtgaagctgcccagcgctgtgtcccagctggtgaacctgaaggagctgcgggtgtaccacagcagcctggtggtggaccacccagccctggccttcctggaggagaacctgaagatcctgcggctgaagttcacagagatgggcaagatcccccgctgggtgttccacctgaagaacctgaaggagctgtacctgagcggctgtgtgctgcctgagcagctgagcaccatgcagctggagggcttccaggacctgaagaacctgcggaccctgtacctgaagagcagcctgagccgcatcccccaggtggtgacagacctgctgcccagcctgcagaagctgagcctggacaatgaaggcagcaagctggtggtgctgaacaacctgaagaagatggtgaacctgaagagcctggagctgatcagctgtgacctggagcgcatcccccacagcatcttcagcctgaacaacctgcacgagctggacctgcgggagaacaacctgaagacagtggaggagatcatctccttccagcacctgcagaacctgagctgcctgaagctgtggcacaacaacatcgcctacatcccagcccagatcggggccctgagcaacctggagcagctgagcctggaccacaacaacatcgagaacctgcccctgcagctgttcctgtgcaccaagctgcactacctggacctgagctacaaccacctgaccttcatccctgaggagatccagtacctgagcaacctgcagtactttgctgtgaccaacaacaacatcgagatgctgcctgatggcctcttccagtgcaagaagctgcagtgcctgctgctgggcaagaacagcctgatgaacctgagcccccacgtgggggagctgagcaacctgacccacctggagctgattggcaactacctggagaccctgcccccagagctggagggctgccagagcctgaagaggaactgcctgattgtggaggagaacctgctgaacaccctgcccctgcctgtgacagagcggctgcagacctgcctggacaagtgctag

SEQ ID NO: 157515 - DNA, 2412 bp, synthetic construct; identical to SEQ ID NO: 157514
  misc_feature 1..2412: note = Description of Artificial Sequence: Synthetic coding sequence
  source 1..2412: mol_type = other DNA

SEQ ID NO: 157516 - DNA, 2412 bp, synthetic construct; identical to SEQ ID NO: 157514
  misc_feature 1..2412: note = Description of Artificial Sequence: Synthetic coding sequence
  source 1..2412: mol_type = other DNA

SEQ ID NO: 157517 - DNA, 312 bp, synthetic construct
  misc_feature 1..312: note = Description of Artificial Sequence: Synthetic coding sequence
  source 1..312: mol_type = other DNA
atgatcaccctgacagagctgaagtgcctggctgatgcccagagcagctaccacatcctgaagccctggtgggatgtgttctggtactacatcaccctcatcatgctgctggtggccgtgctggccggggccctgcagctgacccagagccgggtgctgtgctgcctgccctgcaaggtggagtttgacaaccactgtgctgtgccctgggacatcctgaaggcctccatgaacaccagcagcaaccctggcacccccctgcccctgcccctgcgcatccagaatgacctgcaccggcagcagtacagctag

SEQ ID NO: 157518 - DNA, 693 bp, synthetic construct
  misc_feature 1..693: note = Description of Artificial Sequence: Synthetic coding sequence
  source 1..693: mol_type = other DNA
atgatcaccctgacagagctgaagtgcctggctgatgcccagagcagctaccacatcctgaagccctggtgggatgtgttctggtactacatcaccctcatcatgctgctggtggccgtgctggccggggccctgcagctgacccagagccgggtgctgtgctgcctgccctgcaaggtggagtttgacaaccactgtgctgtgccctgggacatcctgaaggcctccatgaacaccagcagcaaccctggcacccccctgcccctgcccctgcgcatccagaatgacctgcaccggcagcagtacagctacattgatgctgtgtgctatgagaagcagctgcactggtttgccaagttcttcccctacctggtgctgctgcacaccctcatctttgctgcctgcagcaacttctggctgcactaccccagcaccagcagccggctggagcactttgtggccatcctgcacaagtgctttgacagcccctggaccacccgggccctgtctgagaccgtggccgagcagagcgtgcggcccctgaagctgagcaagagcaagatcctgctgagcagcagcggctgcagcgctgacattgattctgggaagcagagcctgccctacccccagcccggcctggagagcgctggcatcgagagccccaccagctctgtgctgacagaaggaggatag

SEQ ID NO: 157519 - DNA, 2412 bp, synthetic construct
  misc_feature 1..2412: note = Description of Artificial Sequence: Synthetic coding sequence
  source 1..2412: mol_type = other DNA
atgatccctgtgacagagttccggcagttcagcgagcagcagcctgccttccgggtgctgaagccctggtgggatgtgttcacagactacctgtctgtggccatgctgatgattggagtgtttggctgcaccctgcaggtgatgcaggacaagatcatctgcctgcccaagagggtgcagcctgcccagaaccacagcagcctgagcaatgtgtcccaggccgtggccagcaccacccccctgcccccacccaagcccagccctgccaaccccatcaccgtggagatgaagggcctgaagacagacctggacctgcagcagtacagcttcatcaaccagatgtgctatgaaagagccctgcactggtacgccaagtacttcccctacctggtgctgatccacaccctggtgttcatgctgtgcagcaacttctggttcaagtttcctggcagcagcagcaagattgagcacttcatcagcatcctgggcaagtgctttgacagcccctggaccacccgggccctgtctgaggtgtctggagaagattctgaggagaaggacaacaggaagaacaacatgaacagaagcaacaccatccagagcggccctgaggacagcctggtgaacagccagagcctgaagagcatccctgagaagtttgtggtggacaagagcacagctggggccctggacaagaaggagggggagcaggccaaggccctgtttgagaaggtgaagaagttccggctgcacgtggaggagggggacatcctgtatgccatgtatgtgcggcagacagtgctgaaggtgatcaagttcctgatcatcatcgcctacaacagcgccctggtgtccaaggtgcagttcaccgtggactgcaatgtggacatccaggacatgacaggctacaagaacttcagctgcaaccacaccatggcccacctgttcagcaagctgtccttctgctacctgtgctttgtgtccatctacggcctgacctgcctgtacaccctgtactggctgttctaccgcagcctgcgggagtacagctttgaatatgtgcggcaggagaccggcattgatgacatcccagatgtgaagaatgactttgccttcatgctgcacatgattgaccagtatgaccccctgtacagcaagagatttgctgtgttcctgtctgaggtgtctgagaacaagctgaagcagctgaacctgaacaatgagtggaccccagacaagctgcggcagaagctgcagaccaatgcccacaaccggctggagctgcccctcatcatgctgagcggcctgcctgacacagtgtttgagatcacagagctgcagagcctgaagctggagatcatcaagaatgtgatgatcccagccaccatcgcccagctggacaacctgcaggagctgagcctgcaccagtgcagcgtgaagatccacagcgctgccctgtccttcctgaaggagaacctgaaggtgctgtctgtgaagtttgatgacatgagggagctgcccccctggatgtatggcctgaggaacctggaggagctgtacctggtgggcagcctgagccatgacatcagcagaaatgtgaccctggagagcctgcgggacctgaagagcctgaagatcctgagcatcaagagcaatgtgtccaagatcccccaggccgtggtggatgtgagcagccacctgcagaagatgtgcatccacaatgatggcaccaagctggtgatgctgaacaacctgaagaagatgaccaacctgacagagctggagctggtgcactgtgacctggagcgcatcccccatgctgtgttcagcctgctgagcctgcaggagctggacctgaaggagaacaacctgaagagcattgaggagatcgtgtccttccagcacctgaggaagctgactgtgctgaagctgtggcacaacagcatcacctacatccctgagcacatcaagaagctgaccagcctggagcggctgtccttcagccacaacaagattgaggtgctgcccagccacctgttcctgtgcaacaagatccgctacctggacctgagctacaatgacatccgcttcatccccccagaaattggagtgctgcagagcctgcagtacttcagcatcacctgcaacaaggtggagagcctgcctgatgagctgtacttctgcaagaagctgaagaccctgaagattggcaagaacagcctgtctgtgctgagccccaagattggcaacctgctcttcctgagctacctggatgtgaagggcaaccactttgagatcctgcccccagagctgggggactgccgggccctgaagagagctggcctggtggtggaggatgccctgtttgagaccctgcccagtgatgtgcgggagcagatgaagacagaatag

SEQ ID NO: 157520 - DNA, 2577 bp, synthetic construct
  misc_feature 1..2577: note = Description of Artificial Sequence: Synthetic coding sequence
  source 1..2577: mol_type = other DNA
atgttcaccctggccgaggtggccagcctgaatgacatccagcccacctaccgcatcctgaagccctggtgggatgtgttcatggactacctggccgtggtgatgctgatggtggccatctttgctggcaccatgcagctgaccaaggaccaggtggtgtgcctgcctgtgctgcccagccctgtgaacagcaaggcccacaccccacctggaaatgctgaggtgaccaccaacatccccaagatggaggccgccaccaaccaggaccaggacggccgcaccaccaatgacatcagctttggcaccagcgctgtgaccccagacatccccctgcgggccacctaccccaggacagactttgccctgcccaaccaggaggccaagaaggagaagaaggaccccactggaaggaagaccaacctggacttccagcagtatgtgttcatcaaccagatgtgctaccacctggccctgccctggtacagcaagtacttcccctacctggccctgatccacaccatcatcctgatggtgagcagcaacttctggttcaagtaccccaagacctgcagcaaggtggagcactttgtgtccatcctgggcaagtgctttgagagcccctggaccaccaaggccctgtctgaaacagcctgtgaagattctgaggagaacaagcagaggatcactggagcccagaccctgcccaagcacgtgtccaccagcagtgatgagggcagccccagcgccagcacccccatgatcaacaagacaggcttcaagttctctgctgagaagcctgtgattgaggtgcccagcatgaccatcctggacaagaaggatggagagcaggccaaggccctgtttgagaaggtgaggaagttccgggcccacgtggaggacagcgacctgatctacaagctgtatgtggtgcagaccgtcatcaagacagccaagttcatcttcatcctgtgctacacagccaactttgtgaatgccatcagctttgaacatgtgtgcaagcccaaggtggagcacctgattggctatgaggtgtttgaatgtacccacaacatggcctacatgctgaagaagctgctgatctcctacatcagcatcatctgtgtgtatggcttcatctgcctgtacaccctcttctggctgttccgcatccccctgaaggagtacagctttgagaaggtgcgggaggagagcagcttcagtgacatcccagatgtgaagaatgactttgccttcctgctgcacatggtggaccagtatgaccagctgtacagcaagagatttggagtcttcctgtctgaggtgtctgagaacaagctgcgggagatcagcctgaaccacgagtggacctttgagaagctgcggcagcacatcagcagaaatgcccaggacaagcaggagctgcacctgttcatgctgagcggcgtgcctgatgctgtgtttgacctgacagacctggatgtgctgaagctggagctgatccctgaggccaagatcccagccaagatcagccagatgaccaacctgcaggagctgcacctgtgccactgcccagccaaggtggagcagacagccttctccttcctgcgggaccacctgcgctgcctgcacgtgaagttcacagatgtggccgagatcccagcctgggtgtacctgctgaagaacctgcgggagctgtacctgattggcaacctgaacagcgagaacaacaagatgattggcctggagagcctgcgggagctgcggcacctgaagatcctgcacgtgaagagcaacctgaccaaggtgcccagcaacatcacagatgtggccccccacctgaccaagctggtgatccacaatgatggcaccaagctgctggtgctgaacagcctgaagaagatgatgaatgtggccgagctggagctgcagaactgtgagctggagcgcatcccccacgccatcttcagcctgagcaacctgcaggagctggacctgaagagcaacaacatccgcaccatcgaggagatcatctccttccagcacctgaagaggctgacctgcctgaagctgtggcacaacaagatcgtgaccatccccccatccatcacccacgtgaagaacctggagagcctgtacttcagcaacaacaagctggagagcctgcctgtggccgtgttcagcctgcagaagctgcgctgcctggatgtgtcctacaacaacatctccatgatccccatcgagatcggcctgctgcagaacctgcagcacctgcacatcaccggcaacaaggtggacatcctgcccaagcagctgttcaagtgcatcaagctgcggaccctgaacctgggccagaactgcatcaccagcctgcctgagaaggtgggccagctgagccagctgacccagctggagctgaagggcaactgcctggaccggctgcctgcccagctgggccagtgcaggatgctgaagaagagcggcctggtggtggaggaccacctgtttgacaccctgcccctggaggtgaaggaggccctgaaccaggacatcaacatcccctttgccaacggcatctag

SEQ ID NO: 157521 - DNA, 2577 bp, synthetic construct; identical to SEQ ID NO: 157520
  misc_feature 1..2577: note = Description of Artificial Sequence: Synthetic coding sequence
  source 1..2577: mol_type = other DNA

SEQ ID NO: 157522 - DNA, 354 bp, synthetic construct
  misc_feature 1..354: note = Description of Artificial Sequence: Synthetic coding sequence
  source 1..354: mol_type = other DNA
atgttcaccctggccgaggtggccagcctgaatgacatccagcccacctaccgcatcctgaagccctggtgggatgtgttcatggactacctggccgtggtgatgctgatggtggccatctttgctggcaccatgcagctgaccaaggaccaggtggtgtgcctgcctgtgctgcccagccctgtgaacagcaaggcccacaccccacctggaaatgctgaggtgaccaccaacatccccaagatggaggccgccaccaaccaggaccaggacggccgcaccaccaatgacatcagctttggcaccagcgctgtgaccccagacatccccctgcgggccacctaccccaggtag

SEQ ID NO: 157523 - DNA, 825 bp, synthetic construct
  misc_feature 1..825: note = Description of Artificial Sequence: Synthetic coding sequence
  source 1..825: mol_type = other DNA
atgttcaccctggccgaggtggccagcctgaatgacatccagcccacctaccgcatcctgaagccctggtgggatgtgttcatggactacctggccgtggtgatgctgatggtggccatctttgctggcaccatgcagctgaccaaggaccaggtggtgtgcctgcctgtgctgcccagccctgtgaacagcaaggcccacaccccacctggaaatgctgaggtgaccaccaacatccccaagatggaggccgccaccaaccaggaccaggacggccgcaccaccaatgacatcagctttggcaccagcgctgtgaccccagacatccccctgcgggccacctaccccaggacagactttgccctgcccaaccaggaggccaagaaggagaagaaggaccccactggaaggaagaccaacctggacttccagcagtatgtgttcatcaaccagatgtgctaccacctggccctgccctggtacagcaagtacttcccctacctggccctgatccacaccatcatcctgatggtgagcagcaacttctggttcaagtaccccaagacctgcagcaaggtggagcactttgtgtccatcctgggcaagtgctttgagagcccctggaccaccaaggccctgtctgaaacagcctgtgaagattctgaggagaacaagcagaggatcactggagcccagaccctgcccaagcacgtgtccaccagcagtgatgagggcagccccagcgccagcacccccatgatcaacaagacaggcttcaagttctctgctgagaagcctgtgattgaggtgcccagcatgacctag

SEQ ID NO: 157524 - DNA, 96 bp, synthetic construct
  misc_feature 1..96: note = Description of Artificial Sequence: Synthetic coding sequence
  source 1..96: mol_type = other DNA
atgttcaccctggccgaggtggccagcctgaatgacatccagcccacctaccgcatcctgaagccctggtgggatgtgttcatggactacctgtag

SEQ ID NO: 157525 - DNA, 564 bp, synthetic construct
  misc_feature 1..564: note = Description of Artificial Sequence: Synthetic coding sequence
  source 1..564: mol_type = other DNA
atgttcaccctggccgaggtggccagcctgaatgacatccagcccacctaccgcatcctgaagccctggtgggatgtgttcatggactacctggccgtggtgatgctgatggtggccatctttgctggcaccatgcagctgaccaaggaccaggtggtgtgcctgcctgtgctgcccagccctgtgaacagcaaggcccacaccccacctggaaatgctgaggtgaccaccaacatccccaagatggaggccgccaccaaccaggaccaggacggccgcaccaccaatgacatcagctttggcaccagcgctgtgaccccagacatccccctgcgggccacctaccccaggacagactttgccctgcccaaccaggaggccaagaaggagaagaaggaccccactggaaggaagaccaacctggacttccagcagtatgtgttcatcaaccagatgtgctaccacctggccctgccctggtacagcaagtacttcccctacctggccctgatccacaccatcatcctgatggtgagcagcaacttctggttcaagtacccctag

SEQ ID NO: 157526 - DNA, 369 bp, synthetic construct
  misc_feature 1..369: note = Description of Artificial Sequence: Synthetic coding sequence
  source 1..369: mol_type = other DNA
atgttcaccctggccgaggtggccagcctgaatgacatccagcccacctaccgcatcctgaagccctggtgggatgtgttcatggactacctggccgtggtgatgctgatggtggccatctttgctggcaccatgcagctgaccaaggaccaggtggtgtgcctgcctgtgctgcccagccctgtgaacagcaaggcccacaccccacctggaaatgctgaggtgaccaccaacatccccaagatggaggccgccaccaaccaggaccaggacggccgcaccaccaatgacatcagctttggcaccagcgctgtgaccccagacatccccctgcgggccacctaccccaggacagactttgccctgtag

SEQ ID NO: 157527 - DNA, 2391 bp, synthetic construct
  misc_feature 1..2391: note = Description of Artificial Sequence: Synthetic coding sequence
  source 1..2391: mol_type = other DNA
atgatccctgtggccgagttcaagcagttcacagagcagcagcctgccttcaaggtgctgaagccctggtgggatgtgctggccgagtacctgactgtggccatgctgatgattggagtgtttggctgcaccctgcaggtgacccaggacaagatcatctgcctgcccaaccacgagctgcaggagaacctgtctgaggccccctgccagcagctgctgccccggggcatccctgagcagattggagccctgcaggaggtgaagggcctgaagaacaacctggacctgcagcagtacagcttcatcaaccagctgtgctatgaaacagccctgcactggtacgccaagtacttcccctacctggtggtgatccacaccctcatcttcatggtgtgcaccagcttctggttcaagtttcctggcaccagcagcaagattgagcacttcatcagcatcctgggcaaatgttttgacagcccctggaccacccgggccctgtctgaggtgtctggagagaaccagaagggccctgctgccacagaaagagctgctgccaccatcgtggccatggccggcactggacctgggaaggccggggagggggagaaggagaaggtgctggccgagcctgagaaggtggtgacagagccccctgtggtgaccctgctggacaagaaggagggggagcaggccaaggccctgtttgagaaggtgaagaagttcaggatgcacgtggaggagggggacatcctgtacaccatgtacatccggcagacagtgctgaaggtgtgcaagttcctggccatcctggtgtacaacctggtgtatgtggagaagatctccttcctggtggcctgccgggtggagaccagcgaggtgacaggctacgccagcttctgctgcaaccacaccaaggcccacctgttcagcaagctggccttctgctacatcagctttgtgtgcatctacggcctgacctgcatctacaccctgtactggctgttccaccggcccctgaaggagtacagcttccgctctgtgcgggaggagaccggcatgggagacatcccagatgtgaagaatgactttgccttcatgctgcacctgattgaccagtatgacagcctgtacagcaagagatttgctgtgttcctgtctgaggtgtctgagagccggctgaagcagctgaacctgaaccacgagtggaccccagagaagctgcggcagaagctgcagagaaatgctgctggccgcctggagctggccctgtgcatgctgcccggcctgcctgacacagtgtttgagctgtctgaggtggagagcctgcggctggaggccatctgtgacatcaccttccccccaggcctgagccagctggtgcacctgcaggagctgagcctgctgcacagccctgcccggctgcccttcagcctgcaggtgttcctgcgggaccacctgaaggtgatgagggtgaagtgtgaggagctgcgggaggtgcccctgtgggtgtttggcctgcggggcctggaggagctgcacctggagggcctcttcccccaggagctggcccgggccgccaccctggagagcctgcgggagctgaagcagctgaaggtgctgagcctgcggagcaatgctgggaaggtgcctgcctctgtgacagatgtggccggccacctgcagaggctgagcctgcacaatgatggagcccggctggtggccctgaacagcctgaagaagctggccgccctgcgggagctggagctggtggcctgtggcctggagcgcatcccccatgctgtgttcagcctgggcgccctgcaggagctggacctgaaggacaaccacctgcggagcattgaggagatcctgtccttccagcactgcaggaagctggtgaccctgcggctgtggcacaaccagatcgcctacgtgcctgagcacgtgaggaagctgcggagcctggagcagctgtacctgagctacaacaagctggagaccctgcccagccagctgggcctgtgcagcggcctgcggctgctggatgtgagccacaacggcctgcacagcctgcccccagaggtgggcctgctgcagaacctgcagcacctggccctgagctacaatgccctggaggccctgcctgaggagctgttcttctgcaggaagctgcggaccctgctgctgggggacaaccagctgagccagctgagcccccacgtgggcgccctgcgggccctgagccggctggagctgaagggcaaccggctggaggccctgcctgaggagctgggcaactgtggcggcctgaagaaggccggcctgctggtggaggacaccctgtaccagggcctgcctgctgaggtgcgggacaagatggaggaggagtag

SEQ ID NO: 157528 - DNA, 1569 bp, synthetic construct
  misc_feature 1..1569: note = Description of Artificial Sequence: Synthetic coding sequence
  source 1..1569: mol_type = other DNA
atggacttcctgctgctgggcctgtgcctgtactggctgctgcggcggcccagcggcgtggtgctgtgcctgctgggcgcctgcttccagatgctgcctgctgcccccagcggctgcccccagctgtgccgctgtgagggccgcctgctgtactgtgaggccctgaacctgacagaggccccccacaacctgagcggcctgctgggcctgagcctgcgctacaacagcctgtctgagctgcgggccggccagttcaccggcctgatgcagctgacctggctgtacctggaccacaaccacatctgcagcgtgcagggagatgccttccagaagctgcggcgggtgaaggagctgaccctgagcagcaaccagatcacccagctgcccaacaccaccttccggcccatgcccaacctgcggtctgtggacctgagctacaacaagctgcaggccctggccccagacctcttccacggcctgaggaagctgaccaccctgcacatgagggccaatgccatccagtttgtgcctgtgcgcatcttccaggactgccgcagcctgaagttcctggacatcggctacaaccagctgaagagcctggccaggaacagctttgctggcctcttcaagctgacagagctgcacctggagcacaatgacctggtgaaggtgaactttgcccacttccccaggctcatcagcctgcacagcctgtgcctgcggaggaacaaggtggccatcgtggtgagcagcctggactgggtgtggaacctggagaagatggacctgtctggaaatgaaattgagtacatggagccccacgtgtttgagaccgtgccccacctgcagagcctgcagctggacagcaaccggctgacctacatcgagccccgcatcctgaacagctggaagagcctgaccagcatcaccctggccggcaacctgtgggactgtggcagaaatgtgtgtgccctggcctcctggctgaacaacttccagggccgctatgatggcaacctgcagtgtgccagcccagaatatgcccagggagaagatgtgctggatgctgtgtatgccttccacctgtgtgaagatggagctgagcccaccagcggccacctgctgtctgctgtgaccaacagaagtgacctgggccccccagccagcagcgccaccaccctggctgatggaggagagggccagcatgatggcacctttgagcccgccaccgtggccctgcccggcggggagcacgccgagaatgctgtgcagatccacaaggtggtgacaggcaccatggccctgatcttctccttcctgattgtggtgctggtgctgtatgtgtcctggaagtgcttccctgccagcctgcggcagctgcggcagtgctttgtgacccagaggaggaagcagaagcagaagcagaccatgcaccagatggccgccatgtctgcccaggagtactacgtggactacaagcccaaccacattgaaggagccctggtgatcatcaatgaatatggcagctgcacctgccaccagcagcctgccagagaatgtgaggtgtag

SEQ ID NO: 157529 - DNA, 1569 bp, synthetic construct; identical to SEQ ID NO: 157528
  misc_feature 1..1569: note = Description of Artificial Sequence: Synthetic coding sequence
  source 1..1569: mol_type = other DNA

SEQ ID NO: 157530 - DNA, 330 bp, synthetic construct
  misc_feature 1..330: note = Description of Artificial Sequence: Synthetic coding sequence
  source 1..330: mol_type = other DNA
atggacttcctgctgctgggcctgtgcctgtactggctgctgcggcggcccagcggcgtggtgctgtgcctgctgggcgcctgcttccagatgctgcctgctgcccccagcggctgcccccagctgtgccgctgtgagggccgcctgctgtactgtgaggccctgaacctgacagaggccccccacaacctgagcggcctgctgggcctgagcctgcgctacaacagcctgtctgagctgcgggccggccagttcaccggcctgatgcagctgacctggctgtacctggaccacaaccacatctgcagcgtgcagggagatgccttctag

SEQ ID NO: 157531 - DNA, 672 bp, synthetic construct
  misc_feature 1..672: note = Description of Artificial Sequence: Synthetic coding sequence
  source 1..672: mol_type = other DNA
atggacttcctgctgctgggcctgtgcctgtactggctgctgcggcggcccagcggcgtggtgctgtgcctgctgggcgcctgcttccagatgctgcctgctgcccccagcggctgcccccagctgtgccgctgtgagggccgcctgctgtactgtgaggccctgaacctgacagaggccccccacaacctgagcggcctgctgggcctgagcctgcgctacaacagcctgtctgagctgcgggccggccagttcaccggcctgatgcagctgacctggctgtacctggaccacaaccacatctgcagcgtgcagggagatgccttccagaagctgcggcgggtgaaggagctgaccctgagcagcaaccagatcacccagctgcccaacaccaccttccggcccatgcccaacctgcggtctgtggacctgagctacaacaagctgcaggccctggccccagacctcttccacggcctgaggaagctgaccaccctgcacatgagggccaatgccatccagtttgtgcctgtgcgcatcttccaggactgccgcagcctgaagttcctggacatcggctacaaccagctgaagagcctggccaggaacagctttgctggcctcttcaagctgacagagctgcacctggagcacaatgacctggtgaagtag

SEQ ID NO: 157532 - DNA, 1569 bp, synthetic construct; identical to SEQ ID NO: 157528
  misc_feature 1..1569: note = Description of Artificial Sequence: Synthetic coding sequence
  source 1..1569: mol_type = other DNA

SEQ ID NO: 157533 - DNA, 1569 bp, synthetic construct; identical to SEQ ID NO: 157528
  misc_feature 1..1569: note = Description of Artificial Sequence: Synthetic coding sequence
  source 1..1569: mol_type = other DNA

SEQ ID NO: 157534 - DNA, 552 bp, synthetic construct
  misc_feature 1..552: note = Description of Artificial Sequence: Synthetic coding sequence
  source 1..552: mol_type = other DNA
atggacttcctgctgctgggcctgtgcctgtactggctgctgcggcggcccagcggcgtggtgctgtgcctgctgggcgcctgcttccagatgctgcctgctgcccccagcggctgcccccagctgtgccgctgtgagggccgcctgctgtactgtgaggccctgaacctgacagaggccccccacaacctgagcggcctgctgggcctgagcctgcgctacaacagcctgtctgagctgcgggccggccagttcaccggcctgatgcagctgacctggctgtacctggaccacaaccacatctgcagcgtgcagggagatgccttccagaagctgcggcgggtgaaggagctgaccctgagcagcaaccagatcacccagctgcccaacaccaccttccggcccatgcccaacctgcggtctgtggacctgagctacaacaagctgcaggccctggccccagacctcttccacggcctgaggaagctgaccaccctgcacatgagggccaatgccatccagtttgtgcctgtgcgcatcttccaggactag

SEQ ID NO: 157535 - DNA, 1551 bp, synthetic construct
  misc_feature 1..1551: note = Description of Artificial Sequence: Synthetic coding sequence
  source 1..1551: mol_type = other DNA
atgggcctgcacttcaagtggcccctgggcgcccccatgctggccgccatctatgccatgtccatggtgctgaagatgctgcctgccctgggcatggcctgcccccccaagtgccgctgtgagaagctgctcttctactgtgacagccagggcttccacagcgtgcccaatgccacagacaagggcagcctgggcctgagcctgcggcacaaccacatcacagagctggagcgggaccagtttgccagcttcagccagctgacctggctgcacctggaccacaaccagatcagcacagtgaaggaggatgccttccagggcctgtacaagctgaaggagctgatcctgagcagcaacaagatcttctacctgcccaacaccaccttcacccagctgatcaacctgcagaacctggacctgtccttcaaccagctgagcagcctgcaccctgagctgttctacggcctgaggaagctgcagaccctgcacctgcggagcaacagcctgcggaccatccctgtgcggctcttctgggactgccgcagcctggagttcctggacctgagcaccaaccggctgcggagcctggccagaaatggatttgctggcctcatcaagctgcgggagctgcacctggagcacaaccagctgaccaagatcaactttgcccacttcctgcggctgagcagcctgcacaccctcttcctgcagtggaacaagatcagcaacctgacctgtggcatggagtggacctggggcaccctggagaagctggacctgactggaaatgagatcaaggccatcgacctgactgtgtttgagaccatgcccaacctgaagatcctgctgatggacaacaacaagctgaacagcctggacagcaagatcctgaacagcctgcggagcctgaccaccgtgggcctgagcggcaacctgtgggagtgcagcgcccgcatctgtgccctggcctcctggctgggcagcttccagggccgctgggagcacagcatcctgtgccacagcccagaccacacccagggcgaggacatcctggatgctgtgcacggcttccagctgtgctggaacctgagcaccaccgtgacagtgatggccaccacctacagagaccccaccacagagtacaccaagaggatcagcagcagcagctaccacgtgggggacaaggagatccccaccacagctggcattgctgtgaccacagaggagcacttccctgagccagacaatgccatcttcacccagagggtcatcaccggcaccatggccctgctcttctccttcttcttcatcatcttcatcgtgttcatcagcaggaagtgctgcccccccaccctgcggcgcatccggcagtgcagcatggtgcagaaccaccggcagctgcggagccagacccggctgcacatgagcaacatgtctgaccagggcccctacaatgaatatgagcccacccatgagggccccttcatcatcatcaatggctacggccagtgcaagtgccagcagctgccctacaaggaatgtgaggtgtag

SEQ ID NO: 157536 - DNA, 1746 bp, synthetic construct
  misc_feature 1..1746: note = Description of Artificial Sequence: Synthetic coding sequence
  source 1..1746: mol_type = other DNA
atgggcttcaacgtcatccggctgctgagcggcagcgctgtggccctggtgattgcccccaccgtgctgctgaccatgctgagcagcgctgagcggggctgccccaagggctgccgctgtgagggcaagatggtgtactgtgagagccagaagctgcaggagatccccagcagcatctctgctggctgcctgggcctgagcctgcgctacaacagcctgcagaagctgaagtacaaccagttcaagggcctgaaccagctgacctggctgtacctggaccacaaccacatcagcaacattgatgaaaatgccttcaacggcatccggcggctgaaggagctgatcctgagcagcaaccgcatctcctacttcctgaacaacaccttccggcctgtgaccaacctgaggaacctggacctgagctacaaccagctgcacagcctgggcagcgagcagttccggggcctgaggaagctgctgagcctgcacctgcggagcaacagcctgcggaccatccctgtgcgcatcttccaggactgcaggaacctggagctgctggacctgggctacaaccgcatccgcagcctggccagaaatgtgtttgctggcatgatccggctgaaggagctgcacctggagcacaaccagttcagcaagctgaacctggccctcttcccccggctggtgtccctgcagaacctgtacctgcagtggaacaagatcagcgtcatcggccagaccatgtcctggacctggagcagcctgcagaggctggacctgtctggaaatgaaattgaggccttcagcggccccagcgtcttccagtgtgtgcccaacctgcagaggctgaacctggacagcaacaagctgaccttcatcggccaggagatcctggacagctggatcagcctgaatgacatcagcctggccggcaacatctgggagtgcagcaggaacatctgcagcctggtgaactggctgaagagcttcaagggcctgcgggagaacaccatcatctgtgccagccccaaggagctgcagggcgtgaatgtgattgatgctgtgaagaactacagcatctgtgggaagagcaccacagaaagatttgacctggcccgggccctgcccaagcccaccttcaagcccaagctgccccggcccaagcatgagagcaagccacccctgccccccaccgtgggcgccacagagcccggccctgagacagatgctgatgctgagcacatctccttccacaagatcatcgccggctctgtggccctcttcctgtctgtgctggtgatcctgctggtgatctacgtgtcctggaagcgctacccagcctccatgaagcagctgcagcagaggagcctgatgagaagacacaggaagaagaagaggcagagcctgaagcagatgacccccagcacccaggagttctacgtggactacaagcccaccaacacagagaccagcgagatgctgctgaatggcaccggcccctgcacctacaacaagagcggcagccgggagtgtgagatccccctgtccatgaatgtgtccaccttcctggcctatgaccagcccaccatctcctactgcggcgtgcaccacgagctgctgagccacaagagctttgagaccaatgcccaggaggacaccatggagacccacctggagacagagctggacctgagcaccatcaccacagctggccgcatcagtgaccacaagcagcagctggcctag

SEQ ID NO: 157537 - DNA, 1746 bp, synthetic construct; identical to SEQ ID NO: 157536
  misc_feature 1..1746: note = Description of Artificial Sequence: Synthetic coding sequence
  source 1..1746: mol_type = other DNA

SEQ ID NO: 157538 - DNA, 1557 bp, synthetic construct
  misc_feature 1..1557: note = Description of Artificial Sequence: Synthetic coding sequence
  source 1..1557: mol_type = other DNA
atgggcttccacctgatcacccagctgaagggcatgtctgtggtgctggtgctgctgcccaccctgctgctggtgatgctgaccggggcccagagggcctgccccaagaactgccgctgtgatggcaagatcgtgtactgtgagagccacgcctttgctgacatccctgagaacatcagcggcggcagccagggcctgagcctgcgcttcaacagcatccagaagctgaagagcaaccagtttgctggcctgaaccagctgatctggctgtacctggaccacaactacatcagctctgtggatgaagatgccttccagggcatccggcggctgaaggagctgatcctgagcagcaacaagatcacctacctgcacaacaagaccttccaccctgtgcccaacctgaggaacctggacctgagctacaacaagctgcagaccctgcagagcgagcagttcaagggcctgaggaagctgatcatcctgcacctgcggagcaacagcctgaagacagtgcccatccgggtcttccaggactgcaggaacctggacttcctggacctgggctacaaccggctgcggagcctgagcagaaatgcctttgctggcctgctgaagctgaaggagctgcacctggagcacaaccagttcagcaagatcaactttgcccacttccccaggctcttcaacctgcggagcatctacctgcagtggaaccgcatccgcagcatcagccagggcctgacctggacctggagcagcctgcacaacctggacctgtctggaaatgacatccagggcatcgagcccggcaccttcaagtgcctgcccaacctgcagaagctgaacctggacagcaacaagctgaccaacatcagccaggagaccgtgaatgcctggatcagcctcatcagcatcaccctgagcggcaacatgtgggagtgcagccgcagcatctgccccctcttctactggctgaagaacttcaagggcaacaaggagagcaccatgatctgtgccggccccaagcacatccagggcgagaaggtgtctgatgctgtggagacctacaacatctgcagcgaggtgcaggtggtgaacacagagaggagccacctggtgccccagaccccccagaagcccctcatcatcccccggcccaccatcttcaagccagatgtgacccagagcacctttgagacccccagccccagccctggcttccagatccctggagctgagcaggagtatgaacatgtgtccttccacaagatcatcgccggctctgtggccctcttcctgtctgtggccatgatcctgctggtgatctacgtgtcctggaagcgctacccagcctccatgaagcagctgcagcagcacagcctgatgaagagaagaaggaagaaggcccgggagagcgagcggcagatgaacagccccctgcaggagtactacgtggactacaagcccaccaacagcgagaccatggacatctctgtgaatggaagtggcccctgcacctacaccatcagcggcagcagagaatgtgaggtgtag

SEQ ID NO: 157539 - DNA, 1773 bp, synthetic construct
  misc_feature 1..1773: note = Description of Artificial Sequence: Synthetic coding sequence
  source 1..1773: mol_type = other DNA
atgggcttccacctgatcacccagctgaagggcatgtctgtggtgctggtgctgctgcccaccctgctgctggtgatgctgaccggggcccagagggcctgccccaagaactgccgctgtgatggcaagatcgtgtactgtgagagccacgcctttgctgacatccctgagaacatcagcggcggcagccagggcctgagcctgcgcttcaacagcatccagaagctgaagagcaaccagtttgctggcctgaaccagctgatctggctgtacctggaccacaactacatcagctctgtggatgaagatgccttccagggcatccggcggctgaaggagctgatcctgagcagcaacaagatcacctacctgcacaacaagaccttccaccctgtgcccaacctgaggaacctggacctgagctacaacaagctgcagaccctgcagagcgagcagttcaagggcctgaggaagctgatcatcctgcacctgcggagcaacagcctgaagacagtgcccatccgggtcttccaggactgcaggaacctggacttcctggacctgggctacaaccggctgcggagcctgagcagaaatgcctttgctggcctgctgaagctgaaggagctgcacctggagcacaaccagttcagcaagatcaactttgcccacttccccaggctcttcaacctgcggagcatctacctgcagtggaaccgcatccgcagcatcagccagggcctgacctggacctggagcagcctgcacaacctggacctgtctggaaatgacatccagggcatcgagcccggcaccttcaagtgcctgcccaacctgcagaagctgaacctggacagcaacaagctgaccaacatcagccaggagaccgtgaatgcctggatcagcctcatcagcatcaccctgagcggcaacatgtgggagtgcagccgcagcatctgccccctcttctactggctgaagaacttcaagggcaacaaggagagcaccatgatctgtgccggccccaagcacatccagggcgagaaggtgtctgatgctgtggagacctacaacatctgcagcgaggtgcaggtggtgaacacagagaggagccacctggtgccccagaccccccagaagcccctcatcatcccccggcccaccatcttcaagccagatgtgacccagagcacctttgagacccccagccccagccctggcttccagatccctggagctgagcaggagtatgaacatgtgtccttccacaagatcatcgccggctctgtggccctcttcctgtctgtggccatgatcctgctggtgatctacgtgtcctggaagcgctacccagcctccatgaagcagctgcagcagcacagcctgatgaagagaagaaggaagaaggcccgggagagcgagcggcagatgaacagccccctgcaggagtactacgtggactacaagcccaccaacagcgagaccatggacatctctgtgaatggaagtggcccctgcacctacaccatcagcggcagcagagaatgtgagatgccccaccacatgaagcccctgccctactacagctatgaccagcctgtgattggctactgccaggcccaccagcccctgcacgtgaccaagggctatgagaccgtgtccccagagcaggatgagagccctggcctggagctgggccgggaccacagcttcatcgccaccatcgcccggtctgctgccccagccatctacctggagcgcatcgccaactag

SEQ ID NO: 157540 - DNA, 1773 bp, synthetic construct; identical to SEQ ID NO: 157539
  misc_feature 1..1773: note = Description of Artificial Sequence: Synthetic coding sequence
  source 1..1773: mol_type = other DNA

SEQ ID NO: 157541 - DNA, 1776 bp, synthetic construct
  misc_feature 1..1776: note = Description of Artificial Sequence: Synthetic coding sequence
  source 1..1776: mol_type = other DNA
atgcctggcttccacctgatcacccagctgaagggcatgtctgtggtgctggtgctgctgcccaccctgctgctggtgatgctgactggagcccagagggcctgccccaagaactgccgctgtgatggcaagatcgtgtactgtgagagccacgcctttgctgacatccctgagaacatcagcggcggcagccagggcctgagcctgcgcttcaacagcatccagaagctgaagagcaaccagtttgctggcctgaaccagctgatctggctgtacctggaccacaactacatcagctctgtggatgaagatgccttccagggcatccggcggctgaaggagctgatcctgagcagcaacaagatcacctacctgcacaacaagaccttccaccctgtgcccaacctgaggaacctggacctgagctacaacaagctgcagaccctgcagagcgagcagttcaagggcctgaggaagctgatcatcctgcacctgcggagcaacagcctgaagacagtgcccatccgggtcttccaggactgcaggaacctggacttcctggacctgggctacaaccggctgcggagcctgagcagaaatgcctttgctggcctgctgaagctgaaggagctgcacctggagcacaaccagttcagcaagatcaactttgcccacttccccaggctcttcaacctgcggagcatctacctgcagtggaaccgcatccgcagcatcagccagggcctgacctggacctggagcagcctgcacaacctggacctgtctggaaatgacatccagggcatcgagcccggcaccttcaagtgcctgcccaacctgcagaagctgaacctggacagcaacaagctgaccaacatcagccaggagaccgtgaatgcctggatcagcctcatcagcatcaccctgagcggcaacatgtgggagtgcagccgcagcatctgccccctcttctactggctgaagaacttcaagggcaacaaggagagcaccatgatctgtgccggccccaagcacatccagggcgagaaggtgtctgatgctgtggagacctacaacatctgcagcgaggtgcaggtggtgaacacagagaggagccacctggtgccccagaccccccagaagcccctcatcatcccccggcccaccatcttcaagccagatgtgacccagagcacctttgagacccccagccccagccctggcttccagatccctggagctgagcaggagtatgagcacgtgtccttccacaagatcatcgccggctctgtggccctcttcctgtctgtggccatgatcctgctggtgatctacgtgtcctggaagcgctacccagcctccatgaagcagctgcagcagcacagcctgatgaagagaagaaggaagaaggcccgggagagcgagcggcagatgaacagccccctgcaggagtactacgtggactacaagcccaccaacagcgagaccatggacatctctgtgaatggcagcggcccctgcacctacaccatcagcggcagccgggagtgtgagatgccccaccacatgaagcccctgccctactacagctatgaccagcccgtcatcggctactgccaggcccaccagcccctgcacgtgaccaagggctatgaaacagtgtccccagagcaggatgagagccctggcctggagctgggccgggaccacagcttcatcgccaccatcgcccggtctgctgccccagccatctacctggagagaattgccaactag

SEQ ID NO: 157542 - DNA, 579 bp, synthetic construct
  misc_feature 1..579: note = Description of Artificial Sequence: Synthetic coding sequence
  source 1..579: mol_type = other DNA
atgaacaagagggactacatgaacacctctgtgcaggagccccccctggactacagcttccgcagcatccacgtgatccaggacctggtgaatgaggagcccaggacaggcctgcggcccctgaagaggagcaagagcggcaagagcctgacccagagcctgtggctgaacaacaacgtgctgaatgacctgcgggacttcaaccaggtggccagccagctgctggagcaccctgagaacctggcctggattgacctgtccttcaatgacctgaccagcattgatcctgtgctgaccaccttcttcaacctgtctgtgctgtacctgcacggcaacagcatccagaggctgggggaggtgaacaagctggccgtgctgccccggctgcggagcctgaccctgcacggcaaccccatggaggaggagaagggctaccggcagtatgtgctgtgcaccctgagccgcatcaccacctttgacttcagcggcgtgaccaaggctgacaggaccacagctgaggtgtggaagaggatgaacatcaagcccaagaaggcctggaccaagcagaacaccctgtag

SEQ ID NO: 157543 - DNA, 876 bp, synthetic construct
  misc_feature 1..876: note = Description of Artificial Sequence: Synthetic coding sequence
  source 1..876: mol_type = other DNA
atgggcaccccctggaggaagaggaaaggaattgctggccctggcctgcctgacctgagctgtgccctggtgctgcagccccgggcccaggtgggcaccatgagccctgccatcgccctggccttcctgcccctggtggtgaccctgctggtgcgctaccgccactacttccggctgctggtgaggacagtgctgctgcggagcctgcgggactgcctgagcggcctgcgcatcgaggagcgggccttctcctatgtgctgacccacgccctgcccggggaccccggccacatcctgaccaccctggaccactggagcagccgctgtgagtacctgagccacatgggccctgtgaagggccagatcctgatgaggctggtggaggagaaggccccagcctgtgtgctggagctgggcacctactgcggctacagcaccctgctgattgcccgggccctgcccccaggcggccgcctgctgactgtggagcgggaccccaggacagctgctgtggccgagaagctgatccggctggccggctttgatgagcacatggtggagctgattgtgggcagcagtgaagatgtgatcccctgcctgcggacccagtaccagctgagcagagctgacctggtgctgctggcccaccggccccgctgctacctgcgggacctgcagctgctggaggcccacgccctgctgcctgctggggccaccgtgctggccgaccacgtgctcttccctggggccccccgcttcctgcagtatgccaagagctgtggccgctaccgctgccgcctgcaccacacaggcctgcctgacttccctgccatcaaggatggcatcgcccagctgacctacgccggccctggatag

SEQ ID NO: 157544 - DNA, 441 bp, synthetic construct
  misc_feature 1..441: note = Description of Artificial Sequence: Synthetic coding sequence
  source 1..441: mol_type = other DNA
atgaacaagagggactacatgaacacctctgtgcaggagccccccctggactacagcttccgcagcatccacgtgatccaggacctggtgaatgaggagcccaggacaggcctgcggcccctgaagaggagcaagagcggcaagagcctgacccagagcctgtggctgaacaacaacgtgctgaatgacctgcgggacttcaaccaggtggccagccagctgctggagcaccctgagaacctggcctggattgacctgtccttcaatgacctgaccagcattgatcctgtgctgaccaccttcttcaacctgtctgtgctgtacctgcacggcaacagcatccagaggctgggggaggtgaacaagctggccgtgctgccccggctgcggagcctgaccctgcacggcaaccccatggaggaggagaagggctacagatag

SEQ ID NO: 157545 - DNA, 756 bp, synthetic construct
  misc_feature 1..756: note = Description of Artificial Sequence: Synthetic coding sequence
  source 1..756: mol_type = other DNA
atgggcaccccctggaggaagaggaaaggaattgctggccctggcctgcctgacctgagctgtgccctggtgctgcagcccagcctgcgggactgcctgagcggcctgcgcatcgaggagcgggccttctcctatgtgctgacccacgccctgcccggggaccccggccacatcctgaccaccctggaccactggagcagccgctgtgagtacctgagccacatgggccctgtgaagggccagatcctgatgaggctggtggaggagaaggccccagcctgtgtgctggagctgggcacctactgcggctacagcaccctgctgattgcccgggccctgcccccaggcggccgcctgctgactgtggagcgggaccccaggacagctgctgtggccgagaagctgatccggctggccggctttgatgagcacatggtggagctgattgtgggcagcagtgaagatgtgatcccctgcctgcggacccagtaccagctgagcagagctgacctggtgctgctggcccaccggccccgctgctacctgcgggacctgcagctgctggaggcccacgccctgctgcctgctggggccaccgtgctggccgaccacgtgctcttccctggggccccccgcttcctgcagtatgccaagagctgtggccgctaccgctgccgcctgcaccacacaggcctgcctgacttccctgccatcaaggatggcatcgcccagctgacctacgccggccctggatag

SEQ ID NO: 157546 - DNA, 876 bp, synthetic construct; identical to SEQ ID NO: 157543
  misc_feature 1..876: note = Description of Artificial Sequence: Synthetic coding sequence
  source 1..876: mol_type = other DNA

SEQ ID NO: 157547 - DNA, 477 bp, synthetic construct
  misc_feature 1..477: note = Description of Artificial Sequence: Synthetic coding sequence
  source 1..477: mol_type = other DNA
atgaacaagagggactacatgaacacctctgtgcaggagccccccctggactacagcttccgcagcatccacgtgatccaggacctggtgaatgaggagcccaggacaggcctgcggcccctgaagaggagcaagagcggcaagagcctgacccagagcctgtggctgaacaacaacgtgctgaatgacctgcgggacttcaaccaggtggccagccagctgctggagcaccctgagaacctggcctggattgacctgtccttcaatgacctgaccagcattgatcctgtgctgaccaccttcttcaacctgtctgtgctgtacctgcacggcaacagcatccagaggctgggggaggtgaacaagctggccgtgctgccccggctgcggagcctgaccctgcacggcaaccccatggaggaggagaagggctacagagtgcccggctctgtggagatgccccacaggcctccttag

SEQ ID NO: 157548 - DNA, 279 bp, synthetic construct
  misc_feature 1..279: note = Description of Artificial Sequence: Synthetic coding sequence
  source 1..279: mol_type = other DNA
atgaacaagagggactacatgaacacctctgtgcaggagccccccctggactacagcttccgcagcatccacgtgatccaggacctggtgaatgaggagcccaggacaggcctgcggcccctgaagaggagcaagagcggcaagagcctgacccagagcctgtggctgaacaacaacgtgctgaatgacctgcgggacttcaaccaggtggccagccagctgctggagcaccctgagaacctggcctggattgacctgtccttcaatgacctgacctag

SEQ ID NO: 157549 - DNA, 579 bp, synthetic construct; identical to SEQ ID NO: 157542
  misc_feature 1..579: note = Description of Artificial Sequence: Synthetic coding sequence
  source 1..579: mol_type = other DNA

SEQ ID NO: 157550 - DNA, 477 bp, synthetic construct; identical to SEQ ID NO: 157547
  misc_feature 1..477: note = Description of Artificial Sequence: Synthetic coding sequence
  source 1..477: mol_type = other DNA

SEQ ID NO: 157551 - DNA, 315 bp, synthetic construct
  misc_feature 1..315: note = Description of Artificial Sequence: Synthetic coding sequence
  source 1..315: mol_type = other DNA
atgaacaagagggactacatgaacacctctgtgcaggagccccccctggactacagcttccgcagcatccacgtgatccaggacctggtgaatgaggagcccaggacaggcctgcggcccctgaagaggagcaagagcggcaagagcctgacccagagcctgtggctgaacaacaacgtgctgaatgacctgcgggacttcaaccaggtggccagccagctgctggagcaccctgagaacctggcctggattgacctgtccttcaatgacctgaccagcattgatcctgtgctgaccaccttcttcaacctgtag

SEQ ID NO: 157552 - DNA, 525 bp, synthetic construct
  misc_feature 1..525: note = Description of Artificial Sequence: Synthetic coding sequence
  source 1..525: mol_type = other DNA
atggtggagttccagcccagcgtgacagacctggtgaatgaggagcccaggacaggcctgcggcccctgaagaggagcaagagcggcaagagcctgacccagagcctgtggctgaacaacaacgtgctgaatgacctgcgggacttcaaccaggtggccagccagctgctggagcaccctgagaacctggcctggattgacctgtccttcaatgacctgaccagcattgatcctgtgctgaccaccttcttcaacctgtctgtgctgtacctgcacggcaacagcatccagaggctgggggaggtgaacaagctggccgtgctgccccggctgcggagcctgaccctgcacggcaaccccatggaggaggagaagggctaccggcagtatgtgctgtgcaccctgagccgcatcaccacctttgacttcagcggcgtgaccaaggctgacaggaccacagctgaggtgtggaagaggatgaacatcaagcccaagaaggcctggaccaagcagaacaccctgtag

SEQ ID NO: 157553 - DNA, 3231 bp, synthetic construct
  misc_feature 1..3231: note = Description of Artificial Sequence: Synthetic coding sequence
  source 1..3231: mol_type = other DNA
atggccgagttcaccagctacaaggagacagccagcagccgccacctgcgcttcaagctgcagagcctgagccggcggctggatgagctggaggaggccaccaagaacctgcagaaggcagaagatgagctgctggacctgcaggacaaggtgatccaggccgagggcagcaacagctccatgctggccgagattgaggtgctgcggcagagggtgctgagaattgagggcaaggatgaggagatcaagagagctgaggacctgtgccgcctgatgaaggagaagctggaggaggaggagaacctgacccgggagctgaagtcagaaattgaaaggctgcagaagaggatggccgagctggagaagctggaggaggccttcagccgcagcaagaatgactgcacccagctgtgcctgagcctgaatgaggagaggaacctgaccaagaagatcagcagcgagctggagatgctgcgggtgaaggtgaaggagctggagagcagtgaagatcggctggacaagacagagcagagcctggccagcgagctggagaagctgaagagcctgaccctgagctttgtgtctgagaggaagtacctgaatgagaaggagaaggaaaatgagaagctgatcaaggagctgacccagaagctggagcagaacaagaagatgaacagagactacaccagaaatgccagcaacctggagagaaatgacctgagaattgaagatggcatcagcagcaccctgcccagcaaggagagcaggaggaagggcggcctggactacctgaagcaggtggagaatgagaccaggaacaagtcagaaaatgagaagaacagaaaccaggaggacaacaaggtgaaggacctgaaccaggagattgagaagctgaagacccagatcaagcactttgagagcctggaggaggagctgaagaagatgaagagcaagaacaatgacctgcaggacaactacctgtctgagcagaacaagaacaagctgctggccagccagctggaggagatcaagctgcagatcaagaagcagaaggagctggagaatggagaggtggagggagaagatgccttcctgagcagcaagggcagacatgagaggaccaagttccggggccacggcagcgaggcctctgtgtccaagcacacagcccgggagctgagcccccagcacaagcgggagcggctgaggaaccgggagtttgccctgaacaatgaaaactacagcctgagcaaccggcaggtgagcagccccagcttcaccaacagaagagctgccaaggccagccacatgggcgtgtccacagattctggcacccaggagaccaagaagacagaggacagatttgtgcccggcagcagccagagcgagggcaagaagagccgggagcagcccagcgtgctgagccgctaccccccagctgcccaggagcacagcaaggcctggaagggcaccagcaagccaggcacagagagcggcctgaagggcaaggtggagaagaccaccaggaccttcagtgacaccacccacggctctgtgcccagcgaccccctgggccgggctgacaaggccagtgacaccagcagcgagaccgtgtttgggaagaggggccacgtgctgggcaatggcagccaggtgacccaggccgccaacagcggctgcagcaaggccatcggggccctggccagcagcagaagaagcagcagcgagggcctgagcaagggcaagaaggccgccaacggcctggaggccgacaacagctgccccaacagcaaggcccctgtgctgagcaagtacccctacagctgccgcagccaggagaacatcctgcagggcttcagcaccagccacaaggagggcgtgaaccagcctgctgctgtggtgatggaggacagcagcccccatgaggccctgcgctgcagggtcatcaagagcagcggccgggagaagccagacagtgatgatgacctggacatcgccagcctggtgacagccaagctggtgaacaccaccatcaccccagagcctgagcccaagccccagcccaacagccgggagaaggccaagaccaggggggcccccaggaccagcctgtttgaaaatgacaaggatgctggcatggagaatgaatctgtgaagtctgtgcgggccagcaccaacaccatggagctgcctgacaccaacggggccggcgtgaagagccagaggcccttcagcccccgggaggccctgcggagccgggccatcatcaagcctgtgattgtggacaaggatgtgaagaagatcatgggcggcagcggcacagagaccaccctggagaagcagaagcctgtgtccaagccaggccccaacaaggtgaccagcagcatcaccatctaccccagcgacagcagcagcccccgggccgcccctggagaggccctgcgggagcggcacaccagcaccagcaacatccaggtgggcctggccgagctgacctctgtgagcaaccacgtgagcagcccctttgagctgagcatccacaagcatgacatcaccctgcagctggccgaggccgagaggatggctgatggccccctgaaggacaggcctgagaccgtggtgagccgcagcagcatcatcatcaagcccagcgaccctgtggagaggaacagccacgcccccccagctgagaccatccgctggaagagccacagcgcccccagcgaggtgggcttcagtgatgcccggcacgtgacagtgagaaatgcctggaagagcagaagagacctgaagagcctggaggacccccccacccgcatcggcaagaatgtggagagcaccaacagcaatgcctacacccagaggagcagcacagacttcagcgagctggagcagcccaggagctgcctgtttgagcagggcacccggcgggtgggccccagcagtggagatgcccctgagcccagcagcaggaggacccagagcagcctgactgtgtctgaggtgctgaccaggaggaacagagtgggggacaccatcaccgtggccgcctggaaccacagcgcctccatggaggaggagggggaggactgcaccctgtctgtgtaccggcagctgcacaacagcctggaccccagcgagctgcccgggaagcagggcctgcctgagagcggccgggtgcgggcagaggagcggctgcggcccacccggccctgtgccgaggagaactag

SEQ ID NO: 157554 - DNA, 3081 bp, synthetic construct
  misc_feature 1..3081: note = Description of Artificial Sequence: Synthetic coding sequence
  source 1..3081: mol_type = other DNA
atggccgagttcaccagctacaaggagacagccagcagccgccacctgcgcttcaagctgcagagcctgagccggcggctggatgagctggaggaggccaccaagaacctgcagaaggcagaagatgagctgctggacctgcaggacaaggtgatccaggccgagggcagcaacagctccatgctggccgagattgaggtgctgcggcagagggtgctgagaattgagggcaaggatgaggagatcaagagagctgaggacctgtgccgcctgatgaaggagaagctggaggaggaggagaacctgacccgggagctgaagtcagaaattgaaaggctgcagaagaggatggccgagctggagaagctggaggaggccttcagccgcagcaagaatgactgcacccagctgtgcctgagcctgaatgaggagaggaacctgaccaagaagatcagcagcgagctggagatgctgcgggtgaaggtgaaggagctggagagcagtgaagatcggctggacaagacagagcagagcctggccagcgagctggagaagctgaagagcctgaccctgagctttgtgtctgagaggaagtacctgaatgagaaggagaaggaaaatgagaagctgatcaaggagctgacccagaagctggagcagaacaagaagatgaacagagactacaccagaaatgccagcaacctggagagaaatgacctgagaattgaagatggcatcagcagcaccctgcccagcaaggagagcaggaggaagggcggcctggactacctgaagcaggtggagaatgagaccaggaacaagtcagaaaatgagaagaacagaaaccaggaggacaacaaggtgaaggacctgaaccaggagattgagaagctgaagacccagatcaagcactttgagagcctggaggaggagctgaagaagatgaagagcaagaacaatgacctgcaggacaactacctgtctgagcagaacaagaacaagctgctggccagccagctggaggagatcaagctgcagatcaagaagcagaaggagctggagaatggagaggtggagggagaagatgccttcctgagcagcaagggcagacatgagaggaccaagttccggggccacggcagcgaggcctctgtgtccaagcacacagcccgggagctgagcccccagcacaagcgggagcggctgaggaaccgggagtttgccctgaacaatgaaaactacagcctgagcaaccggcaggtgagcagccccagcttcaccaacagaagagctgccaaggccagccacatgggcgtgtccacagattctggcacccaggagaccaagaagacagaggacagatttgtgcccggcagcagccagagcgagggcaagaagagccgggagcagcccagcgtgctgagccgctaccccccagctgcccaggagcacagcaaggcctggaagggcaccagcaagccaggcacagagagcggcctgaagggcaaggtggagaagaccaccaggaccttcagtgacaccacccacggctctgtgcccagcgaccccctgggccgggctgacaaggccagtgacaccagcagcgagaccgtgtttgggaagaggggccacgtgctgggcaatggcagccaggtgacccaggccgccaacagcggctgcagcaaggccatcggggccctggccagcagcagaagaagcagcagcgagggcctgagcaagggcaagaaggccgccaacggcctggaggccgacaacagctgccccaacagcaaggcccctgtgctgagcaagtacccctacagctgccgcagccaggagaacatcctgcagggcttcagcaccagccacaaggagggcgtgaaccagcctgctgctgtggtgatggaggacagcagcccccatgaggccctgcgctgcagggtcatcaagagcagcggccgggagaagccagacagtgatgatgacctggacatcgccagcctggtgacagccaagctggtgaacaccaccatcaccccagagcctgagcccaagccccagcccaacagccgggagaaggccaagaccaggggggcccccaggaccagcctgtttgaaaatgacaaggatgctggcatggagaatgaatctgtgaagtctgtgcgggccagcaccaacaccatggagctgcctgacaccaacggggccggcgtgaagagccagaggcccttcagcccccgggaggccctgcggagccgggccatcatcaagcctgtgattgtggacaaggatgtgaagaagatcatgggcggcagcggcacagagaccaccctggagaagcagaagcctgtgtccaagccaggccccaacaaggtgaccagcagcatcaccatctaccccagcgacagcagcagcccccgggccgcccctggagaggccctgcgggagcggcacaccagcaccagcaacatccaggtgggcctggccgagctgacctctgtgagcaaccacgtgagcagcccctttgagctgagcatccacaagcatgacatcaccctgcagctggccgaggccgagaggatggctgatggccccctgaaggacaggcctgagaccgtggtgagccgcagcagcatcatcatcaagcccagcgaccctgtggagaggaacagccacgcccccccagctgagaccatccgctggaagagccacagcgcccccagcgaggtgggcttcagtgatgcccggcacgtgacagtgagaaatgcctggaagagcagaagagacctgaagagcctggaggacccccccacccgcatcggcaagaatgtggagagcaccaacagcaatgcctacacccagaggagcagcacagacttcagcgagctggagcagcccaggagctgcctgtttgagcagggcacccggcgggtgggccccagcagtggagatgcccctgagcccagcagcaggaggacccagagcagcctgactgtgtctgaggtgctgaccaggaggaacagagtgggggacaccatcaccgtggccgcctggaaccacagcgcctccatgagcagctag

SEQ ID NO: 157555 - DNA, 3231 bp, synthetic construct; identical to SEQ ID NO: 157553
  misc_feature 1..3231: note = Description of Artificial Sequence: Synthetic coding sequence
  source 1..3231: mol_type = other DNA

SEQ ID NO: 157556 - DNA, 3231 bp, synthetic construct; identical to SEQ ID NO: 157553
  misc_feature 1..3231: note = Description of Artificial Sequence: Synthetic coding sequence
  source 1..3231: mol_type = other DNA

SEQ ID NO: 157557 - DNA, 822 bp, synthetic construct
  misc_feature 1..822: note = Description of Artificial Sequence: Synthetic coding sequence
  source 1..822: mol_type = other DNA
atggccgagttcaccagctacaaggagacagccagcagccgccacctgcgcttcaagctgcagagcctgagccggcggctggatgagctggaggaggccaccaagaacctgcagaaggcagaagatgagctgctggacctgcaggacaaggtgatccaggccgagggcagcaacagctccatgctggccgagattgaggtgctgcggcagagggtgctgagaattgagggcaaggatgaggagatcaagagagctgaggacctgtgccgcctgatgaaggagaagctggaggaggaggagaacctgacccgggagctgaagtcagaaattgaaaggctgcagaagaggatggccgagctggagaagctggaggaggccttcagccgcagcaagaatgactgcacccagctgtgcctgagcctgaatgaggagaggaacctgaccaagaagatcagcagcgagctggagatgctgcgggtgaaggtgaaggagctggagagcagtgaagatcggctggacaagacagagcagagcctggccagcgagctggagaagctgaagagcctgaccctgagctttgtgtctgagaggaagtacctgaatgagaaggagaaggaaaatgagaagctgatcaaggagctgacccagaagctggagcagaacaagaagatgaacagagactacaccagaaatgccagcaacctggagagaaatgacctgagaattgaagatggcatcagcagcaccctgcccagcaaggagagcaggaggaagggcggcctggactacctgaagcaggtggagaatgagaccaggaactag

SEQ ID NO: 157558 - DNA, 108 bp, synthetic construct
  misc_feature 1..108: note = Description of Artificial Sequence: Synthetic coding sequence
  source 1..108: mol_type = other DNA
atggccgagttcaccagctacaaggagacagccagcagccgccacctgcgcttcaagctgcagagcctgagccggcggctggatgagctggaggaggccaccaagtag

SEQ ID NO: 157559 - DNA, 1041 bp, synthetic construct
  misc_feature 1..1041: note = Description of Artificial Sequence: Synthetic coding sequence
  source 1..1041: mol_type = other DNA
atgaagttctccccagcccactacctgctgcccctgctgcctgccctggtgctgagcacccggcaggactatgaggagctggagaagcagctgaaggaggtgttcaaggagaggagcaccatcctgcggcagctgaccaagaccagccgggagctggatggcatcaaggtgaacctgcagagcctgaagaatgatgagcagagcgccaagacagatgtgcagaagctgctggagctgggccagaagcagcgggaggagatgaagagcctgcaggaggccctgcagaaccagctgaaggagaccagcgagaaggccgagaagcaccaggccaccatcaacttcctgaagacagaggtggagaggaagagcaagatgatccgggacctgcagaatgaaaacaagagcctgaagaacaagctgctgagcggcaacaagctgtgtggcatccatgctgaggagagcaagaagatccaggcccagctgaaggagctgcgctatggcaagaaggacctgctcttcaaggcccagcagctgacagacctggagcagaagctggccgtggccaagaatgagctggagaaggccgccctggaccgggagagccagatgaaggccatgaaggagaccgtgcagctgtgcctgaccagcgtcttccgggaccagcccccaccacccctgagcctcatcaccagcaaccccaccaggatgctgctgcccccaagaaatattgccagcaagctgcctgatgctgctgccaagagcaagccccagcagagcgccagcggcaacaatgaaagcagccaggtggagagcaccaaggagggcaaccccagcaccacagcctgtgacagccaggatgagggccggccctgcagcatgaagcacaaggagagcccccccagcaatgccacagctgagacagagcccatcccccagaagctgcagatgccaccctgcagtgaatgtgaggtgaagaaggcccctgagaagcccctgaccagctttgagggcatggccgcccgggaggagaagatcctgtag

SEQ ID NO: 157560 - DNA, 783 bp, synthetic construct
  misc_feature 1..783: note = Description of Artificial Sequence: Synthetic coding sequence
  source 1..783: mol_type = other DNA
atgaagagcctgcaggaggccctgcagaaccagctgaaggagaccagcgagaaggccgagaagcaccaggccaccatcaacttcctgaagacagaggtggagaggaagagcaagatgatccgggacctgcagaatgaaaacaagagcctgaagaacaagctgctgagcggcaacaagctgtgtggcatccatgctgaggagagcaagaagatccaggcccagctgaaggagctgcgctatggcaagaaggacctgctcttcaaggcccagcagctgacagacctggagcagaagctggccgtggccaagaatgagctggagaaggccgccctggaccgggagagccagatgaaggccatgaaggagaccgtgcagctgtgcctgaccagcgtcttccgggaccagcccccaccacccctgagcctcatcaccagcaaccccaccaggatgctgctgcccccaagaaatattgccagcaagctgcctgatgctgctgccaagagcaagccccagcagagcgccagcggcaacaatgaaagcagccaggtggagagcaccaaggagggcaaccccagcaccacagcctgtgacagccaggatgagggccggccctgcagcatgaagcacaaggagagcccccccagcaatgccacagctgagacagagcccatcccccagaagctgcagatgccaccctgcagtgaatgtgaggtgaagaaggcccctgagaagcccctgaccagctttgagggcatggccgcccgggaggagaagatcctgtag

SEQ ID NO: 157561 - DNA, 900 bp, synthetic construct
  misc_feature 1..900: note = Description of Artificial Sequence: Synthetic coding sequence
  source 1..900: mol_type = other DNA
atggccgagctgggcctgaatgagcaccaccagaatgaggtgatcaactacatgagatttgcccggagcaagaggggcctgcggctgaagacagtggacagctgcttccaggacctgaaggagagccggctggtggaggacaccttcaccattgatgaggtgtctgaggtgctgaatggcctgcaggccgtggtgcacagcgaggtggagagcgagctgatcaacacagcctacaccaacgtgctgctgctgcggcagctgtttgcccaggccgagaagtggtacctgaagctgcagacagacatcagcgagctggagaaccgggagctgctggagcaggtggccgagtttgagaaggccgagatcaccagcagcaacaagaagcccatcctggatgtgaccaagcccaagctggcccccctgaatgaaggaggaacagctgagctgctgaacaaggagatcctgcggctgcaggaggagaatgagaagctgaagagccggctgaagaccatcgagatccaggccaccaatgccctggatgagaagagcaagctggagaaggccctgcaggacctgcagctggaccagggcaaccagaaggacttcatcaaggcccaggacctgagcaacctggagaacacagtggccgccctgaagtctgagttccagaagaccctgaatgacaagacagagaaccagaagagcctggaggagaacctggccacagccaagcatgacctgctgcgggtgcaggagcagctgcacatggccgagaaggagctggagaagaagttccagcagacagctgcctacagaaacatgaaggagatcctgaccaagaagaatgaccagatcaaggacctgaggaagaggctggcccagtatgagcctgaggactag

SEQ ID NO: 157562 - DNA, 849 bp, synthetic construct
  misc_feature 1..849: note = Description of Artificial Sequence: Synthetic coding sequence
  source 1..849: mol_type = other DNA
atgagatttgcccggagcaagaggggcctgcggctgaagacagtggacagctgcttccaggacctgaaggagagccggctggtggaggacaccttcaccattgatgaggtgtctgaggtgctgaatggcctgcaggccgtggtgcacagcgaggtggagagcgagctgatcaacacagcctacaccaacgtgctgctgctgcggcagctgtttgcccaggccgagaagtggtacctgaagctgcagacagacatcagcgagctggagaaccgggagctgctggagcaggtggccgagtttgagaaggccgagatcaccagcagcaacaagaagcccatcctggatgtgaccaagcccaagctggcccccctgaatgaaggaggaacagctgagctgctgaacaaggagatcctgcggctgcaggaggagaatgagaagctgaagagccggctgaagaccatcgagatccaggccaccaatgccctggatgagaagagcaagctggagaaggccctgcaggacctgcagctggaccagggcaaccagaaggacttcatcaaggcccaggacctgagcaacctggagaacacagtggccgccctgaagtctgagttccagaagaccctgaatgacaagacagagaaccagaagagcctggaggagaacctggccacagccaagcatgacctgctgcgggtgcaggagcagctgcacatggccgagaaggagctggagaagaagttccagcagacagctgcctacagaaacatgaaggagatcctgaccaagaagaatgaccagatcaaggacctgaggaagaggctggcccagtatgagccagaagattag

SEQ ID NO: 157563 - DNA, 771 bp, synthetic construct
  misc_feature 1..771: note = Description of Artificial Sequence: Synthetic coding sequence
  source 1..771: mol_type = other DNA
atgaggaaccaggaccccgggaagatgggccggcagaggaagagcatcaagctgtaccccacccaccccctggtgaccttccccaggtcctgggccaagttccaggagaaggccctgctggtggaggacaccttcaccattgatgaggtgtctgaggtgctgaatggcctgcaggccgtggtgcacagcgaggtggagagcgagctgatcaacacagcctacaccaacgtgctgctgctgcggcagctgtttgcccaggccgagaagtggtacctgaagctgcagacagacatcagcgagctggagaaccgggagctgctggagcaggtggccgagtttgagaaggccgagatcaccagcagcaacaagaagcccatcctggatgtgaccaagcccaagctggcccccctgaatgaaggaggaacagctgagctgctgaacaaggagatcctgcggctgcaggaggagaatgagaagctgaagagccggctgaagaccatcgagatccaggccaccaatgccctggatgagaagagcaagctggagaaggccctgcaggacctgcagctggaccagggcaaccagaaggacttcatcaaggcccaggacctgagcaacctggagaacacagtggccgccctgaagtctgagttccagaagaccctgaatgacaagacagagaaccagaagagcctggaggagaacctggccacagccaagcatgacctgctgcgggtgcaggagcagctgcacatggccgagaagatctag

SEQ ID NO: 157564 - DNA, 441 bp, synthetic construct
  misc_feature 1..441: note = Description of Artificial Sequence: Synthetic coding sequence
  source 1..441: mol_type = other DNA
atggtggatgagctggtgctgctgctgcacgccctgctgatgaggcaccgggccctgagcattgagaacagccagctgatggagcagctgcggctgctggtgtgtgagcgggccagcctgctgcggcaggtgcggccccccagctgccctgtgcccttccctgagaccttcaacggggagagcagccggctgcctgagttcatcgtgcagacagccagctacatgctggtgaatgaaaatcgcttctgcaatgatgccatgaaggtggccttcctgatcagcctgctgactggagaggccgaggagtgggtggtgccctacatcgagatggacagccccatcctgggggactaccgggccttcctggatgagatgaagcagtgcttcggctgggatgatgatgaagatgatgatgatgaggaggaggaggatgactactag

SEQ ID NO: 157565 - DNA, 2220 bp, synthetic construct
  misc_feature 1..2220: note = Description of Artificial Sequence: Synthetic coding sequence
  source 1..2220: mol_type = other DNA
atggccagcatcctgctgcggagctgccggggccgggccccagcccggctgcccccaccaccccgctacacagtgccccggggcagccctggggaccctgcccacctgagctgtgccagcaccctgggcctgaggaactgcctgaatgtgcccttcggctgctgcacccccatccaccctgtgtacaccagcagcagaggagaccacctgggctgctgggccctgcggcctgagtgcctgcgcatcgtgtcccgggccccctggaccagcacctctgtgggctttgtggccgtgggcccccagtgcctgcctgtgcggggctggcacagcagcaggcctgtgagagatgacagcgtggtggagaagagcctgaagagcctgaaggacaagaacaagaagctggaggagggcggccctgtgtacagccccccagctgaggtggtggtgaagaagagcctgggccagagggtgctggatgagctgaagcactactaccacggcttccggctgctgtggattgacaccaagattgctgccaggatgctgtggaggatcctgaatggccacagcctgacccggcgggagcggcggcagttcctgcgcatctgtgccgacctcttccggctggtgcccttcctggtgtttgtggtggtgcccttcatggagttcctgctgcctgtggccgtgaagctgttccccaacatgctgcccagcacctttgagacccagagcctgaaggaggagcggctgaagaaggagctgcgggtgaagctggagctggccaagttcctgcaggacaccatcgaggagatggccctgaagaacaaggccgccaagggcagcgccaccaaggacttctctgtgttcttccagaagatccgggagaccggggagcggcccagcaatgaggagatcatgaggttcagcaagctgtttgaagatgagctgaccctggacaacctgacccggccccagctggtggccctgtgcaagctgctggagctgcagagcatcggcaccaacaacttcctgcgcttccagctgaccatgaggctgcggagcatcaaggcagatgacaagctgattgctgaggagggcgtggacagcctgaatgtgaaggagctgcaggccgcctgccgggcccggggcatgagggccctgggcgtgacagaagatcggctgcggggccagctgaagcagtggctggacctgcacctgcaccaggagatccccaccagcctgctgatcctgagccgggccatgtacctgcctgacaccctgagccctgctgaccagctgaagagcaccctgcagaccctgcctgagatcgtggccaaggaggcccaggtgaaggtggccgaggtggagggggagcaggtggacaacaaggccaagctggaggccaccctgcaggaggaggccgccatccagcaggagcaccgggagaaggagctgcagaagaggtctgaggtggccaaggactttgagcctgagcgggtggtggccgccccccagaggcctggaacagagccccagcctgagatgccagacacagtgctgcagagcgagaccctgaaggacacagcccctgtgctggagggcctgaaggaggaggagatcaccaaggaggagattgacatcctgagtgatgcctgcagcaagctgcaggagcagaagaagagcctgaccaaggagaaggaggagctggagctgctgaaggaggatgtgcaggactacagcgaggacctgcaggagatcaagaaggagctgagcaagacaggagaggagaagtatgtggaggagagcaaggccagcaagaggctgaccaagagggtgcagcagatgattggccagattgatggcctcatcagccagctggagatggaccagcaggccggcaagctggccccagccaacggcatgcccactggagaaaatgtcatctctgtggccgagctgatcaatgccatgaagcaggtgaagcacatccctgagagcaagctgaccagcctggccgccgccctggatgagaacaaggatggcaaggtgaacattgatgacctggtgaaggtgattgagctggtggacaaggaggatgtgcacatcagcaccagccaggtggccgagatcgtggccaccctggagaaggaggagaaggtggaggagaaggagaaggccaaggagaaggccgagaaggaggtggccgaggtgaagagctag

SEQ ID NO: 157566 - DNA, 759 bp, synthetic construct
  misc_feature 1..759: note = Description of Artificial Sequence: Synthetic coding sequence
  source 1..759: mol_type = other DNA
atgaggcacacctggcccttcagaaatgtgcccttcggctgctgcacccccatccaccctgtgtacaccagcagcagaggagaccacctgggctgctgggccctgcggcctgagtgcctgcgcatcgtgtcccgggccccctggaccagcacctctgtgggctttgtggccgtgggcccccagtgcctgcctgtgcggggctggcacagcagcaggcctgtgagagatgacagcgtggtggagaagagcctgaagagcctgaaggacaagaacaagaagctggaggagggcggccctgtgtacagccccccagctgaggtggtggtgaagaagagcctgggccagagggtgctggatgagctgaagcactactaccacggcttccggctgctgtggattgacaccaagattgctgccaggatgctgtggaggatcctgaatggccacagcctgacccggcgggagcggcggcagttcctgcgcatctgtgccgacctcttccggctggtgcccttcctggtgtttgtggtggtgcccttcatggagttcctgctgcctgtggccgtgaagctgttccccaacatgctgcccagcacctttgagacccagagcctgaaggaggagcggctgaagaaggagctgcgggtgaagctggagctggccaagttcctgcaggacaccatcgaggagatggccctgaagaacaaggccgccaagggcagcgccaccaaggacttctctgtgttcttccagaagtag

SEQ ID NO: 157567 - DNA, 4185 bp, synthetic construct
  misc_feature 1..4185: note = Description of Artificial Sequence: Synthetic coding sequence
  source 1..4185: mol_type = other DNA
atggccgccctgctgcggagcgcccgctggctgctgcgggccggggccgccccccggctgcccctgagcctgcggctgctgcccggcggccctggccgcctgcacgccgccagctacctgcctgctgcccgggccggccctgtggccggcggcctgctgagccctgcccggctgtatgccatcgccgccaaggagaaggacatccaggaggagagcaccttcagcagcaggaagatcagcaaccagtttgactgggccctgatgaggctggacctgtctgtgagaagaacaggccgcatccccaagaagctgctgcagaaggtgttcaatgacacctgccgcagcggcggcctgggcggcagccacgccctgctgctgctgcggagctgtggcagcctgctgcctgagctgaagctggaggagaggacagaatttgcccaccgcatctgggacaccctgcagaagctgggcgctgtgtatgatgtgagccactacaatgccctgctgaaggtgtacctgcagaatgagtacaagttcagccccacagacttcctggccaagatggaggaggccaacatccagcccaacagagtgacctaccagaggctcatcgccagctactgcaatgtgggggacattgaaggagccagcaagatcctgggcttcatgaagaccaaggacctgcctgtgacagaagctgtgttcagcgccctggtgacaggccacgcccgggccggggacatggagaatgctgagaacatcctgactgtgatgagagatgctggcatcgagcccggccctgacacctacctggccctgctgaatgcctatgcagagaagggggacatcgaccacgtgaagcagaccctggagaaggtggagaagtctgagctgcacctgatggaccgggacctgctgcagatcatcttctccttcagcaaggccggctacccccagtatgtgtctgagatcctggagaaggtgacctgtgagcggcgctacatcccagatgccatgaacctgatcctgctgctggtgacagagaagctggaggatgtggccctgcagatcctgctggcctgccctgtgtccaaggaggatggccccagcgtgtttggcagcttcttcctgcagcactgtgtgaccatgaacacccctgtggagaagctgacagactactgcaagaagctgaaggaggtgcagatgcacagcttccccctgcagttcaccctgcactgtgccctgctggccaacaagacagacctggccaaggccctgatgaaggctgtgaaggaggagggcttccccatccggccccactacttctggcccctgctggtgggccgcaggaaggagaagaatgtgcagggcatcatcgagatcctgaagggcatgcaggagctgggcgtgcacccagaccaggagacctacacagattatgtgatcccctgctttgattctgtgaacagcgcccgggccatcctgcaggagaatggctgcctgagtgacagcgacatgttcagccaggccggcctgcggtctgaggccgccaacggcaacctggactttgtgctgtccttcctgaagagcaacaccctgcccatcagcctgcagagcatccgcagcagcctgctgctgggcttcagaagatccatgaacatcaacctgtggagcgagatcacagagctgctgtacaaggatggccgctactgccaggagccccggggccccacagaggccgtgggctacttcctgtacaacctgattgacagcatgtctgattctgaggtgcaggccaaggaggagcacctgcggcagtacttccaccagctggagaagatgaatgtgaagatccctgagaacatctaccggggcatccggaacctgctggagagctaccacgtgcctgagctgatcaaggatgcccacctgctggtggagagcaagaacctggacttccagaagacagtgcagctgaccagcagcgagctggagagcaccctggagaccctgaaggccgagaaccagcccatcagagatgtgctgaagcagctgatcctggtgctgtgcagcgaggagaacatgcagaaggccctggagctgaaggccaagtatgaaagtgacatggtgactggaggctatgctgccctgatcaacctgtgctgcagacatgacaaggtggaggatgccctgaacctgaaggaggagtttgaccggctggacagcagcgctgtgctggacaccgggaagtatgtgggcctggtgcgggtgctggccaagcacggcaagctgcaggatgccatcaacatcctgaaggagatgaaggagaaggatgtgctgatcaaggacaccacagccctgtccttcttccacatgctgaatggagctgccctgcggggggagattgagaccgtgaagcagctgcacgaggccatcgtgaccctgggcctggccgagcccagcaccaacatctccttccccctggtgacagtgcacctggagaagggggacctgagcacagccctggaggtggccatcgactgctatgagaagtacaaggtgctgccccgcatccatgatgtgctgtgcaagctggtggagaagggggagacagacctgatccagaaggccatggactttgtgtcccaggagcagggcgagatggtgatgctgtatgacctcttctttgccttcctgcagacaggcaactacaaggaggccaagaagatcatcgagaccccaggcatccgggcccggagcgcccggctgcagtggttctgtgacagatgtgtggccaacaaccaggtggagaccctggagaagctggtggagctgacccagaagctgtttgaatgtgaccgggaccagatgtactacaacctgctgaagctgtacaagatcaacggggactggcagagagcagatgctgtgtggaacaagatccaggaggagaatgtcatcccccgggagaagaccctgcggctgctggccgagatcctgcgggagggcaaccaggaggtgccctttgatgtgcctgagctgtggtatgaagatgagaagcacagcctgaacagcagcagcgccagcaccacagagccagacttccagaaggacatcctgattgcctgccgcctgaaccagaagaagggggcctatgacatcttcctgaatgccaaggagcagaacatcgtgttcaatgctgagacctacagcaacctgatcaagctgctgatgtctgaggactacttcacccaggccatggaggtgaaggcctttgctgagacccacatcaagggcttcaccctgaatgatgctgccaacagccgcctcatcatcacccaggtgcggcgggactacctgaaggaggccgtgaccaccctgaagacagtgctggaccagcagcagacccccagccggctggccgtgaccagggtcatccaggccctggccatgaagggagatgtggagaacatcgaggtggtgcagaagatgctgaatggcctggaggacagcatcggcctgagcaagatggtgttcatcaacaacatcgccctggcccagatcaagaacaacaacattgatgctgccatcgagaacatcgagaacatgctgaccagcgagaacaaggtgattgagccccagtacttcggcctggcctacctgttcaggaaggtgattgaggagcagctggagcctgctgtggagaagatcagcatcatggccgagcggctggccaaccagtttgccatctacaagcctgtgacagacttcttcctgcagctggtggatgctgggaaggtggatgatgcccgggccctgctgcagagatgtggggccatcgccgagcagacccccatcctgctgctcttcctgctgaggaacagcaggaagcagggcaaggccagcacagtgaagtctgtgctggagctgatccctgagctgaatgagaaggaggaggcctacaacagcctgatgaagagctatgtgtctgagaaggatgtgaccagcgccaaggccctgtatgagcacctgacagccaagaacaccaagctggatgacctcttcctgaagagatatgccagcctgctgaagtatgctggggagcctgtgcccttcatcgagcccccagagagctttgagttctacgcccagcagctgaggaagctgcgggagaacagcagctag

SEQ ID NO: 157568 - DNA, 3264 bp, synthetic construct
  misc_feature 1..3264: note = Description of Artificial Sequence: Synthetic coding sequence
  source 1..3264: mol_type = other DNA
atgcccccacccatctgcccccccctggcccctggcccctggccaggcggcctgggcggcagccacgccctgctgctgctgcggagctgtggcagcctgctgcctgagctgaagctggaggagaggacagaatttgcccaccgcatctgggacaccctgcagaagctgggcgctgtgtatgatgtgagccactacaatgccctgctgaaggtgtacctgcagaatgagtacaagttcagccccacagacttcctggccaagatggaggaggccaacatccagcccaacagagtgacctaccagaggctcatcgccagctactgcaatgtgggggacattgaaggagccagcaagatcctgggcttcatgaagaccaaggacctgcctgtgacagaagctgtgttcagcgccctggtgacaggccacgcccgggccggggacatggagaatgctgagaacatcctgactgtgatgagagatgctggcatcgagcccggccctgacacctacctggccctgctgaatgcctatgcagagaagggggacatcgaccacgtgaagcagaccctggagaaggtggagaagtctgagctgcacctgatggaccgggacctgctgcagatcatcttctccttcagcaaggccggctacccccagtatgtgtctgagatcctggagaaggtgacctgtgagcggcgctacatcccagatgccatgaacctgatcctgctgctggtgacagagaagctggaggatgtggccctgcagatcctgctggcctgccctgtgtccaaggaggatggccccagcgtgtttggcagcttcttcctgcagcactgtgtgaccatgaacacccctgtggagaagctgacagactactgcaagaagctgaaggaggtgcagatgcacagcttccccctgcagttcaccctgcactgtgccctgctggccaacaagacagacctggccaaggccctgatgaaggctgtgaaggaggagggcttccccatccggccccactacttctggcccctgctggtgggccgcaggaaggagaagaatgtgcagggcatcatcgagatcctgaagggcatgcaggagctgggcgtgcacccagaccaggagacctacacagattatgtgatcccctgctttgattctgtgaacagcgcccgggccatcctgcaggagaatggctgcctgagtgacagcgacatgttcagccaggccggcctgcggtctgaggccgccaacggcaacctggactttgtgctgtccttcctgaagagcaacaccctgcccatcagcctgcagagcatccgcagcagcctgctgctgggcttcagaagatccatgaacatcaacctgtggagcgagatcacagagctgctgtacaaggatggccgctactgccaggagccccggggccccacagaggccgtgggctacttcctgtacaacctgattgacagcatgtctgattctgaggtgcaggccaaggaggagcacctgcggcagtacttccaccagctggagaagatgaatgtgaagatccctgagaacatctaccggggcatccggaacctgctggagagctaccacgtgcctgagctgatcaaggatgcccacctgctggtggagagcaagaacctggacttccagaagacagtgcagctgaccagcagcgagctggagagcaccctggagaccctgaaggccgagaaccagcccatcagagatgtgctgaagcagctgatcctggtgctgtgcagcgaggagaacatgcagaaggccctggagctgaaggccaagtatgaaagtgacatggtgactggaggctatgctgccctgatcaacctgtgctgcagacatgacaaggtggaggatgccctgaacctgaaggaggagtttgaccggctggacagcagcgctgtgctggacaccgggaagtatgtgggcctggtgcgggtgctggccaagcacggcaagctgcaggatgccatcaacatcctgaaggagatgaaggagaaggatgtgctgatcaaggacaccacagccctgtccttcttccacatgctgaatggagctgccctgcggggggagattgagaccgtgaagcagctgcacgaggccatcgtgaccctgggcctggccgagcccagcaccaacatctccttccccctggtgacagtgcacctggagaagggggacctgagcacagccctggaggtggccatcgactgctatgagaagtacaaggtgctgccccgcatccatgatgtgctgtgcaagctggtggagaagggggagacagacctgatccagaaggccatggactttgtgtcccaggagcagggcgagatggtgatgctgtatgacctcttctttgccttcctgcagacaggcaactacaaggaggccaagaagatcatcgagaccccaggcatccgggcccggagcgcccggctgcagtggttctgtgacagatgtgtggccaacaaccaggtggagaccctggagaagctggtggagctgacccagaagctgtttgaatgtgaccgggaccagatgtactacaacctgctgaagctgtacaagatcaacggggactggcagagagcagatgctgtgtggaacaagatccaggaggagaatgtcatcccccgggagaagaccctgcggctgctggccgagatcctgcgggagggcaaccaggaggtgccctttgatgtgcctgagctgtggtatgaagatgagaagcacagcctgaacagcagcagcgccagcaccacagagccagacttccagaaggacatcctgattgcctgccgcctgaaccagaagaagggggcctatgacatcttcctgaatgccaaggagcagaacatcgtgttcaatgctgagacctacagcaacctgatcaagctgctgatgtctgaggactacttcacccaggccatggaggtgaaggcctttgctgagacccacatcaagggcttcaccctgaatgatgctgccaacagccgcctcatcatcacccaggtgcggcgggactacctgaaggaggccgtgaccaccctgaagacagtgctggaccagcagcagacccccagccggctggccgtgaccagggtcatccaggccctggccatgaagggagatgtggagaacatcgaggtggtgcagaagatgctgaatggcctggaggacagcatcggcctgagcaagatggtgttcatcaacaacatcgccctggcccagtag

SEQ ID NO: 157569 - DNA, 2856 bp, synthetic construct
  misc_feature 1..2856: note = Description of Artificial Sequence: Synthetic coding sequence
  source 1..2856: mol_type = other DNA
atgcctggccccctgggcctgctgtgcttcctggccctgggcctgctgggcagcgctggccccagcggggccgccccacccctgtgtgccgccccctgcagctgtgatggagacagaagagtggactgcagcggcaagggcctgacagctgtgcctgagggcctgagcgccttcacccaggccctggacatctccatgaacaacatcacccagctgcctgaagatgccttcaagaacttccccttcctggaggagctgcagctggccggaaatgacctgtccttcatccaccccaaggccctgagcggcctgaaggagctgaaggtgctgaccctgcagaacaaccagctgaagacagtgcccagcgaggccatccggggcctgagcgccctgcagagcctgcggctggatgccaaccacatcacctctgtgcctgaggacagctttgagggcctggtgcagctgcggcacctgtggctggatgacaacagcctgacagaggtgcctgtgcaccccctgagcaacctgcccaccctgcaggccctgaccctggccctgaacaagatcagcagcatcccagactttgccttcaccaacctgagcagcctggtggtgctgcacctgcacaacaacaagatccgcagcctgagccagcactgctttgatggcctggacaacctggagaccctggacctgaactacaacaacctgggggagttcccccaggccatcaaggccctgcccagcctgaaggagctgggcttccacagcaacagcatcagcgtcatcccagatggagcctttgatggcaaccccctgctgcggaccatccacctgtatgacaaccccctgagctttgtgggcaacagcgccttccacaacctgagtgacctgcacagcctggtgatccggggggcctccatggtgcagcagttccccaacctgaccggcaccgtgcacctggagagcctgaccctgaccggcaccaagatcagcagcatccccaacaacctgtgccaggagcagaagatgctgcggaccctggacctgagctacaacaacatccgggacctgcccagcttcaacggctgccacgccctggaggagatcagcctgcagaggaaccagatctaccagatcaaggagggcaccttccagggcctcatcagcctgcgcatcctggacctgagcaggaacctgatccacgagatccacagccgggcctttgccaccctgggccccatcaccaacctggatgtgtccttcaatgagctgaccagcttccccacagagggcctgaatggcctgaaccagctgaagctggtgggcaacttcaagctgaaggaggccctggccgccaaggactttgtgaacctgcggagcctgtctgtgccctatgcctaccagtgctgtgccttctggggctgtgacagctatgccaacctgaacacagaggacaacagcctgcaggaccacagcgtggcccaggagaagggcacagcagatgctgccaacgtgaccagcaccctggagaatgaggagcacagccagatcatcatccactgcacccccagcactggagccttcaagccctgtgagtacctgctgggctcctggatgatccggctgactgtgtggttcatcttcctggtggccctcttcttcaacctgctggtgatcctgaccacctttgccagctgcaccagcctgcccagcagcaagctgttcatcggcctcatctctgtgagcaacctcttcatgggcatctacacaggcatcctgaccttcctggatgctgtgtcctggggccgctttgctgagtttggcatctggtgggagaccggcagcggctgcaaggtggccggcttcctggccgtgttcagcagcgagagcgccatcttcctgctgatgctggccaccgtggagaggagcctgagcgccaaggacatcatgaagaatggcaagagcaaccacctgaagcagttccgggtggccgccctgctggccttcctgggcgccaccgtggccggctgcttccccctcttccacagaggagagtacagcgccagccccctgtgcctgcccttccccaccggggagacccccagcctgggcttcaccgtgaccctggtgctgctgaacagcctggccttcctgctgatggccgtcatctacaccaagctgtactgcaacctggagaaggaggacctgtctgagaacagccagagctccatgatcaagcacgtggcctggctgatcttcaccaactgcatcttcttctgccctgtggccttcttctcctttgcccccctcatcacagccatcagcatcagccctgagatcatgaagtctgtgaccctcatcttcttccccctgcctgcctgcctgaaccctgtgctgtatgtgttcttcaaccccaagttcaaggaggactggaagctgctgaagagaagagtgaccaagaagagcggctctgtgtctgtgtccatcagcagccagggcggctgcctggagcaggacttctactatgactgtggcatgtacagccacctgcagggcaacctgactgtgtgtgactgctgtgagagcttcctgctgaccaagcctgtgtcctgcaagcacctgatcaagagccacagctgcccagccctggccgtggccagctgccagaggcctgagggctactggagcgactgtggcacccagagcgcccacagcgactatgcagatgaggaggacagctttgtgtctgacagcagtgaccaggtgcaggcctgtggccgggcctgcttctaccagagccggggcttccccctggtgcgctatgcctacaacctgccccgggtgaaggactag

SEQ ID NO: 157570 - DNA, 2724 bp, synthetic construct
  misc_feature 1..2724: note = Description of Artificial Sequence: Synthetic coding sequence
  source 1..2724: mol_type = other DNA
atggacaccagccggctgggcgtgctgctgagcctgcctgtgctgctgcagctggccaccggcggcagcagccccaggtctggagtgctgctgcggggctgccccacccactgccactgtgagccagatggccgcatgctgctgcgggtggactgcagcgacctgggcctgtctgagctgcccagcaacctgtctgtgttcaccagctacctggacctgtccatgaacaacatcagccagctgctgcccaaccccctgcccagcctgcgcttcctggaggagctgcggctggccggaaatgccctgacctacatccccaagggggccttcaccggcctgtacagcctgaaggtgctgatgctgcagaacaaccagctgcggcacgtgcccacagaggccctgcagaacctgcggagcctgcagagcctgcggctggatgccaaccacatctcctatgtgccccccagctgcttcagcggcctgcacagcctgcggcacctgtggctggatgacaatgccctgacagagatccctgtgcaggccttccgcagcctgagcgccctgcaggccatgaccctggccctgaacaagatccaccacatcccagactatgccttcggcaacctgagcagcctggtggtgctgcacctgcacaacaaccgcatccacagcctgggcaagaagtgctttgatggcctgcacagcctggagaccctggacctgaactacaacaacctggatgagttccccacagccatccgcaccctgagcaacctgaaggagctgggcttccacagcaacaacatccgcagcatccctgagaaggcctttgtgggcaaccccagcctcatcaccatccacttctatgacaaccccatccagtttgtgggccgcagcgccttccagcacctgcctgagctgcggaccctgaccctgaatggagccagccagatcacagagttcccagacctgactggaacagccaacctggagagcctgaccctgaccggggcccagatcagcagcctgccccagacagtgtgcaaccagctgcccaacctgcaggtgctggacctgagctacaacctgctggaggacctgcccagcttctctgtgtgccagaagctgcagaagattgacctgcggcacaatgagatctatgagatcaaggtggacaccttccagcagctgctgagcctgcggagcctgaacctggcctggaacaagatcgccatcatccaccccaatgccttcagcaccctgcccagcctcatcaagctggacctgagcagcaacctgctgagcagcttccccatcaccggcctgcacggcctgacccacctgaagctgactggaaaccacgccctgcagagcctcatcagcagcgagaacttccctgagctgaaggtgattgagatgccctatgcctaccagtgctgtgccttcggcgtgtgtgaaaatgcctacaagatcagcaaccagtggaacaagggggacaacagctccatggatgacctgcacaagaaggatgctggcatgttccaggcccaggatgagcgggacctggaggacttcctgctggactttgaggaggacctgaaggccctgcacagcgtgcagtgcagccccagccctggccccttcaagccctgtgagcacctgctggatggctggctgatccgcatcggcgtgtggaccatcgctgtgctggccctgacctgcaatgccctggtgaccagcacagtgttccgcagccccctgtacatcagccccatcaagctgctgattggagtgattgctgctgtgaacatgctgactggagtgagcagcgctgtgctggccggcgtggatgccttcaccttcggcagctttgcccggcatggagcctggtgggagaatggagtgggctgccacgtgattggcttcctgagcatctttgccagcgagagctctgtgttcctgctgaccctggccgccctggagcggggcttctctgtgaagtacagcgccaagtttgagaccaaggcccccttcagcagcctgaaggtgatcatcctgctgtgtgccctgctggccctgaccatggctgctgtgcccctgctgggcggcagcaagtacggggccagccccctgtgcctgcccctgccctttggagagcccagcaccatgggctacatggtggccctgatcctgctgaacagcctgtgcttcctgatgatgaccatcgcctacaccaagctgtactgcaacctggacaagggggacctggagaacatctgggactgcagcatggtgaagcacatcgccctgctgctcttcaccaactgcatcctgaactgccctgtggccttcctgtccttcagcagcctcatcaacctgaccttcatcagccctgaggtgatcaagttcatcctgctggtggtggtgcccctgcctgcctgcctgaaccccctgctgtacatcctcttcaacccccacttcaaggaggacctggtgtccctgaggaagcagacctacgtgtggaccaggagcaagcaccccagcctgatgagcatcaacagtgatgatgtggagaagcagagctgtgacagcacccaggccctggtgaccttcaccagcagcagcatcacctatgacctgccccccagctctgtgcccagccctgcctaccctgtgacagagagctgccacctgagctctgtggcctttgtgccctgcctgtag

SEQ ID NO: 157571 - DNA, 2334 bp, synthetic construct
  misc_feature 1..2334: note = Description of Artificial Sequence: Synthetic coding sequence
  source 1..2334: mol_type = other DNA
atggacaccagccggctgggcgtgctgctgagcctgcctgtgctgctgcagctggccaccggcggcagcagccccaggtctggagtgctgctgcggggctgccccacccactgccactgtgagccagatggccgcatgctgctgcgggtggactgcagcgacctgggcctgtctgagctgcccagcaacctgtctgtgttcaccagctacctggacctgtccatgaacaacatcagccagctgctgcccaaccccctgcccagcctgcgcttcctggaggagctgcggctggccggaaatgccctgacctacatccccaagggggccttcaccggcctgtacagcctgaaggtgctgatgctgcagaacaaccagctgcggcacgtgcccacagaggccctgcagaacctgcggagcctgcagagcctgcggctggatgccaaccacatctcctatgtgccccccagctgcttcagcggcctgcacagcctgcggcacctgtggctggatgacaatgccctgacagagatccctgtgcaggccttccgcagcctgagcgccctgcaggccatgaccctggccctgaacaagatccaccacatcccagactatgccttcggcaacctgagcagcctggtggtgctgcacctgcacaacaaccgcatccacagcctgggcaagaagtgctttgatggcctgcacagcctggagaccctggacctgaactacaacaacctggatgagttccccacagccatccgcaccctgagcaacctgaaggagctgggcttccacagcaacaacatccgcagcatccctgagaaggcctttgtgggcaaccccagcctcatcaccatccacttctatgacaaccccatccagtttgtgggccgcagcgccttccagcacctgcctgagctgcggaccctgaccctgaatggagccagccagatcacagagttcccagacctgactggaacagccaacctggagagcctgaccctgaccggggcccagatcagcagcctgccccagacagtgtgcaaccagctgcccaacctgcaggtgctggacctgagctacaacctgctggaggacctgcccagcttctctgtgtgccagaagctgcagaagattgacctgcggcacaatgagatctatgagatcaaggtggacaccttccagcagctgctgagcctgcggagcctgaacctggcctggaacaagatcgccatcatccaccccaatgccttcagcaccctgcccagcctcatcaagctggacctgagcagcaacctgctgagcagcttccccatcaccggcctgcacggcctgacccacctgaagctgactggaaaccacgccctgcagagcctcatcagcagcgagaacttccctgagctgaaggtgattgagatgccctatgcctaccagtgctgtgccttcggcgtgtgtgaaaatgcctacaagatcagcaaccagtggaacaagggggacaacagctccatggatgacctgcacaagaaggatgctggcatgttccaggcccaggatgagcgggacctggaggacttcctgctggactttgaggaggacctgaaggccctgcacagcgtgcagtgcagccccagccctggccccttcaagccctgtgagcacctgctggatggctggctgatccgcatcggcgtgtggaccatcgctgtgctggccctgacctgcaatgccctggtgaccagcacagtgttccgcagccccctgtacatcagccccatcaagctgctgattggagtgattgctgctgtgaacatgctgactggagtgagcagcgctgtgctggccggcgtggatgccttcaccttcggcagctttgcccggcatggagcctggtgggagaatggagtgggctgccacgtgattggcttcctgagcatctttgccagcgagagctctgtgttcctgctgaccctggccgccctggagcggggcttctctgtgaagtacagcgccaagtttgagaccaaggcccccttcagcagcctgaaggtgatcatcctgctgtgtgccctgctggccctgaccatggctgctgtgcccctgctgggcggcagcaagtacggggccagccccctgtgcctgcccctgctgccccatgatgaccactgcctgcaccaggccctgctgcagtttggccagggccggcctggagagtacctgggcctgctgtatggcaagacccactgccctgtggccctgcaccagctgcaccccaagctgccctgtggcttcctggtgctgctgctcttcaacaagccctacatctaccagagctag

SEQ ID NO: 157572 - DNA, 2508 bp, synthetic construct
  misc_feature 1..2508: note = Description of Artificial Sequence: Synthetic coding sequence
  source 1..2508: mol_type = other DNA
atggacaccagccggctgggcgtgctgctgagcctgcctgtgctgctgcagctggccaccggcggcagcagccccaggtctggagtgctgctgcggggctgccccacccactgccactgtgagccagatggccgcatgctgctgcgggtggactgcagcgacctgggcctgtctgagctgcccagcaacctgtctgtgttcaccagctacctggacctgtccatgaacaacatcagccagctgctgcccaaccccctgcccagcctgcgcttcctggaggagctgcggctggccggaaatgccctgacctacatccccaagggggccttcaccggcctgtacagcctgaaggtgctgatgctgcagaacaaccagctgcggcacgtgcccacagaggccctgcagaacctgcggagcctgcagagcctgcacctgcacaacaaccgcatccacagcctgggcaagaagtgctttgatggcctgcacagcctggagaccctggacctgaactacaacaacctggatgagttccccacagccatccgcaccctgagcaacctgaaggagctgggcttccacagcaacaacatccgcagcatccctgagaaggcctttgtgggcaaccccagcctcatcaccatccacttctatgacaaccccatccagtttgtgggccgcagcgccttccagcacctgcctgagctgcggaccctgaccctgaatggagccagccagatcacagagttcccagacctgactggaacagccaacctggagagcctgaccctgaccggggcccagatcagcagcctgccccagacagtgtgcaaccagctgcccaacctgcaggtgctggacctgagctacaacctgctggaggacctgcccagcttctctgtgtgccagaagctgcagaagattgacctgcggcacaatgagatctatgagatcaaggtggacaccttccagcagctgctgagcctgcggagcctgaacctggcctggaacaagatcgccatcatccaccccaatgccttcagcaccctgcccagcctcatcaagctggacctgagcagcaacctgctgagcagcttccccatcaccggcctgcacggcctgacccacctgaagctgactggaaaccacgccctgcagagcctcatcagcagcgagaacttccctgagctgaaggtgattgagatgccctatgcctaccagtgctgtgccttcggcgtgtgtgaaaatgcctacaagatcagcaaccagtggaacaagggggacaacagctccatggatgacctgcacaagaaggatgctggcatgttccaggcccaggatgagcgggacctggaggacttcctgctggactttgaggaggacctgaaggccctgcacagcgtgcagtgcagccccagccctggccccttcaagccctgtgagcacctgctggatggctggctgatccgcatcggcgtgtggaccatcgctgtgctggccctgacctgcaatgccctggtgaccagcacagtgttccgcagccccctgtacatcagccccatcaagctgctgattggagtgattgctgctgtgaacatgctgactggagtgagcagcgctgtgctggccggcgtggatgccttcaccttcggcagctttgcccggcatggagcctggtgggagaatggagtgggctgccacgtgattggcttcctgagcatctttgccagcgagagctctgtgttcctgctgaccctggccgccctggagcggggcttctctgtgaagtacagcgccaagtttgagaccaaggcccccttcagcagcctgaaggtgatcatcctgctgtgtgccctgctggccctgaccatggctgctgtgcccctgctgggcggcagcaagtacggggccagccccctgtgcctgcccctgccctttggagagcccagcaccatgggctacatggtggccctgatcctgctgaacagcctgtgcttcctgatgatgaccatcgcctacaccaagctgtactgcaacctggacaagggggacctggagaacatctgggactgcagcatggtgaagcacatcgccctgctgctcttcaccaactgcatcctgaactgccctgtggccttcctgtccttcagcagcctcatcaacctgaccttcatcagccctgaggtgatcaagttcatcctgctggtggtggtgcccctgcctgcctgcctgaaccccctgctgtacatcctcttcaacccccacttcaaggaggacctggtgtccctgaggaagcagacctacgtgtggaccaggagcaagcaccccagcctgatgagcatcaacagtgatgatgtggagaagcagagctgtgacagcacccaggccctggtgaccttcaccagcagcagcatcacctatgacctgccccccagctctgtgcccagccctgcctaccctgtgacagagagctgccacctgagctctgtggcctttgtgccctgcctgtag

SEQ ID NO: 157573 - DNA, 2652 bp, synthetic construct
  misc_feature 1..2652: note = Description of Artificial Sequence: Synthetic coding sequence
  source 1..2652: mol_type = other DNA
atggacaccagccggctgggcgtgctgctgagcctgcctgtgctgctgcagctggccaccggcggcagcagccccaggtctggagtgctgctgcggggctgccccacccactgccactgtgagccagatggccgcatgctgctgcgggtggactgcagcgacctgggcctgtctgagctgcccagcaacctgtctgtgttcaccagctacctggacctgtccatgaacaacatcagccagctgctgcccaaccccctgcccagcctgcgcttcctggaggagctgcggctggccggaaatgccctgacctacatccccaagggggccttcaccggcctgtacagcctgaaggtgctgatgctgcagaacaaccagctgcggcacgtgcccacagaggccctgcagaacctgcggagcctgcagagcctgcggctggatgccaaccacatctcctatgtgccccccagctgcttcagcggcctgcacagcctgcggcacctgtggctggatgacaatgccctgacagagatccctgtgcaggccttccgcagcctgagcgccctgcaggccatgaccctggccctgaacaagatccaccacatcccagactatgccttcggcaacctgagcagcctggtggtgctgcacctgcacaacaaccgcatccacagcctgggcaagaagtgctttgatggcctgcacagcctggagaccctggacctgaactacaacaacctggatgagttccccacagccatccgcaccctgagcaacctgaaggagctgcacttctatgacaaccccatccagtttgtgggccgcagcgccttccagcacctgcctgagctgcggaccctgaccctgaatggagccagccagatcacagagttcccagacctgactggaacagccaacctggagagcctgaccctgaccggggcccagatcagcagcctgccccagacagtgtgcaaccagctgcccaacctgcaggtgctggacctgagctacaacctgctggaggacctgcccagcttctctgtgtgccagaagctgcagaagattgacctgcggcacaatgagatctatgagatcaaggtggacaccttccagcagctgctgagcctgcggagcctgaacctggcctggaacaagatcgccatcatccaccccaatgccttcagcaccctgcccagcctcatcaagctggacctgagcagcaacctgctgagcagcttccccatcaccggcctgcacggcctgacccacctgaagctgactggaaaccacgccctgcagagcctcatcagcagcgagaacttccctgagctgaaggtgattgagatgccctatgcctaccagtgctgtgccttcggcgtgtgtgaaaatgcctacaagatcagcaaccagtggaacaagggggacaacagctccatggatgacctgcacaagaaggatgctggcatgttccaggcccaggatgagcgggacctggaggacttcctgctggactttgaggaggacctgaaggccctgcacagcgtgcagtgcagccccagccctggccccttcaagccctgtgagcacctgctggatggctggctgatccgcatcggcgtgtggaccatcgctgtgctggccctgacctgcaatgccctggtgaccagcacagtgttccgcagccccctgtacatcagccccatcaagctgctgattggagtgattgctgctgtgaacatgctgactggagtgagcagcgctgtgctggccggcgtggatgccttcaccttcggcagctttgcccggcatggagcctggtgggagaatggagtgggctgccacgtgattggcttcctgagcatctttgccagcgagagctctgtgttcctgctgaccctggccgccctggagcggggcttctctgtgaagtacagcgccaagtttgagaccaaggcccccttcagcagcctgaaggtgatcatcctgctgtgtgccctgctggccctgaccatggctgctgtgcccctgctgggcggcagcaagtacggggccagccccctgtgcctgcccctgccctttggagagcccagcaccatgggctacatggtggccctgatcctgctgaacagcctgtgcttcctgatgatgaccatcgcctacaccaagctgtactgcaacctggacaagggggacctggagaacatctgggactgcagcatggtgaagcacatcgccctgctgctcttcaccaactgcatcctgaactgccctgtggccttcctgtccttcagcagcctcatcaacctgaccttcatcagccctgaggtgatcaagttcatcctgctggtggtggtgcccctgcctgcctgcctgaaccccctgctgtacatcctcttcaacccccacttcaaggaggacctggtgtccctgaggaagcagacctacgtgtggaccaggagcaagcaccccagcctgatgagcatcaacagtgatgatgtggagaagcagagctgtgacagcacccaggccctggtgaccttcaccagcagcagcatcacctatgacctgccccccagctctgtgcccagccctgcctaccctgtgacagagagctgccacctgagctctgtggcctttgtgccctgcctgtag

SEQ ID NO: 157574 - DNA, 2748 bp, synthetic construct
  misc_feature 1..2748: note = Description of Artificial Sequence: Synthetic coding sequence
  source 1..2748: mol_type = other DNA
atgggccggccccggctgaccctggtgtgccaggtgtccatcatcatcagcgcccgggacctgtccatgaacaacctgacagagctgcagcccggcctcttccaccacctgcgcttcctggaggagctgcggctgagcggcaaccacctgagccacatccctggccaggccttcagcggcctgtacagcctgaagatcctgatgctgcagaacaaccagctgggcggcatcccagctgaggccctgtgggagctgcccagcctgcagagcctgcggctggatgccaacctgatcagcctggtgcctgagaggagctttgagggcctgagcagcctgcggcacctgtggctggatgacaatgccctgacagagatccctgtgcgggccctgaacaacctgcctgccctgcaggccatgaccctggccctgaaccgcatcagccacatcccagactatgccttccagaacctgaccagcctggtggtgctgcacctgcacaacaaccgcatccagcacctgggcacccacagctttgagggcctgcacaacctggagaccctggacctgaactacaacaagctgcaggagttccctgtggccatccgcaccctgggccgcctgcaggagctgggcttccacaacaacaacatcaaggccatccctgagaaggccttcatgggcaaccccctgctgcagaccatccacttctatgacaaccccatccagtttgtgggccgcagcgccttccagtacctgcccaagctgcacaccctgagcctgaatggagccatggacatccaggagttcccagacctgaagggcaccaccagcctggagatcctgaccctgacccgggccggcatccggctgctgcccagcggcatgtgccagcagctgccccggctgcgggtgctggagctgagccacaaccagatcgaggagctgcccagcctgcaccgctgccagaagctggaggagatcggcctgcagcacaaccgcatctgggagattggagctgacaccttcagccagctgagcagcctgcaggccctggacctgtcctggaatgccatccgcagcatccaccctgaggccttcagcaccctgcacagcctggtgaagctggacctgacagacaaccagctgaccaccctgcccctggccggcctgggcggcctgatgcacctgaagctgaagggcaacctggccctgagccaggccttcagcaaggacagcttccccaagctgcgcatcctggaggtgccctatgcctaccagtgctgcccctacggcatgtgtgccagcttcttcaaggccagcggccagtgggaggccgaggacctgcacctggatgatgaggagagcagcaagaggcccctgggcctgctggcccggcaggccgagaaccactatgaccaggacctggatgagctgcagctggagatggaggacagcaagccccaccccagcgtgcagtgcagccccaccccaggccccttcaagccctgtgagtacctgtttgagagctggggcatccggctggccgtgtgggccatcgtgctgctgtctgtgctgtgcaatggcctggtgctgctgactgtgtttgctgggggccctgtgcccctgccccctgtgaagtttgtggtgggcgccatcgccggggccaacaccctgaccggcatcagctgtggcctgctggcctctgtggatgccctgaccttcggccagttctctgaatatggagcccgctgggagaccggcctgggctgccgggccaccggcttcctggccgtgctgggcagcgaggcctctgtgctgctgctgaccctggccgctgtgcagtgcagcgtgtctgtgtcctgtgtgcgggcctacggcaagagccccagcctgggctctgtgcgggccggcgtgctgggctgcctggccctggccggcctggccgccgccctgcccctggcctctgtgggggagtatggagccagccccctgtgcctgccctatgcccctcctgagggccagcctgctgccctgggcttcaccgtggccctggtgatgatgaacagcttctgcttcctggtggtggccggggcctacatcaagctgtactgtgacctgcccaggggggactttgaagctgtgtgggactgtgccatggtgcgccacgtggcctggctgatctttgctgatggcctgctgtactgccctgtggccttcctgagctttgcctccatgctgggcctcttccctgtgaccccagaggccgtgaagtctgtgctgctggtggtgctgcccctgcctgcctgcctgaaccccctgctgtacctgctcttcaacccccacttcagagatgacctgcggcggctgcggcccagggctggggacagcggccccctggcctatgctgctgctggggagctggagaagagcagctgtgacagcacccaggccctggtggccttcagtgatgtggacctgatcctggaggccagcgaggccggccggcccccaggcctggagacctacggcttccccagcgtgaccctcatcagctgccagcagcccggggccccccggctggagggcagccactgtgtggagcctgagggcaaccactttggaaacccccagcccagcatggatggagagctgctgctgcgggcagagggcagcaccccagctgggggcggcctgagcggcggcggcggcttccagcccagcggcctggcctttgccagccacgtgtag

SEQ ID NO: 157575 - DNA, 699 bp, synthetic construct
  misc_feature 1..699: note = Description of Artificial Sequence: Synthetic coding sequence
  source 1..699: mol_type = other DNA
atgaacaacctgacagagctgcagcccggcctcttccaccacctgcgcttcctggaggagctgcggctgagcggcaaccacctgagccacatccctggccaggccttcagcggcctgtacagcctgaagatcctgatgctgcagaacaaccagctgggcggcatcccagctgaggccctgtgggagctgcccagcctgcagagcctgcggctggatgccaacctgatcagcctggtgcctgagaggagctttgagggcctgagcagcctgcggcacctgtggctggatgacaatgccctgacagagatccctgtgcgggccctgaacaacctgcctgccctgcaggccatgaccctggccctgaaccgcatcagccacatcccagactatgccttccagaacctgaccagcctggtggtgctggacctgaactacaacaagctgcaggagttccctgtggccatccgcaccctgggccgcctgcaggagctgagcctgaatggagccatggacatccaggagttcccagacctgaagggcaccaccagcctggagatcctgaccctgacccgggccggcatccggctgctgcccagcggcatgtgccagcagctgccccggctgcgggtgctggagctgagccacaaccagatcgaggagctgcccagcctgcaccgctgccagaagctggaggagtag

SEQ ID NO: 157576 - DNA, 2904 bp, synthetic construct
  misc_feature 1..2904: note = Description of Artificial Sequence: Synthetic coding sequence
  source 1..2904: mol_type = other DNA
atgcccagccccccaggcctgcgggccctgtggctgtgtgccgccctgtgtgccagccggcgggccggcggggccccccagcccggccctggccccacagcctgcccagccccctgccactgccaggaggatggcatcatgctgtctgctgactgcagcgagctgggcctgtctgctgtgcctggggacctggaccccctgacagcctacctggacctgtccatgaacaacctgacagagctgcagcccggcctcttccaccacctgcgcttcctggaggagctgcggctgagcggcaaccacctgagccacatccctggccaggccttcagcggcctgtacagcctgaagatcctgatgctgcagaacaaccagctgggcggcatcccagctgaggccctgtgggagctgcccagcctgcagagcctgcggctggatgccaacctgatcagcctggtgcctgagaggagctttgagggcctgagcagcctgcggcacctgtggctggatgacaatgccctgacagagatccctgtgcgggccctgaacaacctgcctgccctgcaggccatgaccctggccctgaaccgcatcagccacatcccagactatgccttccagaacctgaccagcctggtggtgctgcacctgcacaacaaccgcatccagcacctgggcacccacagctttgagggcctgcacaacctggagaccctggacctgaactacaacaagctgcaggagttccctgtggccatccgcaccctgggccgcctgcaggagctgggcttccacaacaacaacatcaaggccatccctgagaaggccttcatgggcaaccccctgctgcagaccatccacttctatgacaaccccatccagtttgtgggccgcagcgccttccagtacctgcccaagctgcacaccctgagcctgaatggagccatggacatccaggagttcccagacctgaagggcaccaccagcctggagatcctgaccctgacccgggccggcatccggctgctgcccagcggcatgtgccagcagctgccccggctgcgggtgctggagctgagccacaaccagatcgaggagctgcccagcctgcaccgctgccagaagctggaggagatcggcctgcagcacaaccgcatctgggagattggagctgacaccttcagccagctgagcagcctgcaggccctggacctgtcctggaatgccatccgcagcatccaccctgaggccttcagcaccctgcacagcctggtgaagctggacctgacagacaaccagctgaccaccctgcccctggccggcctgggcggcctgatgcacctgaagctgaagggcaacctggccctgagccaggccttcagcaaggacagcttccccaagctgcgcatcctggaggtgccctatgcctaccagtgctgcccctacggcatgtgtgccagcttcttcaaggccagcggccagtgggaggccgaggacctgcacctggatgatgaggagagcagcaagaggcccctgggcctgctggcccggcaggccgagaaccactatgaccaggacctggatgagctgcagctggagatggaggacagcaagccccaccccagcgtgcagtgcagccccaccccaggccccttcaagccctgtgagtacctgtttgagagctggggcatccggctggccgtgtgggccatcgtgctgctgtctgtgctgtgcaatggcctggtgctgctgactgtgtttgctgggggccctgtgcccctgccccctgtgaagtttgtggtgggcgccatcgccggggccaacaccctgaccggcatcagctgtggcctgctggcctctgtggatgccctgaccttcggccagttctctgaatatggagcccgctgggagaccggcctgggctgccgggccaccggcttcctggccgtgctgggcagcgaggcctctgtgctgctgctgaccctggccgctgtgcagtgcagcgtgtctgtgtcctgtgtgcgggcctacggcaagagccccagcctgggctctgtgcgggccggcgtgctgggctgcctggccctggccggcctggccgccgccctgcccctggcctctgtgggggagtatggagccagccccctgtgcctgccctatgcccctcctgagggccagcctgctgccctgggcttcaccgtggccctggtgatgatgaacagcttctgcttcctggtggtggccggggcctacatcaagctgtactgtgacctgcccaggggggactttgaagctgtgtgggactgtgccatggtgcgccacgtggcctggctgatctttgctgatggcctgctgtactgccctgtggccttcctgagctttgcctccatgctgggcctcttccctgtgaccccagaggccgtgaagtctgtgctgctggtggtgctgcccctgcctgcctgcctgaaccccctgctgtacctgctcttcaacccccacttcagagatgacctgcggcggctgcggcccagggctggggacagcggccccctggcctatgctgctgctggggagctggagaagagcagctgtgacagcacccaggccctggtggccttcagtgatgtggacctgatcctggaggccagcgaggccggccggcccccaggcctggagacctacggcttccccagcgtgaccctcatcagctgccagcagcccggggccccccggctggagggcagccactgtgtggagcctgagggcaaccactttggaaacccccagcccagcatggatggagagctgctgctgcgggcagagggcagcaccccagctgggggcggcctgagcggcggcggcggcttccagcccagcggcctggcctttgccagccacgtgtag

SEQ ID NO: 157577 - DNA, 228 bp, synthetic construct
  misc_feature 1..228: note = Description of Artificial Sequence: Synthetic coding sequence
  source 1..228: mol_type = other DNA
atgctgtctgctgactgcagcgagctgggcctgtctgctgtgcctggggacctggaccccctgacagcctacctggccgtgcccggcatggtggccgagggcaaggctgacagaactggaggcggcggcagcagcaggcctgagaagaccaggaggagcctggaggaggccatcgacaggaccatcggcggggcccaggagctgtgggcccctgaggtgagcagctag

SEQ ID NO: 157578 - DNA, 2487 bp, synthetic construct
  misc_feature 1..2487: note = Description of Artificial Sequence: Synthetic coding sequence
  source 1..2487: mol_type = other DNA
atgaggctggagggggagggccgcagcgcccgggccggccagaacctgagcagagctggcagcgccaggagaggagccccccgggacctgtccatgaacaacctgacagagctgcagcccggcctcttccaccacctgcgcttcctggaggagctgcggctgagcggcaaccacctgagccacatccctggccaggccttcagcggcctgtacagcctgaagatcctgatgctgcagaacaaccagctgggcggcatcccagctgaggccctgtgggagctgcccagcctgcagagcctggacctgaactacaacaagctgcaggagttccctgtggccatccgcaccctgggccgcctgcaggagctgggcttccacaacaacaacatcaaggccatccctgagaaggccttcatgggcaaccccctgctgcagaccatccacttctatgacaaccccatccagtttgtgggccgcagcgccttccagtacctgcccaagctgcacaccctgagcctgaatggagccatggacatccaggagttcccagacctgaagggcaccaccagcctggagatcctgaccctgaccagggctggcatccggctgctgcccagcggcatgtgccagcagctgccccggctgcgggtgctggagctgagccacaaccagatcgaggagctgcccagcctgcaccgctgccagaagctggaggagatcggcctgcagcacaaccgcatctgggagatcggggctgacaccttcagccagctgagcagcctgcaggccctggacctgtcctggaatgccatccgcagcatccaccctgaggccttcagcaccctgcacagcctggtgaagctggacctgacagacaaccagctgaccaccctgcccctggccggcctgggcggcctgatgcacctgaagctgaagggcaacctggccctgagccaggccttcagcaaggacagcttccccaagctgcgcatcctggaggtgccctatgcctaccagtgctgcccctacggcatgtgtgccagcttcttcaaggccagcggccagtgggaggccgaggacctgcacctggatgatgaggagagcagcaagaggcccctgggcctgctggcccggcaggccgagaaccactatgaccaggacctggatgagctgcagctggagatggaggacagcaagccccaccccagcgtgcagtgcagccccaccccaggccccttcaagccctgtgagtacctgtttgagagctggggcatccggctggccgtgtgggccatcgtgctgctgtctgtgctgtgcaatggcctggtgctgctgactgtgtttgctgggggccctgtgcccctgccccctgtgaagtttgtggtgggcgccatcgccggggccaacaccctgaccggcatcagctgtggcctgctggcctctgtggatgccctgaccttcggccagttctctgaatatggagcccgctgggagaccggcctgggctgccgggccaccggcttcctggccgtgctgggcagcgaggcctctgtgctgctgctgaccctggccgctgtgcagtgcagcgtgtctgtgtcctgtgtgcgggcctacggcaagagccccagcctgggctctgtgcgggccggcgtgctgggctgcctggccctggccggcctggccgccgccctgcccctggcctctgtgggggagtatggagccagccccctgtgcctgccctatgcccctcctgagggccagcctgctgccctgggcttcaccgtggccctggtgatgatgaacagcttctgcttcctggtggtggccggggcctacatcaagctgtactgtgacctgcccaggggggactttgaggccgtgtgggactgtgccatggtgagacatgtggcctggctgatctttgctgatggcctgctgtactgccctgtggccttcctgagctttgcctccatgctgggcctcttccctgtgaccccagaggccgtgaagtctgtgctgctggtggtgctgcccctgcctgcctgcctgaaccccctgctgtacctgctcttcaacccccacttcagagatgacctgcggcggctgcggccccgggccggggacagcggccccctggcctatgctgctgctggggagctggagaagagcagctgtgacagcacccaggccctggtggccttcagtgatgtggacctgatcctggaggccagcgaggccggccggcccccaggcctggagacctacggcttccccagcgtgaccctcatcagctgccagcagcccggggccccccggctggagggcagccactgtgtggagcctgagggcaaccacttcggcaacccccagcccagcatggatggagagctgctgctgcgggcagagggcagcaccccagctgggggcggcctgagcggcggcggcggcttccagcccagcggcctggcctttgccagccacgtgtag

SEQ ID NO: 157579 - DNA, 6039 bp, synthetic construct
  misc_feature 1..6039: note = Description of Artificial Sequence: Synthetic coding sequence
  source 1..6039: mol_type = other DNA
atggagaccctgaatggagctggggacaccggcggcaagcccagcacccggggcggggaccctgctgcccggagcagaagaacagagggcatccgggccgcctaccgccgcggggacagaggaggagcccgggacctgctggaggaggcctgtgaccagtgtgccagccagctggagaagggccagctgctgagcatcccagctgcctacggggacctggagatggtgcgctacctgctgagcaagaggctggtggagctgcccacagagcccacagatgacaacccagctgtggtggccgcctacttcggccacacagctgtggtgcaggagctgctggagcccctgacccccaagcagacagagtgggagcagacagcccccttcagcggcaccttccccctgagctgccacctgctgcccggcccctgcagcccccagaggctgctgaactggatgctggccctggcctgccagaggggccacctgggcgtggtgaagctgctggtgctgacccatggagctgaccctgagagctatgctgtgaggaagaatgagttccctgtgattgtgcggctgcccctgtatgctgccatcaagtctggaaatgaagacatcgccatcttcctgctgcggcatggagcctacttctgcagctacatcctgctggacagcccagaccccagcaagcacctgctgaggaagtacttcatcgaggccagccccctgcccagcagctacccaggcaagacagccctgcgggtgaagtggagccacctgcggctgccctgggtggacctggactggctgattgacatcagctgccagatcacagagctggacctgagcgccaactgcctggccaccctgcccagcgtcatcccctggggcctcatcaacctgaggaagctgaacctgagtgacaaccacctgggggagctgcccggggtgcagagcagtgatgagatcatctgcagccggctgctggagattgacatcagcagcaacaagctgagccacctgcccccaggcttcctgcacctgagcaagctgcagaagctgacagccagcaagaactgcctggagaagctgtttgaggaggagaatgccaccaactggattggcctgaggaagctgcaggagctggacatcagtgacaacaagctgacagagctgcctgccctcttcctgcacagcttcaagagcctgaacagcctgaatgtgtccaggaacaacctgaaggtgtttcctgacccctgggcctgccccctgaagtgctgcaaggccagcagaaatgccctggagtgcctgcctgacaagatggctgtgttctggaagaaccacctgaaggatgtggacttctctgaaaatgccctgaaggaggtgcccctgggcctcttccagctggatgccctgatgttcctgcggctgcagggcaaccagctggccgccctgcccccccaggagaagtggacctgccggcagctgaagaccctggacctgagcaggaaccagctgggcaagaatgaagatggcctgaagaccaagagaattgccttcttcaccacccggggccggcagaggtctggaacagaagctgcctctgtgctggagttccctgccttcctgtctgagagcctggaggtgctgtgcctgaatgacaaccacctggacacagtgcccccatctgtgtgcctgctgaagagcctgtctgagctgtacctgggcaacaaccctggcctgcgggagctgcccccagagctgggccagctgggcaacctgtggcagctggacacagaggacctgaccatcagcaatgtgcctgctgagatccagaaggagggccccaaggccatgctgagctacctgcgggcccagctgaggaaggccgagaagtgcaagctgatgaagatgatcatcgtgggccccccccggcagggcaagagcaccctgctggagatcctgcagacaggccgggccccccaggtggtgcatggagaggccaccatccgcaccaccaagtgggagctgcagaggcctgctggcagccgggccaaggtggagagcgtggagttcaacgtgtgggacattggaggccctgcctccatggccaccgtgaaccagtgcttcttcacagacaaggccctgtatgtggtggtgtggaacctggccctgggggaggaggccgtggccaacctgcagttctggctgctgaacatcgaggccaaggccccaaatgctgtggtgctggtggtgggcacccacctggacctgattgaggccaagttccgggtggagcgcatcgccaccctgcgggcctacgtgctggccctgtgccgcagccccagcggcagccgggccaccggcttcccagacatcaccttcaagcacctgcacgagatcagctgcaagagcctggagggccaggagggcctgcggcagctgatcttccacgtgacctgcagcatgaaggatgtgggcagcaccatcggctgccagaggctggccggccgcctcatccccaggagctacctgagcctgcaggaggccgtgctggccgagcagcagaggaggagcagagatgatgatgtgcagtacctgacagaccggcagctggagcagctggtggagcagaccccagacaatgacatcaaggactatgaggacctgcagagcgccatctccttcctgattgagaccggcaccctgctgcacttcccagacaccagccacggcctgaggaacctgtacttcctggaccccatctggctgtctgagtgcctgcagaggatcttcaacatcaagggcagccgctctgtggccaagaatggagtcatccgggcagaggacctgaggatgctgctggtgggcaccggcttcacccagcagacagaggagcagtacttccagttcctggccaagtttgaaattgccctgcctgtggccaatgacagctacctgctgccccacctgctgcccagcaagccaggcctggacacccacggcatgaggcaccccacagccaacaccatccagagggtcttcaagatgagctttgtgcctgtgggcttctggcagcgcttcatcgccaggatgctgatcagcctggccgagatggacctgcagctgtttgagaacaagaagaacaccaagagcaggaacaggaaggtgaccatctacagcttcaccggcaaccagaggaaccgctgcagcaccttccgggtgaagaggaaccagaccatctactggcaggagggcctgctggtgacctttgatggcggctacctgtctgtggagagcagtgatgtgaactggaagaagaagaagagcggcggcatgaagatcgtgtgccagagcgaggtgcgggacttcagcgccatggccttcatcacagaccacgtgaacagcctgattgaccagtggttccctgccctgacagccacagaaagtgatggcacccccctgatggagcagtatgtgccctgccctgtgtgtgaaacagcctgggcccagcacacagaccccagcgagaagtcagaagatgtgcagtactttgacatggaggactgtgtgctgacagccatcgagcgggacttcatcagctgccccaggcacccagacctgcctgtgcccctgcaggagctggtgcctgagctgttcatgacagacttccctgcccggctcttcctggagaacagcaagctggagcacagtgaagatgagggctctgtgctgggccagggcggcagcggcaccgtcatctaccgggcccgctaccagggccagcctgtggccgtgaagcgcttccacatcaagaagttcaagaactttgccaacgtgcctgctgacaccatgctgcggcacctgcgggccacagatgccatgaagaacttcagcgagttccggcaggaggcctccatgctgcacgccctgcagcacccctgcatcgtggccctgattggcatcagcatccaccccctgtgctttgccctggagctggcccccctgagcagcctgaacacagtgctgtctgaaaatgcccgggacagcagcttcatccccctgggccacatgctgacccagaagatcgcctaccagatcgccagcggcctggcctacctgcacaagaagaacatcatcttctgtgacctgaagagtgacaacatcctggtgtggagcctggatgtgaaggagcacatcaacatcaagctgagtgactatggcatcagccggcagagcttccatgaaggagccctgggcgtggagggcaccccaggctaccaggcccctgagatccggccccgcatcgtgtatgatgagaaggtggacatgttctcctatggcatggtgctgtatgagctgctgagcggccagaggcctgccctgggccaccaccagctgcagatcgccaagaagctgagcaagggcatccggcctgtgctgggccagcctgaggaggtgcagttccggcggctgcaggccctgatgatggagtgctgggacaccaagccagagaagaggcccctggccctgtctgtggtgtcccagatgaaggaccccacctttgccaccttcatgtatgagctgtgctgcggcaagcagacagccttcttcagcagccagggccaggagtacacagtggtgttctgggatggcaaggaggagagcaggaactacacagtggtgaacacagagaagggcctgatggaggtgcagaggatgtgctgccccggcatgaaggtgtcctgccagctgcaggtgcagaggagcctgtggacagccacagaggaccagaagatctacatctacaccctgaagggcatgtgccccctgaacaccccccagcaggccctggacaccccagctgtggtgacctgcttcctggccgtgcctgtgatcaagaagaacagctacctggtgctggccggcctggctgatggcctggtggccgtgtttcctgtggtgcggggcacccccaaggacagctgcagctacctgtgcagccacacagccaacagaagcaagttcagcattgctgatgaagatgcccggcagaacccctaccctgtgaaggccatggaggtggtgaacagcggcagcgaggtgtggtacagcaatggacctggcctgctggtgattgactgtgccagcctggagatctgccggcggctggagccctacatggcccccagcatggtgacctctgtggtgtgcagcagcgagggccgcggggaggaggtggtgtggtgcctggatgacaaggccaacagcctggtgatgtaccacagcaccacctaccagctgtgtgcccgctacttctgtggggtgcccagccccctgcgggacatgtttcctgtgcggcccctggacacagagcccccagctgccagccacacagccaaccccaaggtgcctgagggggacagcattgctgatgtgtccatcatgtacagcgaggagctgggcacccagatcctgatccaccaggagagcctgacagactactgcagcatgagcagctacagcagcagccccccccggcaggccgcccggagccccagcagcctgcccagcagccctgccagcagcagctctgtgcccttcagcacagactgtgaagattctgacatgctgcacaccccaggagctgccagtgacagaagtgaacatgacctgacccccatggatggagagaccttcagccagcacctgcaggccgtgaagatcctggccgtgcgggacctgatctgggtgcccaggagaggaggagatgtgattgtcatcggcctggagaaggacagcggggcccagaggggccgggtgattgctgtgctgaaggcccgggagctgacccctcatggagtgctggtggatgctgctgtggtggccaaggacacagtggtgtgcacctttgaaaatgaaaatacagagtggtgcctggccgtgtggaggggctggggcgcccgggagtttgacatcttctaccagagctatgaggagctgggccgcctggaggcctgcaccaggaagagaagatag

SEQ ID NO: 157580 - DNA, 6048 bp, synthetic construct
  misc_feature 1..6048: note = Description of Artificial Sequence: Synthetic coding sequence
  source 1..6048: mol_type = other DNA
atggccggcatgagccagaggcctcccagcatgtactggtgtgtgggccctgaggagagcgctgtgtgcccagagcgggccatggagaccctgaatggagctggggacacaggaggcaagcccagcacccggggcggggaccctgctgcccggagcagaagaacagagggcatccgggccgcctacagaagaggagaccggggcggggcccgggacctgctggaggaggcctgtgaccagtgtgccagccagctggagaagggccagctgctgagcatcccagctgcctatggagacctggagatggtgcgctacctgctgagcaagaggctggtggagctgcccacagagcccacagatgacaacccagctgtggtggccgcctacttcggccacacagctgtggtgcaggagctgctggagagcctgcccggcccctgcagcccccagaggctgctgaactggatgctggccctggcctgccagaggggccacctgggcgtggtgaagctgctggtgctgacccacggggctgaccctgagagctatgctgtgaggaagaatgagttccctgtgattgtgcggctgcccctgtatgctgccatcaagtctggaaatgaagatattgccatcttcctgctgcggcacggggcctacttctgcagctacatcctgctggacagcccagaccccagcaagcacctgctgaggaagtacttcatcgaggccagccccctgcccagcagctacccaggcaagacagccctgcgggtgaagtggagccacctgcggctgccctgggtggacctggactggctgattgacatcagctgccagatcacagagctggacctgagcgccaactgcctggccaccctgcccagcgtcatcccctggggcctcatcaacctgaggaagctgaacctgagtgacaaccacctgggggagctgcccggggtgcagagcagtgatgagatcatctgcagccggctgctggagattgacatcagcagcaacaagctgagccacctgcccccaggcttcctgcacctgagcaagctgcagaagctgacagccagcaagaactgcctggagaagctgtttgaggaggagaatgccaccaactggattggcctgaggaagctgcaggagctggacatcagtgacaacaagctgacagagctgcctgccctcttcctgcacagcttcaagagcctgaacagcctgaatgtgtccaggaacaacctgaaggtgtttcctgacccctgggcctgccccctgaagtgctgcaaggccagcagaaatgccctggagtgcctgcctgacaagatggctgtgttctggaagaaccacctgaaggatgtggacttctctgaaaatgccctgaaggaggtgcccctgggcctcttccagctggatgccctgatgttcctgcggctgcagggcaaccagctggccgccctgcccccccaggagaagtggacctgccggcagctgaagaccctggacctgagcaggaaccagctgggcaagaatgaagatggcctgaagaccaagagaattgccttcttcaccacccggggccggcagaggagcggcacagaggccgcctctgtgctggagttccctgccttcctgtctgagagcctggaggtgctgtgcctgaatgacaaccacctggacacagtgccccccagcgtgtgcctgctgaagagcctgtctgagctgtacctgggcaacaaccctggcctgcgggagctgcccccagagctgggccagctgggcaacctgtggcagctggacacagaggacctgaccatcagcaatgtgcctgctgagatccagaaggagggccccaaggccatgctgagctacctgcgggcccagctgaggaaggccgagaagtgcaagctgatgaagatgatcatcgtgggccccccccggcagggcaagagcaccctgctggagatcctgcagacaggccgggccccccaggtggtgcacggggaggccaccatccgcaccaccaagtgggagctgcagaggcctgctggcagccgggccaaggtggagagcgtggagttcaacgtgtgggacatcggcggccctgcctccatggccaccgtgaaccagtgcttcttcacagacaaggccctgtatgtggtggtgtggaacctggccctgggggaggaggccgtggccaacctgcagttctggctgctgaacatcgaggccaaggccccaaatgctgtggtgctggtggtgggcacccacctggacctgattgaggccaagttccgggtggagagaattgccaccctgcgggcctacgtgctggccctgtgccgcagccccagcggcagccgggccaccggcttcccagacatcaccttcaagcacctgcacgagatcagctgcaagagcctggagggccaggagggcctgcggcagctgatcttccacgtgacctgcagcatgaaggatgtgggcagcaccatcggctgccagaggctggccggccgcctcatccccaggagctacctgagcctgcaggaggccgtgctggccgagcagcagaggaggagcagagatgatgatgtgcagtacctgacagaccggcagctggagcagctggtggagcagaccccagacaatgacatcaaggactatgaggacctgcagagcgccatctccttcctgattgaaacaggcaccctgctgcacttcccagacaccagccacggcctgaggaacctgtacttcctggaccccatctggctgtctgaatgtctgcagaggatcttcaacatcaagggcagccgctctgtggccaagaatggagtcatccgggcagaggacctgaggatgctgctggtgggcaccggcttcacccagcagacagaggagcagtacttccagttcctggccaagtttgagatcgccctgcctgtggccaatgacagctacctgctgccccacctgctgcccagcaagccaggcctggacacccacggcatgaggcaccccacagccaacaccatccagagggtcttcaagatgagctttgtgcctgtgggcttctggcagcgcttcatcgccaggatgctgatcagcctggccgagatggacctgcagctgtttgagaacaagaagaacaccaagagcaggaacaggaaggtgaccatctacagcttcaccggcaaccagaggaaccgctgcagcaccttccgggtgaagaggaaccagaccatctactggcaggagggcctgctggtgacctttgatggcggctacctgtctgtggagagcagtgatgtgaactggaagaagaagaagagcggcggcatgaagatcgtgtgccagagcgaggtgcgggacttcagcgccatggccttcatcacagaccacgtgaacagcctgattgaccagtggttccctgccctgacagccacagaaagtgatggcacccccctgatggagcagtatgtgccctgccctgtgtgtgaaacagcctgggcccagcacacagaccccagcgagaagtcagaagatgtgcagtactttgacatggaggactgtgtgctgacagccatcgagcgggacttcatcagctgccccaggcacccagacctgcctgtgcccctgcaggagctggtgcctgagctgttcatgacagacttccctgcccggctcttcctggagaacagcaagctggagcacagtgaagatgagggctctgtgctgggccagggcggcagcggcaccgtcatctaccgggcccgctaccagggccagcctgtggccgtgaagcgcttccacatcaagaagttcaagaactttgccaacgtgcctgctgacaccatgctgcggcacctgcgggccacagatgccatgaagaacttcagcgagttccggcaggaggcctccatgctgcacgccctgcagcacccctgcatcgtggccctgattggcatcagcatccaccccctgtgctttgccctggagctggcccccctgagcagcctgaacacagtgctgtctgaaaatgcccgggacagcagcttcatccccctgggccacatgctgacccagaagatcgcctaccagatcgccagcggcctggcctacctgcacaagaagaacatcatcttctgtgacctgaagagtgacaacatcctggtgtggagcctggatgtgaaggagcacatcaacatcaagctgagtgactatggcatcagccggcagagcttccacgagggcgccctgggcgtggagggcaccccaggctaccaggcccctgagatccggcccagaattgtgtatgatgagaaggtggacatgttctcctatggcatggtgctgtatgagctgctgagcggccagaggcctgccctgggccaccaccagctgcagatcgccaagaagctgagcaagggcatccggcctgtgctgggccagcctgaggaggtgcagttccggcggctgcaggccctgatgatggagtgctgggacaccaagccagagaagaggcccctggccctgtctgtggtgtcccagatgaaggaccccacctttgccaccttcatgtatgagctgtgctgcggcaagcagacagccttcttcagcagccagggccaggagtacacagtggtgttctgggatggcaaggaggagagcaggaactacacagtggtgaacacagagaagggcctgatggaggtgcagaggatgtgctgccccggcatgaaggtgtcctgccagctgcaggtgcagaggagcctgtggacagccacagaggaccagaagatctacatctacaccctgaagggcatgtgccccctgaacaccccccagcaggccctggacaccccagctgtggtgacctgcttcctggccgtgcctgtgatcaagaagaacagctacctggtgctggccggcctggctgatggcctggtggccgtgtttcctgtggtgcggggcacccccaaggacagctgcagctacctgtgcagccacacagccaacagaagcaagttcagcattgctgatgaagatgcccggcagaacccctaccctgtgaaggccatggaggtggtgaacagcggcagcgaggtgtggtacagcaatggacctggcctgctggtgattgactgtgccagcctggagatctgccggcggctggagccctacatggcccccagcatggtgacctctgtggtgtgcagcagcgagggccgcggggaggaggtggtgtggtgcctggatgacaaggccaacagcctggtgatgtaccacagcaccacctaccagctgtgtgcccgctacttctgtggggtgcccagccccctgcgggacatgtttcctgtgcggcccctggacacagagcccccagctgccagccacacagccaaccccaaggtgcctgagggggacagcattgctgatgtgtccatcatgtacagcgaggagctgggcacccagatcctgatccaccaggagagcctgacagactactgcagcatgagcagctacagcagcagccccccccggcaggccgcccggagccccagcagcctgcccagcagccctgccagcagcagctctgtgcccttcagcacagactgtgaggacagcgacatgctgcacacccctggggccgccagtgacagaagtgaacatgacctgacccccatggatggagagaccttcagccagcacctgcaggccgtgaagatcctggccgtgcgggacctgatctgggtgcccaggagaggaggagatgtgattgtgattggcctggagaaggacagcggggcccagaggggccgggtgattgctgtgctgaaggcccgggagctgaccccccacggcgtgctggtggatgctgctgtggtggccaaggacacagtggtgtgcacctttgaaaatgaaaatacagagtggtgcctggccgtgtggaggggctggggcgcccgggagtttgacatcttctaccagagctatgaggagctgggccgcctggaggcctgcaccaggaagagaagatag

SEQ ID NO: 157581 - DNA, 2025 bp, synthetic construct
  misc_feature 1..2025: note = Description of Artificial Sequence: Synthetic coding sequence
  source 1..2025: mol_type = other DNA
atgctgcacgccctgcagcacccctgcatcgtggccctgattggcatcagcatccaccccctgtgctttgccctggagctggcccccctgagcagcctgaacacagtgctgtctgaaaatgcccgggacagcagcttcatccccctgggccacatgctgacccagaagatcgcctaccagatcgccagcggcctggcctacctgcacaagaagaacatcatcttctgtgacctgaagagtgacaacatcctggtgtggagcctggatgtgaaggagcacatcaacatcaagctgagtgactatggcatcagccggcagagcttccatgaaggagccctgggcgtggagggcaccccaggctaccaggcccctgagatccggccccgcatcgtgtatgatgagaaggtggacatgttctcctatggcatggtgctgtatgagctgctgagcggccagaggcctgccctgggccaccaccagctgcagatcgccaagaagctgagcaagggcatccggcctgtgctgggccagcctgaggaggtgcagttccggcggctgcaggccctgatgatggagtgctgggacaccaagccagagaagaggcccctggccctgtctgtggtgtcccagatgaaggaccccacctttgccaccttcatgtatgagctgtgctgcggcaagcagacagccttcttcagcagccagggccaggagtacacagtggtgttctgggatggcaaggaggagagcaggaactacacagtggtgaacacagagaagggcctgatggaggtgcagaggatgtgctgccccggcatgaaggtgtcctgccagctgcaggtgcagaggagcctgtggacagccacagaggaccagaagatctacatctacaccctgaagggcatgtgccccctgaacaccccccagcaggccctggacaccccagctgtggtgacctgcttcctggccgtgcctgtgatcaagaagaacagctacctggtgctggccggcctggctgatggcctggtggccgtgtttcctgtggtgcggggcacccccaaggacagctgcagctacctgtgcagccacacagccaacagaagcaagttcagcattgctgatgaagatgcccggcagaacccctaccctgtgaaggccatggaggtggtgaacagcggcagcgaggtgtggtacagcaatggacctggcctgctggtgattgactgtgccagcctggagatctgccggcggctggagccctacatggcccccagcatggtgacctctgtggtgtgcagcagcgagggccgcggggaggaggtggtgtggtgcctggatgacaaggccaacagcctggtgatgtaccacagcaccacctaccagctgtgtgcccgctacttctgtggggtgcccagccccctgcgggacatgtttcctgtgcggcccctggacacagagcccccagctgccagccacacagccaaccccaaggtgcctgagggggacagcattgctgatgtgtccatcatgtacagcgaggagctgggcacccagatcctgatccaccaggagagcctgacagactactgcagcatgagcagctacagcagcagccccccccggcaggccgcccggagccccagcagcctgcccagcagccctgccagcagcagctctgtgcccttcagcacagactgtgaagattctgacatgctgcacaccccaggagctgccagtgacagaagtgaacatgacctgacccccatggatggagagaccttcagccagcacctgcaggccgtgaagatcctggccgtgcgggacctgatctgggtgcccaggagaggaggagatgtgattgtcatcggcctggagaaggacagcggggcccagaggggccgggtgattgctgtgctgaaggcccgggagctgacccctcatggcatcatgcctgtgtcctctgtgaaggtgtgctgggccggctggcctgtgcgggacatggtgtacatggtggccgtgatgtag

SEQ ID NO: 157582 - DNA, 99 bp, synthetic construct
  misc_feature 1..99: note = Description of Artificial Sequence: Synthetic coding sequence
  source 1..99: mol_type = other DNA
atggccggcatgagccagaggcctcccagcatgtactggtgtgtgggccctgaggagagcgctgtgtgcccagagcgggccatggagaccctgaactag

SEQ ID NO: 157583 - DNA, 1506 bp, synthetic construct
  misc_feature 1..1506: note = Description of Artificial Sequence: Synthetic coding sequence
  source 1..1506: mol_type = other DNA
atgttctcctatggcatggtgctgtatgagctgctgagcggccagaggcctgccctgggccaccaccagctgcagatcgccaagaagctgagcaagggcatccggcctgtgctgggccagcctgaggaggtgcagttccggcggctgcaggccctgatgatggagtgctgggacaccaagccagagaagaggcccctggccctgtctgtggtgtcccagatgaaggaccccacctttgccaccttcatgtatgagctgtgctgcggcaagcagacagccttcttcagcagccagggccaggagtacacagtggtgttctgggatggcaaggaggagagcaggaactacacagtggtgaacacagagaagggcctgatggaggtgcagaggatgtgctgccccggcatgaaggtgtcctgccagctgcaggtgcagaggagcctgtggacagccacagaggaccagaagatctacatctacaccctgaagggcatgtgccccctgaacaccccccagcaggccctggacaccccagctgtggtgacctgcttcctggccgtgcctgtgatcaagaagaacagctacctggtgctggccggcctggctgatggcctggtggccgtgtttcctgtggtgcggggcacccccaaggacagctgcagctacctgtgcagccacacagccaacagaagcaagttcagcattgctgatgaagatgcccggcagaacccctaccctgtgaaggccatggaggtggtgaacagcggcagcgaggtgtggtacagcaatggacctggcctgctggtgattgactgtgccagcctggagatctgccggcggctggagccctacatggcccccagcatggtgacctctgtggtgtgcagcagcgagggccgcggggaggaggtggtgtggtgcctggatgacaaggccaacagcctggtgatgtaccacagcaccacctaccagctgtgtgcccgctacttctgtggggtgcccagccccctgcgggacatgtttcctgtgcggcccctggacacagagcccccagctgccagccacacagccaaccccaaggtgcctgagggggacagcattgctgatgtgtccatcatgtacagcgaggagctgggcacccagatcctgatccaccaggagagcctgacagactactgcagcatgagcagctacagcagcagccccccccggcaggccgcccggagccccagcagcctgcccagcagccctgccagcagcagctctgtgcccttcagcacagactgtgaggacagcgacatgctgcacacccctggggccgccagtgacagaagtgaacatgacctgacccccatggatggagagaccttcagccagcacctgcaggccgtgaagatcctggccgtgcgggacctgatctgggtgcccaggagagtggagatgctgagcagcctggcctggaggcgcatcctggcccccagcggggctgagagcctgcccagctag

SEQ ID NO: 157584 - DNA, 7584 bp, synthetic construct
  misc_feature 1..7584: note = Description of Artificial Sequence: Synthetic coding sequence
  source 1..7584: mol_type = other DNA
atggccagcggcagctgccagggctgtgaagaagatgaggagaccctgaagaagctgattgtgcggctgaacaacgtgcaggagggcaagcagatcgagaccctggtgcagatcctggaggacctgctggtgttcacctacagcgagcgggccagcaagctgttccagggcaagaacatccacgtgcccctgctgattgtgctggacagctacatgagggtggcctctgtgcagcaggtgggctggagcctgctgtgcaagctgattgaggtgtgccccggcaccatgcagagcctgatgggcccccaggatgtgggcaatgactgggaggtgctgggcgtgcaccagctgatcctgaagatgctgactgtgcacaatgcctctgtgaacctgagcgtcatcggcctgaagaccctggacctgctgctgaccagcggcaagatcaccctgctgatcctggatgaggagagtgacatcttcatgctgatctttgatgccatgcacagcttccctgccaatgatgaggtgcagaagctgggctgcaaggccctgcacgtgctgtttgagcgggtgtctgaggagcagctgacagaatttgtggagaacaaggactacatgatcctgctgagcgccctgaccaacttcaaggatgaggaggagatcgtgctgcacgtgctgcactgcctgcacagcctggccatcccctgcaacaacgtggaggtgctgatgtctggaaatgtgcgctgctacaacatcgtggtggaggccatgaaggccttccccatgtctgagcgcatccaggaggtgtcctgctgcctgctgcaccggctgaccctgggcaacttcttcaacatcctggtgctgaatgaggtgcatgaatttgtggtgaaggctgtgcagcagtacccagaaaatgctgccctgcagatcagcgccctgagctgcctggccctgctgacagagaccatcttcctgaaccaggacctggaggagaagaatgaaaaccaggagaatgatgatgaaggagaggaggacaagctgttctggctggaggcctgctacaaggccctgacctggcacaggaagaacaagcacgtgcaggaggccgcctgctgggccctgaacaacctgctgatgtaccagaacagcctgcacgagaagattggagatgaagatggccacttccctgcccaccgggaggtgatgctgtccatgctgatgcacagcagcagcaaggaggtgttccaggccagcgccaatgccctgagcaccctgctggagcagaatgtgaacttcaggaagatcctgctgagcaagggcatccacctgaatgtgctggagctgatgcagaagcacatccacagccctgaggtggccgagagcggctgcaagatgctgaaccacctgtttgagggcagcaacaccagcctggacatcatggctgctgtggtgcccaagatcctgactgtgatgaagagacatgagaccagcctgcctgtgcagctggaggccctgcgggccatcctgcacttcatcgtgcccggcatgcctgaggagagccgggaggacacagagttccaccacaagctgaacatggtgaagaagcagtgcttcaagaatgacatccacaagctggtgctggccgccctgaaccgcttcatcggcaaccctggcatccagaagtgtggcctgaaggtgatcagcagcatcgtgcacttcccagatgccctggagatgctgagcctggagggcgccatggacagcgtgctgcacaccctgcagatgtacccagatgaccaggagatccagtgcctgggcctgagcctcatcggctacctgatcaccaagaagaatgtgttcatcggcaccggccacctgctggccaagatcctggtgagcagcctgtaccgcttcaaggatgtggccgagatccagaccaagggcttccagaccatcctggccatcctgaagctgagcgccagcttcagcaagctgctggtgcaccacagctttgacctggtgatcttccaccagatgagcagcaacatcatggagcagaaggaccagcagttcctgaacctgtgctgcaagtgctttgccaaggtggccatggatgactacctgaagaatgtgatgctggagcgggcctgtgaccagaacaacagcatcatggtggagtgcctgctgctgctgggcgcagatgccaaccaggccaaggagggcagcagcctcatctgccaggtgtgtgagaaggagagcagccccaagctggtggagctgctgctgaacagcggcagccgggagcaggatgtgaggaaggccctgaccatcagcattggaaaaggagacagccagatcatcagcctgctgctgcggcggctggccctggatgtggccaacaacagcatctgcctgggcggcttctgcatcggcaaggtggagcccagctggctgggccccctcttcccagacaagaccagcaacctgaggaagcagaccaacatcgccagcaccctggccaggatggtgatccgctaccagatgaagtctgctgtggaggagggcacagccagcggcagtgatggcaacttctctgaagatgtgctgagcaagtttgatgagtggaccttcatcccagacagctccatggattctgtgtttgcccagagtgatgacctggacagcgagggcagcgagggcagcttcctggtgaagaagaagagcaacagcatctctgtgggggagttctacagagatgctgtgctgcagcgctgcagccccaacctgcagaggcacagcaacagcctgggccccatctttgaccacgaggacctgctgaagaggaagaggaagatcctgagcagtgatgacagcctgcggagcagcaagctgcagagccacatgaggcacagcgacagcatcagcagcctggccagcgagcgggagtacatcaccagcctggacctgagcgccaatgagctgcgggacattgatgccctgagccagaagtgctgcatctctgtgcacctggagcacctggagaagctggagctgcaccagaatgccctgaccagcttcccccagcagctgtgtgagaccctgaagagcctgacccacctggacctgcacagcaacaagttcaccagcttccccagctacctgctgaagatgagctgcatcgccaacctggatgtgtccagaaatgacatcggccccagcgtggtgctggaccccaccgtgaagtgccccaccctgaagcagttcaacctgagctacaaccagctgagctttgtgcctgagaacctgacagatgtggtggagaagctggagcagctgatcctggagggcaacaagatcagcggcatctgcagccccctgcggctgaaggagctgaagatcctgaacctgagcaagaaccacatcagcagcctgtctgagaacttcctggaggcctgccccaaggtggagagcttcagcgccaggatgaacttcctggccgccatgcccttcctgccccccagcatgaccatcctgaagctgagccagaacaagttcagctgcatccctgaggccatcctgaacctgccccacctgcggagcctggacatgagcagcaatgacatccagtacctgcccggccctgcccactggaagagcctgaacctgcgggagctgctcttcagccacaaccagatcagcatcctggacctgtctgagaaggcctacctgtggagccgggtggagaagctgcacctgagccacaacaagctgaaggagatccccccagagatcggctgcctggagaacctgaccagcctggatgtgtcctacaacctggagctgcgctccttccccaatgagatgggcaagctgagcaagatctgggacctgcccctggatgagctgcacctgaactttgacttcaagcacatcggctgcaaggccaaggacatcatccgcttcctgcagcagaggctgaagaaggctgtgccctacaacaggatgaagctgatgattgtgggcaacacaggcagcggcaagaccaccctgctgcagcagctgatgaagaccaagaagagtgacctgggcatgcagagcgccaccgtgggcattgatgtgaaggactggcccatccagatccgggacaagaggaagagggacctggtgctgaatgtgtgggactttgctggccgggaggagttctacagcacccacccccacttcatgacccagagggccctgtacctggccgtgtatgacctgagcaagggccaggccgaggtggatgccatgaagccctggctgttcaacatcaaggcccgggccagcagcagccctgtgatcctggtgggcacccacctggatgtgtctgatgagaagcagaggaaggcctgcatgagcaagatcaccaaggagctgctgaacaagaggggcttccctgccatccgggactaccactttgtgaatgccacagaggagagtgatgccctggccaagctgaggaagaccatcatcaatgaaagcctgaacttcaagatccgggaccagctggtggtgggccagctgatcccagactgctacgtggagctggagaagatcatcctgtctgagaggaagaatgtgcccatcgagttccctgtgattgacaggaagaggctgctgcagctggtgcgggagaaccagctgcagctggatgaaaatgagctgccccatgctgtgcacttcctgaatgaaagtggagtgctgctgcacttccaggaccctgccctgcagctgagtgacctgtactttgtggagcccaagtggctgtgcaagatcatggcccagatcctgactgtgaaggtggagggctgccccaagcaccccaagggcatcatcagcagaagagatgtggagaagttcctgagcaagaagaggaagttccccaagaactacatgagccagtacttcaagctgctggagaagttccagatcgccctgcccatcggggaggagtacctgctggtgcccagcagcctgagtgaccacaggcctgtgattgagctgccccactgtgagaacagcgagatcatcatccggctgtatgagatgccctacttccccatgggcttctggagccgcctcatcaaccggctgctggagatcagcccctacatgctgagcggccgggagcgggccctgcggcccaacaggatgtactggaggcagggcatctacctgaactggagccctgaggcctactgcctggtgggcagcgaggtgctggacaaccaccctgagagcttcctgaagatcaccgtgcccagctgcaggaagggctgcatcctgctgggccaggtggtggaccacatcgacagcctgatggaggagtggttccctggcctgctggagattgacatctgtggggagggggagaccctgctgaagaagtgggccctgtacagcttcaatgatggagaggagcaccagaagatcctgctggatgacctgatgaagaaggccgaggagggggacctgctggtgaacccagaccagccccggctgaccatccccatcagccagatcgccccagacctgatcctggccgacctgcccaggaacatcatgctgaacaatgatgagctggagtttgagcaggcccctgagttcctgctgggagatggcagctttggatctgtgtaccgggccgcctatgaaggagaggaggtggccgtgaagatcttcaacaagcacaccagcctgcggctgctgcggcaggagctggtggtgctgtgccacctgcaccaccccagcctcatcagcctgctggccgccggcatccggcccaggatgctggtgatggagctggccagcaagggcagcctggaccggctgctgcagcaggacaaggccagcctgaccaggaccctgcagcaccgcatcgccctgcacgtggctgatggcctgcgctacctgcacagcgccatgatcatctacagagacctgaagccccacaacgtgctgctcttcaccctgtacccaaatgctgccatcatcgccaagattgctgactatggcatcgcccagtactgctgcaggatgggcatcaagaccagcgagggcaccccaggcttccgggcccctgaggtggcccggggaaatgtcatctacaaccagcaggctgatgtgtacagctttggcctgctgctgtatgacatcctgaccactggaggaagaattgtggagggcctgaagttccccaatgaatttgatgagctggagatccagggcaagctgcctgaccctgtgaaggagtatggctgtgccccctggcccatggtggagaagctgatcaagcagtgcctgaaggagaacccccaggagcggcccaccagcgcccaggtgtttgacatcctgaacagcgctgagctggtgtgcctgacccggcgcatcctgctgcccaagaatgtgattgtggagtgcatggtggccacccaccacaacagcagaaatgccagcatctggctgggctgcggccacacagaccggggccagctgtccttcctggacctgaacacagagggctacaccagcgaggaggtggccgacagccgcatcctgtgcctggccctggtgcacctgcctgtggagaaggagagctggatcgtgtctggcacccagagcggcaccctgctggtgatcaacacagaagatggcaagaagaggcacaccctggagaagatgacagacagcgtgacctgcctgtactgcaacagcttcagcaagcagagcaagcagaagaacttcctgctggtgggcacagcagatggcaagctggccatctttgaggacaagacagtgaagctgaagggagctgcccccctgaagatcctgaacattggaaatgtgtccacccccctgatgtgcctgtctgagagcaccaacagcacagaaagaaatgtgatgtggggcggctgcggcaccaagatcttctccttcagcaatgacttcaccatccagaagctgattgagaccaggaccagccagctgttctcctatgctgccttcagtgacagcaacatcatcaccgtggtggtggacacagccctgtacatcgccaagcagaacagccctgtggtggaggtgtgggacaagaagacagagaagctgtgtggcctgattgactgtgtgcacttcctgcgggaggtgatggtgaaggagaacaaggagagcaagcacaagatgagctacagcggccgggtgaagaccctgtgcctgcagaagaacacagccctgtggattggaactggaggcggccacatcctgctgctggacctgagcacccggcggctcatccgggtcatctacaacttctgcaacagcgtgcgggtgatgatgacagcccagctgggcagcctgaagaatgtgatgctggtgctgggctacaacaggaagaacacagagggcacccagaagcagaaggagatccagagctgcctgactgtgtgggacatcaacctgccccatgaggtgcagaacctggagaagcacatcgaggtgaggaaggagctggccgagaagatgaggaggacctctgtggagtag

SEQ ID NO: 157585 - DNA, 582 bp, synthetic construct
  misc_feature 1..582: note = Description of Artificial Sequence: Synthetic coding sequence
  source 1..582: mol_type = other DNA
atgaccagcagctgcttccgcagcaccaccaggaggagcctgagcagccagacagcccagaggctggtgtgcccccagttcatcaatggaacagccaaggacagcatcctgaccagccgcagccaggtgcccatcatcctgcagtggaacaagagcagcaagaagtttgtgccccatggagacatccccaacatggaggatgtgctggccgtgaagagcttcaggatgcagaacaccctgtacctgagcctgacccgcttcatcggggacagccgggtgatgcgctggaacagcaagcagtttgtggagatccaggccctgcccagcagaggagccatgaccctgcagcccttctccttcaaggacaaccactacctggccctgggcagtgactacaccttcagccagatctaccagtgggacaaggagaagcagctgttcaagaagttcaaggagatctacgtgcaggcccccaggagcttcaccgctgtgtccacagaccggcgggacttcttctttgccagcagcttcaagggcaagaccaagatctttgagcacatcatcgtggacctgagcctgtag

SEQ ID NO: 157586 - DNA, 1638 bp, synthetic construct
  misc_feature 1..1638: note = Description of Artificial Sequence: Synthetic coding sequence
  source 1..1638: mol_type = other DNA
atggccctgcggcggggcggctgtggggccctgggcctgctgctgctgctgctgggcgccgcctgcctgatccccaggtctgcccaggtgcggcggctggcccgctgcccagccacctgcagctgcaccaaggagagcatcatctgtgtgggcagctcctgggtgccccgcatcgtgcctggggacatcagcagcctgagcctggtgaatggcaccttcagcgagatcaaggacaggatgttcagccacctgcccagcctgcagctgctgctgctgaacagcaacagcttcaccatcatcagagatgatgcctttgctggcctcttccacctggagtacctgttcatcgagggcaacaagattgagaccatcagcagaaatgccttccggggcctgcgggacctgacccacctgagcctggccaacaaccacatcaaggccctgcccagagatgtgttcagtgacctggacagcctcatcgagctggacctgcggggcaacaagtttgaatgtgactgcaaggccaagtggctgtacctgtggctgaagatgaccaacagcacagtgtctgatgtgctgtgcatcggccccccagagtaccaggagaagaagctgaatgatgtgaccagctttgattatgagtgcaccaccacagactttgtggtgcaccagaccctgccctaccagagcgtgtctgtggacaccttcaacagcaagaatgatgtgtatgtggccatcgcccagcccagcatggagaactgcatggtgctggagtgggaccacatcgagatgaacttccgctcctatgacaacatcaccggccagagcatcgtgggctgcaaggccatcctgattgatgaccaggtgtttgtggtggtggcccagctgtttggaggcagccacatctacaagtatgatgagagctggaccaagtttgtgaagttccaggacatcgaggtgagccgcatcagcaagcccaatgacatcgagctgttccagattgatgatgagaccttctttgtgattgctgacagcagcaaggccggcctgagcacagtgtacaagtggaacagcaagggcttctacagctaccagagcctgcacgagtggttccgggacacagatgctgagtttgtggacattgatggcaagagccacctgatcctgagcagccgcagccaggtgcccatcatcctgcagtggaacaagagcagcaagaagtttgtgccccatggagacatccccaacatggaggatgtgctggccgtgaagagcttcaggatgcagaacaccctgtacctgagcctgacccgcttcatcggggacagccgggtgatgcgctggaacagcaagcagtttgtggagatccaggccctgcccagcagaggagccatgaccctgcagcccttctccttcaaggacaaccactacctggccctgggcagtgactacaccttcagccagatctaccagtgggacaaggagaagcagctgttcaagaagttcaaggagatctacgtgcaggcccccaggagcttcaccgctgtgtccacagaccggcgggacttcttctttgccagcagcttcaagggcaagaccaagatctttgagcacatcatcgtggacctgagcctgtag

SEQ ID NO: 157587 - DNA, 1647 bp, synthetic construct
  misc_feature 1..1647: note = Description of Artificial Sequence: Synthetic coding sequence
  source 1..1647: mol_type = other DNA
atggccggcctgcgggcccggggcggccctggccctggcctgctggccctgagcgccctgggcttctgcctgatgctgcaggtgtctgccaagaggcctcccaagaccccaccctgcccccccagctgcagctgcacccgggacacagccttctgtgtggacagcaaggctgtgcccaggaacctgcccagcgaggtgatcagcctgaccctggtgaatgctgccttcagcgagatccaggatggagccttcagccacctgcccctgctgcagttcctgctgctgaacagcaacaagttcaccctgattggagacaatgccttcaccggcctgagccacctgcagtacctgttcatcgagaacaatgacatctgggccctgagcaagttcaccttccggggcctgaagagcctgacccacctgagcctggccaacaacaacctgcagaccctgccccgggacatcttccggcccctggacatcctgaatgacctggacctgcggggcaacagcctgaactgtgactgcaaggtgaagtggctggtggagtggctggcccacaccaacaccaccgtggcccccatctactgtgccagccccccacgcttccaggagcacaaggtgcaggacctgcccctgcgggagtttgactgcatcaccacagactttgtgctgtaccagaccctggccttccctgctgtgtctgctgagcccttcctgtacagcagtgacctgtacctggccctggcccagcccggggtgtctgcctgcaccatcctgaagtgggactatgtggagcggcagctgcgggactatgaccgcatcccagcccccagcgctgtgcactgcaagcccatggtggtggacagccagctgtatgtggtggtggcccagctgtttggaggcagctacatctaccactgggaccccaacaccacccgcttcacccggctgcaggacatcgacccccagagggtgaggaagcccaatgacctggaggccttcagaattgatggagactggtactttgctgtggccgacagcagcaaggccggggccaccagcctgtaccgctggcaccagaatggcttctacagccaccaggccctgcacccctggcaccgggacacagacctggagtttgtggatggagagggcaagccccggctgattgtgagcagcagcagccaggcccctgtgatctaccagtggagcaggacccagaagcagtttgtggcccagggcgaggtgacccaggtgcctgatgcccaggccgtgaagcacttccgggccggccgggacagctacctgtgcctgagccgctacatcggggacagcaagatcctgcgctgggagggcacccgcttcagcgaggtgcaggccctgcccagccggggcagcctggccctgcagcccttcctggtgggcggccgccgctacctggccctgggcagtgacttctccttcacccagatctaccagtgggatgagggccggcagaagtttgtgcgcttccaggagctggccgtgcaggccccccgggccttctgctacatgcctgctggagatgcccagctgctgctggcccccagcttcaagggccagaccctggtgtaccgccacatcgtggtggacctgagcgcctag

SEQ ID NO: 157588 - DNA, 1614 bp, synthetic construct
  misc_feature 1..1614: note = Description of Artificial Sequence: Synthetic coding sequence
  source 1..1614: mol_type = other DNA
atgggcggggccggcatcctgctgctgctgctggccggggccggcgtggtggtggcctggaggcctcccaagggcaagtgccccctgcgctgcagctgcagcaaggacagcgccctgtgtgagggcagcccagacctgcctgtgtccttcagccccaccctgctgagcctgagcctggtgaggactggagtgacccagctgaaggccggcagcttcctgcgcatccccagcctgcacctgctgctcttcaccagcaacagcttctctgtgattgaagatgatgcctttgctggcctgagccacctgcagtacctgttcatcgaggacaatgagatcggcagcatcagcaagaatgccctgcggggcctgcggagcctgacccacctgagcctggccaacaaccacctggagaccctgccccgcttcctgttccggggcctggacaccctgacccacgtggacctgcggggcaaccccttccagtgtgactgccgggtgctgtggctgctgcagtggatgcccaccgtgaatgcctctgtgggcaccggggcctgtgccggccctgccagcctgagccacatgcagctgcaccacctggaccccaagaccttcaagtgccgggccatcgagctgtcctggttccagacagtgggggagagcgccctgtctgtggagcccttctcctaccagggcgagccccacatcgtgctggcccagccctttgctggccgctgcctgatcctgtcctgggactacagcctgcagcgcttccggcctgaggaggagctgcctgctgcctctgtggtgtcctgcaagcccctggtgctgggccccagcctgtttgtgctggccgcccggctgtggggcggcagccagctgtgggcccggcccagccctggcctgcggctggcccccacccagaccctggccccccggcggctgctgcggcccaatgatgctgagctgctgtggctggagggccagccctgctttgtggtggctgatgccagcaaggccggcagcaccaccctgctgtgcagagatggccctggcttctacccccaccagagcctgcacgcctggcaccgggacacagatgctgaggccctggagctggatggccggccccacctgctgctggccagcgccagccagaggcctgtgctcttccactggacaggaggccgctttgaaagaagaacagacatccctgaggctgaagatgtgtatgccaccaggcacttccaggccggaggagatgtgttcctgtgcctgacccgctacatcggggacagcatggtgatgcgctgggatggctccatgttccggctgctgcagcagctgcccagcagaggagcccacgtgttccagcccctgctgattgcccgggaccagctggccatcctgggcagtgactttgccttcagccaggtgctgcggctggagccagacaagggcctgctggagcccctgcaggagctgggccccccagccctggtggccccccgggcctttgcccacatcaccatggccggccgccgcttcctgtttgctgcctgcttcaagggccccacccagatctaccagcaccatgaaattgacctgagcgcctag

SEQ ID NO: 157589 - DNA, 1485 bp, synthetic construct
  misc_feature 1..1485: note = Description of Artificial Sequence: Synthetic coding sequence
  source 1..1485: mol_type = other DNA
atgggcggggccggcatcctgctgctgctgctggccggggccggcgtggtggtggcctggaggcctcccaagggcaagtgccccctgcgctgcagctgcagcaaggacagcgccctgtgtgagggcagcccagacctgcctgtgtccttcagccccaccctgctgagcctgagcctggtgaggactggagtgacccagctgaaggccggcagcttcctgcgcatccccagcctgcacctgctgctcttcaccagcaacagcttctctgtgattgaagatgatgcctttgctggcctgagccacctgcagtacctgttcatcgaggacaatgagatcggcagcatcagcaagaatgccctgcggggcctgcggagcctgacccacctgagcctggccaacaaccacctggagaccctgccccgcttcctgttccggggcctggacaccctgacccacgtggacctgcggggcaaccccttccagtgtgactgccgggtgctgtggctgctgcagtggatgcccaccgtgaatgcctctgtgggcaccggggcctgtgccggccctgccagcctgagccacatgcagctgcaccacctggaccccaagaccttcaagtgccgggccatcgagctgtcctggttccagacagtgggggagagcgccctgtctgtggagcccttctcctaccagggcgagccccacatcgtgctggcccagccctttgctggccgctgcctgatcctgtcctgggactacagcctgcagcgcttccggcctgaggaggagctgcccggggagcccccaccccggcccagcgcctgcccagctgcctgcctggccggcctgacctgcctgcccaccagcccccagaggcctccctggtgcccagccagccactggtgctgggcccgggccagcagctgctggctgcctgcctgtggcggggcccacagctgtggccctggccctgtgcctgcctgtgcctggccccagaggcggccctggccccggggcggctgctgcggccccatgacccccagcagctgtggctggaagggcaacccagcctcctggtggcccatgccaccccggcgggccgccccccgctgctgtgccgccaccggccctgccttcaccaggacccgggcctgcaccccaggcaccggcaccaggaccctgcggccctggagctggacagctggccccacctgctgctggccccggctgcccagcggcccctgcagcagcactggacctgtggccgccagcagagatgcccagaccagcccccggcccaggatgtccatgccccacgccaccagccggctggtgggcacctgcagctgtgccagccacgccaccctgggcaccccctggagctgtgccggcacagccccctgctttgtgtgctgcagcaacttccccagggctgtgcccaccagcagcagccactgcagcagccctggcacctcctggcccagctag

SEQ ID NO: 157590 - DNA, 1617 bp, synthetic construct
  misc_feature 1..1617: note = Description of Artificial Sequence: Synthetic coding sequence
  source 1..1617: mol_type = other DNA
atgggcggggccggcatcctgctgctgctgctggccggggccggcgtggtggtggcctggaggcctcccaagggcaagtgccccctgcgctgcagctgcagcaaggacagcgccctgtgtgagggcagcccagacctgcctgtgtccttcagccccaccctgctgagcctgagcctggtgaggactggagtgacccagctgaaggccggcagcttcctgcgcatccccagcctgcacctgctgctcttcaccagcaacagcttctctgtgattgaagatgatgcctttgctggcctgagccacctgcagtacctgttcatcgaggacaatgagatcggcagcatcagcaagaatgccctgcggggcctgcggagcctgacccacctgagcctggccaacaaccacctggagaccctgccccgcttcctgttccggggcctggacaccctgacccacgtggacctgcggggcaaccccttccagtgtgactgccgggtgctgtggctgctgcagtggatgcccaccgtgaatgcctctgtgggcaccggggcctgtgccggccctgccagcctgagccacatgcagctgcaccacctggaccccaagaccttcaagtgccgggccatcgagctgtcctggttccagacagtgggggagagcgccctgtctgtggagcccttctcctaccagggcgagccccacatcgtgctggcccagccctttgctggccgctgcctgatcctgtcctgggactacagcctgcagcgcttccggcctgaggaggagctgcctgctgcctctgtggtgtcctgcaagcccctggtgctgggccccagcctgtttgtgctggccgcccggctgtggggcggcagccagctgtgggcccggcccagccctggcctgcggctggcccccacccagaccctggccccccggcggctgctgcggcccaatgatgctgagctgctgtggctggagggccagccctgctttgtggtggctgatgccagcaaggccggcagcaccaccctgctgtgcagagatggccctggcttctacccccaccagagcctgcacgcctggcaccgggacacagatgctgaggccctggagctggatggccggccccacctgctgctggccagcgccagccagaggcctgtgctcttccactggacaggaggccgctttgaaagaagaacagacatccctgaggctgaagatgtgtatgccaccaggcacttccaggccggaggagatgtgttcctgtgcctgacccgctacatcggggacagcatggtggtgatgcgctgggatggctccatgttccggctgctgcagcagctgcccagcagaggagcccacgtgttccagcccctgctgattgcccgggaccagctggccatcctgggcagtgactttgccttcagccaggtgctgcggctggagccagacaagggcctgctggagcccctgcaggagctgggccccccagccctggtggccccccgggcctttgcccacatcaccatggccggccgccgcttcctgtttgctgcctgcttcaagggccccacccagatctaccagcaccacgagattgacctgagcgcctag

SEQ ID NO: 157591 - DNA, 2091 bp, synthetic construct
  misc_feature 1..2091: note = Description of Artificial Sequence: Synthetic coding sequence
  source 1..2091: mol_type = other DNA
atggccaccccaggcagcgagccccagccctttgtgcctgccctgtctgtggccaccctgcaccccctgcaccacccccaccaccaccaccaccaccaccagcaccacggcggcactggagcccctgggggcgccggcggcggcggcggcggcagcggcggcttcaacctgcccctgaacagaggcctggagcgggccctggaggaggccgccaacagcggcggcctgaacctgagcgccaggaagctgaaggagttccccaggacagctgcccctggccatgacctgagtgacacagtgcaggccgacctgagcaagaaccggctggtggaggtgcccatggagctgtgccactttgtgtccctggagatcctgaacctgtaccacaactgcatccgggtcatccctgaggccatcgtgaacctgcagatgctgacctacctgaacctgagcaggaaccagctgagcgccctgcctgcctgcctgtgtggcctgcccctgaaggtgctgattgccagcaacaacaagctgggcagcctgcctgaggagatcggccagctgaagcagctgatggagctggatgtgtcctgcaatgagatcacagccctgccccagcagatcggccagctgaagagcctgcgggagctgaatgtgagaagaaactacctgaaggtgctgccccaggagctggtggacctgagcctggtgaagtttgacttcagctgcaacaaggtgctggtgatccccatctgcttccgggagatgaagcagctgcaggtgctgctgctggagaacaaccccctgcagagccccccagcccagatctgcaccaagggcaaggtgcacatcttcaagtacctgagcatccaggcctgccagatcaagacagctgacagcctgtacctgcacaccatggagcggccccacctgcaccagcacgtggaggatggcaagaaggacagcgacagcggcgtgggcagtgacaatggagacaagaggctgagcgccacagagcccagtgatgaggacacagtgtccctgaatgtgcccatgagcaacatcatggaggaggagcagatcatcaaggaggacagctgccaccggctgagccctgtgaagggggagttccaccaggagttccagcctgagcccagcctgctgggggacagcaccaacagcggggaggagcgggaccagttcacagacagagcagatggcctgcacagcgagttcatgaactacaaggcccgggcagaggactgtgaggagctgctgagaattgaagaagatgtgcactggcagacagagggcatcatcagcagcagcaaggaccaggacatggacatcgccatgattgagcagctgcgggaggccgtggacctgctgcaggaccccaacggcctgagcacagacatcacagagaggtctgtgctgaacctgtaccccatgggcagcgctgaggccctggagctgcaggacagcgccctgaatggccagatccagctggagaccagccctgtgtgtgaggtgcagagcgacctgaccctgcagagcaatggcagccagtacagccccaatgagatccgggagaacagccctgctgtgagccccaccaccaacagcacagcccccttcggcctgaagcccaggtctgtgttcctgcggccccagaggaacctggagagcattgacccccagttcaccatccggaggaagatggagcagatgagggaggagaaggagctggtggagcagctgcgggagagcattgagatgaggctgaaggtgtccctgcacgaggacctgggcgccgccctgatggatggagtggtgctgtgccacctggtgaaccacatccggcccaggtctgtggccagcatccacgtgcccagccctgctgtgcccaagctgtccatggccaagtgcagaagaaatgtggagaacttcctggaggcctgcaggaagctgggcgtgcctgaggagaagctgtgcctgccccaccacatcctggaggagaagggcctggtgaaggtgggcatcaccatccaggccctgctggacatcaccgtgaccaaggccctcttcacctag

SEQ ID NO: 157592 - DNA, 2187 bp, synthetic construct
  misc_feature 1..2187: note = Description of Artificial Sequence: Synthetic coding sequence
  source 1..2187: mol_type = other DNA
atggccaccccaggcagcgagccccagccctttgtgcctgccctgtctgtggccaccctgcaccccctgcaccacccccaccaccaccaccaccaccaccagcaccacggcggcactggagcccctgggggcgccggcggcggcggcggcggcagcggcggcttcaacctgcccctgaacagaggcctggagcgggccctggaggaggccgccaacagcggcggcctgaacctgagcgccaggaagctgaaggagttccccaggacagctgcccctggccatgacctgagtgacacagtgcaggccgacctgagcaagaaccggctggtggaggtgcccatggagctgtgccactttgtgtccctggagatcctgaacctgtaccacaactgcatccgggtcatccctgaggccatcgtgaacctgcagatgctgacctacctgaacctgagcaggaaccagctgagcgccctgcctgcctgcctgtgtggcctgcccctgaaggtgctgattgccagcaacaacaagctgggcagcctgcctgaggagatcggccagctgaagcagctgatggagctggatgtgtcctgcaatgagatcacagccctgccccagcagatcggccagctgaagagcctgcgggagctgaatgtgagaagaaactacctgaaggtgctgccccaggagctggtggacctgagcctggtgaagtttgacttcagctgcaacaaggtgctggtgatccccatctgcttccgggagatgaagcagctgcaggtgctgctgctggagaacaaccccctgcagagccccccagcccagatctgcaccaagggcaaggtgcacatcttcaagtacctgagcatccaggcctgccagatcaagacagctgacagcctgtacctgcacaccatggagcggccccacctgcaccagcacgtggaggatggcaagaaggacagcgacagcggcgtgggcagtgacaatggagacaagaggctgagcgccacagagcccagtgatgaggacacagtgtccctgaatgtgcccatgagcaacatcatggaggaggagcagatcatcaaggaggacagctgccaccggctgagccctgtgaagggggagttccaccaggagttccagcctgagcccagcctgctgggggacagcaccaacagcggggaggagcgggaccagttcacagacagagcagatggcctgcacagcgagttcatgaactacaaggcccgggcagaggactgtgaggagctgctgagaattgaagaagatgtgcactggcagacagagggcatcatcagcagcagcaaggaccaggacatggacatcgccatgattgagcagctgcgggaggccgtggacctgctgcaggaccccaacggcctgagcacagacatcacagagaggtctgtgctgaacctgtaccccatgggcagcgctgaggccctggagctgcaggacagcgccctgaatggccagatccagctggagaccagccctgtgtgtgaggtgcagagcgacctgaccctgcagagcaatggcagccagtacagccccaatgagatccgggagaacagccctgctgtgagccccaccaccaacagcacagcccccttcggcctgaagcccaggtctgtgttcctgcggccccagaggaacctggagagcattgacccccagttcaccatccggaggaagatggagcagatgagggaggagaaggagctggtggagcagctgcgggagagcattgagatgaggctgaaggtgtccctgcacgaggacctgggcgccgccctgatggatggagtggtgctgtgccacctggtgaaccacatccggcccaggtctgtggccagcatccacgtgcccagccctgctgtgcccaagctgtccatggccaagtgcagaagaaatgtggagaacttcctggaggcctgcaggaagctgggcgtgcctgaggccgacctgtgcagcccctgtgacatcctgcagctggacttccgccacatcaggaagacagtggacaccctgctggccctgggggagaaggcccccccacccaccagcgccctgcggagccgggacctgattggcttctgcctggtgcacatcctcttcatcgtgctggtgtacatcacctaccactggaatgccctgagcgcctag

SEQ ID NO: 157593 - DNA, 2292 bp, synthetic construct
  misc_feature 1..2292: note = Description of Artificial Sequence: Synthetic coding sequence
  source 1..2292: mol_type = other DNA
atggccaccccaggcagcgagccccagccctttgtgcctgccctgtctgtggccaccctgcaccccctgcaccacccccaccaccaccaccaccaccaccagcaccacggcggcactggagcccctgggggcgccggcggcggcggcggcggcagcggcggcttcaacctgcccctgaacagaggcctggagcgggccctggaggaggccgccaacagcggcggcctgaacctgagcgccaggaagctgaaggagttccccaggacagctgcccctggccatgacctgagtgacacagtgcaggccgacctgagcaagaaccggctggtggaggtgcccatggagctgtgccactttgtgtccctggagatcctgaacctgtaccacaactgcatccgggtcatccctgaggccatcgtgaacctgcagatgctgacctacctgaacctgagcaggaaccagctgagcgccctgcctgcctgcctgtgtggcctgcccctgaaggtgctgattgccagcaacaacaagctgggcagcctgcctgaggagatcggccagctgaagcagctgatggagctggatgtgtcctgcaatgagatcacagccctgccccagcagatcggccagctgaagagcctgcgggagctgaatgtgagaagaaactacctgaaggtgctgccccaggagctggtggacctgagcctggtgaagtttgacttcagctgcaacaaggtgctggtgatccccatctgcttccgggagatgaagcagctgcaggtgctgctgctggagaacaaccccctgcagagccccccagcccagatctgcaccaagggcaaggtgcacatcttcaagtacctgagcatccaggcctgccagatcaagacagctgacagcctgtacctgcacaccatggagcggccccacctgcaccagcacgtggaggatggcaagaaggacagcgacagcggcgtgggcagtgacaatggagacaagaggctgagcgccacagagcccagtgatgaggacacagtgtccctgaatgtgcccatgagcaacatcatggaggaggagcagatcatcaaggaggacagctgccaccggctgagccctgtgaagggggagttccaccaggagttccagcctgagcccagcctgctgggggacagcaccaacagcggggaggagcgggaccagttcacagacagagcagatggcctgcacagcgagttcatgaactacaaggcccgggcagaggactgtgaggagctgctgagaattgaagaagatgtgcactggcagacagagggcatcatcagcagcagcaaggaccaggacatggacatcgccatgattgagcagctgcgggaggccgtggacctgctgcaggaccccaacggcctgagcacagacatcacagagaggtctgtgctgaacctgtaccccatgggcagcgctgaggccctggagctgcaggacagcgccctgaatggccagatccagctggagaccagccctgtgtgtgaggtgcagagcgacctgaccctgcagagcaatggcagccagtacagccccaatgagatccgggagaacagccctgctgtgagccccaccaccaacagcacagcccccttcggcctgaagcccaggagtgaccctgccctgatcctgccccccatctccttcaacaccctgacccaggcccagacctgggacagcagcagctacagcgtgcccagcgagggggacagcgacaacgtgttcctgcggccccagaggaacctggagagcattgacccccagttcaccatccggaggaagatggagcagatgagggaggagaaggagctggtggagcagctgcgggagagcattgagatgaggctgaaggtgtccctgcacgaggacctgggcgccgccctgatggatggagtggtgctgtgccacctggtgaaccacatccggcccaggtctgtggccagcatccacgtgcccagccctgctgtgcccaagctgtccatggccaagtgcagaagaaatgtggagaacttcctggaggcctgcaggaagctgggcgtgcctgaggccgacctgtgcagcccctgtgacatcctgcagctggacttccgccacatcaggaagacagtggacaccctgctggccctgggggagaaggcccccccacccaccagcgccctgcggagccgggacctgattggcttctgcctggtgcacatcctcttcatcgtgctggtgtacatcacctaccactggaatgccctgagcgcctag

SEQ ID NO: 157594 - DNA, 3282 bp, synthetic construct
  misc_feature 1..3282: note = Description of Artificial Sequence: Synthetic coding sequence
  source 1..3282: mol_type = other DNA
atggcccggcctgtgcggggcggcctgggcgcccccaggaggagcccctgcctgctgctgctgtggctgctgctgctgcggctggagcctgtgacagctgctgctggcccccgggccccctgtgccgccgcctgcacctgtgccggggacagcctggactgtggcggccggggcctggccgccctgcccggggacctgcccagctggaccaggagcctgaacctgagctacaacaagctgtctgaaattgatcctgctggctttgaggacctgcccaacctgcaggaggtgtacctgaacaacaatgagctgacagctgtgcccagcctgggcgccgccagcagccacgtggtgtccctcttcctgcagcacaacaagatccgctctgtggagggcagccagctgaaggcctacctgagcctggaggtgctggacctgagcctgaacaacatcacagaggtgaggaacacctgcttcccccacggcccccccatcaaggagctgaacctggccggcaacagaattggcaccctggagctgggcgcctttgatggcctgagccgcagcctgctgaccctgcggctgagcaagaaccgcatcacccagctgcctgtgcgggccttcaagctgccccggctgacccagctggacctgaacagaaaccgcatccgcctcatcgagggcctgaccttccagggcctgaacagcctggaggtgctgaagctgcagaggaacaacatcagcaagctgacagatggagccttctggggcctgagcaagatgcacgtgctgcacctggagtacaacagcctggtggaggtgaacagcggcagcctgtatggcctgacagccctgcaccagctgcacctgagcaacaacagcatcgcccgcatccacaggaagggctggagcttctgccagaagctgcacgagctggtgctgtccttcaacaacctgacccggctggatgaggagagcctggccgagctgagcagcctgtctgtgctgcggctgagccacaacagcatcagccacatcgccgagggcgccttcaagggcctgcggagcctgcgggtgctggacctggaccacaatgagatcagcggcaccatcgaggacaccagcggggccttcagcggcctggacagcctgagcaagctgaccctgtttggaaacaagatcaagtctgtggccaagagggccttcagcggcctggagggcctggagcacctgaacctgggcggcaatgccatccgctctgtgcagtttgatgcctttgtgaagatgaagaacctgaaggagctgcacatcagcagtgacagcttcctgtgtgactgccagctgaagtggctgcccccctggctgattggccgcatgctgcaggcctttgtgacagccacctgtgcccaccctgagagcctgaagggccagagcatcttctctgtgcccccagagagctttgtgtgtgatgacttcctgaagccccagatcatcacccagcctgagaccaccatggccatggtgggcaaggacatccgcttcacctgcagcgctgccagcagcagcagcagccccatgacctttgcctggaagaaggacaatgaggtgctgaccaatgctgacatggagaactttgtgcacgtgcacgcccaggatggagaggtgatggagtacaccaccatcctgcacctgcggcaggtgacctttggacatgagggccgctaccagtgtgtgatcaccaaccacttcggcagcacctacagccacaaggcccggctgactgtgaatgtgctgcccagcttcaccaagacccctcatgacatcaccatccgcaccaccaccatggcccggctggagtgtgccgccaccggccaccccaacccccagatcgcctggcagaaggatggcggcacagacttccctgctgcccgggagaggaggatgcacgtgatgccagatgatgatgtgttcttcatcacagatgtgaagattgatgatgctggggtgtacagctgcacagcccagaacagcgctggcagcatcagcgccaatgccaccctgactgtgctggagacccccagcctggtggtgcccctggaggacagagtggtgtctgtgggggagaccgtggccctgcagtgcaaggccactggaaaccccccaccccgcatcacctggttcaagggggaccggcccctgagcctgacagagcggcaccacctgaccccagacaaccagctgctggtggtgcagaatgtggtggccgaggatgctggccgctacacctgtgagatgagcaacaccctgggcacagagcgggcccacagccagctgtctgtgctgcctgctgctggctgcaggaaggatggcaccaccgtgggcatcttcaccatcgctgtggtgagcagcatcgtgctgaccagcctggtgtgggtgtgcatcatctaccagaccaggaagaagtctgaggagtacagcgtgaccaacacagatgaaacagtggtgcccccagatgtgcccagctacctgagcagccagggcaccctgagtgaccggcaggagaccgtggtgaggacagaaggaggcccccaggccaacggccacatcgagagcaatggagtgtgccccagagatgccagccacttccctgagccagacacccacagcgtggcctgccggcagcccaagctgtgtgccggcagcgcctaccacaaggagccctggaaggccatggagaaggccgagggcaccccaggcccccacaagatggagcacggcggccgggtggtgtgcagcgactgcaacacagaggtggactgctacagccggggccaggccttccacccccagcctgtgtcccgggacagcgcccagcccagcgccccaaatggacctgagcccggcggcagtgaccaggagcacagcccccaccaccagtgcagcaggacagctgctggcagctgcccagagtgccagggcagcctgtaccccagcaaccacgacaggatgctgacagctgtgaagaagaagcccatggccagcctggatggcaagggggacagctcctggaccctggcccggctgtaccacccagacagcacagagctgcagcctgccagcagcctgaccagcggcagccctgagcgggcagaggcccagtacctgctggtgtccaatggccacctgcccaaggcctgtgatgccagccctgagagcacccccctgaccggccagctgcccgggaagcagagggtgcccctgctgctggcccccaagagctag

SEQ ID NO: 157595 - DNA, 2991 bp, synthetic construct
  misc_feature 1..2991: note = Description of Artificial Sequence: Synthetic coding sequence
  source 1..2991: mol_type = other DNA
aacctgagctacaacaagctgtctgaaattgatcctgctggctttgaggacctgcccaacctgcaggaggtgtacctgaacaacaatgagctgacagctgtgcccagcctgggcgccgccagcagccacgtggtgtccctcttcctgcagcacaacaagatccgctctgtggagggcagccagctgaaggcctacctgagcctggaggtgctggacctgagcctgaacaacatcacagaggtgaggaacacctgcttcccccacggcccccccatcaaggagctgaacctggccggcaaccgcatcggcaccctggagctgggcgcctttgatggcctgagccgcagcctgctgaccctgcggctgagcaagaaccgcatcacccagctgcctgtgcgggccttcaagctgccccggctgacccagctggacctgaacagaaaccgcatccggctgattgagggcctgaccttccagggcctgaacagcctggaggtgctgaagctgcagaggaacaacatcagcaagctgacagatggagccttctggggcctgagcaagatgcacgtgctgcacctggagtacaacagcctggtggaggtgaacagcggcagcctgtatggcctgacagccctgcaccagctgcacctgagcaacaacagcatcgcccgcatccacaggaagggctggagcttctgccagaagctgcacgagctggtgctgtccttcaacaacctgacccggctggatgaggagagcctggccgagctgagcagcctgtctgtgctgcggctgagccacaacagcatcagccacatcgccgagggcgccttcaagggcctgcggagcctgcgggtgctggacctggaccacaatgagatcagcggcaccatcgaggacaccagcggggccttcagcggcctggacagcctgagcaagctgaacctgggcggcaatgccatccgctctgtgcagtttgatgcctttgtgaagatgaagaacctgaaggagctgcacatcagcagtgacagcttcctgtgtgactgccagctgaagtggctgcccccctggctgattggaaggatgctgcaggcctttgtgacagccacctgtgcccaccctgagagcctgaagggccagagcatcttctctgtgcccccagagagctttgtgtgtgatgacttcctgaagccccagatcatcacccagcctgagaccaccatggccatggtgggcaaggacatccgcttcacctgcagcgctgccagcagcagcagcagccccatgacctttgcctggaagaaggacaatgaggtgctgaccaatgctgacatggagaactttgtgcacgtgcacgcccaggatggagaggtgatggagtacaccaccatcctgcacctgcggcaggtgaccttcggccacgagggccgctaccagtgtgtgatcaccaaccacttcggcagcacctacagccacaaggcccggctgactgtgaatgtgctgcccagcttcaccaagacccctcatgacatcaccatccgcaccaccaccatggcccggctggagtgtgccgccaccggccaccccaacccccagatcgcctggcagaaggatggcggcacagacttccctgctgcccgggagaggaggatgcacgtgatgccagatgatgatgtgttcttcatcacagatgtgaagattgatgatgctggggtgtacagctgcacagcccagaacagcgctggcagcatcagcgccaatgccaccctgactgtgctggagacccccagcctggtggtgcccctggaggacagagtggtgtctgtgggggagaccgtggccctgcagtgcaaggccaccggcaaccccccaccccgcatcacctggttcaagggggaccggcccctgagcctgacagagcggcaccacctgaccccagacaaccagctgctggtggtgcagaatgtggtggctgaagatgctggccgctacacctgtgagatgagcaacaccctgggcacagagcgggcccacagccagctgtctgtgctgcctgctgctggctgcaggaaggatggcaccaccgtgggcatcttcaccatcgctgtggtgagcagcatcgtgctgaccagcctggtgtgggtgtgcatcatctaccagaccaggaagaagtctgaggagtacagcgtgaccaacacagatgagaccgtggtgcccccagatgtgcccagctacctgagcagccagggcaccctgagtgaccggcaggagaccgtggtgaggacagagggcggcccccaggccaacggccacatcgagagcaatggagtgtgccccagagatgccagccacttccctgagccagacacccacagcgtggcctgccggcagcccaagctgtgtgccggcagcgcctaccacaaggagccctggaaggccatggagaaggccgagggcaccccaggcccccacaagatggagcacggcggccgggtggtgtgcagcgactgcaacacagaggtggactgctacagccggggccaggccttccacccccagcctgtgtcccgggacagcgcccagcccagcgcccccaacggccctgagcccggcggcagtgaccaggagcacagcccccaccaccagtgcagcaggacagctgctggcagctgcccagagtgccagggcagcctgtaccccagcaaccacgacaggatgctgacagctgtgaagaagaagcccatggccagcctggatggaaaaggagacagctcctggaccctggcccggctgtaccacccagacagcacagagctgcagcctgccagcagcctgaccagcggcagccctgagagagctgaggcccagtacctgctggtgtccaatggccacctgcccaaggcctgtgatgccagccctgagagcacccccctgaccggccagctgcccgggaagcagagggtgcccctgctgctggcccccaagagctag

SEQ ID NO: 157596 - DNA, 3213 bp, synthetic construct
  misc_feature 1..3213: note = Description of Artificial Sequence: Synthetic coding sequence
  source 1..3213: mol_type = other DNA
atggcccggcctgtgcggggcggcctgggcgcccccaggaggagcccctgcctgctgctgctgtggctgctgctgctgcggctggagcctgtgacagctgctgctggcccccgggccccctgtgccgccgcctgcacctgtgccggggacagcctggactgtggcggccggggcctggccgccctgcccggggacctgcccagctggaccaggagcctgaacctgagctacaacaagctgtctgaaattgatcctgctggctttgaggacctgcccaacctgcaggaggtgtacctgaacaacaatgagctgacagctgtgcccagcctgggcgccgccagcagccacgtggtgtccctcttcctgcagcacaacaagatccgctctgtggagggcagccagctgaaggcctacctgagcctggaggtgctggacctgagcctgaacaacatcacagaggtgaggaacacctgcttcccccacggcccccccatcaaggagctgaacctggccggcaacagaattggcaccctggagctgggcgcctttgatggcctgagccgcagcctgctgaccctgcggctgagcaagaaccgcatcacccagctgcctgtgcgggccttcaagctgccccggctgacccagctggacctgaacagaaaccgcatccgcctcatcgagggcctgaccttccagggcctgaacagcctggaggtgctgaagctgcagaggaacaacatcagcaagctgacagatggagccttctggggcctgagcaagatgcacgtgctgcacctggagtacaacagcctggtggaggtgaacagcggcagcctgtatggcctgacagccctgcaccagctgcacctgagcaacaacagcatcgcccgcatccacaggaagggctggagcttctgccagaagctgcacgagctggtgctgtccttcaacaacctgacccggctggatgaggagagcctggccgagctgagcagcctgtctgtgctgcggctgagccacaacagcatcagccacatcgccgagggcgccttcaagggcctgcggagcctgcgggtgctggacctggaccacaatgagatcagcggcaccatcgaggacaccagcggggccttcagcggcctggacagcctgagcaagctgctgctgctggagcccagccagagcgctggctgcagcagccccagccagccccacatgtctgctgggggccgcaccctgtttggaaacaagatcaagtctgtggccaagagggccttcagcggcctggagggcctggagcacctgaacctgggcggcaatgccatccgctctgtgcagtttgatgcctttgtgaagatgaagaacctgaaggagctgcacatcagcagtgacagcttcctgtgtgactgccagctgaagtggctgcccccctggctgattggccgcatgctgcaggcctttgtgacagccacctgtgcccaccctgagagcctgaagggccagagcatcttctctgtgcccccagagagctttgtgtgtgatgacttcctgaagccccagatcatcacccagcctgagaccaccatggccatggtgggcaaggacatccgcttcacctgcagcgctgccagcagcagcagcagccccatgacctttgcctggaagaaggacaatgaggtgctgaccaatgctgacatggagaactttgtgcacgtgcacgcccaggatggagaggtgatggagtacaccaccatcctgcacctgcggcaggtgacctttggacatgagggccgctaccagtgtgtgatcaccaaccacttcggcagcacctacagccacaaggcccggctgactgtgaatgtgctgcccagcttcaccaagacccctcatgacatcaccatccgcaccaccaccatggcccggctggagtgtgccgccaccggccaccccaacccccagatcgcctggcagaaggatggcggcacagacttccctgctgcccagacccccagcctggtggtgcccctggaggacagagtggtgtctgtgggggagaccgtggccctgcagtgcaaggccaccggcaaccccccaccccgcatcacctggttcaagggggaccggcccctgagcctgacagagcggcaccacctgaccccagacaaccagctgctggtggtgcagaatgtggtggctgaagatgctggccgctacacctgtgagatgagcaacaccctgggcacagagcgggcccacagccagctgtctgtgctgcctgctgctggctgcaggaaggatggcaccaccgtgggcatcttcaccatcgctgtggtgagcagcatcgtgctgaccagcctggtgtgggtgtgcatcatctaccagaccaggaagaagtctgaggagtacagcgtgaccaacacagatgagaccgtggtgcccccagatgtgcccagctacctgagcagccagggcaccctgagtgaccggcaggagaccgtggtgaggacagagggcggcccccaggccaacggccacatcgagagcaatggagtgtgccccagagatgccagccacttccctgagccagacacccacagcgtggcctgccggcagcccaagctgtgtgccggcagcgcctaccacaaggagccctggaaggccatggagaaggccgagggcaccccaggcccccacaagatggagcacggcggccgggtggtgtgcagcgactgcaacacagaggtggactgctacagccggggccaggccttccacccccagcctgtgtcccgggacagcgcccagcccagcgcccccaacggccctgagcccggcggcagtgaccaggagcacagcccccaccaccagtgcagcaggacagctgctggcagctgcccagagtgccagggcagcctgtaccccagcaaccacgacaggatgctgacagctgtgaagaagaagcccatggccagcctggatggaaaaggagacagctcctggaccctggcccggctgtaccacccagacagcacagagctgcagcctgccagcagcctgaccagcggcagccctgagagagctgaggcccagtacctgctggtgtccaatggccacctgcccaaggcctgtgatgccagccctgagagcacccccctgaccggccagctgcccgggaagcagagggtgcccctgctgctggcccccaagagctag

SEQ ID NO: 157597 - DNA, 3198 bp, synthetic construct
  misc_feature 1..3198: note = Description of Artificial Sequence: Synthetic coding sequence
  source 1..3198: mol_type = other DNA
atggccccagcccccctgggcgtgcctgaggagcagctgctgggctgccgcagccgggtgctgagccggctgctcttcatcgcccagacagccctgctgctgctgcctgctgctggggccggcctgtgcccagccccctgcagctgccgcatccccctgctggactgcagcaggaggaagctgcctgcccccagctggagggccctgagcggcctgctgcccccagacacagccatcctggacttcagccacaaccggctgagcaactggaacatcagcctggagagccagaccctgcaggaggtgaagatgaactacaatgagctgacagagatcccctactttggagagcccaccagcaacatcaccctgctgagcctggtgcacaacatcatccctgagatcaatgcccaggccctgcagttctacccagccctggagagcctggacctgagcagcaacatcatcagcgagatcaagaccagcagcttccccaggatgcagctgaagtacctgaacctgagcaacaaccgcatcaccaccctggaggccggctgctttgacaacctgagcagcagcctgctggtggtgaagctgaacagaaacaggatgtccatgatcccccccaagatcttcaagctgccccacctgcagttcctggagctgaagaggaaccgcatcaagatcgtggagggcctgaccttccagggcctggacagcctgcggagcctgaagatgcagagaaatggcatcagcaagctgaaggatggagccttcttcggcctgaacaacatggaggagctggagctggagcacaacaacctgaccagggtgaacaagggctggctgtatggcctgaggatgctgcagcagctgtatgtgtcccagaatgccatcgagcgcatcagcccagatgcctgggagttctgccagaggctgtctgagctggacctgagctacaaccagctgacccggctggatgaaagtgcctttgtgggcctgagcctgctggagcggctgaacctgggggacaacagagtgacccacatcgcagatggagtcttccgcttcctgagcaacctgcagaccctggacctgagaaataatgagatctcctgggccattgaagatgccagcgaggcctttgctggcctgaccagcctgaccaagctgatcctgcagggcaaccagatcaagagcatcaccaagaaggccttcatcggcctggagagcctggagcacctggacctgaacaacaatgccatcatgagcatccaggagaatgccttcagccagacccacctgaaggagctgatcctgaacaccagcagcctgctgtgtgactgccacctgaagtggctgctgcagtggctggtggacaacaacttccagcacagcgtgaatgtgtcctgtgcccaccctgagtggctggccggccagagcatcctgaatgtggacctgaaggactttgtgtgtgatgacttcctgaagccccagatccgcacccaccctgagaccatcatcgccctgcggggcatgaatgtgaccctgacctgcacagctgtgagcagcagtgacagccccatgagcacagtgtggaggaaggacagcgagatcctgtatgatgtggacacagagaactttgtgcgctactggcagcaggccggggaggccctggagtacaccagcatcctgcacctgttcaacgtgaacttcacagatgagggcaagtaccagtgcatcgtgaccaaccacttcggcagcaactacagccagaaggccaagctgactgtgaatgagatgcccagcttcctgaagacccccatggacctgaccatcagaactggagccatggcccggctggagtgtgccgctgagggccacccagccccccagatctcctggcagaaggatggcggcacagacttccctgctgcccgggagaggaggatgcacgtgatgccagaagatgatgtgttcttcatcgccaacgtgaagattgaggacatgggcatctacagctgcatggcccagaacacagctgggggcctgagcgccaatgccagcctgactgtgctggagacccccagcttcatccggcccctggaggacaagacagtgaccagaggagaaacagctgtgctgcagtgcatcgccggcggcagccctgccccccggctgaactggaccaaggatgatggccccctgctggtgacagagcggcacttctttgctgctgccaaccagctgctgatcatcgtggatgctggcctggaggatgctgggaagtacacctgcatcatgagcaacaccctgggcacagagcggggccacatctacctgaatgtcatcagcagccccaactgtgacagcagccagagcagcatcggccatgaagatgatggctggaccaccgtgggcatcgtcatcatcgtggtggtgtgctgcgtggtgggcaccagcctcatctgggtgattgtcatctaccacatgaggaggaagaatgaagactacagcatcaccaacacagaggagctgaacctgcctgctgacatccccagctacctgagcagccagggcaccctgtctgagccccaggagggctacagcaacagcgaggccggcagccaccagcagctgatgcccccagccaacggctacatccacaagggcacagatggcggcaccggcaccagggtcatctgcagcgactgctatgacaatgccaacatctacagcaggacccgggagtactgcccctacacctacatcgccgaggaggatgtgctggaccagaccctgagcagcctgatggtgcagatgcccaaggagacctacctggtgcaccccccccaggacaccacagccctggagagcctcatccccagcgccaaccgggagcccagcgccttccccaccaaccacgagcgcatcagcgagaagaagctgcccagcacccagatgtctggagagaccctgcagaggcctgtgtggaacatcaaccgggagctgggcctgccccacccccccttcagccagcagcctgtgcatgagagcccccagctgcaccagaatgaaggcctggccggccgggagccagactgcagcgccagctccatgagctgccaccggctgcaggaccacgcctttgacttcagcaggaccaggaacatccaggacggcagcgagggcacctag

SEQ ID NO: 157598 - DNA, 876 bp, synthetic construct
  misc_feature 1..876: note = Description of Artificial Sequence: Synthetic coding sequence
  source 1..876: mol_type = other DNA
atggagagcgagaggagcaagaggatgggaaatgcctgcatccccctgaagagaattgcctacttcctgtgcctgctgagcgccctgctgctgacagagggcaagaagccagccaagcccaagtgcccagctgtgtgcacctgcaccaaggacaatgccctgtgtgaaaatgcccggagcatccccaggacagtgcccccagatgtgatcagcctgagctttgtgcgcagcggcttcacagagatcagcgagggcagcttcctgttcacccccagcctgcagctgctgctcttcaccagcaacagctttgatgtgatcagtgatgatgccttcatcggcctgccccacctggagtacctgttcatcgagaacaacaacatcaagagcatcagccgccacaccttccggggcctgaagagcctcatccacctgagcctggccaacaacaacctgcagaccctgcccaaggacatcttcaagggcctggacagcctgaccaacgtggacctgcggggcaacagcttcaactgtgactgcaagctgaagtggctggtggagtggctgggccacaccaatgccaccgtggaggacatctactgtgagggccccccagagtacaagaagaggaagatcaacagcctgagcagcaaggactttgactgcatcatcacagaatttgccaagagccaggacctgccctaccagagcctgagcattgacaccttctcctacctgaatgatgaatatgtggtgattgcccagcccttcaccgggaagtgcatcttcctggagtgggaccacgtggagaagaccttcagaaattatgacaacatcaccgtgctgcgggagatccaccgcttcaccaacatgtcctag

SEQ ID NO: 157599 - DNA, 1674 bp, synthetic construct
  misc_feature 1..1674: note = Description of Artificial Sequence: Synthetic coding sequence
  source 1..1674: mol_type = other DNA
atggagagcgagaggagcaagaggatgggaaatgcctgcatccccctgaagagaattgcctacttcctgtgcctgctgagcgccctgctgctgacagagggcaagaagccagccaagcccaagtgcccagctgtgtgcacctgcaccaaggacaatgccctgtgtgaaaatgcccggagcatccccaggacagtgcccccagatgtgatcagcctgagctttgtgcgcagcggcttcacagagatcagcgagggcagcttcctgttcacccccagcctgcagctgctgctcttcaccagcaacagctttgatgtgatcagtgatgatgccttcatcggcctgccccacctggagtacctgttcatcgagaacaacaacatcaagagcatcagccgccacaccttccggggcctgaagagcctcatccacctgagcctggccaacaacaacctgcagaccctgcccaaggacatcttcaagggcctggacagcctgaccaacgtggacctgcggggcaacagcttcaactgtgactgcaagctgaagtggctggtggagtggctgggccacaccaatgccaccgtggaggacatctactgtgagggccccccagagtacaagaagaggaagatcaacagcctgagcagcaaggactttgactgcatcatcacagaatttgccaagagccaggacctgccctaccagagcctgagcattgacaccttctcctacctgaatgatgaatatgtggtgattgcccagcccttcaccgggaagtgcatcttcctggagtgggaccacgtggagaagaccttcagaaattatgacaacatcaccggcaccagcacagtggtgtgcaagcccatcgtgattgagacccagctgtatgtgattgtggcccagctgtttggaggcagccacatctacaagagggacagctttgccaacaagttcatcaagatccaggacatcgagatcctgaagatcaggaagcccaatgacatcgagaccttcaagattgagaacaactggtactttgtggtggccgacagcagcaaggccggcttcaccaccatctacaagtggaatggaaatggcttctacagccaccagagcctgcacgcctggtacagagacacagatgtggagtacctggagatcgtgaggaccccccagaccctgcggaccccccacctgatcctgagcagcagcagccagaggcctgtgatctaccagtggaacaaggccacccagctgttcaccaaccagacagacatccccaacatggaggatgtgtatgctgtgaagcacttctctgtgaagggagatgtgtacatctgcctgacccgcttcatcggggacagcaaggtgatgaagtggggcggcagcagcttccaggacatccagaggatgcccagccggggctccatggtgttccagcccctgcagatcaacaactaccagtatgccatcctgggcagtgactacagcttcacccaggtgtacaactgggatgctgagaaggccaagtttgtgaagttccaggagctgaatgtgcaggcccccaggagcttcacccacgtgtccatcaacaagaggaacttcctgtttgccagcagcttcaagggcaacacccagatctacaagcacgtgattgtggacctgagcgcctag

SEQ ID NO: 157600 - DNA, 1530 bp, synthetic construct
  misc_feature 1..1530: note = Description of Artificial Sequence: Synthetic coding sequence
  source 1..1530: mol_type = other DNA
atggagagcgagaggagcaagaggatgggaaatgcctgcatccccctgaagagaattgcctacttcctgtgcctgctgagcgccctgctgctgacagagggcaagaagccagccaagcccaagtgcccagctgtgtgcacctgcaccaaggacaatgccctgtgtgaaaatgcccggagcatccccaggacagtgcccccagatgtgatcagcctgagctttgtgcgcagcggcttcacagagatcagcgagggcagcttcctgttcacccccagcctgcagctgctgagcctggccaacaacaacctgcagaccctgcccaaggacatcttcaagggcctggacagcctgaccaacgtggacctgcggggcaacagcttcaactgtgactgcaagctgaagtggctggtggagtggctgggccacaccaatgccaccgtggaggacatctactgtgagggccccccagagtacaagaagaggaagatcaacagcctgagcagcaaggactttgactgcatcatcacagaatttgccaagagccaggacctgccctaccagagcctgagcattgacaccttctcctacctgaatgatgaatatgtggtgattgcccagcccttcaccgggaagtgcatcttcctggagtgggaccacgtggagaagaccttcagaaattatgacaacatcaccggcaccagcacagtggtgtgcaagcccatcgtgattgagacccagctgtatgtgattgtggcccagctgtttggaggcagccacatctacaagagggacagctttgccaacaagttcatcaagatccaggacatcgagatcctgaagatcaggaagcccaatgacatcgagaccttcaagattgagaacaactggtactttgtggtggccgacagcagcaaggccggcttcaccaccatctacaagtggaatggaaatggcttctacagccaccagagcctgcacgcctggtacagagacacagatgtggagtacctggagatcgtgaggaccccccagaccctgcggaccccccacctgatcctgagcagcagcagccagaggcctgtgatctaccagtggaacaaggccacccagctgttcaccaaccagacagacatccccaacatggaggatgtgtatgctgtgaagcacttctctgtgaagggagatgtgtacatctgcctgacccgcttcatcggggacagcaaggtgatgaagtggggcggcagcagcttccaggacatccagaggatgcccagccggggctccatggtgttccagcccctgcagatcaacaactaccagtatgccatcctgggcagtgactacagcttcacccaggtgtacaactgggatgctgagaaggccaagtttgtgaagttccaggagctgaatgtgcaggcccccaggagcttcacccacgtgtccatcaacaagaggaacttcctgtttgccagcagcttcaagggcaacacccagatctacaagcacgtgattgtggacctgagcgcctag

SEQ ID NO: 157601 - DNA, 777 bp, synthetic construct
  misc_feature 1..777: note = Description of Artificial Sequence: Synthetic coding sequence
  source 1..777: mol_type = other DNA
atgtctgcctaccccaagagctacaacccctttgatgatgatggagaagatgaaggagcccggcctgccccctggagagatgcccgggacctgcctgatggcccagatgccccagctgaccggcagcagtacctgcggcaggaggtgctgcggcgggcagaggccacagctgccagcaccagccgcagcctggccctgatgtatgagagcgagaaggtgggcgtggccagcagcgaggagctggcccggcagaggggcgtgctggagaggacagagaagatggtggacaagatggaccaggacctgaagatcagccagaagcacatcaacagcatcaagtctgtgtttggaggcctggtgaactacttcaagagcaagcctgtggagaccccacctgagcagaatggcaccctgaccagccagcccaacaaccggctgaaggaggccatcagcaccagcaaggagcaggaggccaagtaccaggccagccaccccaacctgaggaagctggatgacacagatcctgtgcccaggggggccggcagcgccatgagcacagatgcctaccccaagaacccccacctgcgggcctaccaccagaagattgacagcaacctggatgagctgtccatgggcctgggccgcctgaaggacatcgccctgggcatgcagacagaaattgaggagcaggatgacatcctggaccggctgaccaccaaggtggacaagctggatgtgaacatcaagagcacagagaggaaggtgcggcagctgtag

SEQ ID NO: 157602 - DNA, 2466 bp, synthetic construct
  misc_feature 1..2466: note = Description of Artificial Sequence: Synthetic coding sequence
  source 1..2466: mol_type = other DNA
atggccggccctggcagcactggaggccagattggagctgctgccctggccggcggggcccggagcaaggtggcccccagcgtggactttgaccacagctgcagcgacagcgtggagtacctgaccctgaactttggcccctttgagaccgtgcaccgctggaggcggctgcccccctgtgatgaatttgtgggcgcccggcgcagcaagcacacagtggtggcctacaaggatgccatctacgtgtttggaggagacaatggagccttcaccaccggcaccccaccagccccccgctaccaccacagcgctgtggtgtatggcagctccatgtttgtgtttggaggctacaccggggacatctacagcaacagcaacctgaagaacaagaatgacctgtttgagtacaagtttgccaccggccagtggacagagtggaagattgagggccgcctgcctgtggcccggagcgcccatggagccaccgtgtacagcgacaagctgtggatctttgctggctatgatggaaatgcccggctgaatgacatgtggaccatcggcctgcaggaccgggagctgacctgctgggaggaggtggcccagagcggggagatcccccccagctgctgcaacttccctgtggccgtgtgccgggacaagatgtttgtgttttctggccagagcggggccaagatcaccaacaacctcttccagtttgagttcaaggacaagacctggacccgcatccccacagagcacctgctgcggggcagccccccaccaccccagaggagatatggccacaccatggtggcctttgacagacacctgtatgtgtttggaggagctgctgacaacaccctgcccaatgagctgcactgctatgatgtggacttccagacctgggaggtggtgcagcccagcagtgacagcgaggtgggcggcgctgaggtgcctgagcgggcctgtgccagcgaggaggtgcccaccctgacctatgaggagcgggtgggcttcaagaagagcagagatgtgtttggcctggactttggcaccaccagcgccaagcagcccacccagcctgccagcgagctgcccagcggccgcctcttccacgccgctgctgtgatcagtgatgccatgtacatctttggaggcaccgtggacaacaacatccgcagcggggagatgtaccgcttccagttcagctgctaccccaagtgcaccctgcacgaggactatggccgcctgtgggagagccggcagttctgtgatgtggagtttgtgctgggggagaaggaggagtgtgtgcagggccacgtggccatcgtgacagcccggagccgctggctgcggaggaagatcacccaggcccgggagcggctggcccagaagctggagcaggaggccgcccctgtgccccgggaggcccctggggtggccgccggcggggcccggccccccctgctgcacgtggccatccgggaggccgaggcccggccctttgaggtgctgatgcagttcctgtacacagacaagatcaagtaccccaggaaaggacatgtggaggatgtgctgctgatcatggatgtgtacaagctggccctgtccttccagctgtgccgcctggagcagctgtgccggcagtacatcgaggcctctgtggacctgcagaatgtgctggtggtgtgtgagagcgctgcccggctgcagctgagccagctgaaggagcactgcctgaactttgtggtgaaggagagccacttcaaccaggtgatcatgatgaaggagtttgagcggctgagcagccccctcatcgtggagatcgtgcggaggaagcagcagcccccacccaggacccccctggaccagcctgtggacatcggcaccagcctcatccaggacatgaaggcctacctggagggcgctggagctgagttctgtgacatcaccctgctgctggatggccaccccaggcctgcccacaaggccatcctggccgcccggagcagctactttgaggccatgttccgctccttcatgccagaagatggccaggtgaacatcagcattggagagatggtgcccagccggcaggcctttgagagcatgctgcgctacatctactacggggaggtgaacatgcctcctgaggacagcctgtacctgtttgctgccccctactactacggcttctacaacaaccggctgcaggcctactgcaagcagaacctggagatgaatgtgacagtgcagaatgtgctgcagatcctggaggccgctgacaagacccaggccctggacatgaagaggcactgcctgcacatcatcgtgcaccagttcaccaaggtgtccaagctgcccaccctgcggagcctgagccagcagctgctgctggacatcatcgacagcctggccagccacatcagtgacaagcagtgtgccgagctgggcgctgacatctag

SEQ ID NO: 157603 - DNA, 2400 bp, synthetic construct
  misc_feature 1..2400: note = Description of Artificial Sequence: Synthetic coding sequence
  source 1..2400: mol_type = other DNA
atgaactatgaccccatcgtgtccaaggtggccgaggtgctggccagcggccgggccatcaggaagcgggaggtggagaggagcaagcacacagtggtggcctacaaggatgccatctacgtgtttggaggagacaacgggaagaccatgctgaatgacctgctgcgctttgatgtgaaggactgctcctggtgccgggccttcaccaccggcaccccaccagccccccgctaccaccacagcgctgtggtgtatggcagctccatgtttgtgtttggaggctacaccggggacatctacagcaacagcaacctgaagaacaagaatgacctgtttgagtacaagtttgccaccggccagtggacagagtggaagattgagggccgcctgcctgtggcccggagcgcccatggagccaccgtgtacagcgacaagctgtggatctttgctggctatgatggaaatgcccggctgaatgacatgtggaccatcggcctgcaggaccgggagctgacctgctgggaggaggtggcccagagcggggagatcccccccagctgctgcaacttccctgtggccgtgtgccgggacaagatgtttgtgttttctggccagagcggggccaagatcaccaacaacctcttccagtttgagttcaaggacaagacctggacccgcatccccacagagcacctgctgcggggcagccccccaccaccccagaggagatatggccacaccatggtggcctttgacagacacctgtatgtgtttggaggagctgctgacaacaccctgcccaatgagctgcactgctatgatgtggacttccagacctgggaggtggtgcagcccagcagtgacagcgaggtgggcggcgctgaggtgcctgagcgggcctgtgccagcgaggaggtgcccaccctgacctatgaggagcgggtgggcttcaagaagagcagagatgtgtttggcctggactttggcaccaccagcgccaagcagcccacccagcctgccagcgagctgcccagcggccgcctcttccacgccgctgctgtgatcagtgatgccatgtacatctttggaggcaccgtggacaacaacatccgcagcggggagatgtaccgcttccagttcagctgctaccccaagtgcaccctgcacgaggactatggccgcctgtgggagagccggcagttctgtgatgtggagtttgtgctgggggagaaggaggagtgtgtgcagggccacgtggccatcgtgacagcccggagccgctggctgcggaggaagatcacccaggcccgggagcggctggcccagaagctggagcaggaggccgcccctgtgccccgggaggcccctggggtggccgccggcggggcccggccccccctgctgcacgtggccatccgggaggccgaggcccggccctttgaggtgctgatgcagttcctgtacacagacaagatcaagtaccccaggaaaggacatgtggaggatgtgctgctgatcatggatgtgtacaagctggccctgtccttccagctgtgccgcctggagcagctgtgccggcagtacatcgaggcctctgtggacctgcagaatgtgctggtggtgtgtgagagcgctgcccggctgcagctgagccagctgaaggagcactgcctgaactttgtggtgaaggagagccacttcaaccaggtgatcatgatgaaggagtttgagcggctgagcagccccctcatcgtggagatcgtgcggaggaagcagcagcccccacccaggacccccctggaccagcctgtggacatcggcaccagcctcatccaggacatgaaggcctacctggagggcgctggagctgagttctgtgacatcaccctgctgctggatggccaccccaggcctgcccacaaggccatcctggccgcccggagcagctactttgaggccatgttccgctccttcatgccagaagatggccaggtgaacatcagcattggagagatggtgcccagccggcaggcctttgagagcatgctgcgctacatctactacggggaggtgaacatgcctcctgaggacagcctgtacctgtttgctgccccctactactacggcttctacaacaaccggctgcaggcctactgcaagcagaacctggagatgaatgtgacagtgcagaatgtgctgcagatcctggaggccgctgacaagacccaggccctggacatgaagaggcactgcctgcacatcatcgtgcaccagttcaccaaggtgtccaagctgcccaccctgcggagcctgagccagcagctgctgctggacatcatcgacagcctggccagccacatcagtgacaagcagtgtgccgagctgggcgctgacatctag

SEQ ID NO: 157604 - DNA, 1560 bp, synthetic construct; identical to SEQ ID NO: 156604
  misc_feature 1..1560: note = Description of Artificial Sequence: Synthetic coding sequence
  source 1..1560: mol_type = other DNA

SEQ ID NO: 157605 - DNA, 3036 bp, synthetic construct
  misc_feature 1..3036: note = Description of Artificial Sequence: Synthetic coding sequence
  source 1..3036: mol_type = other DNA
atgattgaaaattccatgtttgaggaggagccagatgtggtggacctggccaaggagccctgcctgcaccccctggagccagatgaggtggagtatgagccccggggcagccggctgctggtgcggggcctgggggagcacgagatggaggaggatgaggaggactatgagagcagcgccaagctgctgggcatgtccttcatgaacagaagcagcggcctgagaaattctgccaccggctaccggcagagcccagatggagcctgcagcgtgcccagcgcccggaccatggtggtgtgtgccttcgtcatcgtggtggccgtgtctgtcatcatggtgatctacctgctgccccgctgcaccttcaccaaggagggctgccacaagaagaaccagagcatcggcctcatccagccctttgccaccaacgggaagctgttcccctgggcccagatccggctgcccacagctgtggtgcccctgcgctatgagctgagcctgcaccccaacctgacctccatgaccttccggggctctgtgaccatctctgtgcaggccctgcaggtgacctggaacatcatcctgcacagcacaggccacaacatcagccgggtgaccttcatgtctgctgtgagcagccaggagaagcaggccgagatcctggagtatgcctaccacggccagatcgccatcgtggcccctgaggccctgctggccggccacaactacaccctgaagattgagtacagcgccaacatcagcagcagctactacggcttctacggcttctcctacacagatgagagcaatgagaagaagtactttgctgccacccagtttgagcccctggccgcccggagcgccttcccctgctttgatgagcccgccttcaaggccaccttcatcatcaagatcatcagagatgagcagtacacagccctgagcaacatgcccaagaagagctctgtggtgctggatgatggcctggtgcaggatgagttcagcgagagcgtgaagatgagcacctacctggtggccttcatcgtgggggagatgaagaacctgagccaggatgtgaatggcaccctggtgtccatctatgctgtgcctgagaagattggccaggtgcactacgccctggagaccaccgtgaagctgctggagttcttccagaactactttgagatccagtaccccctgaagaagctggacctggtggccatcccagactttgaagctggggccatggagaactggggcctgctgaccttccgggaggagaccctgctgtatgacagcaacaccagctccatggctgacaggaagctggtgaccaagatcatcgcccacgagctggcccaccagtggtttggaaacctggtgaccatgaagtggtggaatgacctgtggctgaatgaaggatttgccaccttcatggagtacttcagcctggagaagatcttcaaggagctgagcagctatgaggacttcctggatgcccgcttcaagaccatgaagaaggacagcctgaacagcagccaccccatcagcagctctgtgcagagcagcgagcagatcgaggagatgtttgacagcctgagctacttcaagggcagcagcctgctgctgatgctgaagacctacctgtctgaagatgtgttccagcacgctgtggtgctgtacctgcacaaccacagctatgccagcatccagagtgatgacctgtgggacagcttcaatgaggtgaccaaccagaccctggatgtgaagaggatgatgaagacctggaccctgcagaagggcttccccctggtgacagtgcagaagaagggcaaggagctgttcatccagcaggagcgcttcttcctgaacatgaagccagagatccagcccagcgacaccagctacctgtggcacatccccctgtcctatgtgacagagggcaggaactacagcaagtaccagagcgtgtccctgctggacaagaagagcggggtcatcaacctgacagaggaggtgctgtgggtgaaggtgaacatcaacatgaatggctactacatcgtgcactatgcagatgatgactgggaggccctgatccaccagctgaagatcaacccctacgtgctgagtgacaaggaccgggccaacctgatcaacaacatctttgagctggccggcctgggcaaggtgcccctgaagagggcctttgacctgatcaactacctgggcaatgaaaaccacacagcccccatcacagaggccctcttccagacagacctgatctacaacctgctggagaagctgggctacatggacctggccagccggctggtgaccagggtcttcaagctgctgcagaaccagatccagcagcagacctggacagatgagggcacccccagcatgagggagctgcggagcgccctgctggagtttgcctgcacccacaacctgggcaactgcagcaccacagccatgaagctgtttgatgactggatggccagcaatggcacccagagcctgcccacagatgtgatgaccaccgtcttcaaggtgggcgccaagacagacaagggctggagcttcctgctgggcaagtacatcagcatcggcagcgaggccgagaagaacaagatcctggaggccctggccagcagtgaagatgtgaggaagctgtactggctgatgaagagcagcctgaatggagacaacttccgcacccagaagctgtccttcatcatcagaacagtgggccgccacttccctggccacctgctggcctgggactttgtgaaggagaactggaacaagctggtgcagaagttccccctgggcagctacaccatccagaacatcgtggccggcagcacctacctgttcagcaccaagacccacctgtctgaggtgcaggccttctttgagaaccagagcgaggccaccttccggctgcgctgtgtgcaggaggccctggaggtgatccagctgaacatccagtggatggagaagaacctgaagagcctgacctggtggctgtag

SEQ ID NO: 157606 - DNA, 3450 bp, synthetic construct
  misc_feature 1..3450: note = Description of Artificial Sequence: Synthetic coding sequence
  source 1..3450: mol_type = other DNA
atggccgagaggaaaggaacagccaaggtggacttcctgaagaagattgagaaggagatccagcagaagtgggacacagagcgggtgtttgaggtgaatgccagcaacctggagaagcagaccagcaagggcaagtactttgtgaccttcccctacccctacatgaatggccgcctgcacctgggccacaccttcagcctgagcaaatgtgaggcctgtgccgacaagctgaagcgggagattgagctgtatggctgccccccagacttcccagatgaggaggaggaggaggaggagacctctgtgaagacagaggacatcatcatcaaggacaaggccaagggcaagaagagcaaggctgctgccaaggccggcagcagcaagtaccagtggggcatcatgaagagcctgggcctgagtgatgaggagatcgtgaagttcagcgaggccgagcactggctggactacttcccccccctggccatccaggacctgaagaggatgggcctgaaggtggactggaggaggagcttcatcaccacagatgtgaacccctactatgacagctttgtgcgctggcagttcctgaccctgcgggagaggaacaagatcaagtttgggaagcgctacaccatctacagccccaaggatggccagccctgcatggaccatgaccggcagacaggagaaggagtgggcccccaggagtacaccctgctgaagctgaaggtgctggagccctaccccagcaagctgagcggcctgaagggcaagaacatcttcctggtggccgccaccctgcggcctgagaccatgtttggccagaccaactgctgggtgcggccagacatgaagtacatcggctttgaaacagtgaatggagacatcttcatctgcacccagaaggccgccaggaacatgagctaccagggcttcaccaaggacaacggggtggtgcctgtggtgaaggagctgatgggagaggagatcctgggcgccagcctgagcgcccccctgaccagctacaaggtgatctacgtgctgcccatgctgaccatcaaggaggacaagggcactggagtggtgacctctgtgcccagcgacagcccagatgacattgctgccctgcgggacctgaagaagaagcaggccctgcgggccaagtatggcatcagagatgacatggtgctgccctttgagcctgtgcctgtgattgagatccctggcttcggcaacctgtctgctgtgaccatctgtgatgagctgaagatccagagccagaatgaccgggagaagctggccgaggccaaggagaagatctacctgaagggcttctatgagggcatcatgctggtggatggcttcaagggccagaaggtgcaggatgtgaagaagaccatccagaagaagatgattgatgctggagatgccctgatctacatggagcctgagaagcaggtgatgagccgcagcagtgatgaatgtgtggtggccctgtgtgaccagtggtacctggactatggagaggagaactggaagaagcagaccagccagtgcctgaagaacctggagaccttctgtgaggagaccaggaggaactttgaggccaccctgggctggctgcaggagcacgcctgcagcaggacctacggcctgggcacccacctgccctgggatgagcagtggctgattgagagcctgagtgacagcaccatctacatggccttctacacagtggcccacctgctgcagggcggcaacctgcacggccaggccgagagccccctgggcatccggccccagcagatgaccaaggaggtgtgggactatgtgttcttcaaggaggcccccttccccaagacccagatcgccaaggagaagctggaccagctgaagcaggagtttgagttctggtaccctgtggacctgcgggtgtctgggaaggacctggtgcccaaccacctgagctactacctgtacaaccacgtggccatgtggccagagcagagcgacaagtggcccacagctgtgcgggccaacggccacctgctgctgaacagcgagaagatgagcaagagcacaggcaacttcctgaccctgacccaggccatcgacaagttcagcgcagatggcatgaggctggccctggctgatgctggggacacagtggaggatgccaactttgtggaggccatggctgatgctggcatcctgcggctgtacacctgggtggagtgggtgaaggagatggtggccaactgggacagcctgcggagcggccctgccagcaccttcaatgacagagtgtttgccagcgagctgaatgccggcatcatcaagacagaccagaactatgagaagatgatgttcaaggaggccctgaagacaggcttctttgagttccaggccgccaaggacaagtaccgggagctggccgtggagggcatgcaccgggagctggtgttccgcttcatcgaggtgcagaccctgctgctggcccccttctgcccccacctgtgtgagcacatctggaccctgctgggcaagccagacagcatcatgaatgcctcctggcctgtggccggccctgtgaatgaggtgctgatccacagcagccagtacctgatggaggtgacccatgacctgcggctgcggctgaagaactacatgatgcctgccaagggcaagaagacagacaagcagcccctgcagaagcccagccactgcaccatctacgtggccaagaactacccaccctggcagcacaccaccctgtctgtgctgaggaagcactttgaggccaacaacgggaagctgcctgacaacaaggtgattgccagcgagctgggctccatgcctgagctgaagaagtacatgaagaaggtgatgccctttgtggccatgatcaaggagaacctggagaagatgggcccccgcatcctggacctgcagctggagtttgatgagaaggctgtgctgatggagaacatcgtgtacctgaccaacagcctggagctggagcacatcgaggtgaagtttgccagcgaggccgaggacaagatccgggaggactgctgccctgggaagcccctgaatgtgttccgcatcgagcccggggtgtctgtgtccctggtgaacccccagcccagcaatggccacttcagcaccaagattgagatccggcagggcgacaactgtgacagcatcatccggcggctgatgaagatgaacagaggcatcaaggacctgagcaaggtgaagctgatgagatttgatgaccccctgctgggccccaggagagtgcctgtgctgggcaaggagtacacagagaagacccccatcagcgagcacgctgtgttcaacgtggacctgatgagcaagaagatccacctgacagaaaatggcatccgggtggacatcggggacaccatcatctacctggtgcactag

SEQ ID NO: 157607 - DNA, 480 bp, synthetic construct
  misc_feature 1..480: note = Description of Artificial Sequence: Synthetic coding sequence
  source 1..480: mol_type = other DNA
atggccgagaggaaaggaacagccaaggtggacttcctgaagaagattgagaaggagatccagcagaagtgggacacagagcgggtgtttgaggtgaatgccagcaacctggagaagcagaccagcaagggcaagtactttgtgaccttcccctacccctacatgaatggccgcctgcacctgggccacaccttcagcctgagcaaatgtgaatttgctgtgggctaccagaggctgaagggcaagtgctgcctcttccccttcggcctgcactgcaccggcatgcccatcaaggcctgtgccgacaagctgaagcgggagattgagctgtatggctgccccccagacttcccagatgaggaggaggaggaggaggagacctctgtgaagacagaggacatcatcatcaaggacaaggccaagggcaagaagagcaaggccgccaagctggacctgctgaacaccagcggggccctgtag

SEQ ID NO: 157608 - DNA, 3531 bp, synthetic construct
  misc_feature 1..3531: note = Description of Artificial Sequence: Synthetic coding sequence
  source 1..3531: mol_type = other DNA
atggccgagaggaaaggaacagccaaggtggacttcctgaagaagattgagaaggagatccagcagaagtgggacacagagcgggtgtttgaggtgaatgccagcaacctggagaagcagaccagcaagggcaagtactttgtgaccttcccctacccctacatgaatggccgcctgcacctgggccacaccttcagcctgagcaaatgtgaatttgctgtgggctaccagaggctgaagggcaagtgctgcctcttccccttcggcctgcactgcaccggcatgcccatcaaggcctgtgccgacaagctgaagcgggagattgagctgtatggctgccccccagacttcccagatgaggaggaggaggaggaggagacctctgtgaagacagaggacatcatcatcaaggacaaggccaagggcaagaagagcaaggccgccgccaaggccggcagcagcaagtaccagtggggcatcatgaagagcctgggcctgagtgatgaggagatcgtgaagttcagcgaggccgagcactggctggactacttcccccccctggccatccaggacctgaagaggatgggcctgaaggtggactggaggaggagcttcatcaccacagatgtgaacccctactatgacagctttgtgcgctggcagttcctgaccctgcgggagaggaacaagatcaagtttgggaagcgctacaccatctacagccccaaggatggccagccctgcatggaccatgaccggcagacaggagagggcgtgggcccccaggagtacaccctgctgaagctgaaggtgctggagccctaccccagcaagctgagcggcctgaagggcaagaacatcttcctggtggccgccaccctgcggcctgagaccatgtttggccagaccaactgctgggtgcggccagacatgaagtacatcggctttgagaccgtgaatggagacatcttcatctgcacccagaaggccgccaggaacatgagctaccagggcttcaccaaggacaatggagtggtgcctgtggtgaaggagctgatgggagaggagatcctgggcgccagcctgagcgcccccctgaccagctacaaggtgatctacgtgctgcccatgctgaccatcaaggaggacaagggcaccggggtggtgacctctgtgcccagcgacagcccagatgacattgctgccctgcgggacctgaagaagaagcaggccctgcgggccaagtatggcatcagagatgacatggtgctgccctttgagcctgtgcctgtgattgagatccctggctttggaaacctgtctgctgtgaccatctgtgatgagctgaagatccagagccagaatgaccgggagaagctggccgaggccaaggagaagatctacctgaagggcttctatgagggcatcatgctggtggatggcttcaagggccagaaggtgcaggatgtgaagaagaccatccagaagaagatgattgatgctggagatgccctgatctacatggagcctgagaagcaggtgatgagccgcagcagtgatgaatgtgtggtggccctgtgtgaccagtggtacctggactatggagaggagaactggaagaagcagaccagccagtgcctgaagaacctggagaccttctgtgaggagaccaggaggaactttgaggccaccctgggctggctgcaggagcacgcctgcagcaggacctacggcctgggcacccacctgccctgggatgagcagtggctgattgagagcctgagtgacagcaccatctacatggccttctacacagtggcccacctgctgcagggcggcaacctgcacggccaggccgagagccccctgggcatccggccccagcagatgaccaaggaggtgtgggactatgtgttcttcaaggaggcccccttccccaagacccagatcgccaaggagaagctggaccagctgaagcaggagtttgagttctggtaccctgtggacctgcgggtgtctgggaaggacctggtgcccaaccacctgagctactacctgtacaaccacgtggccatgtggccagagcagagcgacaagtggcccacagctgtgcgggccaacggccacctgctgctgaacagcgagaagatgagcaagagcactggaaacttcctgaccctgacccaggccatcgacaagttcagcgcagatggcatgaggctggccctggctgatgctggggacacagtggaggatgccaactttgtggaggccatggctgatgctggcatcctgcggctgtacacctgggtggagtgggtgaaggagatggtggccaactgggacagcctgcggagcggccctgccagcaccttcaatgacagagtgtttgccagcgagctgaatgccggcatcatcaagacagaccagaactatgagaagatgatgttcaaggaggccctgaagacaggcttctttgagttccaggccgccaaggacaagtaccgggagctggccgtggagggcatgcaccgggagctggtgttccgcttcatcgaggtgcagaccctgctgctggcccccttctgcccccacctgtgtgagcacatctggaccctgctgggcaagccagacagcatcatgaatgcctcctggcctgtggccggccctgtgaatgaggtgctgatccacagcagccagtacctgatggaggtgacccatgacctgcggctgcggctgaagaactacatgatgcctgccaagggcaagaagacagacaagcagcccctgcagaagcccagccactgcaccatctacgtggccaagaactacccaccctggcagcacaccaccctgtctgtgctgaggaagcactttgaggccaacaacgggaagctgcctgacaacaaggtgattgccagcgagctgggctccatgcctgagctgaagaagtacatgaagaaggtgatgccctttgtggccatgatcaaggagaacctggagaagatgggcccccgcatcctggacctgcagctggagtttgatgagaaggctgtgctgatggagaacatcgtgtacctgaccaacagcctggagctggagcacatcgaggtgaagtttgccagcgaggccgaggacaagatccgggaggactgctgccctgggaagcccctgaatgtgttcagaattgagcccggggtgtctgtgtccctggtgaacccccagcccagcaatggccacttcagcaccaagattgagatccggcagggcgacaactgtgacagcatcatccggcggctgatgaagatgaacagaggcatcaaggacctgagcaaggtgaagctgatgagatttgatgaccccctgctgggcccccggcgggtgcctgtgctgggcaaggagtacacagagaagacccccatcagcgagcacgctgtgttcaacgtggacctgatgagcaagaagatccacctgacagaaaatggcatccgggtggacattggagacaccatcatctacctggtgcactag

SEQ ID NO: 157609 - DNA, 3369 bp, synthetic construct
  misc_feature 1..3369: note = Description of Artificial Sequence: Synthetic coding sequence
  source 1..3369: mol_type = other DNA
atgaatggccgcctgcacctgggccacaccttcagcctgagcaaatgtgaatttgctgtgggctaccagaggctgaagggcaagtgctgcctcttccccttcggcctgcactgcaccggcatgcccatcaaggcctgtgccgacaagctgaagcgggagattgagctgtatggctgccccccagacttcccagatgaggaggaggaggaggaggagacctctgtgaagacagaggacatcatcatcaaggacaaggccaagggcaagaagagcaaggccgccgccaaggccggcagcagcaagtaccagtggggcatcatgaagagcctgggcctgagtgatgaggagatcgtgaagttcagcgaggccgagcactggctggactacttcccccccctggccatccaggacctgaagaggatgggcctgaaggtggactggaggaggagcttcatcaccacagatgtgaacccctactatgacagctttgtgcgctggcagttcctgaccctgcgggagaggaacaagatcaagtttgggaagcgctacaccatctacagccccaaggatggccagccctgcatggaccatgaccggcagacaggagagggcgtgggcccccaggagtacaccctgctgaagctgaaggtgctggagccctaccccagcaagctgagcggcctgaagggcaagaacatcttcctggtggccgccaccctgcggcctgagaccatgtttggccagaccaactgctgggtgcggccagacatgaagtacatcggctttgagaccgtgaatggagacatcttcatctgcacccagaaggccgccaggaacatgagctaccagggcttcaccaaggacaatggagtggtgcctgtggtgaaggagctgatgggagaggagatcctgggcgccagcctgagcgcccccctgaccagctacaaggtgatctacgtgctgcccatgctgaccatcaaggaggacaagggcaccggggtggtgacctctgtgcccagcgacagcccagatgacattgctgccctgcgggacctgaagaagaagcaggccctgcgggccaagtatggcatcagagatgacatggtgctgccctttgagcctgtgcctgtgattgagatccctggctttggaaacctgtctgctgtgaccatctgtgatgagctgaagatccagagccagaatgaccgggagaagctggccgaggccaaggagaagatctacctgaagggcttctatgagggcatcatgctggtggatggcttcaagggccagaaggtgcaggatgtgaagaagaccatccagaagaagatgattgatgctggagatgccctgatctacatggagcctgagaagcaggtgatgagccgcagcagtgatgaatgtgtggtggccctgtgtgaccagtggtacctggactatggagaggagaactggaagaagcagaccagccagtgcctgaagaacctggagaccttctgtgaggagaccaggaggaactttgaggccaccctgggctggctgcaggagcacgcctgcagcaggacctacggcctgggcacccacctgccctgggatgagcagtggctgattgagagcctgagtgacagcaccatctacatggccttctacacagtggcccacctgctgcagggcggcaacctgcacggccaggccgagagccccctgggcatccggccccagcagatgaccaaggaggtgtgggactatgtgttcttcaaggaggcccccttccccaagacccagatcgccaaggagaagctggaccagctgaagcaggagtttgagttctggtaccctgtggacctgcgggtgtctgggaaggacctggtgcccaaccacctgagctactacctgtacaaccacgtggccatgtggccagagcagagcgacaagtggcccacagctgtgcgggccaacggccacctgctgctgaacagcgagaagatgagcaagagcactggaaacttcctgaccctgacccaggccatcgacaagttcagcgcagatggcatgaggctggccctggctgatgctggggacacagtggaggatgccaactttgtggaggccatggctgatgctggcatcctgcggctgtacacctgggtggagtgggtgaaggagatggtggccaactgggacagcctgcggagcggccctgccagcaccttcaatgacagagtgtttgccagcgagctgaatgccggcatcatcaagacagaccagaactatgagaagatgatgttcaaggaggccctgaagacaggcttctttgagttccaggccgccaaggacaagtaccgggagctggccgtggagggcatgcaccgggagctggtgttccgcttcatcgaggtgcagaccctgctgctggcccccttctgcccccacctgtgtgagcacatctggaccctgctgggcaagccagacagcatcatgaatgcctcctggcctgtggccggccctgtgaatgaggtgctgatccacagcagccagtacctgatggaggtgacccatgacctgcggctgcggctgaagaactacatgatgcctgccaagggcaagaagacagacaagcagcccctgcagaagcccagccactgcaccatctacgtggccaagaactacccaccctggcagcacaccaccctgtctgtgctgaggaagcactttgaggccaacaacgggaagctgcctgacaacaaggtgattgccagcgagctgggctccatgcctgagctgaagaagtacatgaagaaggtgatgccctttgtggccatgatcaaggagaacctggagaagatgggcccccgcatcctggacctgcagctggagtttgatgagaaggctgtgctgatggagaacatcgtgtacctgaccaacagcctggagctggagcacatcgaggtgaagtttgccagcgaggccgaggacaagatccgggaggactgctgccctgggaagcccctgaatgtgttcagaattgagcccggggtgtctgtgtccctggtgaacccccagcccagcaatggccacttcagcaccaagattgagatccggcagggcgacaactgtgacagcatcatccggcggctgatgaagatgaacagaggcatcaaggacctgagcaaggtgaagctgatgagatttgatgaccccctgctgggcccccggcgggtgcctgtgctgggcaaggagtacacagagaagacccccatcagcgagcacgctgtgttcaacgtggacctgatgagcaagaagatccacctgacagaaaatggcatccgggtggacattggagacaccatcatctacctggtgcactag

SEQ ID NO: 157610 - DNA, 372 bp, synthetic construct
  misc_feature 1..372: note = Description of Artificial Sequence: Synthetic coding sequence
  source 1..372: mol_type = other DNA
atgtggccagagcagagcgacaagtggcccacagctgtgcgggccaacggccacctgctgctgaacagcgagaagatgagcaagagcacaggcaacttcctgaccctgacccaggccatcgacaagttcagcgcagatggcatgaggctggccctggctgatgctggggacacagtggaggatgccaactttgtggaggccatggctgatgctggcatcctgcggctgtacacctgggtggagtgggtgaaggagatggtggccaactgggacagcctgcggagcggccctgccagcaccttcaatgacagagtgtttgccagcgagctgaatgccggcatcatcaagacagaccagaccatgaagaggtag

SEQ ID NO: 157611 - DNA, 1458 bp, synthetic construct
  misc_feature 1..1458: note = Description of Artificial Sequence: Synthetic coding sequence
  source 1..1458: mol_type = other DNA
atgtggccagagcagagcgacaagtggcccacagctgtgcgggccaacggccacctgctgctgaacagcgagaagatgagcaagagcacaggcaacttcctgaccctgacccaggccatcgacaagttcagcgcagatggcatgaggctggccctggctgatgctggggacacagtggaggatgccaactttgtggaggccatggctgatgctggcatcctgcggctgtacacctgggtggagtgggtgaaggagatggtggccaactgggacagcctgcggagcggccctgccagcaccttcaatgacagagtgtttgccagcgagctgaatgccggcatcatcaagacagaccagaactatgagaagatgatgttcaaggaggccctgaagacaggcttctttgagttccaggccgccaaggacaagtaccgggagctggccgtggagggcatgcaccgggagctggtgttccgcttcatcgaggtgcagaccctgctgctggcccccttctgcccccacctgtgtgagcacatctggaccctgctgggcaagccagacagcatcatgaatgcctcctggcctgtggccggccctgtgaatgaggtgctgatccacagcagccagtacctgatggaggtgacccatgacctgcggctgcggctgaagaactacatgatgcctgccaagggcaagaagacagacaagcagcccctgcagaagcccagccactgcaccatctacgtggccaagaactacccaccctggcagcacaccaccctgtctgtgctgaggaagcactttgaggccaacaacgggaagctgcctgacaacaaggtgattgccagcgagctgggctccatgcctgagctgaagaagtacatgaagaaggtgatgccctttgtggccatgatcaaggagaacctggagaagatgggcccccgcatcctggacctgcagctggagtttgatgagaaggctgtgctgatggagaacatcgtgtacctgaccaacagcctggagctggagcacatcgaggtgaagtttgccagcgaggccgaggacaagatccgggaggactgctgccctgggaagcccctgaatgtgttccgcatcgagcccggggtgtctgtgtccctggtgaacccccagcccagcaatggccacttcagcaccaagattgagatccggcagggcgacaactgtgacagcatcatccggcggctgatgaagatgaacagaggcatcaaggacctgagcaaggtgaagctgatgagatttgatgaccccctgctgggccccaggagagtgcctgtgctgggcaaggagtacacagagaagacccccatcagcgagcacgctgtgttcaacgtggacctgatgagcaagaagatccacctgacagaaaatggcatccgggtggacatcggggacaccatcatctacctggtgcactag

SEQ ID NO: 157612 - DNA, 3393 bp, synthetic construct
  misc_feature 1..3393: note = Description of Artificial Sequence: Synthetic coding sequence
  source 1..3393: mol_type = other DNA
atggccgagaggaaaggaacagccaaggtggacttcctgaagaagattgagaaggagatccagcagaagtgggacacagagcgggtgtttgaggtgaatgccagcaacctggagaagcagaccagcaagggcaagtactttgtgaccttcccctacccctacatgaatggccgcctgcacctgggccacaccttcagcctgagcaaatgtgaatttgctgtgggctaccagaggctgaagggcaagtgctgcctcttccccttcggcctgcactgcaccggcatgcccatcaagagcaaggccgccgccaaggccggcagcagcaagtaccagtggggcatcatgaagagcctgggcctgagtgatgaggagatcgtgaagttcagcgaggccgagcactggctggactacttcccccccctggccatccaggacctgaagaggatgggcctgaaggtggactggaggaggagcttcatcaccacagatgtgaacccctactatgacagctttgtgcgctggcagttcctgaccctgcgggagaggaacaagatcaagtttgggaagcgctacaccatctacagccccaaggatggccagccctgcatggaccatgaccggcagacaggagagggcgtgggcccccaggagtacaccctgctgaagctgaaggtgctggagccctaccccagcaagctgagcggcctgaagggcaagaacatcttcctggtggccgccaccctgcggcctgagaccatgtttggccagaccaactgctgggtgcggccagacatgaagtacatcggctttgagaccgtgaatggagacatcttcatctgcacccagaaggccgccaggaacatgagctaccagggcttcaccaaggacaatggagtggtgcctgtggtgaaggagctgatgggagaggagatcctgggcgccagcctgagcgcccccctgaccagctacaaggtgatctacgtgctgcccatgctgaccatcaaggaggacaagggcaccggggtggtgacctctgtgcccagcgacagcccagatgacattgctgccctgcgggacctgaagaagaagcaggccctgcgggccaagtatggcatcagagatgacatggtgctgccctttgagcctgtgcctgtgattgagatccctggctttggaaacctgtctgctgtgaccatctgtgatgagctgaagatccagagccagaatgaccgggagaagctggccgaggccaaggagaagatctacctgaagggcttctatgagggcatcatgctggtggatggcttcaagggccagaaggtgcaggatgtgaagaagaccatccagaagaagatgattgatgctggagatgccctgatctacatggagcctgagaagcaggtgatgagccgcagcagtgatgaatgtgtggtggccctgtgtgaccagtggtacctggactatggagaggagaactggaagaagcagaccagccagtgcctgaagaacctggagaccttctgtgaggagaccaggaggaactttgaggccaccctgggctggctgcaggagcacgcctgcagcaggacctacggcctgggcacccacctgccctgggatgagcagtggctgattgagagcctgagtgacagcaccatctacatggccttctacacagtggcccacctgctgcagggcggcaacctgcacggccaggccgagagccccctgggcatccggccccagcagatgaccaaggaggtgtgggactatgtgttcttcaaggaggcccccttccccaagacccagatcgccaaggagaagctggaccagctgaagcaggagtttgagttctggtaccctgtggacctgcgggtgtctgggaaggacctggtgcccaaccacctgagctactacctgtacaaccacgtggccatgtggccagagcagagcgacaagtggcccacagctgtgcgggccaacggccacctgctgctgaacagcgagaagatgagcaagagcactggaaacttcctgaccctgacccaggccatcgacaagttcagcgcagatggcatgaggctggccctggctgatgctggggacacagtggaggatgccaactttgtggaggccatggctgatgctggcatcctgcggctgtacacctgggtggagtgggtgaaggagatggtggccaactgggacagcctgcggagcggccctgccagcaccttcaatgacagagtgtttgccagcgagctgaatgccggcatcatcaagacagaccagaactatgagaagatgatgttcaaggaggccctgaagacaggcttctttgagttccaggccgccaaggacaagtaccgggagctggccgtggagggcatgcaccgggagctggtgttccgcttcatcgaggtgcagaccctgctgctggcccccttctgcccccacctgtgtgagcacatctggaccctgctgggcaagccagacagcatcatgaatgcctcctggcctgtggccggccctgtgaatgaggtgctgatccacagcagccagtacctgatggaggtgacccatgacctgcggctgcggctgaagaactacatgatgcctgccaagggcaagaagacagacaagcagcccctgcagaagcccagccactgcaccatctacgtggccaagaactacccaccctggcagcacaccaccctgtctgtgctgaggaagcactttgaggccaacaacgggaagctgcctgacaacaaggtgattgccagcgagctgggctccatgcctgagctgaagaagtacatgaagaaggtgatgccctttgtggccatgatcaaggagaacctggagaagatgggcccccgcatcctggacctgcagctggagtttgatgagaaggctgtgctgatggagaacatcgtgtacctgaccaacagcctggagctggagcacatcgaggtgaagtttgccagcgaggccgaggacaagatccgggaggactgctgccctgggaagcccctgaatgtgttcagaattgagcccggggtgtctgtgtccctggtgaacccccagcccagcaatggccacttcagcaccaagattgagatccggcagggcgacaactgtgacagcatcatccggcggctgatgaagatgaacagaggcatcaaggacctgagcaaggtgaagctgatgagatttgatgaccccctgctgggcccccggcgggtgcctgtgctgggcaaggagtacacagagaagacccccatcagcgagcacgctgtgttcaacgtggacctgatgagcaagaagatccacctgacagaaaatggcatccgggtggacattggagacaccatcatctacctggtgcactag

SEQ ID NO: 157613 - DNA, 2712 bp, synthetic construct
  misc_feature 1..2712: note = Description of Artificial Sequence: Synthetic coding sequence
  source 1..2712: mol_type = other DNA
atggcctctgtgtggcagaggctgggcttctacgccagcctgctgaagaggcagctgaatggaggcccagatgtgatcaagtgggagcggcgggtcatccctggctgcaccaggagcatctacagcgccaccgggaagtggaccaaggagtacaccctgcagaccaggaaggatgtggagaagtggtggcaccagaggatcaaggagcaggccagcaagatcagcgaggccgacaagagcaagcccaagttctacgtgctgtccatgttcccctaccccagcggcaagctgcacatgggccacgtgcgggtgtacaccatcagtgacaccatcgcccgcttccagaagatgaggggcatgcaggtgatcaaccccatgggctgggatgccttcggcctgcctgcagaaaatgctgctgtggagaggaacctgcacccccagagctggacccagagcaacatcaagcacatgaggaagcagctggaccggctgggcctgtgcttctcctgggaccgggagatcaccacctgcctgcctgactactacaagtggacccagtacctgttcatcaagctgtatgaagctggcctggcctaccagaaggaggccctggtgaactgggaccctgtggaccagacagtgctggccaatgagcaggtggatgaacatggctgctcctggaggtctggggccaaggtggagcagaagtacctgcggcagtggttcatcaagaccacagcctatgccaaggccatgcaggatgccctggccgacctgcctgagtggtacggcatcaagggcatgcaggcccactggattggagactgtgtgggctgccacctggacttcaccctgaaggtgcacggccaggccaccggggagaagctgacagcctacacagccaccccagaggccatctacggcaccagccacgtggccatcagccccagccaccggctgctgcacggccacagcagcctgaaggaggccctgaggatggccctggtgcctgggaaggactgcctgacccctgtgatggctgtgaacatgctgacccagcaggaggtgcctgtggtgatcctggccaaggctgacctggagggcagcctggacagcaagattggcatccccagcaccagcagcgaggacaccatcctggcccagaccctgggcctggcctacagcgaggtgattgagaccctgcctgatggaacagagcggctgagcagcagcgctgagttcaccggcatgacccggcaggatgccttcctggccctgacccagaaggcccggggcaagagggtgggcggagatgtgaccagtgacaagctgaaggactggctgatcagccggcagcgctactggggcacccccatccccatcgtgcactgccctgtgtgtggccccacccctgtgcccctggaggacctgcctgtgaccctgcccaacatcgccagcttcaccgggaagggcggcccccccctggccatggccagcgagtgggtgaactgcagctgcccccgctgcaagggggccgccaagcgggagacagacaccatggacacctttgtggacagcgcctggtactacttccgctacacagacccccacaacccccacagccccttcaacacagctgtggccgactactggatgcctgtggacctgtacatcggcggcaaggagcacgctgtgatgcacctgttctacgcccgcttcttcagccacttctgccacgaccagaagatggtgaagcaccgggagcccttccacaagctgctggcccagggcctcatcaagggccagaccttccggctgcccagcggccagtacctgcagcgggaggaggtggacctgaccggctctgtgcctgtgcacgccaagaccaaggagaagctggaggtgacctgggagaagatgagcaagagcaagcacaacggggtggaccctgaggaggtggtggagcagtatggaattgacaccatccggctgtacatcctgtttgctgcccctcctgagaaggacatcctgtgggatgtgaagacagatgccctgcccggggtgctgcgctggcagcagaggctgtggaccctgaccacccgcttcatcgaggcccgggccagcggcaagagcccccagccccagctgctgagcaacaaggagaaggccgaggccaggaagctgtgggagtacaagaacagcgtcatcagccaggtgaccacccacttcacagaggacttcagcctgaacagcgccatcagccagctgatgggcctgagcaatgccctgagccaggccagccagagcgtcatcctgcacagccctgagtttgaagatgccctgtgtgccctgatggtgatggccgcccccctggccccccacgtgaccagcgagatctgggccggcctggccctggtgcccaggaagctgtgtgcccactacacctgggatgcctctgtgctgctgcaggcctggccagctgtggaccctgagttcctgcagcagcctgaggtggtgcagatggctgtgctgatcaacaacaaggcctgtgggaagatccctgtgccccagcaggtggcccgggaccaggacaaggtgcatgaatttgtgctgcagagcgagctgggcgtgcggctgctgcagggccgcagcatcaagaagagcttcctgagccccaggacagccctgatcaacttcctggtgcaggactag

SEQ ID NO: 157614 - DNA, 2583 bp, synthetic construct
  misc_feature 1..2583: note = Description of Artificial Sequence: Synthetic coding sequence
  source 1..2583: mol_type = other DNA
atggcctctgtgtggcagaggctgggcttctacgccagcctgctgaagaggcagctgaatggaggcccagatgtgatcaagtgggagcggcgggtcatccctggctgcaccaggagcatctacagcgccaccgggaagtggaccaaggagtacaccctgcagaccaggaaggatgtggagaagtggtggcaccagaggatcaaggagcaggccagcaagatcagcgaggctgatgtgatcaaccccatgggctgggatgccttcggcctgcctgcagaaaatgctgctgtggagaggaacctgcacccccagagctggacccagagcaacatcaagcacatgaggaagcagctggaccggctgggcctgtgcttctcctgggaccgggagatcaccacctgcctgcctgactactacaagtggacccagtacctgttcatcaagctgtatgaggccggcctggcctaccagaaggaggccctggtgaactgggaccctgtggaccagacagtgctggccaatgagcaggtggatgagcacggctgctcctggaggtctggggccaaggtggagcagaagtacctgcggcagtggttcatcaagaccacagcctatgccaaggccatgcaggatgccctggccgacctgcctgagtggtacggcatcaagggcatgcaggcccactggattggagactgtgtgggctgccacctggacttcaccctgaaggtgcacggccaggccactggagagaagctgacagcctacacagccaccccagaggccatctacggcaccagccacgtggccatcagccccagccaccggctgctgcacggccacagcagcctgaaggaggccctgaggatggccctggtgcctgggaaggactgcctgacccctgtgatggctgtgaacatgctgacccagcaggaggtgcctgtggtgatcctggccaaggctgacctggagggcagcctggacagcaagattggcatccccagcaccagcagcgaggacaccatcctggcccagaccctgggcctggcctacagcgaggtgattgagaccctgcctgatggaacagagcggctgagcagcagcgctgagttcaccggcatgacccggcaggatgccttcctggccctgacccagaaggcccggggcaagagggtgggcggagatgtgaccagtgacaagctgaaggactggctgatcagccggcagcgctactggggcacccccatccccatcgtgcactgccctgtgtgtggccccacccctgtgcccctggaggacctgcctgtgaccctgcccaacatcgccagcttcaccggaaaaggaggcccccccctggccatggccagcgagtgggtgaactgcagctgcccccgctgcaagggagctgccaagcgggagacagacaccatggacacctttgtggacagcgcctggtactacttccgctacacagacccccacaacccccacagccccttcaacacagctgtggccgactactggatgcctgtggacctgtacatcggcggcaaggagcacgctgtgatgcacctgttctacgcccgcttcttcagccacttctgccacgaccagaagatggtgaagcaccgggagcccttccacaagctgctggcccagggcctcatcaagggccagaccttccggctgcccagcggccagtacctgcagcgggaggaggtggacctgactggatctgtgcctgtgcacgccaagaccaaggagaagctggaggtgacctgggagaagatgagcaagagcaagcacaatggagtggaccctgaggaggtggtggagcagtatggcatcgacaccatccggctgtacatcctgtttgctgcccctcctgagaaggacatcctgtgggatgtgaagacagatgccctgcccggggtgctgcgctggcagcagaggctgtggaccctgaccacccgcttcatcgaggcccgggccagcggcaagagcccccagccccagctgctgagcaacaaggagaaggccgaggccaggaagctgtgggagtacaagaacagcgtcatcagccaggtgaccacccacttcacagaggacttcagcctgaacagcgccatcagccagctgatgggcctgagcaatgccctgagccaggccagccagagcgtcatcctgcacagccctgagtttgaagatgccctgtgtgccctgatggtgatggccgcccccctggcccctcatgtgaccagcgagatctgggccggcctggccctggtgcccaggaagctgtgtgcccactacacctgggatgcctctgtgctgctgcaggcctggccagctgtggaccctgagttcctgcagcagcctgaggtggtgcagatggctgtgctgatcaacaacaaggcctgtgggaagatccctgtgccccagcaggtggcccgggaccaggacaaggtgcatgaatttgtgctgcagagcgagctgggcgtgcggctgctgcagggccgcagcatcaagaagagcttcctgagccccaggacagccctgatcaacttcctggtgcaggactag

SEQ ID NO: 157615 - DNA, 2712 bp, synthetic construct; identical to SEQ ID NO: 157613
  misc_feature 1..2712: note = Description of Artificial Sequence: Synthetic coding sequence
  source 1..2712: mol_type = other DNA

SEQ ID NO: 157616 - DNA, 345 bp, synthetic construct
  misc_feature 1..345: note = Description of Artificial Sequence: Synthetic coding sequence
  source 1..345: mol_type = other DNA
atggcctctgtgtggcagaggctgggcttctacgccagcctgctgaagaggcagctgaatggaggcccagatgtgatcaagtgggagcggcgggtcatccctggctgcaccaggagcatctacagcgccaccgggaagtggaccaaggagtacaccctgcagaccaggaaggatgtggagaagtggtggcaccagaggatcaaggagcaggccagcaagatcagcgaggccgacaagagcaagcccaagttctacgtgctgtccatgttcccctaccccagcggcaagctgcacatgggccacgtgcgggtgtacaccatcagtgacaccatcgcccgcttctag

SEQ ID NO: 157617 - DNA, 609 bp, synthetic construct
  misc_feature 1..609: note = Description of Artificial Sequence: Synthetic coding sequence
  source 1..609: mol_type = other DNA
atgaaggtgctggccgccggcgtggtgcccctgctgctggtgctgcactggaagcatggagctggcagccccctgcccatcacccctgtgaatgccacctgtgccatccgccacccctgccacaacaacctgatgaaccagatccgcagccagctggcccagctgaatggcagcgccaatgccctcttcatcctgtactacacagcccagggcgagcccttccccaacaacctggacaagctgtgtggccccaacgtgacagacttcccccccttccacgccaatggaacagagaaggccaagctggtggagctgtaccgcatcgtggtgtacctgggcaccagcctgggcaacatcacccgggaccagaagatcctgaaccccagcgccctgagcctgcacagcaagctgaatgccacagctgacatcctgcggggcctgctgagcaatgtgctgtgccgcctgtgcagcaagtaccacgtgggccacgtggatgtgacctacggccctgacaccagcggcaaggatgtgttccagaagaagaagctgggctgccagctgctgggcaagtacaagcagatcatcgctgtgctggcccaggccttctag

SEQ ID NO: 157618 - DNA, 3294 bp, synthetic construct
  misc_feature 1..3294: note = Description of Artificial Sequence: Synthetic coding sequence
  source 1..3294: mol_type = other DNA
atgatggacatctacgtgtgcctgaagaggcccagctggatggtggacaacaagaggatgaggacagccagcaacttccagtggctgctgagcaccttcatcctgctgtacctgatgaaccaggtgaacagccagaagaagggggcccctcatgacctgaagtgtgtgaccaacaacctgcaggtgtggaactgctcctggaaggcccccagcggcaccggccggggcacagattatgaggtgtgcatcgagaacagaagccgcagctgctaccagctggagaagaccagcatcaagatcccagccctgagccatggagactatgagatcaccatcaacagcctgcatgactttggcagcagcaccagcaagttcaccctgaatgagcagaatgtgtccctcatcccagacaccccagagatcctgaacctgtctgctgacttcagcaccagcaccctgtacctgaagtggaatgaccggggcagcgtcttcccccacaggagcaatgtcatctgggagatcaaggtgctgaggaaggagagcatggagctggtgaagctggtgacccacaacaccaccctgaatggcaaggacaccctgcaccactggagctgggccagtgacatgcccctggagtgtgccatccactttgtggagatccgctgctacatcgacaacctgcacttcagcggcctggaggagtggagcgactggagccctgtgaagaacatctcctggatcccagacagccagaccaaggtgttcccccaggacaaggtgatcctggtgggcagtgacatcaccttctgctgcgtgtcccaggagaaggtgctgagcgccctgattggccacaccaactgccccctcatccacctggatggagaaaatgtggccatcaagatccggaacatctctgtgtctgccagcagcggcaccaacgtggtgttcaccacagaggacaacatctttggaacagtcatctttgctggctaccccccagacaccccccagcagctgaactgtgagacccatgacctgaaggagatcatctgctcctggaaccctggccgggtgacagccctggtgggcccccgggccaccagctacaccctggtggagagcttcagcggcaagtatgtgcggctgaagagagctgaggcccccaccaatgaaagctaccagctgctcttccagatgctgcccaaccaggagatctacaacttcaccctgaatgcccacaaccccctgggccgcagccagagcaccatcctggtgaacatcacagagaaggtgtacccccacacccccaccagcttcaaggtgaaggacatcaacagcacagctgtgaagctgtcctggcacctgcccggcaactttgccaagatcaacttcctgtgtgaaattgagatcaagaagagcaacagcgtgcaggagcagagaaatgtgaccatcaagggcgtggagaacagcagctacctggtggccctggacaagctgaacccctacaccctgtacaccttccgcatccgctgcagcacagagaccttctggaagtggagcaagtggagcaacaagaagcagcacctgaccacagaggccagccccagcaaaggaccagacacctggagggagtggagcagtgatggcaagaacctgatcatctactggaagcccctgcccatcaatgaggccaacgggaagatcctgagctacaacgtgtcctgcagcagtgatgaggagacccagagcctgtctgagatcccagacccccagcacaaggccgagatccggctggacaagaatgactacatcatctctgtggtggccaagaacagcgtgggcagcagcccccccagcaagatcgcctccatggagatccccaatgatgacctgaagattgagcaggtggtgggcatgggcaagggcatcctgctgacctggcactatgaccccaacatgacctgtgactatgtgatcaagtggtgcaacagcagccgctctgagccctgcctgatggactggaggaaggtgcccagcaacagcacagagaccgtcatcgagagtgatgagttccggcccggcatccgctacaacttcttcctgtatggctgcaggaaccagggctaccagctgctgcgctccatgattggctacatcgaggagctggcccccatcgtggcccccaacttcaccgtggaggacaccagcgctgacagcatcctggtgaagtgggaggacatccctgtggaggagctgcggggcttcctgcggggctacctgttctactttggaaaaggagagcgggacaccagcaagatgagggtgctggagagcggccgcagtgacatcaaggtgaagaacatcacagacatcagccagaagaccctgagaattgctgacctgcagggcaagaccagctaccacctggtgctgcgggcctacacagatggcggcgtgggccctgagaagtccatgtatgtggtgaccaaggaaaattctgtgggcctcatcatcgccatcctgatccctgtggccgtggccgtgattgtgggcgtggtgaccagcatcctgtgctacaggaagcgggagtggatcaaggagaccttctacccagacatccccaaccctgagaactgcaaggccctgcagttccagaagtctgtgtgtgagggcagcagcgccctgaagaccctggagatgaacccctgcacccccaacaacgtggaggtgctggagaccaggtctgccttccccaagattgaggacacagagatcatcagccctgtggccgagaggcctgaggacagaagtgatgctgagcctgagaaccacgtggtggtgtcctactgcccccccatcatcgaggaggagatccccaacccagctgctgatgaggccggcggcacagcccaggtgatctacattgatgtgcagagcatgtaccagccccaggccaagccagaggaggagcaggagaatgaccctgtgggcggggccggctacaagccccagatgcacctgcccatcaacagcacagtggaggacattgctgctgaggaggacctggacaagacagctggctaccggccccaggccaacgtgaacacctggaacctggtgtccccagacagccccaggagcattgacagcaacagcgagatcgtgtcctttggcagcccctgcagcatcaacagccggcagttcctgatcccccccaaggatgaggacagccccaagagcaatggaggcggctggagcttcaccaacttcttccagaacaagcccaatgactag

SEQ ID NO: 157619 - DNA, 3294 bp, synthetic construct; identical to SEQ ID NO: 157618
  misc_feature 1..3294: note = Description of Artificial Sequence: Synthetic coding sequence
  source 1..3294: mol_type = other DNA

SEQ ID NO: 157620 - DNA, 381 bp, synthetic construct
  misc_feature 1..381: note = Description of Artificial Sequence: Synthetic coding sequence
  source 1..381: mol_type = other DNA
atgatggacatctacgtgtgcctgaagaggcccagctggatggtggacaacaagaggatgaggacagccagcaacttccagtggctgctgagcaccttcatcctgctgtacctgatgaaccaggtgaacagccagaagaagggggcccctcatgacctgaagtgtgtgaccaacaacctgcaggtgtggaactgctcctggaaggcccccagcggcaccggccggggcacagattatgaggtgtgcatcgagaacagaagccgcagctgctaccagctggagaagaccagcatcaagatcccagccctgagccatggagactatgagatcaccatcaacagcctgcatgactttggcagcagcaccagcaagttcacctag

SEQ ID NO: 157621 - DNA, 228 bp, synthetic construct
  misc_feature 1..228: note = Description of Artificial Sequence: Synthetic coding sequence
  source 1..228: mol_type = other DNA
atgatggacatctacgtgtgcctgaagaggcccagctggatggtggacaacaagaggatgaggacagccagcaacttccagtggctgctgagcaccttcatcctgctgtacctgatgaaccaggtgaacagccagaagaagggggcccctcatgacctgaagtgtgtgaccaacaacctgcaggtgtggaactgctcctggaaggcccccagcggcactggaagatag

SEQ ID NO: 157622 - DNA, 456 bp, synthetic construct
  misc_feature 1..456: note = Description of Artificial Sequence: Synthetic coding sequence
  source 1..456: mol_type = other DNA
atgttcagcaccaaggccctgctgctggccggcctcatcagcacagccctggccggcccctgggccaacatctgtgccggcaagagcagcaatgagatccgcacctgtgacagacatggctgcggccagtacagcgcccagaggagccagaggccccaccagggcgtggacatcctgtgcagcgctggcagcacagtgtatgcccccttcaccggcatgattgtgggccaggagaagccctaccagaacaagaatgccatcaacaatggagtgcgcatcagcggccggggcttctgtgtgaagatgttctacatcaagcccatcaagtacaagggccccatcaagaagggggagaagctgggcaccctgctgcccctgcagaaggtgtacccaggcatccagagccacgtgcacatcgagaactgtgacagcagtgaccccacagcctacctgtag

SEQ ID NO: 157623 - DNA, 1128 bp, synthetic construct
  misc_feature 1..1128: note = Description of Artificial Sequence: Synthetic coding sequence
  source 1..1128: mol_type = other DNA
atgacccccatcctgactgtgctgatctgcctgggcctgagcctggaccccaggacccacgtgcaggccggccccctgcccaagcccaccctgtgggccgagcccggcagcgtcatcacccagggcagccctgtgaccctgcgctgccagggcagcctggagacccaggagtaccacctgtaccgggagaagaagacagccctgtggatcacccgcatcccccaggagctggtgaagaagggccagttccccatcctgagcatcacctgggagcacgccggccgctactgctgcatctacggcagccacacagctggcctgtctgagagcagtgaccccctggagctggtggtgactggagcctacagcaagcccaccctgagcgccctgcccagccctgtggtgaccagcggcggcaatgtgaccatccagtgtgacagccaggtggcctttgatggcttcatcctgtgtgtgtccaagaagcccagcctgtctgtgcagcccggccctgtggtggcccctggagagaagctgaccttccagtgtggcagtgatgctggctatgacagatttgtgctgtacaaggagtggggccgggacttcctgcagaggcctggccggcagccccaggccggcctgagccaggccaacttcaccctgggccctgtgagccgctcctatggaggccagtacacctgcagcggggcctacaacctgagcagcgagtggagcgcccccagcgaccccctggacatcctgatcaccggccagatccgggcccggcccttcctgtctgtgcggcccggccccaccgtggccagcggggagaatgtgaccctgctgtgccagagccagggcggcatgcacaccttcctgctgaccaaggagggcgctgctgacagccccctgcggctgaagagcaagaggcagagccacaagtaccaggccgagttccccatgagccctgtgaccagcgcccacgccggcacctaccgctgctacggcagcctgagcagcaacccctacctgctgacccaccccagcgaccccctggagctggtggtgtctggagctgctgagaccctgagccccccccagaacaagagtgacagcaaggccggggagtag

SEQ ID NO: 157624 - DNA, 1956 bp, synthetic construct
  misc_feature 1..1956: note = Description of Artificial Sequence: Synthetic coding sequence
  source 1..1956: mol_type = other DNA
atgacccccatcctgactgtgctgatctgcctgggcctgagcctgggccccaggacccacgtgcaggccggccacctgcccaagcccaccctgtgggccgagcccggcagcgtcatcacccagggcagccctgtgaccctgcgctgccagggcggccaggagacccaggagtaccgcctgtaccgggagaagaagacagccctgtggatcacccgcatcccccaggagctggtgaagaagggccagttccccatccccagcatcacctgggagcacgccggccgctaccgctgctactacggcagtgacacagctggccgctctgagagcagtgaccccctggagctggtggtgactggagcctacatcaagcccaccctgagcgcccagcccagccctgtggtgaacagcggcggcaatgtcatcctgcagtgtgacagccaggtggcctttgatggcttcagcctgtgcaaggagggagaagatgagcacccccagtgcctgaacagccagccccacgcccggggcagcagccgggccatcttctctgtgggccctgtgagccccagccgccgctggtggtaccgctgctacgcctatgacagcaacagcccctatgagtggagcctgcccagcgacctgctggagctgctggtgctgggcgtgtccaagaagcccagcctgtctgtgcagcccggccccatcgtggcccctgaggagaccctgaccctgcagtgtggcagtgatgctggctacaacagatttgtgctgtacaaggatggagagcgggacttcctgcagctggccggggcccagccccaggccggcctgagccaggccaacttcaccctgggccctgtgagccgctcctatggaggccagtaccgctgctacggggcccacaacctgagcagcgagtggagcgcccccagcgaccccctggacatcctgattgctggccagttctatgacagagtgtccctgtctgtgcagcccggccccaccgtggccagcggggagaatgtgaccctgctgtgccagagccagggctggatgcagaccttcctgctgaccaaggagggcgctgctgatgacccctggaggctgcggagcacctaccagagccagaagtaccaggccgagttccccatgggccctgtgaccagcgcccacgccggcacctaccgctgctacggcagccagagcagcaagccctacctgctgacccaccccagcgaccccctggagctggtggtgtctggccccagcggcggccccagcagccccaccaccggccccaccagcaccagcgctggccctgaggaccagcccctgacccccaccggcagtgacccccagagcggcctgggccgccacctgggcgtggtgattggcatcctggtggccgtcatcctgctgctgctgctgctgctgctgctcttcctgatcctgcggcaccggcggcagggcaagcactggaccagcacccagaggaaggctgacttccagcaccctgctggagctgtgggccctgagcccacagaccggggcctgcagtggaggagcagccctgctgctgatgcccaggaggagaacctgtatgctgctgtgaagcacacccagccagaagatggagtggagatggacaccaggagcccccatgatgaggacccccaggccgtgacctacgccgaggtgaagcacagccggccccggcgggagatggccagcccccccagccccctgtctggagagttcctggacaccaaggaccggcaggccgaggaggaccggcagatggacacagaggccgccgccagcgaggccccccaggatgtgacctacgcccagctgcacagcctgaccctgcggcgggaggccacagagcccccacccagccaggagggccccagccctgctgtgcccagcatctatgccaccctggccatccactag

SEQ ID NO: 157625 - DNA, 1956 bp, synthetic construct
  misc_feature 1..1956: note = Description of Artificial Sequence: Synthetic coding sequence
  source 1..1956: mol_type = other DNA
atgacccccatcctgactgtgctgatctgcctgggcctgagcctgggccccaggacccacgtgcaggccggccacctgcccaagcccaccctgtgggccgagcccggcagcgtcatcacccagggcagccctgtgaccctgcgctgccagggcggccaggagacccaggagtaccgcctgtaccgggagaagaagacagccctgtggatcacccgcatcccccaggagctggtgaagaagggccagttccccatccccagcatcacctgggagcacgccggccgctaccgctgctactacggcagtgacacagctggccgctctgagagcagtgaccccctggagctggtggtgactggagcctacatcaagcccaccctgagcgcccagcccagccctgtggtgaacagcggcggcaatgtcatcctgcagtgtgacagccaggtggcctttgatggcttcagcctgtgcaaggagggagaagatgagcacccccagtgcctgaacagccagccccacgcccggggcagcagccgggccatcttctctgtgggccctgtgagccccagccgccgctggtggtaccgctgctacgcctatgacagcaacagcccctatgagtggagcctgcccagcgacctgctggagctgctggtgctgggcgtgtccaagaagcccagcctgtctgtgcagcccggccccatcgtggcccctgaggagaccctgaccctgcagtgtggcagtgatgctggctacaacagatttgtgctgtacaaggatggagagcgggacttcctgcagctggccggggcccagccccaggccggcctgagccaggccaacttcaccctgggccctgtgagccgctcctatggaggccagtaccgctgctacggggcccacaacctgagcagcgagtggagcgcccccagcgaccccctggacatcctgattgctggccagttctatgacagagtgtccctgtctgtgcagcccggccccaccgtggccagcggggagaatgtgaccctgctgtgccagagccagggctggatgcagaccttcctgctgaccaaggagggcgctgctgatgacccctggaggctgcggagcacctaccagagccagaagtaccaggccgagttccccatgggccctgtgaccagcgcccacgccggcacctaccgctgctacggcagccagagcagcaagccctacctgctgacccaccccagcgaccccctggagctggtggtgtctggccccagcggcggccccagcagccccaccaccggccccaccagcaccagcggccctgaggaccagcccctgacccccactggaagtgacccccagagcggcctgggccgccacctgggcgtggtgattggcatcctggtggccgtcatcctgctgctgctgctgctgctgctgctcttcctgatcctgcggcaccggcggcagggcaagcactggaccagcacccagaggaaggctgacttccagcaccctgctggagctgtgggccctgagcccacagaccggggcctgcagtggaggagcagccctgctgctgatgcccaggaggagaacctgtatgctgctgtgaagcacacccagccagaagatggagtggagatggacacccggcagagcccccatgatgaggacccccaggccgtgacctacgccgaggtgaagcacagccggccccggcgggagatggccagcccccccagccccctgtctggagagttcctggacaccaaggaccggcaggccgaggaggaccggcagatggacacagaggccgccgccagcgaggccccccaggatgtgacctacgcccagctgcacagcctgaccctgcggcgggaggccacagagcccccacccagccaggagggccccagccctgctgtgcccagcatctatgccaccctggccatccactag

SEQ ID NO: 157626 - DNA, 1794 bp, synthetic construct
  misc_feature 1..1794: note = Description of Artificial Sequence: Synthetic coding sequence
  source 1..1794: mol_type = other DNA
atgacccccatcgtgacagtgctgatctgcctgggcctgagcctgggccccaggacccacgtgcagacaggcaccatccccaagcccaccctgtgggccgagccagattctgtcatcacccagggcagccctgtgaccctgagctgccagggcagcctggaggcccaggagtaccgcctgtaccgggagaagaagagcgcctcctggatcacccgcatccggcctgagctggtgaagaatggccagttccacatccccagcatcacctgggagcacacaggccgctatggctgccagtactacagccgggcccgctggagcgagctgagtgaccccctggtgctggtgatgaccggggcctaccccaagcccaccctgagcgcccagcccagccctgtggtgaccagcggcggccgggtgaccctgcagtgtgagagccaggtggccttcggcggcttcatcctgtgcaaggagggggaggaggagcacccccagtgcctgaacagccagccccacgcccggggcagcagccgggccatcttctctgtgggccctgtgagccccaacagacgctggagccaccgctgctacggctatgacctgaacagcccctacgtgtggagcagccccagcgacctgctggagctgctggtgcctggggtgtccaagaagcccagcctgtctgtgcagcccggccctgtggtggcccctggagagagcctgaccctgcagtgtgtgtctgatgtgggctatgacagatttgtgctgtacaaggagggggagcgggacctgcggcagctgcccggccggcagccccaggccggcctgagccaggccaacttcaccctgggccctgtgagccgctcctatggaggccagtaccgctgctatggagcccacaacctgagcagtgaatgttctgcccccagcgaccccctggacatcctgatcaccggccagatccggggcacccccttcatctctgtgcagcccggccccaccgtggccagcggagaaaatgtgaccctgctgtgccagagctggaggcagttccacaccttcctgctgaccaaggccggggctgctgatgcccccctgcggctgcggagcatccacgagtaccccaagtaccaggccgagttccccatgagccctgtgaccagcgcccatgctggcacctaccgctgctacggcagcctgaacagcgacccctacctgctgagccaccccagcgagcccctggagctggtggtgtctggccccagcatgggcagcagccccccacccaccggccccatcagcaccccaggccctgaggaccagcccctgacccccaccggcagtgacccccagagcggcctgggccgccacctgggcgtggtgattggcatcctggtggccgtggtgctgctgctgctgctgctgctgctgctcttcctgatcctgcggcaccggcggcagggcaagcactggaccagcacccagaggaaggctgacttccagcaccctgctggagctgtgggccctgagcccacagaccggggcctgcagtggaggagcagccctgctgctgatgcccaggaggagaacctgtatgctgctgtgaaggacacccagccagaagatggagtggagatggacaccagggctgctgccagcgaggccccccaggatgtgacctacgcccagctgcacagcctgaccctgcggaggaaggccacagagcccccacccagccaggagcgggagcccccagctgagcccagcatctatgccaccctggccatccactag

SEQ ID NO: 157627 - DNA, 1899 bp, synthetic construct
  misc_feature 1..1899: note = Description of Artificial Sequence: Synthetic coding sequence
  source 1..1899: mol_type = other DNA
atgaccccagccctgacagccctgctgtgcctgggcctgagcctgggccccaggaccagggtgcaggccggccccttccccaagcccaccctgtgggccgagcccggcagcgtcatctcctggggcagccctgtgaccatctggtgccagggcagccaggaggcccaggagtaccgcctgcacaaggagggcagccctgagcccctggacaggaacaaccccctggagcccaagaacaaggcccgcttcagcatccccagcatgacagagcaccacgccggccgctaccgctgccactactacagcagcgctggctggagcgagcccagcgaccccctggagatggtgatgaccggggcctacagcaagcccaccctgagcgccctgcccagccctgtggtggccagcggcggcaacatgaccctgcgctgtggcagccagaagggctaccaccactttgtgctgatgaaggagggggagcaccagctgcccaggaccctggacagccagcagctgcacagccggggcttccaggccctcttccctgtgggccctgtgacccccagccaccgctggaggttcacctgctactactactacaccaacaccccctgggtgtggagccaccccagcgaccccctggagatcctgcccagcggcgtgtccaggaagcccagcctgctgaccctgcagggccctgtgctggcccctggccagagcctgaccctgcagtgtggcagtgatgtgggctacaacagatttgtgctgtacaaggagggggagcgggacttcctgcagaggcctggccagcagccccaggccggcctgagccaggccaacttcaccctgggccctgtgagccccagcaatggaggccagtaccgctgctatggagcccacaacctgagcagcgagtggagcgcccccagcgaccccctgaacatcctgatggccggccagatctatgacacagtgtccctgagcgcccagcccggccccaccgtggccagcggagaaaatgtgaccctgctgtgccagagctggtggcagtttgacaccttcctgctgaccaaggagggcgccgcccacccccccctgcggctgcgctccatgtacggggcccacaagtaccaggccgagttccccatgagccctgtgaccagcgcccatgctggcacctaccgctgctacggcagctacagcagcaacccccacctgctgagccaccccagcgagcccctggagctggtggtgtctggccacagcggcggcagcagcctgccccccaccggcccccccagcaccccaggcctgggccgctacctggaggtgctgattggagtgtctgtggcctttgtgctgctgctcttcctgctgctcttcctgctgctgcggcggcagaggcacagcaagcacaggaccagtgaccagaggaagacagacttccagaggcctgctggagctgctgagacagagcccaaggaccggggcctgctgcggcgcagcagccctgctgctgatgtgcaggaggagaacctgtatgctgctgtgaaggacacccagagtgaagatagagtggagctggacagccagcagagcccccatgatgaggacccccaggccgtgacctacgcccctgtgaagcacagcagcccccggcgggagatggccagcccccccagcagcctgagcggggagttcctggacaccaaggaccggcaggtggaggaggaccggcagatggacacagaagctgctgccagcgaggccagccaggatgtgacctacgcccagctgcacagcctgaccctgcggaggaaggccacagagcccccacccagccaggagggggagcccccagctgagcccagcatctatgccaccctggccatccactag

SEQ ID NO: 157628 - DNA, 1344 bp, synthetic construct
  misc_feature 1..1344: note = Description of Artificial Sequence: Synthetic coding sequence
  source 1..1344: mol_type = other DNA
atgatccccaccttcaccgccctgctgtgcctgggcctgagcctgggccccaggacccacatgcaggccggccccctgcccaagcccaccctgtgggccgagcccggcagcgtcatctcctggggcaacagcgtgaccatctggtgccagggcaccctggaggcccgggagtaccgcctggacaaggaggagagccctgccccctgggaccggcagaaccccctggagcccaagaacaaggcccgcttcagcatccccagcatgacagaggactatgccggccgctaccgctgctactaccgcagccctgtgggctggagccagcccagcgaccccctggagctggtgatgaccggggcctacagcaagcccaccctgagcgccctgcccagccccctggtgaccagcggcaagtctgtgaccctgctgtgccagagccgcagccccatggacaccttcctgctgatcaaggagcgggccgcccaccccctgctgcacctgcggagtgaacatggagcccagcagcaccaggccgagttccccatgagccctgtgacctctgtgcatggaggcacctaccgctgcttcagcagccacggcttcagccactacctgctgagccaccccagcgaccccctggagctgattgtgtctggcagcctggaggacccccggcccagccccaccaggtctgtgtccacagctgctggccctgaggaccagcccctgatgcccaccggctctgtgccccacagcggcctgcggcggcactgggaggtgctgattggagtgctggtggtgtccatcctgctgctgagcctgctgctcttcctgctgctgcagcactggaggcagggcaagcacaggaccctggcccagaggcaggccgacttccagaggcctcctggagctgctgagcctgagcccaaggatggcggcctgcagaggaggagcagccctgctgctgatgtgcagggcgagaacttctgtgccgctgtgaagaacacccagccagaagatggagtggagatggacaccaggagcccccatgatgaggacccccaggccgtgacctacgccaaggtgaagcacagccggccccggcgggagatggccagcccccccagccccctgtctggagagttcctggacaccaaggaccggcaggccgaggaggaccggcagatggacacagaggccgccgccagcgaggccccccaggatgtgacctacgcccagctgcacagcttcaccctgcggcagaaggccacagagcccccacccagccaggagggcgccagccctgctgagcccagcgtgtatgccaccctggccatccactag

SEQ ID NO: 157629 - DNA, 1476 bp, synthetic construct
  misc_feature 1..1476: note = Description of Artificial Sequence: Synthetic coding sequence
  source 1..1476: mol_type = other DNA
atgaccctgaccctgtctgtgctgatctgcctgggcctgtctgtgggccccaggacctgtgtgcaggccggcaccctgcccaagcccaccctgtgggccgagcccgcctctgtgattgcccggggcaagcctgtgaccctgtggtgccagggccccctggagacagaggagtaccgcctggacaaggagggcctgccctgggccaggaagaggcagaaccccctggagcccggggccaaggccaagttccacatccccagcacagtgtatgacagcgctggccgctaccgctgctactatgagaccccagctggctggagcgagcccagcgaccccctggagctggtggccaccggggtgtccaggaagcccagcctgctgatcccccagggctctgtggtggcccggggcggcagcctgaccctgcagtgccgcagtgatgtgggctatgacatctttgtgctgtacaaggagggggagcatgacctggtgcagggcagcggccagcagccccaggccggcctgagccaggccaacttcaccctgggccctgtgagccgcagccatggaggccagtaccgctgctacggggcccacaacctgagcccccgctggagcgcccccagcgaccccctggacatcctgattgctggcctcatcccagacatcccagccctgtctgtgcagcccggccccaaggtggccagcggggagaatgtgaccctgctgtgccagagctggcaccagattgacaccttcttcctgaccaaggagggcgccgcccacccccccctgtgcctgaagagcaagtaccagagctaccgccaccaggccgagttctccatgagccctgtgaccagcgcccagggcggcacctaccgctgctacagcgccatccgcagctacccctacctgctgagcagccccagctacccccaggagctggtggtgtctggccccagcggggaccccagcctgagccccaccggcagcacccccaccccagctggccctgaggaccagcccctgacccccaccggcctggacccccagagcggcctgggccgccacctgggcgtggtgactggagtgtctgtggcctttgtgctgctgctcttcctgctgctcttcctgctgctgcggcaccgccaccagagcaagcacaggaccagcgcccacttctacagacctgctggagctgctggccctgagcccaaggaccagggcctgcagaagagggccagccctgtggccgacatccaggaggagatcctgaatgctgctgtgaaggacacccagcccaaggatggagtggagatggatgcccgggctgctgccagcgaggccccccaggatgtgacctacgcccagctgcacagcctgaccctgcggcgggaggccacagagcccccacccagccaggagcgggagcccccagctgagcccagcatctatgcccccctggccatccactag

SEQ ID NO: 157630 - DNA, 1470 bp, synthetic construct
  misc_feature 1..1470: note = Description of Artificial Sequence: Synthetic coding sequence
  source 1..1470: mol_type = other DNA
atgacccccatcgtgacagtgctgatctgcctgcggctgagcctgggccccaggacccacgtgcaggccggcaccctgcccaagcccaccctgtgggccgagcccggcagcgtcatcacccagggcagccctgtgaccctgtggtgccagggcatcctggagacccaggagtaccgcctgtaccgggagaagaagacagccccctggatcacccgcatcccccaggagatcgtgaagaagggccagttccccatccccagcatcacctgggagcacacaggccgctaccgctgcttctacggcagccacacagctggctggagcgagcccagcgaccccctggagctggtggtgactggagcctacatcaagcccaccctgagcgccctgcccagccctgtggtgaccagcggcggcaatgtgaccctgcactgtgtgtcccaggtggccttcggcagcttcatcctgtgcaaggagggagaagatgagcacccccagtgcctgaacagccagcccaggacccacggctggagccgggccatcttctctgtgggccctgtgagccccagccgccgctggagctaccgctgctacgcctatgacagcaacagcccccacgtgtggagcctgcccagcgacctgctggagctgctggtgctgggcgtgtccaagaagcccagcctgtctgtgcagcccggccccatcgtggcccctggagagagcctgaccctgcagtgtgtgtctgatgtgtcctatgacagatttgtgctgtacaaggagggggagcgggacttcctgcagctgcccggcccccagccccaggccggcctgagccaggccaacttcaccctgggccctgtgagccgctcctatggaggccagtaccgctgcagcggggcctacaacctgagcagcgagtggagcgcccccagcgaccccctggacatcctgattgctggccagttccggggccggcccttcatctctgtgcaccctggccccaccgtggccagcggggagaatgtgaccctgctgtgccagagctggggccccttccacaccttcctgctgaccaaggccggggctgctgatgcccccctgcggctgcggagcatccacgagtaccccaagtaccaggccgagttccccatgagccctgtgaccagcgcccacagcggcacctaccgctgctacggcagcctgagcagcaacccctacctgctgagccaccccagcgacagcctggagctgatggtgtctggagctgctgagaccctgagccccccccagaacaagagtgacagcaaggccggggccgccaacaccctgagccccagccagaacaagacagccagccacccccaggactacacagtggagaacctgatccgcatgggcattgctggcctggtgctggtggtgctgggcatcctgctgtttgaggcccagcacagccagaggagcctgtag

SEQ ID NO: 157631 - DNA, 1401 bp, synthetic construct
  misc_feature 1..1401: note = Description of Artificial Sequence: Synthetic coding sequence
  source 1..1401: mol_type = other DNA
atgacccccatcctgactgtgctgatctgcctgggcctgagcctgggccccaggacccacgtgcaggccggccacctgcccaagcccaccctgtgggccgagcccggcagcgtcatcatccagggcagccctgtgaccctgcgctgccagggcagcctgcaggccgaggagtaccacctgtaccgggagaacaagagcgcctcctgggtgcggcgcatccaggagcccgggaagaatggccagttccccatccccagcatcacctgggagcacgccggccgctaccactgccagtactacagccacaaccacagcagcgagtacagcgaccccctggagctggtggtgactggagcctacagcaagcccaccctgagcgccctgcccagccctgtggtgaccctgggcggcaatgtgaccctgcagtgtgtgtcccaggtggcctttgatggcttcatcctgtgcaaggagggagaagatgagcacccccagaggctgaacagccacagccacgcccggggctggagctgggccatcttctctgtgggccctgtgagccccagccgccgctggagctaccgctgctacgcctatgacagcaacagcccctacgtgtggagcctgcccagcgacctgctggagctgctggtgcctggggtgtccaagaagcccagcctgtctgtgcagcccggccccatggtggcccctggagagagcctgaccctgcagtgtgtgtctgatgtgggctatgacagatttgtgctgtacaaggagggggagcgggacttcctgcagaggcctggctggcagccccaggccggcctgagccaggccaacttcaccctgggccctgtgagccccagccatggaggccagtaccgctgctacagcgcccacaacctgagcagcgagtggagcgcccccagcgaccccctggacatcctgatcaccggccagttctatgaccggcccagcctgtctgtgcagcctgtgcccaccgtggcccctgggaagaatgtgaccctgctgtgccagagccggggccagttccacaccttcctgctgaccaaggagggcgccggccacccccccctgcacctgcggtctgagcaccaggcccagcagaaccaggccgagttcaggatgggccctgtgaccagcgcccacgtgggcacctaccgctgctacagcagcctgagcagcaacccctacctgctgagcctgcccagcgaccccctggagctggtggtgtctgccagcctgggccagcacccccaggactacacagtggagaacctgatccgcatgggcgtggccggcctggtgctggtggtgctgggcatcctgctgtttgaggcccagcacagccagaggagcctgcaggatgctgctggccgctag

SEQ ID NO: 157632 - DNA, 1452 bp, synthetic construct
  misc_feature 1..1452: note = Description of Artificial Sequence: Synthetic coding sequence
  source 1..1452: mol_type = other DNA
atgacccccatcctgactgtgctgatctgcctgggcctgagcctgggccccaggacccacgtgcaggccggccacctgcccaagcccaccctgtgggccgagcccggcagcgtcatcatccagggcagccctgtgaccctgcgctgccagggcagcctgcaggccgaggagtaccacctgtaccgggagaacaagagcgcctcctgggtgcggcgcatccaggagcccgggaagaatggccagttccccatccccagcatcacctgggagcacgccggccgctaccactgccagtactacagccacaaccacagcagcgagtacagcgaccccctggagctggtggtgactggagcctacagcaagcccaccctgagcgccctgcccagccctgtggtgaccctgggcggcaatgtgaccctgcagtgtgtgtcccaggtggcctttgatggcttcatcctgtgcaaggagggagaagatgagcacccccagaggctgaacagccacagccacgcccggggctggagctgggccatcttctctgtgggccctgtgagccccagccgccgctggagctaccgctgctacgcctatgacagcaacagcccctacgtgtggagcctgcccagcgacctgctggagctgctggtgcctggggtgtccaagaagcccagcctgtctgtgcagcccggccccatggtggcccctggagagagcctgaccctgcagtgtgtgtctgatgtgggctatgacagatttgtgctgtacaaggagggggagcgggacttcctgcagaggcctggctggcagccccaggccggcctgagccaggccaacttcaccctgggccctgtgagccccagccatggaggccagtaccgctgctacagcgcccacaacctgagcagcgagtggagcgcccccagcgaccccctggacatcctgatcaccggccagttctatgaccggcccagcctgtctgtgcagcctgtgcccaccgtggcccctgggaagaatgtgaccctgctgtgccagagccggggccagttccacaccttcctgctgaccaaggagggcgccggccacccccccctgcacctgcggtctgagcaccaggcccagcagaaccaggccgagttcaggatgggccctgtgaccagcgcccacgtgggcacctaccgctgctacagcagcctgagcagcaacccctacctgctgagcctgcccagcgaccccctggagctggtggtgtctgaggccgctgagaccctgagccccagccagaacaagacagacagcaccaccaccagcctgggccagcacccccaggactacacagtggagaacctgatccgcatgggcgtggccggcctggtgctggtggtgctgggcatcctgctgtttgaggcccagcacagccagaggagcctgcaggatgctgctggaagatag

SEQ ID NO: 157633 - DNA, 1452 bp, synthetic construct; identical to SEQ ID NO: 157632
  misc_feature 1..1452: note = Description of Artificial Sequence: Synthetic coding sequence
  source 1..1452: mol_type = other DNA

SEQ ID NO: 157634 - DNA, 984 bp, synthetic construct
  misc_feature 1..984: note = Description of Artificial Sequence: Synthetic coding sequence
  source 1..984: mol_type = other DNA
atgacccccatcctgactgtgctgatctgcctgggcctgagcctgggccccaggacccacgtgcaggccggccacctgcccaagcccaccctgtgggccgagcccggcagcgtcatcatccagggcagccctgtgaccctgcgctgccagggcagcctgcaggccgaggagtaccacctgtaccgggagaacaagagcgcctcctgggtgcggcgcatccaggagcccgggaagaatggccagttccccatccccagcatcacctgggagcacgccggccgctaccactgccagtactacagccacaaccacagcagcgagtacagcgaccccctggagctggtggtgactggagcctacagcaagcccaccctgagcgccctgcccagccctgtggtgaccctgggcggcaatgtgaccctgcagtgtgtgtcccaggtggcctttgatggcttcatcctgtgcaaggagggagaagatgagcacccccagaggctgaacagccacagccacgcccggggctggagctgggccatcttctctgtgggccctgtgagccccagccgccgctggagctaccgctgctacgcctatgacagcaacagcccctacgtgtggagcctgcccagcgacctgctggagctgctggtgcctggggtgtccaagaagcccagcctgtctgtgcagcccggccccatggtggcccctggagagagcctgaccctgcagtgtgtgtctgatgtgggctatgacagatttgtgctgtacaaggagggggagcgggacttcctgcagaggcctggctggcagccccaggccggcctgagccaggccaacttcaccctgggccctgtgagccccagccatggaggccagtaccgctgctacagcgcccacaacctgagcagcgagtggagcgcccccagcgaccccctggacatcctgatcaccggccagttctatgaccggcccagcctgtcctag

SEQ ID NO: 157635 - DNA, 1320 bp, synthetic construct
  misc_feature 1..1320: note = Description of Artificial Sequence: Synthetic coding sequence
  source 1..1320: mol_type = other DNA
atgacccccatcctgactgtgctgatctgcctgggcctgagcctggaccccaggacccacgtgcaggccggccccctgcccaagcccaccctgtgggccgagcccggcagcgtcatcacccagggcagccctgtgaccctgcgctgccagggcagcctggagacccaggagtaccacctgtaccgggagaagaagacagccctgtggatcacccgcatcccccaggagctggtgaagaagggccagttccccatcctgagcatcacctgggagcacgccggccgctactgctgcatctacggcagccacacagctggcctgtctgagagcagtgaccccctggagctggtggtgactggagcctacagcaagcccaccctgagcgccctgcccagccctgtggtgaccagcggcggcaatgtgaccatccagtgtgacagccaggtggcctttgatggcttcatcctgtgcaaggagggagaagatgagcacccccagtgcctgaacagccacagccacgcccggggcagcagccgggccatcttctctgtgggccctgtgagccccagccgccgctggagctaccgctgctacggctatgacagccgggccccctacgtgtggagcctgcccagcgacctgctgggcctgctggtgcctggggtgtccaagaagcccagcctgtctgtgcagcccggccctgtggtggcccctggagagaagctgaccttccagtgtggcagtgatgctggctatgacagatttgtgctgtacaaggagtggggccgggacttcctgcagaggcctggccggcagccccaggccggcctgagccaggccaacttcaccctgggccctgtgagccgctcctatggaggccagtacacctgcagcggggcctacaacctgagcagcgagtggagcgcccccagcgaccccctggacatcctgatcaccggccagatccgggcccggcccttcctgtctgtgcggcccggccccaccgtggccagcggggagaatgtgaccctgctgtgccagagccagggcggcatgcacaccttcctgctgaccaaggagggcgctgctgacagccccctgcggctgaagagcaagaggcagagccacaagtaccaggccgagttccccatgagccctgtgaccagcgcccacgccggcacctaccgctgctacggcagcctgagcagcaacccctacctgctgacccaccccagcgaccccctggagctggtggtgtctggagctgctgagaccctgagccccccccagaacaagagtgacagcaaggccggggagtag

SEQ ID NO: 157636 - DNA, 1371 bp, synthetic construct
  misc_feature 1..1371: note = Description of Artificial Sequence: Synthetic coding sequence
  source 1..1371: mol_type = other DNA
atgcaccggggcctcatccacccccagagcagcgctgtgggcggagatgccatgacccccatcctgactgtgctgatctgcctgggcctgagcctggaccccaggacccacgtgcaggccggccccctgcccaagcccaccctgtgggccgagcccggcagcgtcatcacccagggcagccctgtgaccctgcgctgccagggcagcctggagacccaggagtaccacctgtaccgggagaagaagacagccctgtggatcacccgcatcccccaggagctggtgaagaagggccagttccccatcctgagcatcacctgggagcacgccggccgctactgctgcatctacggcagccacacagctggcctgtctgagagcagtgaccccctggagctggtggtgactggagcctacagcaagcccaccctgagcgccctgcccagccctgtggtgaccagcggcggcaatgtgaccatccagtgtgacagccaggtggcctttgatggcttcatcctgtgcaaggagggggaggatgagcacccccagtgcctgaacagccacagccacgcccggggcagcagccgggccatcttctctgtgggccctgtgagccccagccgccgctggagctaccgctgctacggctatgacagccgggccccctacgtgtggagcctgcccagcgacctgctgggcctgctggtgcctggggtgtccaagaagcccagcctgtctgtgcagcccggccctgtggtggcccctggagagaagctgaccttccagtgtggcagtgatgctggctatgacagatttgtgctgtacaaggagtggggccgggacttcctgcagaggcctggccggcagccccaggccggcctgagccaggccaacttcaccctgggccctgtgagccgctcctatggaggccagtacacctgcagcggggcctacaacctgagcagcgagtggagcgcccccagcgaccccctggacatcctgatcaccggccagatccgggcccggcccttcctgtctgtgcggcccggccccaccgtggccagcggagaaaatgtgaccctgctgtgccagagccagggcggcatgcacaccttcctgctgaccaaggagggcgctgctgacagccccctgcggctgaagagcaagaggcagagccacaagtaccaggccgagttccccatgagccctgtgaccagcgcccatgctggcacctaccgctgctacggcagcctgagcagcaacccctacctgctgacccaccccagcgaccccctggagctggtggtgtctggagctgctgagaccctgagccccccccagaacaagagtgacagcaaggccggggagtag

SEQ ID NO: 157637 - DNA, 1959 bp, synthetic construct
  misc_feature 1..1959: note = Description of Artificial Sequence: Synthetic coding sequence
  source 1..1959: mol_type = other DNA
atgacccccatcctgactgtgctgatctgcctgggcctgagcctgggccccaggacccacgtgcaggccggccacctgcccaagcccaccctgtgggccgagcccggcagcgtcatcacccagggcagccctgtgaccctgcgctgccagggcggccaggagacccaggagtaccgcctgtaccgggagaagaagacagccctgtggatcacccgcatcccccaggagctggtgaagaagggccagttccccatccccagcatcacctgggagcacgccggccgctaccgctgctactacggcagtgacacagctggccgctctgagagcagtgaccccctggagctggtggtgactggagcctacatcaagcccaccctgagcgcccagcccagccctgtggtgaacagcggcggcaatgtcatcctgcagtgtgacagccaggtggcctttgatggcttcagcctgtgcaaggagggagaagatgagcacccccagtgcctgaacagccagccccacgcccggggcagcagccgggccatcttctctgtgggccctgtgagccccagccgccgctggtggtaccgctgctacgcctatgacagcaacagcccctatgagtggagcctgcccagcgacctgctggagctgctggtgctgggcgtgtccaagaagcccagcctgtctgtgcagcccggccccatcgtggcccctgaggagaccctgaccctgcagtgtggcagtgatgctggctacaacagatttgtgctgtacaaggatggagagcgggacttcctgcagctggccggggcccagccccaggccggcctgagccaggccaacttcaccctgggccctgtgagccgctcctatggaggccagtaccgctgctacggggcccacaacctgagcagcgagtggagcgcccccagcgaccccctggacatcctgattgctggccagttctatgacagagtgtccctgtctgtgcagcccggccccaccgtggccagcggggagaatgtgaccctgctgtgccagagccagggctggatgcagaccttcctgctgaccaaggagggcgctgctgatgacccctggaggctgcggagcacctaccagagccagaagtaccaggccgagttccccatgggccctgtgaccagcgcccacgccggcacctaccgctgctacggcagccagagcagcaagccctacctgctgacccaccccagcgaccccctggagctggtggtgtctggccccagcggcggccccagcagccccaccaccggccccaccagcaccagcgctggccctgaggaccagcccctgacccccaccggcagtgacccccagagcggcctgggccgccacctgggcgtggtgattggcatcctggtggccgtcatcctgctgctgctgctgctgctgctgctcttcctgatcctgcggcaccggcggcagggcaagcactggaccagcacccagaggaaggctgacttccagcaccctgctggagctgtgggccctgagcccacagaccggggcctgcagtggaggagcagccctgctgctgatgcccaggaggagaacctgtatgctgctgtgaagcacacccagccagaagatggagtggagatggacacccggcagagcccccatgatgaggacccccaggccgtgacctatgcagaggtgaagcacagccggccccggcgggagatggccagcccccccagccccctgagcggggagttcctggacaccaaggaccggcaggccgaggaggaccggcagatggacacagaagctgctgccagcgaggccccccaggatgtgacctacgcccagctgcacagcctgaccctgcggcgggaggccacagagcccccacccagccaggagggccccagccctgctgtgcccagcatctatgccaccctggccatccactag

SEQ ID NO: 157638 - DNA, 1953 bp, synthetic construct
  misc_feature 1..1953: note = Description of Artificial Sequence: Synthetic coding sequence
  source 1..1953: mol_type = other DNA
atgacccccatcctgactgtgctgatctgcctgggcctgagcctgggccccaggacccacgtgcaggccggccacctgcccaagcccaccctgtgggccgagcccggcagcgtcatcacccagggcagccctgtgaccctgcgctgccagggcggccaggagacccaggagtaccgcctgtaccgggagaagaagacagccctgtggatcacccgcatcccccaggagctggtgaagaagggccagttccccatccccagcatcacctgggagcacgccggccgctaccgctgctactacggcagtgacacagctggccgctctgagagcagtgaccccctggagctggtggtgactggagcctacatcaagcccaccctgagcgcccagcccagccctgtggtgaacagcggcggcaatgtcatcctgcagtgtgacagccaggtggcctttgatggcttcagcctgtgcaaggagggagaagatgagcacccccagtgcctgaacagccagccccacgcccggggcagcagccgggccatcttctctgtgggccctgtgagccccagccgccgctggtggtaccgctgctacgcctatgacagcaacagcccctatgagtggagcctgcccagcgacctgctggagctgctggtgctgggcgtgtccaagaagcccagcctgtctgtgcagcccggccccatcgtggcccctgaggagaccctgaccctgcagtgtggcagtgatgctggctacaacagatttgtgctgtacaaggatggagagcgggacttcctgcagctggccggggcccagccccaggccggcctgagccaggccaacttcaccctgggccctgtgagccgctcctatggaggccagtaccgctgctacggggcccacaacctgagcagcgagtggagcgcccccagcgaccccctggacatcctgattgctggccagttctatgacagagtgtccctgtctgtgcagcccggccccaccgtggccagcggggagaatgtgaccctgctgtgccagagccagggctggatgcagaccttcctgctgaccaaggagggcgctgctgatgacccctggaggctgcggagcacctaccagagccagaagtaccaggccgagttccccatgggccctgtgaccagcgcccacgccggcacctaccgctgctacggcagccagagcagcaagccctacctgctgacccaccccagcgaccccctggagctggtggtgtctggccccagcggcggccccagcagccccaccaccggccccaccagcaccagcggccctgaggaccagcccctgacccccactggaagtgacccccagagcggcctgggccgccacctgggcgtggtgattggcatcctggtggccgtcatcctgctgctgctgctgctgctgctgctcttcctgatcctgcggcaccggcggcagggcaagcactggaccagcacccagaggaaggctgacttccagcaccctgctggagctgtgggccctgagcccacagaccggggcctgcagtggaggagcagccctgctgctgatgcccaggaggagaacctgtatgctgctgtgaagcacacccagccagaagatggagtggagatggacaccaggagcccccatgatgaggacccccaggccgtgacctatgcagaggtgaagcacagccggccccggcgggagatggccagcccccccagccccctgagcggggagttcctggacaccaaggaccggcaggccgaggaggaccggcagatggacacagaagctgctgccagcgaggccccccaggatgtgacctacgcccagctgcacagcctgaccctgcggcgggaggccacagagcccccacccagccaggagggccccagccctgctgtgcccagcatctatgccaccctggccatccactag

SEQ ID NO: 157639 - DNA, 1953 bp, synthetic construct; identical to SEQ ID NO: 157638
  misc_feature 1..1953: note = Description of Artificial Sequence: Synthetic coding sequence
  source 1..1953: mol_type = other DNA

SEQ ID NO: 157640 - DNA, 1905 bp, synthetic construct
  misc_feature 1..1905: note = Description of Artificial Sequence: Synthetic coding sequence
  source 1..1905: mol_type = other DNA
atgacccccatcctgactgtgctgatctgcctgggcctgagcctgggccccaggacccacgtgcaggccggccacctgcccaagcccaccctgtgggccgagcccggcagcgtcatcacccagggcagccctgtgaccctgcgctgccagggcggccaggagacccaggagtaccgcctgtaccgggagaagaagacagccctgtggatcacccgcatcccccaggagctggtgaagaagggccagttccccatccccagcatcacctgggagcacgccggccgctaccgctgctactacggcagtgacacagctggccgctctgagagcagtgaccccctggagctggtggtgactggagcctacatcaagcccaccctgagcgcccagcccagccctgtggtgaacagcggcggcaatgtcatcctgcagtgtgacagccaggtggcctttgatggcttcagcctgtgcaaggagggagaagatgagcacccccagtgcctgaacagccagccccacgcccggggcagcagccgggccatcttctctgtgggccctgtgagccccagccgccgctggtggtaccgctgctacgcctatgacagcaacagcccctatgagtggagcctgcccagcgacctgctggagctgctggtgctgggcgtgtccaagaagcccagcctgtctgtgcagcccggccccatcgtggcccctgaggagaccctgaccctgcagtgtggcagtgatgctggctacaacagatttgtgctgtacaaggatggagagcgggacttcctgcagctggccggggcccagccccaggccggcctgagccaggccaacttcaccctgggccctgtgagccgctcctatggaggccagtaccgctgctacggggcccacaacctgagcagcgagtggagcgcccccagcgaccccctggacatcctgattgctggccagttctatgacagagtgtccctgtctgtgcagcccggccccaccgtggccagcggggagaatgtgaccctgctgtgccagagccagggctggatgcagaccttcctgctgaccaaggagggcgctgctgatgacccctggaggctgcggagcacctaccagagccagaagtaccaggccgagttccccatgggccctgtgaccagcgcccacgccggcacctaccgctgctacggcagccagagcagcaagccctacctgctgacccaccccagcgaccccctggagctggtggtgtctgctggccctgaggaccagcccctgacccccactggaagtgacccccagagcggcctgggccgccacctgggcgtggtgattggcatcctggtggccgtcatcctgctgctgctgctgctgctgctgctcttcctgatcctgcggcaccggcggcagggcaagcactggaccagcacccagaggaaggctgacttccagcaccctgctggagctgtgggccctgagcccacagaccggggcctgcagtggaggagcagccctgctgctgatgcccaggaggagaacctgtatgctgctgtgaagcacacccagccagaagatggagtggagatggacaccaggagcccccatgatgaggacccccaggccgtgacctatgcagaggtgaagcacagccggccccggcgggagatggccagcccccccagccccctgagcggggagttcctggacaccaaggaccggcaggccgaggaggaccggcagatggacacagaagctgctgccagcgaggccccccaggatgtgacctacgcccagctgcacagcctgaccctgcggcgggaggccacagagcccccacccagccaggagggccccagccctgctgtgcccagcatctatgccaccctggccatccactag

SEQ ID NO: 157641 - DNA, 1953 bp, synthetic construct; identical to SEQ ID NO: 157638
  misc_feature 1..1953: note = Description of Artificial Sequence: Synthetic coding sequence
  source 1..1953: mol_type = other DNA

SEQ ID NO: 157642 - DNA, 1533 bp, synthetic construct
  misc_feature 1..1533: note = Description of Artificial Sequence: Synthetic coding sequence
  source 1..1533: mol_type = other DNA
atgacccccatcctgactgtgctgatctgcctgggcctgagcctgggccccaggacccacgtgcaggccggccacctgcccaagcccaccctgtgggccgagcccggcagcgtcatcacccagggcagccctgtgaccctgcgctgccagggcggccaggagacccaggagtaccgcctgtaccgggagaagaagacagccctgtggatcacccgcatcccccaggagctggtgaagaagggccagttccccatccccagcatcacctgggagcacgccggccgctaccgctgctactacggcagtgacacagctggccgctctgagagcagtgaccccctggagctggtggtgactggagcctacatcaagcccaccctgagcgcccagcccagccctgtggtgaacagcggcggcaatgtcatcctgcagtgtgacagccaggtggcctttgatggcttcagcctgtgcaaggagggagaagatgagcacccccagtgcctgaacagccagccccacgcccggggcagcagccgggccatcttctctgtgggccctgtgagccccagccgccgctggtggtaccgctgctacgcctatgacagcaacagcccctatgagtggagcctgcccagcgacctgctggagctgctggtgctgggcgtgtccaagaagcccagcctgtctgtgcagcccggccccatcgtggcccctgaggagaccctgaccctgcagtgtggcagtgatgctggctacaacagatttgtgctgtacaaggatggagagcgggacttcctgcagctggccggggcccagccccaggccggcctgagccaggccaacttcaccctgggccctgtgagccgctcctatggaggccagtaccgctgctacggggcccacaacctgagcagcgagtggagcgcccccagcgaccccctggacatcctgattgctggccagttctatgacagagtgtccctgtctgtgcagcccggccccaccgtggccagcggggagaatgtgaccctgctgtgccagagccagggctggatgcagaccttcctgctgaccaaggagggcgctgctgatgacccctggaggctgcggagcacctaccagagccagaagtaccaggccgagttccccatgggccctgtgaccagcgcccacgccggcacctaccgctgctacggcagccagagcagcaagccctacctgctgacccaccccagcgaccccctggagctggtggtgtctggccccagcggcggccccagcagccccaccaccggccccaccagcaccagcggccctgaggaccagcccctgacccccactggaagtgacccccagagcggcctgggccgccacctgggcgtggtgattggcatcctggtggccgtcatcctgctgctgctgctgctgctgctgctcttcctgatcctgcggcaccggcggcagggcaagcactggaccagcagccctgcccagctgcccatgcccaggaagaagacctccatgctgccctag

SEQ ID NO: 157643 - DNA, 1797 bp, synthetic construct
  misc_feature 1..1797: note = Description of Artificial Sequence: Synthetic coding sequence
  source 1..1797: mol_type = other DNA
atgacccccatcgtgacagtgctgatctgcctgggcctgagcctgggccccaggacccacgtgcagacaggcaccatccccaagcccaccctgtgggccgagccagattctgtcatcacccagggcagccctgtgaccctgagctgccagggcagcctggaggcccaggagtaccgcctgtaccgggagaagaagagcgcctcctggatcacccgcatccggcctgagctggtgaagaatggccagttccacatccccagcatcacctgggagcacacaggccgctatggctgccagtactacagccgggcccgctggagcgagctgagtgaccccctggtgctggtgatgaccggggcctaccccaagcccaccctgagcgcccagcccagccctgtggtgaccagcggcggccgggtgaccctgcagtgtgagagccaggtggccttcggcggcttcatcctgtgcaaggagggggaggaggagcacccccagtgcctgaacagccagccccacgcccggggcagcagccgggccatcttctctgtgggccctgtgagccccaacagacgctggagccaccgctgctacggctatgacctgaacagcccctacgtgtggagcagccccagcgacctgctggagctgctggtgcctggggtgtccaagaagcccagcctgtctgtgcagcccggccctgtggtggcccctggagagagcctgaccctgcagtgtgtgtctgatgtgggctatgacagatttgtgctgtacaaggagggggagcgggacctgcggcagctgcccggccggcagccccaggccggcctgagccaggccaacttcaccctgggccctgtgagccgctcctatggaggccagtaccgctgctatggagcccacaacctgagcagtgaatgttctgcccccagcgaccccctggacatcctgatcaccggccagatccggggcacccccttcatctctgtgcagcccggccccaccgtggccagcggagaaaatgtgaccctgctgtgccagagctggaggcagttccacaccttcctgctgaccaaggccggggctgctgatgcccccctgcggctgcggagcatccacgagtaccccaagtaccaggccgagttccccatgagccctgtgaccagcgcccatgctggcacctaccgctgctacggcagcctgaacagcgacccctacctgctgagccaccccagcgagcccctggagctggtggtgtctggccccagcatgggcagcagccccccacccaccggccccatcagcaccccagctggccctgaggaccagcccctgacccccactggaagtgacccccagagcggcctgggccgccacctgggcgtggtgattggcatcctggtggccgtggtgctgctgctgctgctgctgctgctgctcttcctgatcctgcggcaccggcggcagggcaagcactggaccagcacccagaggaaggctgacttccagcaccctgctggagctgtgggccctgagcccacagaccggggcctgcagtggaggagcagccctgctgctgatgcccaggaggagaacctgtatgctgctgtgaaggacacccagccagaagatggagtggagatggacaccagggctgctgccagcgaggccccccaggatgtgacctacgcccagctgcacagcctgaccctgcggaggaaggccacagagcccccacccagccaggagcgggagcccccagctgagcccagcatctatgccaccctggccatccactag

SEQ ID NO: 157644 - DNA, 1449 bp, synthetic construct
  misc_feature 1..1449: note = Description of Artificial Sequence: Synthetic coding sequence
  source 1..1449: mol_type = other DNA
atgaccggggcctaccccaagcccaccctgagcgcccagcccagccctgtggtgaccagcggcggccgggtgaccctgcagtgtgagagccaggtggccttcggcggcttcatcctgtgcaaggagggggaggaggagcacccccagtgcctgaacagccagccccacgcccggggcagcagccgggccatcttctctgtgggccctgtgagccccaacagacgctggagccaccgctgctacggctatgacctgaacagcccctacgtgtggagcagccccagcgacctgctggagctgctggtgcctggggtgtccaagaagcccagcctgtctgtgcagcccggccctgtggtggcccctggagagagcctgaccctgcagtgtgtgtctgatgtgggctatgacagatttgtgctgtacaaggagggggagcgggacctgcggcagctgcccggccggcagccccaggccggcctgagccaggccaacttcaccctgggccctgtgagccgctcctatggaggccagtaccgctgctatggagcccacaacctgagcagtgaatgttctgcccccagcgaccccctggacatcctgatcaccggccagatccggggcacccccttcatctctgtgcagcccggccccaccgtggccagcggagaaaatgtgaccctgctgtgccagagctggaggcagttccacaccttcctgctgaccaaggccggggctgctgatgcccccctgcggctgcggagcatccacgagtaccccaagtaccaggccgagttccccatgagccctgtgaccagcgcccatgctggcacctaccgctgctacggcagcctgaacagcgacccctacctgctgagccaccccagcgagcccctggagctggtggtgtctggccccagcatgggcagcagccccccacccaccggccccatcagcaccccagctggccctgaggaccagcccctgacccccactggaagtgacccccagagcggcctgggccgccacctgggcgtggtgattggcatcctggtggccgtggtgctgctgctgctgctgctgctgctgctcttcctgatcctgcggcaccggcggcagggcaagcactggaccagcacccagaggaaggctgacttccagcaccctgctggagctgtgggccctgagcccacagaccggggcctgcagtggaggagcagccctgctgctgatgcccaggaggagaacctgtatgctgctgtgaaggacacccagccagaagatggagtggagatggacaccagggctgctgccagcgaggccccccaggatgtgacctacgcccagctgcacagcctgaccctgcggaggaaggccacagagcccccacccagccaggagcgggagcccccagctgagcccagcatctatgccaccctggccatccactag

SEQ ID NO: 157645 - DNA, 1932 bp, synthetic construct
  misc_feature 1..1932: note = Description of Artificial Sequence: Synthetic coding sequence
  source 1..1932: mol_type = other DNA
atgaccccagccctgacagccctgctgtgcctgggcctgagcctgggccccaggaccagggtgcaggccggccccttccccaagcccaccctgtgggccgagcccggcagcgtcatctcctggggcagccctgtgaccatctggtgccagggcagccaggaggcccaggagtaccgcctgcacaaggagggcagccctgagcccctggacaggaacaaccccctggagcccaagaacaaggcccgcttcagcatccccagcatgacagagcaccacgccggccgctaccgctgccactactacagcagcgctggctggagcgagcccagcgaccccctggagatggtgatgaccggggcctacagcaagcccaccctgagcgccctgcccagccctgtggtggccagcggcggcaacatgaccctgcgctgtggcagccagaagggctaccaccactttgtgctgatgaaggagggggagcaccagctgcccaggaccctggacagccagcagctgcacagccggggcttccaggccctcttccctgtgggccctgtgacccccagccaccgctggaggttcacctgctactactactacaccaacaccccctgggtgtggagccaccccagcgaccccctggagatcctgcccagcggcgtgtccaggaagcccagcctgctgaccctgcagggccctgtgctggcccctggccagagcctgaccctgcagtgtggcagtgatgtgggctacaacagatttgtgctgtacaaggagggggagcgggacttcctgcagaggcctggccagcagccccaggccggcctgagccaggccaacttcaccctgggccctgtgagccccagcaatggaggccagtaccgctgctatggagcccacaacctgagcagcgagtggagcgcccccagcgaccccctgaacatcctgatggccggccagatctatgacacagtgtccctgagcgcccagcccggccccaccgtggccagcggagaaaatgtgaccctgctgtgccagagctggtggcagtttgacaccttcctgctgaccaaggagggcgccgcccacccccccctgcggctgcgctccatgtacggggcccacaagtaccaggccgagttccccatgagccctgtgaccagcgcccatgctggcacctaccgctgctacggcagctacagcagcaacccccacctgctgagccaccccagcgagcccctggagctggtggtgtctggccctgaggaccagcccctgaaccccccaggcagcggcccccagaaccccccaggcctgggcagcggggccggcaccagggctgctggcctgggccgctacctggaggtgctgattggagtgtctgtggcctttgtgctgctgctcttcctgctgctcttcctgctgctgcggcggcagaggcacagcaagcacaggaccagtgaccagaggaagacagacttccagaggcctgctggagctgctgagacagagcccaaggaccggggcctgctgcggcgcagcagccctgctgctgatgtgcaggaggagaacctgtatgctgctgtgaaggacacccagagtgaagatagagtggagctggacagccagagcccccatgatgaggacccccaggccgtgacctacgcccctgtgaagcacagcagcccccggcgggagatggccagcccccccagcagcctgtctggagagttcctggacaccaaggaccggcaggtggaggaggaccggcagatggacacagaggccgccgccagcgaggccagccaggatgtgacctacgcccagctgcacagcctgaccctgcggaggaaggccacagagcccccacccagccaggagggggagcccccagctgagcccagcatctatgccaccctggccatccactag

SEQ ID NO: 157646 - DNA, 1896 bp, synthetic construct
  misc_feature 1..1896: note = Description of Artificial Sequence: Synthetic coding sequence
  source 1..1896: mol_type = other DNA
atgaccccagccctgacagccctgctgtgcctgggcctgagcctgggccccaggaccagggtgcaggccggccccttccccaagcccaccctgtgggccgagcccggcagcgtcatctcctggggcagccctgtgaccatctggtgccagggcagccaggaggcccaggagtaccgcctgcacaaggagggcagccctgagcccctggacaggaacaaccccctggagcccaagaacaaggcccgcttcagcatccccagcatgacagagcaccacgccggccgctaccgctgccactactacagcagcgctggctggagcgagcccagcgaccccctggagatggtgatgaccggggcctacagcaagcccaccctgagcgccctgcccagccctgtggtggccagcggcggcaacatgaccctgcgctgtggcagccagaagggctaccaccactttgtgctgatgaaggagggggagcaccagctgcccaggaccctggacagccagcagctgcacagccggggcttccaggccctcttccctgtgggccctgtgacccccagccaccgctggaggttcacctgctactactactacaccaacaccccctgggtgtggagccaccccagcgaccccctggagatcctgcccagcggcgtgtccaggaagcccagcctgctgaccctgcagggccctgtgctggcccctggccagagcctgaccctgcagtgtggcagtgatgtgggctacaacagatttgtgctgtacaaggagggggagcgggacttcctgcagaggcctggccagcagccccaggccggcctgagccaggccaacttcaccctgggccctgtgagccccagcaatggaggccagtaccgctgctatggagcccacaacctgagcagcgagtggagcgcccccagcgaccccctgaacatcctgatggccggccagatctatgacacagtgtccctgagcgcccagcccggccccaccgtggccagcggagaaaatgtgaccctgctgtgccagagctggtggcagtttgacaccttcctgctgaccaaggagggcgccgcccacccccccctgcggctgcgctccatgtacggggcccacaagtaccaggccgagttccccatgagccctgtgaccagcgcccatgctggcacctaccgctgctacggcagctacagcagcaacccccacctgctgagccaccccagcgagcccctggagctggtggtgtctggccacagcggcggcagcagcctgccccccaccggcccccccagcaccccaggcctgggccgctacctggaggtgctgattggagtgtctgtggcctttgtgctgctgctcttcctgctgctcttcctgctgctgcggcggcagaggcacagcaagcacaggaccagtgaccagaggaagacagacttccagaggcctgctggagctgctgagacagagcccaaggaccggggcctgctgcggcgcagcagccctgctgctgatgtgcaggaggagaacctgtatgctgctgtgaaggacacccagagtgaagatagagtggagctggacagccagagcccccatgatgaggacccccaggccgtgacctacgcccctgtgaagcacagcagcccccggcgggagatggccagcccccccagcagcctgtctggagagttcctggacaccaaggaccggcaggtggaggaggaccggcagatggacacagaggccgccgccagcgaggccagccaggatgtgacctacgcccagctgcacagcctgaccctgcggaggaaggccacagagcccccacccagccaggagggggagcccccagctgagcccagcatctatgccaccctggccatccactag

SEQ ID NO: 157647 - DNA, 1947 bp, synthetic construct
  misc_feature 1..1947: note = Description of Artificial Sequence: Synthetic coding sequence
  source 1..1947: mol_type = other DNA
atgaccccagccctgacagccctgctgtgcctgggcctgagcctgggccccaggaccagggtgcaggccggccccttccccaagcccaccctgtgggccgagcccggcagcgtcatctcctggggcagccctgtgaccatctggtgccagggcagcctggaggcccaggagtaccagctggacaaggagggcagccctgagcccctggacaggaacaaccccctggagcccaagaacaaggcccgcttcagcatccccagcatgacccagcaccacgccggccgctaccgctgccactactacagcagcgctggctggagcgagcccagcgaccccctggagctggtgatgaccggggcctacagcaagcccaccctgagcgccctgcccagccctgtggtggccagcggcggcaacatgaccctgcgctgtggcagccagaagggctaccaccactttgtgctgatgaaggagggggagcaccagctgcccaggaccctggacagccagcagctgcacagccggggcttccaggccctcttccctgtgggccctgtgacccccagccaccgctggaggttcacctgctactactactacaccaacaccccctgggtgtggagccaccccagcgaccccctggagatcctgcccagcggcgtgtccaggaagcccagcctgctgaccctgcagggccctgtgctggcccctggccagagcctgaccctgcagtgtggcagtgatgtgggctacaacagatttgtgctgtacaaggagggggagcgggacttcctgcagaggcctggccagcagccccaggccggcctgagccaggccaacttcaccctgggccctgtgagccccagcaatggaggccagtaccgctgctatggagcccacaacctgagcagcgagtggagcgcccccagcgaccccctgaacatcctgatggccggccagatctatgacacagtgtccctgagcgcccagcccggccccaccgtggccagcggagaaaatgtgaccctgctgtgccagagctggtggcagtttgacaccttcctgctgaccaaggagggcgccgcccacccccccctgcggctgcgctccatgtacggggcccacaagtaccaggccgagttccccatgagccctgtgaccagcgcccatgctggcacctaccgctgctacggcagctacagcagcaacccccacctgctgagccaccccagcgagcccctggagctggtggtgtctggccacagcggcggcagcagcctgccccccaccggcccccccagcacccctgggggccctgaggaccagcccctgaaccccccaggcagcggcccccagaaccggctgggccgctacctggaggtgctgattggagtgtctgtggcctttgtgctgctgctcttcctgctgctcttcctgctgctgcggcggcagaggcacagcaagcacaggaccagtgaccagaggaagacagacttccagaggcctgctggagctgctgagacagagcccaaggaccggggcctgctgcggcgcagcagccctgctgctgatgtgcaggaggagaacctgtatgctgctgtgaaggacacccagagcgaggacagagtggagctggacagccagagcccccatgatgaggacccccaggccgtgacctacgcccctgtgaagcacagcagcccccggcgggagatggccagcccccccagcagcctgagcggggagttcctggacaccaaggaccggcaggtggaggaggaccggcagatggacacagaagctgctgccagcgaggccagccaggatgtgacctacgcccagctgcacagcctgaccctgcggaggaaggccacagagcccccacccagccaggagggggagcccccagctgagcccagcatctatgccaccctggccatccactag

SEQ ID NO: 157648 - DNA, 1896 bp, synthetic construct; identical to SEQ ID NO: 157646
  misc_feature 1..1896: note = Description of Artificial Sequence: Synthetic coding sequence
  source 1..1896: mol_type = other DNA

SEQ ID NO: 157649 - DNA, 477 bp, synthetic construct
  misc_feature 1..477: note = Description of Artificial Sequence: Synthetic coding sequence
  source 1..477: mol_type = other DNA
atgaccccagccctgacagccctgctgtgcctgggcctgagcctgggccccaggaccagggtgcaggccggccccttccccaagcccaccctgtgggccgagcccggcagcgtcatctcctggggcagccctgtgaccatctggtgccagggcagccaggaggcccaggagtaccgcctgcacaaggagggcagccctgagcccctggacaggaacaaccccctggagcccaagaacaaggcccgcttcagcatccccagcatgacagagcaccacgccggccgctaccgctgccactactacagcagcgctggctggagcgagcccagcgaccccctggagatggtgatgaccggggcctacagcaagcccaccctgagcgccctgcccagccctgtggtggccagcggcggcaacatgaccctgcgctgtggcagccagaagggctaccaccactttgtgctgatgaaggagtag

SEQ ID NO: 157650 - DNA, 1347 bp, synthetic construct
  misc_feature 1..1347: note = Description of Artificial Sequence: Synthetic coding sequence
  source 1..1347: mol_type = other DNA
atgatccccaccttcaccgccctgctgtgcctgggcctgagcctgggccccaggacccacatgcaggccggccccctgcccaagcccaccctgtgggccgagcccggcagcgtcatctcctggggcaacagcgtgaccatctggtgccagggcaccctggaggcccgggagtaccgcctggacaaggaggagagccctgccccctgggaccggcagaaccccctggagcccaagaacaaggcccgcttcagcatccccagcatgacagaggactatgccggccgctaccgctgctactaccgcagccctgtgggctggagccagcccagcgaccccctggagctggtgatgaccggggcctacagcaagcccaccctgagcgccctgcccagccccctggtgaccagcggcaagtctgtgaccctgctgtgccagagccgcagccccatggacaccttcctgctgatcaaggagcgggccgcccaccccctgctgcacctgcggagtgaacatggagcccagcagcaccaggccgagttccccatgagccctgtgacctctgtgcatggaggcacctaccgctgcttcagcagccacggcttcagccactacctgctgagccaccccagcgaccccctggagctgattgtgtctggcagcctggaggacccccggcccagccccaccaggtctgtgtccacagctgctggccctgaggaccagcccctgatgcccaccggctctgtgccccacagcggcctgcggcggcactgggaggtgctgattggagtgctggtggtgtccatcctgctgctgagcctgctgctcttcctgctgctgcagcactggaggcagggcaagcacaggaccctggcccagaggcaggccgacttccagaggcctcctggagctgctgagcctgagcccaaggatggcggcctgcagaggaggagcagccctgctgctgatgtgcagggcgagaacttctgtgccgctgtgaagaacacccagccagaagatggagtggagatggacacccggcagagcccccatgatgaggacccccaggccgtgacctacgccaaggtgaagcacagccggccccggcgggagatggccagcccccccagccccctgagcggggagttcctggacaccaaggaccggcaggccgaggaggaccggcagatggacacagaagctgctgccagcgaggccccccaggatgtgacctacgcccagctgcacagcttcaccctgcggcagaaggccacagagcccccacccagccaggagggcgccagccctgctgagcccagcgtgtatgccaccctggccatccactag

SEQ ID NO: 157651 - DNA, 1347 bp, synthetic construct; identical to SEQ ID NO: 157650
  misc_feature 1..1347: note = Description of Artificial Sequence: Synthetic coding sequence
  source 1..1347: mol_type = other DNA

SEQ ID NO: 157652 - DNA, 1773 bp, synthetic construct
  misc_feature 1..1773: note = Description of Artificial Sequence: Synthetic coding sequence
  source 1..1773: mol_type = other DNA
atgaccctgaccctgtctgtgctgatctgcctgggcctgtctgtgggccccaggacctgtgtgcaggccggcaccctgcccaagcccaccctgtgggccgagcccgcctctgtgattgcccggggcaagcctgtgaccctgtggtgccagggccccctggagacagaggagtaccgcctggacaaggagggcctgccctgggccaggaagaggcagaaccccctggagcccggggccaaggccaagttccacatccccagcacagtgtatgacagcgctggccgctaccgctgctactatgagaccccagctggctggagcgagcccagcgaccccctggagctggtggccaccggcttctacgccgagcccaccctgctggccctgcccagccctgtggtggccagcggcggcaatgtgaccctgcagtgtgacaccctggatggcctgctgacctttgtgctggtggaggaggagcagaagctgcccaggaccctgtacagccagaagctgcccaagggccccagccaggccctcttccctgtgggccctgtgacccccagctgccgctggaggttccgctgctactactactacaggaagaacccccaggtgtggagcaaccccagcgacctgctggagatcctggtgcctggggtgtccaggaagcccagcctgctgatcccccagggctctgtggtggcccggggcggcagcctgaccctgcagtgccgcagtgatgtgggctatgacatctttgtgctgtacaaggagggggagcatgacctggtgcagggcagcggccagcagccccaggccggcctgagccaggccaacttcaccctgggccctgtgagccgcagccatggaggccagtaccgctgctacggggcccacaacctgagcccccgctggagcgcccccagcgaccccctggacatcctgattgctggcctcatcccagacatcccagccctgtctgtgcagcccggccccaaggtggccagcggggagaatgtgaccctgctgtgccagagctggcaccagattgacaccttcttcctgaccaaggagggcgccgcccacccccccctgtgcctgaagagcaagtaccagagctaccgccaccaggccgagttctccatgagccctgtgaccagcgcccagggcggcacctaccgctgctacagcgccatccgcagctacccctacctgctgagcagccccagctacccccaggagctggtggtgtctggccccagcggggaccccagcctgagccccaccggcagcacccccaccccaggccctgaggaccagcccctgacccccaccggcctggacccccagagcggcctgggccgccacctgggcgtggtgactggagtgtctgtggcctttgtgctgctgctcttcctgctgctcttcctgctgctgcggcaccgccaccagagcaagcacaggaccagcgcccacttctacagacctgctggagctgctggccctgagcccaaggaccagggcctgcagaagagggccagccctgtggccgacatccaggaggagatcctgaatgctgctgtgaaggacacccagcccaaggatggagtggagatggatgcccgggccgccgccagcgaggccccccaggatgtgacctacgcccagctgcacagcctgaccctgcggcgggaggccacagagcccccacccagccaggagcgggagcccccagctgagcccagcatctatgcccccctggccatccactag

SEQ ID NO: 157653 - DNA, 1776 bp, synthetic construct
  misc_feature 1..1776: note = Description of Artificial Sequence: Synthetic coding sequence
  source 1..1776: mol_type = other DNA
atgaccctgaccctgtctgtgctgatctgcctgggcctgtctgtgggccccaggacctgtgtgcaggccggcaccctgcccaagcccaccctgtgggccgagcccgcctctgtgattgcccggggcaagcctgtgaccctgtggtgccagggccccctggagacagaggagtaccgcctggacaaggagggcctgccctgggccaggaagaggcagaaccccctggagcccggggccaaggccaagttccacatccccagcacagtgtatgacagcgctggccgctaccgctgctactatgagaccccagctggctggagcgagcccagcgaccccctggagctggtggccaccggcttctacgccgagcccaccctgctggccctgcccagccctgtggtggccagcggcggcaatgtgaccctgcagtgtgacaccctggatggcctgctgacctttgtgctggtggaggaggagcagaagctgcccaggaccctgtacagccagaagctgcccaagggccccagccaggccctcttccctgtgggccctgtgacccccagctgccgctggaggttccgctgctactactactacaggaagaacccccaggtgtggagcaaccccagcgacctgctggagatcctggtgcctggggtgtccaggaagcccagcctgctgatcccccagggctctgtggtggcccggggcggcagcctgaccctgcagtgccgcagtgatgtgggctatgacatctttgtgctgtacaaggagggggagcatgacctggtgcagggcagcggccagcagccccaggccggcctgagccaggccaacttcaccctgggccctgtgagccgcagccatggaggccagtaccgctgctacggggcccacaacctgagcccccgctggagcgcccccagcgaccccctggacatcctgattgctggcctcatcccagacatcccagccctgtctgtgcagcccggccccaaggtggccagcggggagaatgtgaccctgctgtgccagagctggcaccagattgacaccttcttcctgaccaaggagggcgccgcccacccccccctgtgcctgaagagcaagtaccagagctaccgccaccaggccgagttctccatgagccctgtgaccagcgcccagggcggcacctaccgctgctacagcgccatccgcagctacccctacctgctgagcagccccagctacccccaggagctggtggtgtctggccccagcggggaccccagcctgagccccaccggcagcacccccaccccagctggccctgaggaccagcccctgacccccaccggcctggacccccagagcggcctgggccgccacctgggcgtggtgactggagtgtctgtggcctttgtgctgctgctcttcctgctgctcttcctgctgctgcggcaccgccaccagagcaagcacaggaccagcgcccacttctacagacctgctggagctgctggccctgagcccaaggaccagggcctgcagaagagggccagccctgtggccgacatccaggaggagatcctgaatgctgctgtgaaggacacccagcccaaggatggagtggagatggatgcccgggctgctgccagcgaggccccccaggatgtgacctacgcccagctgcacagcctgaccctgcggcgggaggccacagagcccccacccagccaggagcgggagcccccagctgagcccagcatctatgcccccctggccatccactag

SEQ ID NO: 157654 - DNA, 1869 bp, synthetic construct
  misc_feature 1..1869: note = Description of Artificial Sequence: Synthetic coding sequence
  source 1..1869: mol_type = other DNA
atgaccctgaccctgtctgtgctgatctgcctgggcctgtctgtgggccccaggacctgtgtgcaggccggcaccctgcccaagcccaccctgtgggccgagcccgcctctgtgattgcccggggcaagcctgtgaccctgtggtgccagggccccctggagacagaggagtaccgcctggacaaggagggcctgccctgggccaggaagaggcagaaccccctggagcccggggccaaggccaagttccacatccccagcacagtgtatgacagcgctggccgctaccgctgctactatgagaccccagctggctggagcgagcccagcgaccccctggagctggtggccacagccctgcccagccctgtggtggccagcggcggcaatgtgaccctgcagtgtgacaccctggatggcctgctgacctttgtgctggtggaggaggagcagaagctgcccaggaccctgtacagccagaagctgcccaagggccccagccaggccctcttccctgtgggccctgtgacccccagctgccgctggaggttccgctgctactactactacaggaagaacccccaggtgtggagcaaccccagcgacctgctggagatcctggtgcctggggtgtccaggaagcccagcctgctgatcccccagggctctgtggtggcccggggcggcagcctgaccctgcagtgccgcagtgatgtgggctatgacatctttgtgctgtacaaggagggggagcatgacctggtgcagggcagcggccagcagccccaggccggcctgagccaggccaacttcaccctgggccctgtgagccgcagccacggcggccagtaccgctgctatggagcccacaacctgagcccccgctggagcgcccccagcgaccccctggacatcctgattgctggcctcatcccagacatcccagccctgtctgtgcagcccggccccaaggtggccagcggagaaaatgtgaccctgctgtgccagagctggcaccagattgacaccttcttcctgaccaaggagggcgccgcccacccccccctgtgcctgaagagcaagtaccagagctaccgccaccaggccgagttctccatgagccctgtgaccagcgcccagggcggcacctaccgctgctacagcgccatccgcagctacccctacctgctgagcagccccagctacccccaggagctggtggtgtctggccccagcggggaccccagcctgagccccaccggcagcacccccaccccagctggccctgaggaccagcccctgacccccaccggcctggacccccagagcggcctgggccgccacctgggcgtggtgactggagtgtctgtggcctttgtgctgctgctcttcctgctgctcttcctgctgctgcggcaccgccaccagagcaagcacaggaccagcgcccacttctacagacctgctggagctgctggccctgagcccaaggaccagggcctgcagaagagggccagccctgtggccgacatccaggaggagatcctgaatgctgctgtgaaggacacccagcccaaggatggagtggagatggatgcccggcagagcccccatgatgaggacccccaggccgtgacctacgccgaggtgaagcacagccggccccggcgggagatggccagcccccccagccccctgtctggagagttcctggacaccaaggaccggcaggccgaggaggaccggcagatggacacagagcgggtgctgagcagccctggcccccaggccagccccccaccacccaggagcctgcccctgaccctgccccgctgccgcctgctgcacctgaagccacccaggatgtag

SEQ ID NO: 157655 - DNA, 2595 bp, synthetic construct
  misc_feature 1..2595: note = Description of Artificial Sequence: Synthetic coding sequence
  source 1..2595: mol_type = other DNA
atgggctgctggggccagctgctggtgtggtttggagctgctggggccatcctgtgcagcagccctggcagccaggagaccttcctgcggagcagccccctgcccctggccagccccagcccccgggaccccaaggtgtctgcccctccttccatcctggagcccgccagccccctgaacagccctggaacagagggctcctggctgttcagcacctgtggggccagcggcagacatggccccacccagacccagtgtgatggagcctatgccggcacctctgtggtggtgacagtgggcgccgccggccagctgcggggcgtgcagctgtggagggtgcccggccctggccagtacctgatcagcgcctacggggctgctgggggcaagggggccaagaaccacctgagccgggcccacggcgtgtttgtgtctgccatcttcagcctgggcctgggggagagcctgtacatcctggtgggccagcagggagaagatgcctgccctgggggcagccctgagagccagctggtgtgcctgggggagagcagagctgtggaggagcacgccgccatggatggcagcgagggcgtgcccggcagccgccgctgggccggcggcggcggcggcggcggcggggccacctacgtgttccgggtgcgggccggggagctggagcccctgctggtggccgccggcggcggcggccgggcctacctgcggccccgggaccggggccgcacccaggccagccctgagaagctggagaacagaagtgaggcccctggcagcggcggccggggcggcgctgctgggggcggcggcggctggaccagccgggcccccagcccccaggccggccgcagcctgcaggagggcgctgagggcggccagggctgcagcgaggcctgggccaccctgggctgggccgccgccggcggctttggaggcggcggcggggcctgcacagctgggggcggcggcggcggctacagaggaggagatgccagcgagacagacaacctgtgggcagatggagaagatggagtgtccttcatccaccccagcagcgagctgttcctgcagcccctggccgtgacagagaaccacggggaggtggagatccgccgccacctgaactgcagccactgccccctgcgggactgccagtggcaggccgagctgcagctggctgaatgtctgtgcccagagggcatggagctggccgtggacaacgtgacctgcatggacctgcacaagcccccaggccccctggtgctgatggtggccgtggtggccaccagcaccctgagcctgctgatggtgtgtggggtgctgatcctggtgaagcagaagaagtggcagggcctgcaggagatgaggctgcccagccctgagctggagctgagcaagctgcggaccagcgccatcagaacagcccccaacccctactactgccaggtgggcctgggccctgcccagagctggcccctgcccccaggagtgacagaggtgtccccagccaacgtgaccctgctgcgggccctgggccacggggcctttggagaggtgtatgagggcctggtgattggcctgcccggggacagcagccccctgcaggtggccatcaagaccctgcctgagctgtgcagcccccaggatgagctggacttcctgatggaggccctgatcatcagcaagttccgccaccagaacatcgtgcgctgtgtgggcctgagcctgcgggccacccccaggctcatcctgctggagctgatgtctggaggagacatgaagagcttcctgcggcacagccggccccacctgggccagcccagccccctggtgatgagggacctgctgcagctggcccaggacatcgcccagggctgccactacctggaggagaaccacttcatccaccgggacattgctgccaggaactgcctgctgagctgtgccggccccagccgggtggccaagatcggggactttggcatggcccgggacatctaccgggccagctactaccgccgcggggaccgggccctgctgcctgtgaagtggatgcctcctgaggccttcctggagggcatcttcaccagcaagacagacagctggagctttggagtgctgctgtgggagatcttcagcctgggctacatgccctacccaggccgcaccaaccaggaggtgctggactttgtggtgggcggcggccgcatggaccccccccggggctgccccggccctgtgtaccgcatcatgacccagtgctggcagcacgagcctgagctgcggcccagctttgccagcatcctggagcggctgcagtactgcacccaggaccctgatgtgctgaacagcctgctgcccatggagctgggccccaccccagaggaggagggcaccagcggcctgggcaacagaagcctggagtgcctgcggcccccccagccccaggagctgagccctgagaagctgaagtcctggggcggcagccccctgggcccctggctgagcagcggcctgaagcccctgaagagccggggcctgcagccccagaacctgtggaaccccacctaccgctcctag

SEQ ID NO: 157656 - DNA, 2412 bp, synthetic construct
  misc_feature 1..2412: note = Description of Artificial Sequence: Synthetic coding sequence
  source 1..2412: mol_type = other DNA
atgggctgctggggccagctgctggtgtggtttggagctgctggggccatcctgtgcagcagccctggcagccaggagaccttcctgcggagcagccccctgcccctggccagccccagcccccgggaccccaaggtgtctgcccctccttccatcctggagcccgccagccccctgaacagccctggaacagagggctcctggctgttcagcacctgtggggccagcggcagacatggccccacccagacccagtgtgatggagcctatgccggcacctctgtggtggtgacagtgggcgccgccggccagctgcggggcgtgcagctgtggagggtgcccggccctggccagtacctgatcagcgcctacggggctgctgggggcaagggggccaagaaccacctgagccgggcccacggcgtgtttgtgtctgccatcttcagcctgggcctgggggagagcctgtacatcctggtgggccagcagggagaagatgcctgccctgggggcagccctgagagccagctggtgtgcctgggggagagcagagctgtggaggagcacgccgccatggatggcagcgagggcgtgcccggcagccgccgctgggccggcggcggcggcggcggcggcggggccacctacgtgttccgggtgcgggccggggagctggagcccctgctggtggccgccggcggcggcggccgggcctacctgcggccccgggaccggggccgcacccaggccagccctgagaagctggagaacagaagtgaggcccctggcagcggcggccggggcggcgctgctggaggagatgccagcgagacagacaacctgtgggcagatggagaagatggagtgtccttcatccaccccagcagcgagctgttcctgcagcccctggccgtgacagaaaatcatggagaggtggagatcagaagacacctgaactgcagccactgccccctgcgggactgccagtggcaggccgagctgcagctggccgagtgcctgtgcccagagggcatggagctggccgtggacaacgtgacctgcatggacctgcacaagcccccaggccccctggtgctgatggtggccgtggtggccaccagcaccctgagcctgctgatggtgtgtggggtgctgatcctggtgaagcagaagaagtggcagggcctgcaggagatgaggctgcccagccctgagctggagctgagcaagctgcggaccagcgccatcagaacagcccccaacccctactactgccaggtgggcctgggccctgcccagagctggcccctgcccccaggagtgacagaggtgtccccagccaacgtgaccctgctgcgggccctgggccatggagccttcggggaggtgtatgagggcctggtgattggcctgcccggggacagcagccccctgcaggtggccatcaagaccctgcctgagctgtgcagcccccaggatgagctggacttcctgatggaggccctgatcatcagcaagttccgccaccagaacatcgtgcgctgtgtgggcctgagcctgcgggccacccccaggctcatcctgctggagctgatgtctggaggagacatgaagagcttcctgcggcacagccggccccacctgggccagcccagccccctggtgatgagggacctgctgcagctggcccaggacatcgcccagggctgccactacctggaggagaaccacttcatccaccgggacattgctgccaggaactgcctgctgagctgtgccggccccagccgggtggccaagattggagactttggcatggcccgggacatctaccgggccagctactacagaagaggagaccgggccctgctgcctgtgaagtggatgcctcctgaggccttcctggagggcatcttcaccagcaagacagacagctggagctttggagtgctgctgtgggagatcttcagcctgggctacatgccctacccaggccgcaccaaccaggaggtgctggactttgtggtgggcggcggccgcatggaccccccccggggctgccccggccctgtgtaccgcatcatgacccagtgctggcagcacgagcctgagctgcggcccagctttgccagcatcctggagcggctgcagtactgcacccaggaccctgatgtgctgaacagcctgctgcccatggagctgggccccaccccagaggaggagggcaccagcggcctgggcaacagaagcctggagtgcctgcggcccccccagccccaggagctgagccctgagaagctgaagtcctggggcggcagccccctgggcccctggctgagcagcggcctgaagcccctgaagagccggggcctgcagccccagaacctgtggaaccccacctaccgctcctag

SEQ ID NO: 157657 - DNA, 1437 bp, synthetic construct
  misc_feature 1..1437: note = Description of Artificial Sequence: Synthetic coding sequence
  source 1..1437: mol_type = other DNA
atgggctgctggggccagctgctggtgtggtttggagctgctggggccatcctgtgcagcagccctggcagccaggagaccttcctgcggagcagccccctgcccctggccagccccagcccccgggaccccaaggtgtctgcccctccttccatcctggagcccgccagccccctgaacagccctggaacagagggctcctggctgttcagcacctgtggggccagcggcagacatggccccacccagacccagtgtgatggagcctatgccggcacctctgtggtggtgacagtgggcgccgccggccagctgcggggcgtgcagctgtggagggtgcccggccctggccagtacctgatcagcgcctacggggctgctgggggcaagggggccaagaaccacctgagccgggcccacggcgtgtttgtgtctgccatcttcagcctgggcctgggggagagcctgtacatcctggtgggccagcagggagaagatgcctgccctgggggcagccctgagagccagctggtgtgcctgggggagagcagagctgtggaggagcacgccgccatggatggcagcgagggcgtgcccggcagccgccgctgggccggcggcggcggcggcggcggcggggccacctacgtgttccgggtgcgggccggggagctggagcccctgctggtggccgccggcggcggcggccgggcctacctgcggccccgggaccggggccgcacccaggccagccctgagaagctggagaacagaagtgaggcccctggcagcggcggccggggcggcgctgctgggggcggcggcggctggaccagccgggcccccagcccccaggccggccgcagcctgcaggagggcgctgagggcggccagggctgcagcgaggcctgggccaccctgggctgggccgccgccggcggctttggaggcggcggcggggcctgcacagctgggggcggcggcggcggctacagaggaggagatgccagcgagacagacaacctgtgggcagatggagaagatggagtgtccttcatccaccccagcagcgagctgttcctgcagcccctggccgtgacagagaaccacggggaggtggagatccgccgccacctgaactgcagccactgccccctgcgggactgccagtggcaggccgagctgcagctggctgaatgtctgtgcccagagggcatggagctggccgtggacaacgtgacctgcatggacctgcacaagcccccaggccccctggtgctgatggtggccgtggtggccaccagcaccctgagcctgctgatggtgtgtggggtgctgatcctgggcaccaagaggctggccggcaccgtggacagccggctgctgctgagcagcgagctgggctgggtgtctgctgggggcggcagaagaagatag

SEQ ID NO: 157658 - DNA, 2205 bp, synthetic construct
  misc_feature 1..2205: note = Description of Artificial Sequence: Synthetic coding sequence
  source 1..2205: mol_type = other DNA
atgggctgctggggccagctgctggtgtggtttggagctgctggggccatcctgtgcagcagccctggcagccaggagaccttcctgcggagcagccccctgcccctggccagccccagcccccgggaccccaaggtgtctgcccctccttccatcctggagcccgccagccccctgaacagccctggaacagagggctcctggctgttcagcacctgtggggccagcggcagacatggccccacccagacccagtgtgatggagcctatgccggcacctctgtggtggtgacagtgggcgccgccggccagctgcggggcgtgcagctgtggagggtgcccggccctggccagtacctgatcagcgcctacggggctgctgggggcaagggggccaagaaccacctgagccgggcccacggcgtgtttgtgtctgccatcttcagcctgggcctgggggagagcctgtacatcctggtgggccagcagggagaagatgcctgccctgggggcagccctgagagccagctggtgtgcctgggggagagcagagctgtggaggagcacgccgccatggatggcagcgagggcgtgcccggcagccgccgctgggccggcggcggcggcggcggcggcggggccacctacgtgttccgggtgcgggccggggagctggagcccctgctggtggccgccggcggcggcggccgggcctacctgcggccccgggaccggggccgcacccaggccagccctgagaagctggagaacagaagtgaggcccctggcagcggcggccggggcggcgctgctggaggagatgccagcgagacagacaacctgtgggcagatggagaagatggagtgtccttcatccaccccagcagcgagctgttcctgcagcccctggccgtgacagaaaatcatggagaggtggagatcagaagacacctgaactgcagccactgccccctgcgggactgccagtggcaggccgagctgcagctggccgagtgcctgtgcccagagggcatggagctggccgtggacaacgtgacctgcatggacctgcacaagcccccaggccccctggtgctgatggtggccgtggtggccaccagcaccctgagcctgctgatggtgtgtggggtgctgatcctgggcggggcctggccaggccctgtgctggccagcgccacccgctgccaccggggcttccccagccagtgctacagcgcccagaccctgcctgagctgtgcagcccccaggatgagctggacttcctgatggaggccctgatcatcagcaagttccgccaccagaacatcgtgcgctgtgtgggcctgagcctgcgggccacccccaggctcatcctgctggagctgatgtctggaggagacatgaagagcttcctgcggcacagccggccccacctgggccagcccagccccctggtgatgagggacctgctgcagctggcccaggacatcgcccagggctgccactacctggaggagaaccacttcatccaccgggacattgctgccaggaactgcctgctgagctgtgccggccccagccgggtggccaagatcggggactttggcatggcccgggacatctaccgggccagctactaccgccgcggggaccgggccctgctgcctgtgaagtggatgcctcctgaggccttcctggagggcatcttcaccagcaagacagacagctggagctttggagtgctgctgtgggagatcttcagcctgggctacatgccctacccaggccgcaccaaccaggaggtgctggactttgtggtgggcggcggccgcatggaccccccccggggctgccccggccctgtgtaccgcatcatgacccagtgctggcagcacgagcctgagctgcggcccagctttgccagcatcctggagcggctgcagtactgcacccaggaccctgatgtgctgaacagcctgctgcccatggagctgggccccaccccagaggaggagggcaccagcggcctgggcaacagaagcctggagtgcctgcggcccccccagccccaggagctgagccctgagaagctgaagtcctggggcggcagccccctgggcccctggctgagcagcggcctgaagcccctgaagagccggggcctgcagccccagaacctgtggaaccccacctaccgctcctag

SEQ ID NO: 157659 - DNA, 180 bp, synthetic construct
  misc_feature 1..180: note = Description of Artificial Sequence: Synthetic coding sequence
  source 1..180: mol_type = other DNA
atgctgagcagaaatgatgacatctgcatctatggaggcctgggcctgggcggcctgctgctgctggccgtggtgctgctgagcgcctgcctgtgctggctgcaccggcggggccctggcctgctgcgggccggcacccccctgtgcatctctgctgaggccgccagcgcccagcagtag

SEQ ID NO: 157660 - DNA, 201 bp, synthetic construct
  misc_feature 1..201: note = Description of Artificial Sequence: Synthetic coding sequence
  source 1..201: mol_type = other DNA
atgctgagcagaaatgatgacatctgcatctatggaggcctgggcctgggcggcctgctgctgctggccgtggtgctgctgagcgcctgcctgtgctggctgcaccggcgggcccccagcgtgctggtgcccggccctggcctgctgcgggccggcacccccctgtgcatctctgctgaggccgccagcgcccagcagtag

SEQ ID NO: 157661 - DNA, 222 bp, synthetic construct
  misc_feature 1..222: note = Description of Artificial Sequence: Synthetic coding sequence
  source 1..222: mol_type = other DNA
atgctgagcagaaatgatgtgaagaggctggagaggtcctggcacctgctgtcctggagccaggcccagggcagcagcgagcaggagctgcactacgccagcctgcagaggctgcctgtgcccagcagcgagggccctgacctgcggggccgggacaagaggggcaccaaggaggaccccagggctgactatgcctgcatcgccgagaacaagcccacctag

SEQ ID NO: 157662 - DNA, 201 bp, synthetic construct
  misc_feature 1..201: note = Description of Artificial Sequence: Synthetic coding sequence
  source 1..201: mol_type = other DNA
atgctgagcagaaatgatgtgaagaggctggagaggtcctgggcccagggcagcagcgagcaggagctgcactacgccagcctgcagaggctgcctgtgcccagcagcgagggccctgacctgcggggccgggacaagaggggcaccaaggaggaccccagggctgactatgcctgcatcgccgagaacaagcccacctag

SEQ ID NO: 157663 - DNA, 108 bp, synthetic construct
  misc_feature 1..108: note = Description of Artificial Sequence: Synthetic coding sequence
  source 1..108: mol_type = other DNA
atgctgagcagaaatgatgcccccagcgtgctggtgcccggccctggcctgctgcgggccggcacccccctgtgcatctctgctgaggccgccagcgcccagcagtag

SEQ ID NO: 157664 - DNA, 315 bp, synthetic construct
  misc_feature 1..315: note = Description of Artificial Sequence: Synthetic coding sequence
  source 1..315: mol_type = other DNA
atgctgagcagaaatgatgacatctgcatctatggaggcctgggcctgggcggcctgctgctgctggccgtggtgctgctgagcgcctgcctgtgctggctgcaccggcgggtgaagaggctggagaggtcctggcacctgctgtcctggagccaggcccagggcagcagcgagcaggagctgcactacgccagcctgcagaggctgcctgtgcccagcagcgagggccctgacctgcggggccgggacaagaggggcaccaaggaggaccccagggctgactatgcctgcatcgccgagaacaagcccacctag

SEQ ID NO: 157665 - DNA, 42 bp, synthetic construct
  misc_feature 1..42: note = Description of Artificial Sequence: Synthetic coding sequence
  source 1..42: mol_type = other DNA
atgctgagcagaaatgatgaggccgccagcgcccagcagtag

SEQ ID NO: 157666 - DNA, 108 bp, synthetic construct; identical to SEQ ID NO: 157663
  misc_feature 1..108: note = Description of Artificial Sequence: Synthetic coding sequence
  source 1..108: mol_type = other DNA

SEQ ID NO: 157667 - DNA, 276 bp, synthetic construct
  misc_feature 1..276: note = Description of Artificial Sequence: Synthetic coding sequence
  source 1..276: mol_type = other DNA
atgatctacgtgtccactggagcctggggctgggccggcagctgcttctggcagtggagcttctgccccccagcctgtgtgggctgcatcgaggagcacctgctgtcctggagccaggcccagggcagcagcgagcaggagctgcactacgccagcctgcagaggctgcctgtgcccagcagcgagggccctgacctgcggggccgggacaagaggggcaccaaggaggaccccagggctgactatgcctgcatcgccgagaacaagcccacctag

SEQ ID NO: 157668 - DNA, 156 bp, synthetic construct
  misc_feature 1..156: note = Description of Artificial Sequence: Synthetic coding sequence
  source 1..156: mol_type = other DNA
atgctgagcagaaatgatgtgaagaggctggagaggtcctggaggctgcctgtgcccagcagcgagggccctgacctgcggggccgggacaagaggggcaccaaggaggaccccagggctgactatgcctgcatcgccgagaacaagcccacctag

SEQ ID NO: 157669 - DNA, 192 bp, synthetic construct
  misc_feature 1..192: note = Description of Artificial Sequence: Synthetic coding sequence
  source 1..192: mol_type = other DNA
atgcacctgtgccggggctgccagtgcccagctgtgcgggacctgaccagcggggctgagacccgggaggccccccggcgcatccaggagctgaccatgcctgccctgctgcggaccaaccccccagagcaccccaggcacctgccccagccccggcgggtggacagagtgcccctgtggagcagccagtag

SEQ ID NO: 157670 - DNA, 222 bp, synthetic construct; identical to SEQ ID NO: 157661
  misc_feature 1..222: note = Description of Artificial Sequence: Synthetic coding sequence
  source 1..222: mol_type = other DNA

SEQ ID NO: 157671 - DNA, 108 bp, synthetic construct; identical to SEQ ID NO: 157663
  misc_feature 1..108: note = Description of Artificial Sequence: Synthetic coding sequence
  source 1..108: mol_type = other DNA

SEQ ID NO: 157672 - DNA, 201 bp, synthetic construct; identical to SEQ ID NO: 157660
  misc_feature 1..201: note = Description of Artificial Sequence: Synthetic coding sequence
  source 1..201: mol_type = other DNA

SEQ ID NO: 157673 - DNA, 315 bp, synthetic construct; identical to SEQ ID NO: 157664
  misc_feature 1..315: note = Description of Artificial Sequence: Synthetic coding sequence
  source 1..315: mol_type = other DNA

SEQ ID NO: 157674 - DNA, 135 bp, synthetic construct
  misc_feature 1..135: note = Description of Artificial Sequence: Synthetic coding sequence
  source 1..135: mol_type = other DNA
atgctgagcagaaatgatgacatctgcatctatggaggcctgggcctgggcggcctgctgctgctggccgtggtgctgctgagcgcctgcctgtgctggctgcaccggcgggaggccgccagcgcccagcagtag

SEQ ID NO: 157675 - DNA, 201 bp, synthetic construct
  misc_feature 1..201: note = Description of Artificial Sequence: Synthetic coding sequence
  source 1..201: mol_type = other DNA
atgctgagcagaaatgatgacatctgcatctatggaggcctgggcctgggcggcctgctgctgctggccgtggtgctgctgagcgcctgcctgtgctggctgcaccggcgggtgaagaggctggagaggtcctggaggctgcctgtgcccagcagcgagggccctgacctgcggggccgggacaagaggggcaccaagtag

SEQ ID NO: 157676 - DNA, 201 bp, synthetic construct; identical to SEQ ID NO: 157662
  misc_feature 1..201: note = Description of Artificial Sequence: Synthetic coding sequence
  source 1..201: mol_type = other DNA

SEQ ID NO: 157677 - DNA, 294 bp, synthetic construct
  misc_feature 1..294: note = Description of Artificial Sequence: Synthetic coding sequence
  source 1..294: mol_type = other DNA
atgctgagcagaaatgatgacatctgcatctatggaggcctgggcctgggcggcctgctgctgctggccgtggtgctgctgagcgcctgcctgtgctggctgcaccggcgggtgaagaggctggagaggtcctgggcccagggcagcagcgagcaggagctgcactacgccagcctgcagaggctgcctgtgcccagcagcgagggccctgacctgcggggccgggacaagaggggcaccaaggaggaccccagggctgactatgcctgcatcgccgagaacaagcccacctag

SEQ ID NO: 157678 - DNA, 180 bp, synthetic construct; identical to SEQ ID NO: 157659
  misc_feature 1..180: note = Description of Artificial Sequence: Synthetic coding sequence
  source 1..180: mol_type = other DNA

SEQ ID NO: 157679 - DNA, 87 bp, synthetic construct
  misc_feature 1..87: note = Description of Artificial Sequence: Synthetic coding sequence
  source 1..87: mol_type = other DNA
atgctgagcagaaatgatggccctggcctgctgcgggccggcacccccctgtgcatctctgctgaggccgccagcgcccagcagtag

SEQ ID NO: 157680 - DNA, 87 bp, synthetic construct; identical to SEQ ID NO: 157679
  misc_feature 1..87: note = Description of Artificial Sequence: Synthetic coding sequence
  source 1..87: mol_type = other DNA

SEQ ID NO: 157681 - DNA, 87 bp, synthetic construct; identical to SEQ ID NO: 157679
  misc_feature 1..87: note = Description of Artificial Sequence: Synthetic coding sequence
  source 1..87: mol_type = other DNA

SEQ ID NO: 157682 - DNA, 87 bp, synthetic construct; identical to SEQ ID NO: 157679
  misc_feature 1..87: note = Description of Artificial Sequence: Synthetic coding sequence
  source 1..87: mol_type = other DNA

SEQ ID NO: 157683 - DNA, 42 bp, synthetic construct; identical to SEQ ID NO: 157665
  misc_feature 1..42: note = Description of Artificial Sequence: Synthetic coding sequence
  source 1..42: mol_type = other DNA

SEQ ID NO: 157684 - DNA, 249 bp, synthetic construct
  misc_feature 1..249: note = Description of Artificial Sequence: Synthetic coding sequence
  source 1..249: mol_type = other DNA
atgctgagcagaaatgatgacatctgcatctatggaggcctgggcctgggcggcctgctgctgctggccgtggtgctgctgagcgcctgcctgtgctggctgcaccggcgggtgaagaggctggagaggtcctggaggctgcctgtgcccagcagcgagggccctgacctgcggggccgggacaagaggggcaccaaggaggaccccagggctgactatgcctgcatcgccgagaacaagcccacctag

SEQ ID NO: 157685 - DNA, 201 bp, synthetic construct; identical to SEQ ID NO: 157662
  misc_feature 1..201: note = Description of Artificial Sequence: Synthetic coding sequence
  source 1..201: mol_type = other DNA

SEQ ID NO: 157686 - DNA, 201 bp, synthetic construct; identical to SEQ ID NO: 157662
  misc_feature 1..201: note = Description of Artificial Sequence: Synthetic coding sequence
  source 1..201: mol_type = other DNA

SEQ ID NO: 157687 - DNA, 294 bp, synthetic construct; identical to SEQ ID NO: 157677
  misc_feature 1..294: note = Description of Artificial Sequence: Synthetic coding sequence
  source 1..294: mol_type = other DNA

SEQ ID NO: 157688 - DNA, 156 bp, synthetic construct; identical to SEQ ID NO: 157668
  misc_feature 1..156: note = Description of Artificial Sequence: Synthetic coding sequence
  source 1..156: mol_type = other DNA

SEQ ID NO: 157689 - DNA, 294 bp, synthetic construct; identical to SEQ ID NO: 157677
  misc_feature 1..294: note = Description of Artificial Sequence: Synthetic coding sequence
  source 1..294: mol_type = other DNA

SEQ ID NO: 157690 - DNA, 315 bp, synthetic construct; identical to SEQ ID NO: 157664
  misc_feature 1..315: note = Description of Artificial Sequence: Synthetic coding sequence
  source 1..315: mol_type = other DNA

SEQ ID NO: 157691 - DNA, 132 bp, synthetic construct
  misc_feature 1..132: note = Description of Artificial Sequence: Synthetic coding sequence
  source 1..132: mol_type = other DNA
taccggggcatgatgatctacgtgtccactggagcctggggctgggccggcagctgcttctggcagtggagcttctgccccccagcctgtgtgggctgcatcgaggagcggctgcctgtgcccagcagctag

SEQ ID NO: 157692 - DNA, 111 bp, synthetic construct
  misc_feature 1..111: note = Description of Artificial Sequence: Synthetic coding sequence
  source 1..111: mol_type = other DNA
atgctgagcagaaatgatgacatctgcatctatggaggcctgggcctgggcggcctgctgctgctggccgtggtgctgctgagcgcctgcctgtgctggctgcacaggtag

SEQ ID NO: 157693 - DNA, 315 bp, synthetic construct; identical to SEQ ID NO: 157664
  misc_feature 1..315: note = Description of Artificial Sequence: Synthetic coding sequence
  source 1..315: mol_type = other DNA

SEQ ID NO: 157694 - DNA, 141 bp, synthetic construct
  misc_feature 1..141: note = Description of Artificial Sequence: Synthetic coding sequence
  source 1..141: mol_type = other DNA
atgctgagcagaaatgatgacatctgcatctatggaggcctgggcctgggcggcctgctgctgctggccgtggtgctgctgagcgcctgcctgtgctggctgcaccggcgggagcactgcctggccctggagcccctgtag

SEQ ID NO: 157695 - DNA, 42 bp, synthetic construct; identical to SEQ ID NO: 157665
  misc_feature 1..42: note = Description of Artificial Sequence: Synthetic coding sequence
  source 1..42: mol_type = other DNA

SEQ ID NO: 157696 - DNA, 87 bp, synthetic construct; identical to SEQ ID NO: 157679
  misc_feature 1..87: note = Description of Artificial Sequence: Synthetic coding sequence
  source 1..87: mol_type = other DNA

SEQ ID NO: 157697 - DNA, 201 bp, synthetic construct; identical to SEQ ID NO: 157662
  misc_feature 1..201: note = Description of Artificial Sequence: Synthetic coding sequence
  source 1..201: mol_type = other DNA

SEQ ID NO: 157698 - DNA, 87 bp, synthetic construct; identical to SEQ ID NO: 157679
  misc_feature 1..87: note = Description of Artificial Sequence: Synthetic coding sequence
  source 1..87: mol_type = other DNA

SEQ ID NO: 157699 - DNA, 87 bp, synthetic construct; identical to SEQ ID NO: 157679
  misc_feature 1..87: note = Description of Artificial Sequence: Synthetic coding sequence
  source 1..87: mol_type = other DNA

SEQ ID NO: 157700 - DNA, 132 bp, synthetic construct
  misc_feature 1..132: note = Description of Artificial Sequence: Synthetic coding sequence
  source 1..132: mol_type = other DNA
tgaagcagaaatgatgacatctgcatctacggcggcctgggcctgggcggcctgctgctgctggccgtggtgctgctgagcgcctgcctgtgctggctgcacagaagagaggccgccagcgcccagcagtag

SEQ ID NO: 157701 - DNA, 156 bp, synthetic construct; identical to SEQ ID NO: 157668
  misc_feature 1..156: note = Description of Artificial Sequence: Synthetic coding sequence
  source 1..156: mol_type = other DNA

SEQ ID NO: 157702 - DNA, 108 bp, synthetic construct; identical to SEQ ID NO: 157663
  misc_feature 1..108: note = Description of Artificial Sequence: Synthetic coding sequence
  source 1..108: mol_type = other DNA

SEQ ID NO: 157703 - DNA, 42 bp, synthetic construct; identical to SEQ ID NO: 157665
  misc_feature 1..42: note = Description of Artificial Sequence: Synthetic coding sequence
  source 1..42: mol_type = other DNA

SEQ ID NO: 157704 - DNA, 294 bp, synthetic construct; identical to SEQ ID NO: 157677
  misc_feature 1..294: note = Description of Artificial Sequence: Synthetic coding sequence
  source 1..294: mol_type = other DNA

SEQ ID NO: 157705 - DNA, 201 bp, synthetic construct; identical to SEQ ID NO: 157662
  misc_feature 1..201: note = Description of Artificial Sequence: Synthetic coding sequence
  source 1..201: mol_type = other DNA

SEQ ID NO: 157706 - DNA, 141 bp, synthetic construct; identical to SEQ ID NO: 157694
  misc_feature 1..141: note = Description of Artificial Sequence: Synthetic coding sequence
  source 1..141: mol_type = other DNA

SEQ ID NO: 157707 - DNA, 132 bp, synthetic construct; identical to SEQ ID NO: 157700
  misc_feature 1..132: note = Description of Artificial Sequence: Synthetic coding sequence
  source 1..132: mol_type = other DNA

SEQ ID NO: 157708 - DNA, 141 bp, synthetic construct; identical to SEQ ID NO: 157694
  misc_feature 1..141: note = Description of Artificial Sequence: Synthetic coding sequence
  source 1..141: mol_type = other DNA

SEQ ID NO: 157709 - DNA, 87 bp, synthetic construct; identical to SEQ ID NO: 157679
  misc_feature 1..87: note = Description of Artificial Sequence: Synthetic coding sequence
  source 1..87: mol_type = other DNA

SEQ ID NO: 157710 - DNA, 132 bp, synthetic construct; identical to SEQ ID NO: 157700
  misc_feature 1..132: note = Description of Artificial Sequence: Synthetic coding sequence
  source 1..132: mol_type = other DNA

SEQ ID NO: 157711 - DNA, 201 bp, synthetic construct; identical to SEQ ID NO: 157662
  misc_feature 1..201: note = Description of Artificial Sequence: Synthetic coding sequence
  source 1..201: mol_type = other DNA

SEQ ID NO: 157712 - DNA, 180 bp, synthetic construct; identical to SEQ ID NO: 157659
  misc_feature 1..180: note = Description of Artificial Sequence: Synthetic coding sequence
  source 1..180: mol_type = other DNA

SEQ ID NO: 157713 - DNA, 222 bp, synthetic construct; identical to SEQ ID NO: 157661
  misc_feature 1..222: note = Description of Artificial Sequence: Synthetic coding sequence
  source 1..222: mol_type = other DNA

SEQ ID NO: 157714 - DNA, 201 bp, synthetic construct; identical to SEQ ID NO: 157660
  misc_feature 1..201: note = Description of Artificial Sequence: Synthetic coding sequence
  source 1..201: mol_type = other DNA

SEQ ID NO: 157715 - DNA, 201 bp, synthetic construct; identical to SEQ ID NO: 157662
  misc_feature 1..201: note = Description of Artificial Sequence: Synthetic coding sequence
  source 1..201: mol_type = other DNA

SEQ ID NO: 157716 - DNA, 87 bp, synthetic construct; identical to SEQ ID NO: 157679
  misc_feature 1..87: note = Description of Artificial Sequence: Synthetic coding sequence
  source 1..87: mol_type = other DNA

SEQ ID NO: 157717 - DNA, 249 bp, synthetic construct; identical to SEQ ID NO: 157684
  misc_feature 1..249: note = Description of Artificial Sequence: Synthetic coding sequence
  source 1..249: mol_type = other DNA

SEQ ID NO: 157718 - DNA, 156 bp, synthetic construct; identical to SEQ ID NO: 157668
  misc_feature 1..156: note = Description of Artificial Sequence: Synthetic coding sequence
  source 1..156: mol_type = other DNA

SEQ ID NO: 157719 - DNA, 180 bp, synthetic construct; identical to SEQ ID NO: 157659
  misc_feature 1..180: note = Description of Artificial Sequence: Synthetic coding sequence
  source 1..180: mol_type = other DNA

SEQ ID NO: 157720 - DNA, 201 bp, synthetic construct; identical to SEQ ID NO: 157662
  misc_feature 1..201: note = Description of Artificial Sequence: Synthetic coding sequence
  source 1..201: mol_type = other DNA

SEQ ID NO: 157721 - DNA, 156 bp, synthetic construct; identical to SEQ ID NO: 157668
  misc_feature 1..156: note = Description of Artificial Sequence: Synthetic coding sequence
  source 1..156: mol_type = other DNA

SEQ ID NO: 157722 - DNA, 249 bp, synthetic construct; identical to SEQ ID NO: 157684
  misc_feature 1..249: note = Description of Artificial Sequence: Synthetic coding sequence
  source 1..249: mol_type = other DNA

SEQ ID NO: 157723 - DNA, 141 bp, synthetic construct; identical to SEQ ID NO: 157694
  misc_feature 1..141: note = Description of Artificial Sequence: Synthetic coding sequence
  source 1..141: mol_type = other DNA

SEQ ID NO: 157724 - DNA, 108 bp, synthetic construct; identical to SEQ ID NO: 157663
  misc_feature 1..108: note = Description of Artificial Sequence: Synthetic coding sequence
  source 1..108: mol_type = other DNA

SEQ ID NO: 157725 - DNA, 249 bp, synthetic construct; identical to SEQ ID NO: 157684
  misc_feature 1..249: note = Description of Artificial Sequence: Synthetic coding sequence
  source 1..249: mol_type = other DNA

SEQ ID NO: 157726 - DNA, 87 bp, synthetic construct; identical to SEQ ID NO: 157679
  misc_feature 1..87: note = Description of Artificial Sequence: Synthetic coding sequence
  source 1..87: mol_type = other DNA

SEQ ID NO: 157727 - DNA, 294 bp, synthetic construct; identical to SEQ ID NO: 157677
  misc_feature 1..294: note = Description of Artificial Sequence: Synthetic coding sequence
  source 1..294: mol_type = other DNA

SEQ ID NO: 157728 - DNA, 87 bp, synthetic construct; identical to SEQ ID NO: 157679
  misc_feature 1..87: note = Description of Artificial Sequence: Synthetic coding sequence
  source 1..87: mol_type = other DNA

SEQ ID NO: 157729 - DNA, 108 bp, synthetic construct; identical to SEQ ID NO: 157663
  misc_feature 1..108: note = Description of Artificial Sequence: Synthetic coding sequence
  source 1..108: mol_type = other DNA

SEQ ID NO: 157730 - DNA, 294 bp, synthetic construct; identical to SEQ ID NO: 157677
  misc_feature 1..294: note = Description of Artificial Sequence: Synthetic coding sequence
  source 1..294: mol_type = other DNA

SEQ ID NO: 157731 - DNA, 201 bp, synthetic construct; identical to SEQ ID NO: 157662
  misc_feature 1..201: note = Description of Artificial Sequence: Synthetic coding sequence
  source 1..201: mol_type = other DNA

SEQ ID NO: 157732 - DNA, 201 bp, synthetic construct; identical to SEQ ID NO: 157662
  misc_feature 1..201: note = Description of Artificial Sequence: Synthetic coding sequence
  source 1..201: mol_type = other DNA

SEQ ID NO: 157733 - DNA, 42 bp, synthetic construct; identical to SEQ ID NO: 157665
  misc_feature 1..42: note = Description of Artificial Sequence: Synthetic coding sequence
  source 1..42: mol_type = other DNA

SEQ ID NO: 157734 - DNA, 87 bp, synthetic construct; identical to SEQ ID NO: 157679
  misc_feature 1..87: note = Description of Artificial Sequence: Synthetic coding sequence
  source 1..87: mol_type = other DNA

SEQ ID NO: 157735 - DNA, 111 bp, synthetic construct; identical to SEQ ID NO: 157692
  misc_feature 1..111: note = Description of Artificial Sequence: Synthetic coding sequence
  source 1..111: mol_type = other DNA

SEQ ID NO: 157736 - DNA, 294 bp, synthetic construct; identical to SEQ ID NO: 157677
  misc_feature 1..294: note = Description of Artificial Sequence: Synthetic coding sequence
  source 1..294: mol_type = other DNA

SEQ ID NO: 157737 - DNA, 180 bp, synthetic construct; identical to SEQ ID NO: 157659
  misc_feature 1..180: note = Description of Artificial Sequence: Synthetic coding sequence
  source 1..180: mol_type = other DNA

SEQ ID NO: 157738 - DNA, 294 bp, synthetic construct; identical to SEQ ID NO: 157677
  misc_feature 1..294: note = Description of Artificial Sequence: Synthetic coding sequence
  source 1..294: mol_type = other DNA

SEQ ID NO: 157739 - DNA, 201 bp, synthetic construct; identical to SEQ ID NO: 157660
  misc_feature 1..201: note = Description of Artificial Sequence: Synthetic coding sequence
  source 1..201: mol_type = other DNA

SEQ ID NO: 157740 - DNA, 87 bp, synthetic construct; identical to SEQ ID NO: 157679
  misc_feature 1..87: note = Description of Artificial Sequence: Synthetic coding sequence
  source 1..87: mol_type = other DNA

SEQ ID NO: 157741 - DNA, 180 bp, synthetic construct; identical to SEQ ID NO: 157659
  misc_feature 1..180: note = Description of Artificial Sequence: Synthetic coding sequence
  source 1..180: mol_type = other DNA

SEQ ID NO: 157742 - DNA, 201 bp, synthetic construct; identical to SEQ ID NO: 157662
  misc_feature 1..201: note = Description of Artificial Sequence: Synthetic coding sequence
  source 1..201: mol_type = other DNA

SEQ ID NO: 157743 - DNA, 108 bp, synthetic construct; identical to SEQ ID NO: 157663
  misc_feature 1..108: note = Description of Artificial Sequence: Synthetic coding sequence
  source 1..108: mol_type = other DNA

SEQ ID NO: 157744 - DNA, 201 bp, synthetic construct; identical to SEQ ID NO: 157662
  misc_feature 1..201: note = Description of Artificial Sequence: Synthetic coding sequence
  source 1..201: mol_type = other DNA

SEQ ID NO: 157745 - DNA, 87 bp, synthetic construct; identical to SEQ ID NO: 157679
  misc_feature 1..87: note = Description of Artificial Sequence: Synthetic coding sequence
  source 1..87: mol_type = other DNA

SEQ ID NO: 157746 - DNA, 108 bp, synthetic construct; identical to SEQ ID NO: 157663
  misc_feature 1..108: note = Description of Artificial Sequence: Synthetic coding sequence
  source 1..108: mol_type = other DNA

SEQ ID NO: 157747 - DNA, 132 bp, synthetic construct; identical to SEQ ID NO: 157700
  misc_feature 1..132: note = Description of Artificial Sequence: Synthetic coding sequence
  source 1..132: mol_type = other DNA

SEQ ID NO: 157748 - DNA, 111 bp, synthetic construct; identical to SEQ ID NO: 157692
  misc_feature 1..111: note = Description of Artificial Sequence: Synthetic coding sequence
  source 1..111: mol_type = other DNA

SEQ ID NO: 157749 - DNA, 111 bp, synthetic construct; identical to SEQ ID NO: 157692
  misc_feature 1..111: note = Description of Artificial Sequence: Synthetic coding sequence
  source 1..111: mol_type = other DNA

SEQ ID NO: 157750 - DNA, 201 bp, synthetic construct; identical to SEQ ID NO: 157662
  misc_feature 1..201: note = Description of Artificial Sequence: Synthetic coding sequence
  source 1..201: mol_type = other DNA

SEQ ID NO: 157751 - DNA, 294 bp, synthetic construct; identical to SEQ ID NO: 157677
  misc_feature 1..294: note = Description of Artificial Sequence: Synthetic coding sequence
  source 1..294: mol_type = other DNA

SEQ ID NO: 157752 - DNA, 87 bp, synthetic construct; identical to SEQ ID NO: 157679
  misc_feature 1..87: note = Description of Artificial Sequence: Synthetic coding sequence
  source 1..87: mol_type = other DNA

SEQ ID NO: 157753 - DNA, 315 bp, synthetic construct; identical to SEQ ID NO: 157664
  misc_feature 1..315: note = Description of Artificial Sequence: Synthetic coding sequence
  source 1..315: mol_type = other DNA

SEQ ID NO: 157754 - DNA, 201 bp, synthetic construct; identical to SEQ ID NO: 157662
  misc_feature 1..201: note = Description of Artificial Sequence: Synthetic coding sequence
  source 1..201: mol_type = other DNA

SEQ ID NO: 157755 - DNA, 111 bp, synthetic construct; identical to SEQ ID NO: 157692
  misc_feature 1..111: note = Description of Artificial Sequence: Synthetic coding sequence
  source 1..111: mol_type = other DNA

SEQ ID NO: 157756 - DNA, 294 bp, synthetic construct; identical to SEQ ID NO: 157677
  misc_feature 1..294: note = Description of Artificial Sequence: Synthetic coding sequence
  source 1..294: mol_type = other DNA

SEQ ID NO: 157757 - DNA, 156 bp, synthetic construct; identical to SEQ ID NO: 157668
  misc_feature 1..156: note = Description of Artificial Sequence: Synthetic coding sequence
  source 1..156: mol_type = other DNA

SEQ ID NO: 157758 - DNA, 315 bp, synthetic construct; identical to SEQ ID NO: 157664
  misc_feature 1..315: note = Description of Artificial Sequence: Synthetic coding sequence
  source 1..315: mol_type = other DNA

SEQ ID NO: 157759 - DNA, 294 bp, synthetic construct; identical to SEQ ID NO: 157677
  misc_feature 1..294: note = Description of Artificial Sequence: Synthetic coding sequence
  source 1..294: mol_type = other DNA

SEQ ID NO: 157760 - DNA, 315 bp, synthetic construct; identical to SEQ ID NO: 157664
  misc_feature 1..315: note = Description of Artificial Sequence: Synthetic coding sequence
  source 1..315: mol_type = other DNA

SEQ ID NO: 157761 - DNA, 156 bp, synthetic construct; identical to SEQ ID NO: 157668
  misc_feature 1..156: note = Description of Artificial Sequence: Synthetic coding sequence
  source 1..156: mol_type = other DNA

SEQ ID NO: 157762 - DNA, 201 bp, synthetic construct; identical to SEQ ID NO: 157660
  misc_feature 1..201: note = Description of Artificial Sequence: Synthetic coding sequence
  source 1..201: mol_type = other DNA

SEQ ID NO: 157763 - DNA, 111 bp, synthetic construct; identical to SEQ ID NO: 157692
  misc_feature 1..111: note = Description of Artificial Sequence: Synthetic coding sequence
  source 1..111: mol_type = other DNA

SEQ ID NO: 157764 - DNA, 222 bp, synthetic construct; identical to SEQ ID NO: 157661
  misc_feature 1..222: note = Description of Artificial Sequence: Synthetic coding sequence
  source 1..222: mol_type = other DNA

SEQ ID NO: 157765 - DNA, 201 bp, synthetic construct; identical to SEQ ID NO: 157662
  misc_feature 1..201: note = Description of Artificial Sequence: Synthetic coding sequence
  source 1..201: mol_type = other DNA

SEQ ID NO: 157766 - DNA, 201 bp, synthetic construct; identical to SEQ ID NO: 157662
  misc_feature 1..201: note = Description of Artificial Sequence: Synthetic coding sequence
  source 1..201: mol_type = other DNA

SEQ ID NO: 157767 - DNA, 108 bp, synthetic construct; identical to SEQ ID NO: 157663
  misc_feature 1..108: note = Description of Artificial Sequence: Synthetic coding sequence
  source 1..108: mol_type = other DNA

SEQ ID NO: 157768 - DNA, 87 bp, synthetic construct; identical to SEQ ID NO: 157679
  misc_feature 1..87: note = Description of Artificial Sequence: Synthetic coding sequence
  source 1..87: mol_type = other DNA

SEQ ID NO: 157769 - DNA, 141 bp, synthetic construct; identical to SEQ ID NO: 157694
  misc_feature 1..141: note = Description of Artificial Sequence: Synthetic coding sequence
  source 1..141: mol_type = other DNA

SEQ ID NO: 157770 - DNA, 141 bp, synthetic construct; identical to SEQ ID NO: 157694
  misc_feature 1..141: note = Description of Artificial Sequence: Synthetic coding sequence
  source 1..141: mol_type = other DNA

SEQ ID NO: 157771 - DNA, 201 bp, synthetic construct; identical to SEQ ID NO: 157660
  misc_feature 1..201: note = Description of Artificial Sequence: Synthetic coding sequence
  source 1..201: mol_type = other DNA

SEQ ID NO: 157772 - DNA, 141 bp, synthetic construct; identical to SEQ ID NO: 157694
  misc_feature 1..141: note = Description of Artificial Sequence: Synthetic coding sequence
  source 1..141: mol_type = other DNA

SEQ ID NO: 157773 - DNA, 87 bp, synthetic construct; identical to SEQ ID NO: 157679
  misc_feature 1..87: note = Description of Artificial Sequence: Synthetic coding sequence
  source 1..87: mol_type = other DNA

SEQ ID NO: 157774 - DNA, 294 bp, synthetic construct; identical to SEQ ID NO: 157677
  misc_feature 1..294: note = Description of Artificial Sequence: Synthetic coding sequence
  source 1..294: mol_type = other DNA

SEQ ID NO: 157775 - DNA, 180 bp, synthetic construct; identical to SEQ ID NO: 157659
  misc_feature 1..180: note = Description of Artificial Sequence: Synthetic coding sequence
  source 1..180: mol_type = other DNA

SEQ ID NO: 157776 - DNA, 294 bp, synthetic construct; identical to SEQ ID NO: 157677
  misc_feature 1..294: note = Description of Artificial Sequence: Synthetic coding sequence
  source 1..294: mol_type = other DNA

SEQ ID NO: 157777 - DNA, 87 bp, synthetic construct; identical to SEQ ID NO: 157679
  misc_feature 1..87: note = Description of Artificial Sequence: Synthetic coding sequence
  source 1..87: mol_type = other DNA

SEQ ID NO: 157778 - DNA, 111 bp, synthetic construct; identical to SEQ ID NO: 157692
  misc_feature 1..111: note = Description of Artificial Sequence: Synthetic coding sequence
  source 1..111: mol_type = other DNA

SEQ ID NO: 157779 - DNA, 156 bp, synthetic construct; identical to SEQ ID NO: 157668
  misc_feature 1..156: note = Description of Artificial Sequence: Synthetic coding sequence
  source 1..156: mol_type = other DNA

SEQ ID NO: 157780 - DNA, 42 bp, synthetic construct; identical to SEQ ID NO: 157665
  misc_feature 1..42: note = Description of Artificial Sequence: Synthetic coding sequence
  source 1..42: mol_type = other DNA

SEQ ID NO: 157781 - DNA, 201 bp, synthetic construct; identical to SEQ ID NO: 157662
  misc_feature 1..201: note = Description of Artificial Sequence: Synthetic coding sequence
  source 1..201: mol_type = other DNA

SEQ ID NO: 157782 - DNA, 87 bp, synthetic construct; identical to SEQ ID NO: 157679
  misc_feature 1..87: note = Description of Artificial Sequence: Synthetic coding sequence
  source 1..87: mol_type = other DNA

SEQ ID NO: 157783 - DNA, 315 bp, synthetic construct; identical to SEQ ID NO: 157664
  misc_feature 1..315: note = Description of Artificial Sequence: Synthetic coding sequence
  source 1..315: mol_type = other DNA

SEQ ID NO: 157784 - DNA, 249 bp, synthetic construct; identical to SEQ ID NO: 157684
  misc_feature 1..249: note = Description of Artificial Sequence: Synthetic coding sequence
  source 1..249: mol_type = other DNA

SEQ ID NO: 157785 - DNA, 201 bp, synthetic construct; identical to SEQ ID NO: 157662
  misc_feature 1..201: note = Description of Artificial Sequence: Synthetic coding sequence
  source 1..201: mol_type = other DNA

SEQ ID NO: 157786 - DNA, 87 bp, synthetic construct; identical to SEQ ID NO: 157679
  misc_feature 1..87: note = Description of Artificial Sequence: Synthetic coding sequence
  source 1..87: mol_type = other DNA

SEQ ID NO: 157787 - DNA, 132 bp, synthetic construct; identical to SEQ ID NO: 157700
  misc_feature 1..132: note = Description of Artificial Sequence: Synthetic coding sequence
  source 1..132: mol_type = other DNA

SEQ ID NO: 157788 - DNA, 249 bp, synthetic construct; identical to SEQ ID NO: 157684
  misc_feature 1..249: note = Description of Artificial Sequence: Synthetic coding sequence
  source 1..249: mol_type = other DNA

SEQ ID NO: 157789 - DNA, 201 bp, synthetic construct; identical to SEQ ID NO: 157662
  misc_feature 1..201: note = Description of Artificial Sequence: Synthetic coding sequence
  source 1..201: mol_type = other DNA

SEQ ID NO: 157790 - DNA, 180 bp, synthetic construct; identical to SEQ ID NO: 157659
  misc_feature 1..180: note = Description of Artificial Sequence: Synthetic coding sequence
  source 1..180: mol_type = other DNA

SEQ ID NO: 157791 - DNA, 87 bp, synthetic construct; identical to SEQ ID NO: 157679
  misc_feature 1..87: note = Description of Artificial Sequence: Synthetic coding sequence
  source 1..87: mol_type = other DNA

SEQ ID NO: 157792 - DNA, 249 bp, synthetic construct; identical to SEQ ID NO: 157684
  misc_feature 1..249: note = Description of Artificial Sequence: Synthetic coding sequence
  source 1..249: mol_type = other DNA

SEQ ID NO: 157793 - DNA, 111 bp, synthetic construct; identical to SEQ ID NO: 157692
  misc_feature 1..111: note = Description of Artificial Sequence: Synthetic coding sequence
  source 1..111: mol_type = other DNA

SEQ ID NO: 157794 - DNA, 222 bp, synthetic construct; identical to SEQ ID NO: 157661
  misc_feature 1..222: note = Description of Artificial Sequence: Synthetic coding sequence
  source 1..222: mol_type = other DNA

SEQ ID NO: 157795 - DNA, 201 bp, synthetic construct; identical to SEQ ID NO: 157662
  misc_feature 1..201: note = Description of Artificial Sequence: Synthetic coding sequence
  source 1..201: mol_type = other DNA

SEQ ID NO: 157796 - DNA, 87 bp, synthetic construct; identical to SEQ ID NO: 157679
  misc_feature 1..87: note = Description of Artificial Sequence: Synthetic coding sequence
  source 1..87: mol_type = other DNA

SEQ ID NO: 157797 - DNA, 201 bp, synthetic construct; identical to SEQ ID NO: 157660
  misc_feature 1..201: note = Description of Artificial Sequence: Synthetic coding sequence
  source 1..201: mol_type = other DNA

SEQ ID NO: 157798 - DNA, 222 bp, synthetic construct; identical to SEQ ID NO: 157661
  misc_feature 1..222: note = Description of Artificial Sequence: Synthetic coding sequence
  source 1..222: mol_type = other DNA

SEQ ID NO: 157799 - DNA, 201 bp, synthetic construct; identical to SEQ ID NO: 157660
  misc_feature 1..201: note = Description of Artificial Sequence: Synthetic coding sequence
  source 1..201: mol_type = other DNA

SEQ ID NO: 157800 - DNA, 87 bp, synthetic construct; identical to SEQ ID NO: 157679
  misc_feature 1..87: note = Description of Artificial Sequence: Synthetic coding sequence
  source 1..87: mol_type = other DNA

SEQ ID NO: 157801 - DNA, 87 bp, synthetic construct; identical to SEQ ID NO: 157679
  misc_feature 1..87: note = Description of Artificial Sequence: Synthetic coding sequence
  source 1..87: mol_type = other DNA

SEQ ID NO: 157802 - DNA, 87 bp, synthetic construct; identical to SEQ ID NO: 157679
  misc_feature 1..87: note = Description of Artificial Sequence: Synthetic coding sequence
  source 1..87: mol_type = other DNA

SEQ ID NO: 157803 - DNA, 87 bp, synthetic construct; identical to SEQ ID NO: 157679
  misc_feature 1..87: note = Description of Artificial Sequence: Synthetic coding sequence
  source 1..87: mol_type = other DNA

SEQ ID NO: 157804 - DNA, 294 bp, synthetic construct; identical to SEQ ID NO: 157677
  misc_feature 1..294: note = Description of Artificial Sequence: Synthetic coding sequence
  source 1..294: mol_type = other DNA

SEQ ID NO: 157805 - DNA, 222 bp, synthetic construct; identical to SEQ ID NO: 157661
  misc_feature 1..222: note = Description of Artificial Sequence: Synthetic coding sequence
  source 1..222: mol_type = other DNA

SEQ ID NO: 157806 - DNA, 87 bp, synthetic construct; identical to SEQ ID NO: 157679
  misc_feature 1..87: note = Description of Artificial Sequence: Synthetic coding sequence
  source 1..87: mol_type = other DNA

SEQ ID NO: 157807 - DNA, 294 bp, synthetic construct; identical to SEQ ID NO: 157677
  misc_feature 1..294: note = Description of Artificial Sequence: Synthetic coding sequence
  source 1..294: mol_type = other DNA

SEQ ID NO: 157808 - DNA, 201 bp, synthetic construct; identical to SEQ ID NO: 157662
  misc_feature 1..201: note = Description of Artificial Sequence: Synthetic coding sequence
  source 1..201: mol_type = other DNA

SEQ ID NO: 157809 - DNA, 87 bp, synthetic construct; identical to SEQ ID NO: 157679
  misc_feature 1..87: note = Description of Artificial Sequence: Synthetic coding sequence
  source 1..87: mol_type = other DNA

SEQ ID NO: 157810 - DNA, 201 bp, synthetic construct; identical to SEQ ID NO: 157662
  misc_feature 1..201: note = Description of Artificial Sequence: Synthetic coding sequence
  source 1..201: mol_type = other DNA

SEQ ID NO: 157811 - DNA, 42 bp, synthetic construct; identical to SEQ ID NO: 157665
  misc_feature 1..42: note = Description of Artificial Sequence: Synthetic coding sequence
  source 1..42: mol_type = other DNA

SEQ ID NO: 157812 - DNA, 132 bp, synthetic construct; identical to SEQ ID NO: 157691
  misc_feature 1..132: note = Description of Artificial Sequence: Synthetic coding sequence
  source 1..132: mol_type = other DNA

SEQ ID NO: 157813 - DNA, 201 bp, synthetic construct; identical to SEQ ID NO: 157662
  misc_feature 1..201: note = Description of Artificial Sequence: Synthetic coding sequence
  source 1..201: mol_type = other DNA

SEQ ID NO: 157814 - DNA, 294 bp, synthetic construct; identical to SEQ ID NO: 157677
  misc_feature 1..294: note = Description of Artificial Sequence: Synthetic coding sequence
  source 1..294: mol_type = other DNA

SEQ ID NO: 157815 - DNA, 222 bp, synthetic construct; identical to SEQ ID NO: 157661
  misc_feature 1..222: note = Description of Artificial Sequence: Synthetic coding sequence
  source 1..222: mol_type = other DNA

SEQ ID NO: 157816 - DNA, 42 bp, synthetic construct; identical to SEQ ID NO: 157665
  misc_feature 1..42: note = Description of Artificial Sequence: Synthetic coding sequence
  source 1..42: mol_type = other DNA

SEQ ID NO: 157817 - DNA, 276 bp, synthetic construct; identical to SEQ ID NO: 157667
  misc_feature 1..276: note = Description of Artificial Sequence: Synthetic coding sequence
  source 1..276: mol_type = other DNA

SEQ ID NO: 157818 - DNA, 276 bp, synthetic construct; identical to SEQ ID NO: 157667
  misc_feature 1..276: note = Description of Artificial Sequence: Synthetic coding sequence
  source 1..276: mol_type = other DNA

SEQ ID NO: 157819 - DNA, 276 bp, synthetic construct; identical to SEQ ID NO: 157667
  misc_feature 1..276: note = Description of Artificial Sequence: Synthetic coding sequence
  source 1..276: mol_type = other DNA

SEQ ID NO: 157820 - DNA, 108 bp, synthetic construct; identical to SEQ ID NO: 157663
  misc_feature 1..108: note = Description of Artificial Sequence: Synthetic coding sequence
  source 1..108: mol_type = other DNA

SEQ ID NO: 157821 - DNA, 276 bp, synthetic construct; identical to SEQ ID NO: 157667
  misc_feature 1..276: note = Description of Artificial Sequence: Synthetic coding sequence
  source 1..276: mol_type = other DNA

SEQ ID NO: 157822 - DNA, 108 bp, synthetic construct; identical to SEQ ID NO: 157663
  misc_feature 1..108: note = Description of Artificial Sequence: Synthetic coding sequence
  source 1..108: mol_type = other DNA

SEQ ID NO: 157823 - DNA, 108 bp, synthetic construct; identical to SEQ ID NO: 157663
  misc_feature 1..108: note = Description of Artificial Sequence: Synthetic coding sequence
  source 1..108: mol_type = other DNA

SEQ ID NO: 157824 - DNA, 276 bp, synthetic construct; identical to SEQ ID NO: 157667
  misc_feature 1..276: note = Description of Artificial Sequence: Synthetic coding sequence
  source 1..276: mol_type = other DNA

SEQ ID NO: 157825 - DNA, 276 bp, synthetic construct; identical to SEQ ID NO: 157667
  misc_feature 1..276: note = Description of Artificial Sequence: Synthetic coding sequence
  source 1..276: mol_type = other DNA

SEQ ID NO: 157826 - DNA, 108 bp, synthetic construct; identical to SEQ ID NO: 157663
  misc_feature 1..108: note = Description of Artificial Sequence: Synthetic coding sequence
  source 1..108: mol_type = other DNA

SEQ ID NO: 157827 - DNA, 108 bp, synthetic construct; identical to SEQ ID NO: 157663
  misc_feature 1..108: note = Description of Artificial Sequence: Synthetic coding sequence
  source 1..108: mol_type = other DNA

SEQ ID NO: 157828 - DNA, 108 bp, synthetic construct; identical to SEQ ID NO: 157663
  misc_feature 1..108: note = Description of Artificial Sequence: Synthetic coding sequence
  source 1..108: mol_type = other DNA

SEQ ID NO: 157829 - DNA, 108 bp, synthetic construct; identical to SEQ ID NO: 157663
  misc_feature 1..108: note = Description of Artificial Sequence: Synthetic coding sequence
  source 1..108: mol_type = other DNA

SEQ ID NO: 157830 - DNA, 276 bp, synthetic construct; identical to SEQ ID NO: 157667
  misc_feature 1..276: note = Description of Artificial Sequence: Synthetic coding sequence
  source 1..276: mol_type = other DNA

SEQ ID NO: 157831 - DNA, 843 bp, synthetic construct
  misc_feature 1..843: note = Description of Artificial Sequence: Synthetic coding sequence
  source 1..843: mol_type = other DNA
atggagcgggagatggtgctgtgcctggcccagaccatccacacccaggaggacctgccccggcccagcatctctgctgagcccggcaccgtcatccccctgggcagccacgtgacctttgtgtgccggggccctgtgggcgtgcagaccttccggctggagcgggagagccgcagcacctacaatgacacagaagatgtgtcccaggccagccccagcgagagcgaggcccgcttcagaattgattctgtgtctgagggcaatgccggcccctaccgctgcatctactacaagccacccaagtggagcgagcagagcgactacctggagctgctggtgaaggagaccagcggcggccctgacagcccagacacagagcccggcagcagcgctggccccacccagaggcccagcgacaacagccacaatgaacatgccccagccagccagggcctgaaggccgagcacctgtacatcctgattggagtgtctgtggtgttcctgttctgcctgctgctgctggtgctcttctgcctgcaccggcagaaccagatcaagcagggccccccaagaagcaaggatgaggagcagaagccccagcagaggccagacctggccgtggatgtgctggagaggacagctgacaaggccaccgtgaatggcctgcctgagaaggaccgggagacagacaccagcgccctggccgccggcagcagccaggaggtgacctacgcccagctggaccactgggccctgacccagaggacagcccgggctgtgagcccccagagcaccaagcccatggccgagagcatcacctatgctgctgtggcccggcactag

SEQ ID NO: 157832 - DNA, 813 bp, synthetic construct
  misc_feature 1..813: note = Description of Artificial Sequence: Synthetic coding sequence
  source 1..813: mol_type = other DNA
atgagcccccaccccacagccctgctgggcctggtgctgtgcctggcccagaccatccacacccaggaggaggacctgccccggcccagcatctctgctgagcccggcaccgtcatccccctgggcagccacgtgacctttgtgtgccggggccctgtgggcgtgcagaccttccggctggagcgggagagccgcagcacctacaatgacacagaagatgtgtcccaggccagccccagcgagagcgaggcccgcttcagaattgacagcgtgtctgagggcaatgccggcccctaccgctgcatctactacaagccacccaagtggagcgagcagagcgactacctggagctgctggtgaagggccccacccagaggcccagcgacaacagccacaatgaacatgccccagccagccagggcctgaaggccgagcacctgtacatcctgattggagtgtctgtggtgttcctgttctgcctgctgctgctggtgctcttctgcctgcaccggcagaaccagatcaagcagggccccccaagaagcaaggatgaggagcagaagccccagcagaggccagacctggccgtggatgtgctggagaggacagctgacaaggccaccgtgaatggcctgcctgagaaggaccgggagacagacaccagcgccctggccgccggcagcagccaggaggtgacctacgcccagctggaccactgggccctgacccagaggacagcccgggctgtgagcccccagagcaccaagcccatggccgagagcatcacctatgctgctgtggcccggcactag

SEQ ID NO: 157833 - DNA, 864 bp, synthetic construct
  misc_feature 1..864: note = Description of Artificial Sequence: Synthetic coding sequence
  source 1..864: mol_type = other DNA
atgagcccccaccccacagccctgctgggcctggtgctgtgcctggcccagaccatccacacccaggaggaggacctgccccggcccagcatctctgctgagcccggcaccgtcatccccctgggcagccacgtgacctttgtgtgccggggccctgtgggcgtgcagaccttccggctggagcgggagagccgcagcacctacaatgacacagaagatgtgtcccaggccagccccagcgagagcgaggcccgcttcagaattgacagcgtgtctgagggcaatgccggcccctaccgctgcatctactacaagccacccaagtggagcgagcagagcgactacctggagctgctggtgaaggagaccagcggcggccctgacagcccagacacagagcccggcagcagcgctggccccacccagaggcccagcgacaacagccacaatgagcacgccccagccagccagggcctgaaggccgagcacctgtacatcctgattggagtgtctgtggtgttcctgttctgcctgctgctgctggtgctcttctgcctgcaccggcagaaccagatcaagcagggcccccccaggagcaaggatgaggagcagaagccccagcagaggccagacctggccgtggatgtgctggagaggacagctgacaaggccaccgtgaatggcctgcctgagaaggaccgggagacagacaccagcgccctggccgccggcagcagccaggaggtgacctacgcccagctggaccactgggccctgacccagaggacagcccgggctgtgagcccccagagcaccaagcccatggccgagagcatcacctacgccgctgtggcccggcactag

SEQ ID NO: 157834 - DNA, 1545 bp, synthetic construct
  misc_feature 1..1545: note = Description of Artificial Sequence: Synthetic coding sequence
  source 1..1545: mol_type = other DNA
atgctgaccagggtgaagtctgctgtggccaacttcatgggcggcatcatggccggcagcagcggcagcgagcacggcggcggcagctgtggcggcagtgacctgcccctgcgcttcccctacggccggcctgagttcctgggcctgagccaggatgaggtggagtgcagcgctgaccacatcgcccggcccatcctgatcctgaaggagacccggcggctgccctgggccaccggctatgcagaggtgatcaatgctgggaagagcacccacaatgaagaccaggccagctgtgaggtgctgactgtgaagaagaaggccggggctgtgaccagcacccccaacagaaacagcagcaagagaagaagcagcctgcccaatggagagggcctgcagctgaaggaaaattctgagagcgagggcgtgtcctgccactactggagcctgtttgatggccacgccggcagcggggctgctgtggtggccagccggctgctgcagcaccacatcacagagcagctgcaggacatcgtggacatcctgaagaacagcgctgtgctgccccccacctgcctgggggaggagcctgagaacaccccagccaacagcaggaccctgaccagggctgccagcctgcggggcggcgtgggcgcccctggcagccccagcaccccacccacccgcttcttcacagagaagaagatcccccatgagtgcctggtgattggagccctggagagcgccttcaaggagatggacctgcagatcgagcgggagaggagcagctacaacatcagcggcggctgcacagccctgattgtcatctgcctgctgggcaagctgtatgtggccaatgctggggacagccgggccatcatcatcagaaatggagagatcatccccatgagcagcgagttcaccccagagacagagcggcagaggctgcagtacctggccttcatgcagccccacctgctgggcaatgagttcacccacctggagttccccaggagagtgcagaggaaggagctgggcaagaagatgctgtacagagacttcaacatgacaggctgggcctacaagaccattgaagatgaggacctgaagttccccctcatctacggggagggcaagaaggcccgggtgatggccaccatcggcgtgacccggggcctgggggaccatgacctgaaggtgcatgacagcaacatctacatcaagcccttcctgagcagcgcccctgaggtgcgcatctatgacctgagcaaatatgaccacggcagtgatgatgtgctgatcctggccacagatggcctgtgggatgtgctgagcaatgaggaggtggccgaggccatcacccagttcctgcccaactgtgaccctgatgacccccaccgctacaccctggccgcccaggacctggtgatgagggcccggggcgtgctgaaggaccggggctggaggatcagcaatgaccggctgggcagcggagatgacatctctgtgtatgtgatccccctcatccacggcaacaagctgtcctag

SEQ ID NO: 157835 - DNA, 1527 bp, synthetic construct
  misc_feature 1..1527: note = Description of Artificial Sequence: Synthetic coding sequence
  source 1..1527: mol_type = other DNA
atgctgccccagaggaacctgagcaagaggcaggtgcccaccatgcacatccctgtgaagacccggcggctgctggccgccctgaaggtgctggacaccaaggacctgaccatcgagaaggtggtgatcaatggccaggaggtgaagtatgccctgggggagcggcagagctacaagggcagccccatggagatcagcctgcccatcgccctgagcaagaaccaggagatcgtgattgagatcagctttgagaccagccccaagagcagcgccctgcagtggctgaccccagagcagaccagcggcaaggagcacccctacctgttcagccagtgccaggccatccactgccgggccatcctgccctgccaggacacccccagcgtgaagctgacctacacagctgaggtgtctgtgcccaaggagctggtggccctgatgtctgccatcagagatggagagaccccagaccctgaggaccccagcaggaagatctacaagttcatccagaaggtgcccatcccctgctacctgattgccctggtggtgggcgccctggagagccggcagatcggccccaggaccctggtgtggagcgagaaggagcaggtggagaagagcgcctatgagttcagcgagacagagagcatgctgaagattgctgaggacctgggcggcccctacgtgtggggccagtatgacctgctggtgctgcccccatccttcccctacggcggcatggagaacccctgcctgacctttgtgacccccaccctgctggccggggacaagagcctgagcaatgtcatcgcccacgagatcagccacagctggacaggcaacctggtgaccaacaagacctgggaccacttctggctgaatgaaggccacacagtgtacctggagcggcacatctgtggccgcctgtttggagagaagttccgccacttcaatgccctgggcggctggggcgagctgcagaacagcgtgaagacctttggagagacccaccccttcaccaagctggtggtggacctgacagacattgatcctgatgtggcctacagctctgtgccctatgagaagggctttgccctgctcttctacctggagcagctgctgggcggccctgagatcttcctgggcttcctgaaggcctacgtggagaagttctcctacaagagcatcaccacagatgactggaaggacttcctgtacagctacttcaaggacaaggtggatgtgctgaaccaggtggactggaatgcctggctgtacagccctggcctgccccccatcaagcccaactatgacatgaccctgaccaatgcctgcatcgccctgagccagcgctggatcacagccaaggaggatgacctgaacagcttcaatgccacagacctgaaggacctgagcagccaccagctgaatgagttcctggcccagaccctgcagaggatggctgctgccctgcacagcatccaggtgggcggcagaaattcctttggagccaaggatggcaactag

SEQ ID NO: 157836 - DNA, 1764 bp, synthetic construct
  misc_feature 1..1764: note = Description of Artificial Sequence: Synthetic coding sequence
  source 1..1764: mol_type = other DNA
atgctgccccagaggaacctgagcaagaggcaggtgcccaccatgcacatccctgtgaagacccggcggctgctggccgccctgaaggtgctggacaccaaggacctgaccatcgagaaggtggtgatcaatggccaggaggtgaagtatgccctgggggagcggcagagctacaagggcagccccatggagatcagcctgcccatcgccctgagcaagaaccaggagatcgtgattgagatcagctttgagaccagccccaagagcagcgccctgcagtggctgaccccagagcagaccagcggcaaggagcacccctacctgttcagccagtgccaggccatccactgccgggccatcctgccctgccaggacacccccagcgtgaagctgacctacacagctgaggtgtctgtgcccaaggagctggtggccctgatgtctgccatcagagatggagagaccccagaccctgaggaccccagcaggaagatctacaagttcatccagaaggtgcccatcccctgctacctgattgccctggtggtgggcgccctggagagccggcagatcggccccaggaccctggtgtggagcgagaaggagcaggtggagaagagcgcctatgagttcagcgagacagagagcatgctgaagattgctgaggacctgggcggcccctacgtgtggggccagtatgacctgctggtgctgcccccatccttcccctacggcggcatggagaacccctgcctgacctttgtgacccccaccctgctggccggggacaagagcctgagcaatgtcatcgcccacgagatcagccacagctggacaggcaacctggtgaccaacaagacctgggaccacttctggctgaatgaaggccacacagtgtacctggagcggcacatctgtggccgcctgtttggagagaagttccgccacttcaatgccctgggcggctggggcgagctgcagaacagcgtgaagacctttggagagacccaccccttcaccaagctggtggtggacctgacagacattgatcctgatgtggcctacagctctgtgccctatgagaagggctttgccctgctcttctacctggagcagctgctgggcggccctgagatcttcctgggcttcctgaaggcctacgtggagaagttctcctacaagagcatcaccacagatgactggaaggacttcctgtacagctacttcaaggacaaggtggatgtgctgaaccaggtggactggaatgcctggctgtacagccctggcctgccccccatcaagcccaactatgacatgaccctgaccaatgcctgcatcgccctgagccagcgctggatcacagccaaggaggatgacctgaacagcttcaatgccacagacctgaaggacctgagcagccaccagctgaatgagttcctggcccagaccctgcagagggcccccctgcccctgggccacatcaagaggatgcaggaggtgtacaacttcaatgccatcaacaacagcgagatccgcttccgctggctgcggctgtgcatccagagcaagtgggaggatgccatccccctggccctgaagatggccacagagcagggccgcatgaagttcacccggcccctcttcaaggacctggccgcctttgacaagagccatgaccaggccgtgaggacctaccaggagcacaaggcctccatgcaccctgtgacagccatgctggtgggcaaggacctgaaggtggactag

SEQ ID NO: 157837 - DNA, 1059 bp, synthetic construct
  misc_feature 1..1059: note = Description of Artificial Sequence: Synthetic coding sequence
  source 1..1059: mol_type = other DNA
atgaacaccaccagcagcgctgccccacccagcctgggcgtggagttcatcagcctgctggccatcatcctgctgtctgtggccctggccgtgggcctgcccggcaacagctttgtggtgtggagcatcctgaagaggatgcagaagaggtctgtgacagccctgatggtgctgaacctggccctggccgacctggccgtgctgctgacagcccccttcttcctgcacttcctggcccagggcacctggagctttggcctggccggctgccgcctgtgccactacgtgtgtggggtgtccatgtatgcctctgtgctgctgatcacagccatgagcctggacaggagcctggccgtggcccggccctttgtgtcccagaagctgcggaccaaggccatggccaggagagtgctggccggcatctgggtgctgtccttcctgctggccacccctgtgctggcctacagaacagtggtgccctggaagaccaacatgagcctgtgcttcccccgctaccccagcgagggccaccgggccttccacctgatctttgaggccgtgacaggcttcctgctgcccttcctggccgtggtggccagctacagcgacatcggccggcggctgcaggcccggcgcttccgccgcagcagaagaacaggccgcctggtggtgctgatcatcctgacctttgctgccttctggctgccctaccacgtggtgaacctggccgaggccggccgggccctggccggccaggccgccggcctgggcctggtgggcaagaggctgagcctggccagaaatgtgctgattgccctggccttcctgagcagctctgtgaaccctgtgctgtatgcctgtgccggcggcggcctgctgcggtctgctggggtgggctttgtggccaagctgctggagggcaccggcagcgaggccagcagcacccggcggggcggcagcctgggccagacagcccggagcggccctgctgccctggagcccggccccagcgagagcctgacagccagcagccccctgaagctgaatgagctgaactag

SEQ ID NO: 157838 - DNA, 1059 bp, synthetic construct; identical to SEQ ID NO: 157837
  misc_feature 1..1059: note = Description of Artificial Sequence: Synthetic coding sequence
  source 1..1059: mol_type = other DNA

SEQ ID NO: 157839 - DNA, 1059 bp, synthetic construct; identical to SEQ ID NO: 157837
  misc_feature 1..1059: note = Description of Artificial Sequence: Synthetic coding sequence
  source 1..1059: mol_type = other DNA

SEQ ID NO: 157840 - DNA, 309 bp, synthetic construct
  misc_feature 1..309: note = Description of Artificial Sequence: Synthetic coding sequence
  source 1..309: mol_type = other DNA
atgaacaccaccagcagcgctgccccacccagcctgggcgtggagttcatcagcctgctggccatcatcctgctgtctgtggccctggccgtgggcctgcccggcaacagctttgtggtgtggagcatcctgaagaggatgcagaagaggtctgtgacagccctgatggtgctgaacctggccctggccgacctggccgtgctgctgacagcccccttcttcctgcacttcctggcccagggcacctggagctttggcctggccggctgccgcctgtgccactacgtgtgtggggtgtccatgtactag

SEQ ID NO: 157841 - DNA, 483 bp, synthetic construct
  misc_feature 1..483: note = Description of Artificial Sequence: Synthetic coding sequence
  source 1..483: mol_type = other DNA
atgtctgtgtgctacagacctcctggaaatgagaccctgctgtcctggaagaccagccgggccaccggcacagccttcctgctgctggccgccctgctgggcctgcctggaaatggatttgtggtgtggagcctggccggctggaggcctgcccggggccggcccctggccgccaccctggtgctgcacctggccctggctgatggagctgtgctgctgctgacccccctgtttgtggccttcctgacccggcaggcctggcccctgggccaggccggctgcaaggctgtgtactacgtgtgtgccctgtccatgtatgcctctgtgctgctgaccggcctgctgagcctgcagcgctgcctggccgtgacccggcccttcctggccccccggctgcggagccctgccctggcccggcggctgctgctggccgtgtggctggccgccctgctgctggccgtgcctgctgctgtgtacagatag

SEQ ID NO: 157842 - DNA, 1170 bp, synthetic construct
  misc_feature 1..1170: note = Description of Artificial Sequence: Synthetic coding sequence
  source 1..1170: mol_type = other DNA
atggcccccagccaccgggccagccaggtgggcttctgccccaccccagagcggcccctgtggaggctgccccccacctgccggcccaggaggatgtctgtgtgctaccggcccccaggaaatgagaccctgctgtcctggaagaccagccgggccactggaacagccttcctgctgctggccgccctgctgggcctgcctggaaatggatttgtggtgtggagcctggccggctggaggcctgcccggggccggcccctggccgccaccctggtgctgcacctggccctggctgatggagctgtgctgctgctgacccccctgtttgtggccttcctgacccggcaggcctggcccctgggccaggccggctgcaaggctgtgtactacgtgtgtgccctgtccatgtatgcctctgtgctgctgaccggcctgctgagcctgcagcgctgcctggccgtgacccggcccttcctggccccccggctgcggagccctgccctggcccggcggctgctgctggccgtgtggctggccgccctgctgctggccgtgcctgctgctgtgtaccgccacctgtggagggacagagtgtgccagctgtgccaccccagccctgtgcatgctgctgcccacctgagcctggagaccctgacagcctttgtgctgcccttcggcctgatgctgggctgctacagcgtgaccctggcccggctgcggggggcccgctggggcagcggcagacatggagcccgggtgggccgcctggtgtctgccatcgtgctggccttcggcctgctgtgggccccctaccacgctgtgaacctgctgcaggccgtggccgccctggcccctcctgagggcgccctggccaagctgggcggggccggccaggccgcccgggccggcaccacagccctggccttcttcagcagctctgtgaaccctgtgctgtatgtgttcaccgctggggacctgctgccccgggccggcccccgcttcctgacccggctgtttgagggcagcggggaggcccggggcggcggccgcagccgggagggcaccatggagctgcggaccaccccccagctgaaggtggtgggccagggcagaggaaatggagaccccggcggcggcatggagaaggatggccctgagtgggacctgtag

SEQ ID NO: 157843 - DNA, 960 bp, synthetic construct
  misc_feature 1..960: note = Description of Artificial Sequence: Synthetic coding sequence
  source 1..960: mol_type = other DNA
atgtctgtgtgctacagacctcctggaaatgagaccctgctgtcctggaagaccagccgggccaccggcacagccttcctgctgctggccgccctgctgggcctgcctggaaatggatttgtggtgtggagcctggccggctggaggcctgcccggggccggcccctggccgccaccctggtgctgcacctggccctggctgatggagctgtgctgctgctgacccccctgtttgtggccttcctgacccggcaggcctggcccctgggccaggccggctgcaaggctgtgtactacgtgtgtgccctgtccatgtatgcctctgtgctgctgaccggcctgctgagcctgcagcgctgcctggccgtgacccggcccttcctggccccccggctgcggagccctgccctggcccggcggctgctgctggccgtgtggctggccgccctgctgctggccgtgcctgctgctgtgtaccgccacctgtggagggacagagtgtgccagctgtgccaccccagccctgtgcacgccgccgcccacctgagcctggagaccctgacagcctttgtgctgcccttcggcctgatgctgggctgctacagcgtgaccctggcccggctgcggggggcccgctggggcagcggccgccacggggcccgggtgggccgcctggtgtctgccatcgtgctggccttcggcctgctgtgggccccctaccacgctgtgaacctgctgcaggccgtggccgccctggcccctcctgagggcgccctggccaagctgggcggggccggccaggccgcccgggccggcaccacagccctggccttcttcagcagctctgtgaaccctgtgctgtatgtgttcaccgctggggacctgctgcccagggctggcccccgcttcctgacccggctgtttgagggcagcggggaggcccggggcggcggccgctag

SEQ ID NO: 157844 - DNA, 1077 bp, synthetic construct
  misc_feature 1..1077: note = Description of Artificial Sequence: Synthetic coding sequence
  source 1..1077: mol_type = other DNA
atgtctgtgtgctacagacctcctggaaatgagaccctgctgtcctggaagaccagccgggccaccggcacagccttcctgctgctggccgccctgctgggcctgcctggaaatggatttgtggtgtggagcctggccggctggaggcctgcccggggccggcccctggccgccaccctggtgctgcacctggccctggctgatggagctgtgctgctgctgacccccctgtttgtggccttcctgacccggcaggcctggcccctgggccaggccggctgcaaggctgtgtactacgtgtgtgccctgtccatgtatgcctctgtgctgctgaccggcctgctgagcctgcagcgctgcctggccgtgacccggcccttcctggccccccggctgcggagccctgccctggcccggcggctgctgctggccgtgtggctggccgccctgctgctggccgtgcctgctgctgtgtaccgccacctgtggagggacagagtgtgccagctgtgccaccccagccctgtgcacgccgccgcccacctgagcctggagaccctgacagcctttgtgctgcccttcggcctgatgctgggctgctacagcgtgaccctggcccggctgcggggggcccgctggggcagcggccgccacggggcccgggtgggccgcctggtgtctgccatcgtgctggccttcggcctgctgtgggccccctaccacgctgtgaacctgctgcaggccgtggccgccctggcccctcctgagggcgccctggccaagctgggcggggccggccaggccgcccgggccggcaccacagccctggccttcttcagcagctctgtgaaccctgtgctgtatgtgttcaccgctggggacctgctgcccagggctggcccccgcttcctgacccggctgtttgagggcagcggggaggcccggggcggcggccgcagccgggagggcaccatggagctgcggaccaccccccagctgaaggtggtgggccagggcagaggaaatggagaccccggcggcggcatggagaaggatggccctgagtgggacctgtag

SEQ ID NO: 157845 - DNA, 1077 bp, synthetic construct; identical to SEQ ID NO: 157844
  misc_feature 1..1077: note = Description of Artificial Sequence: Synthetic coding sequence
  source 1..1077: mol_type = other DNA

SEQ ID NO: 157846 - DNA, 453 bp, synthetic construct
  misc_feature 1..453: note = Description of Artificial Sequence: Synthetic coding sequence
  source 1..453: mol_type = other DNA
atgaaggatgaggtggccctgctggccgctgtgaccctgctgggcgtgctgctgcaggcctacttcagcctgcaggtgatcagcgcccggcgggccttccgggtgtccccacccctgaccactggacctcctgagtttgagcgggtgtaccgggcccaggtgaactgcagcgagtacttccccctcttcctggccaccctgtgggtggccggcatcttcttccatgaaggagctgctgccctgtgtggcctggtgtacctgtttgcccggctgcgctacttccagggctacgcccggagcgcccagctgcggctggcccccctgtatgccagcgcccgggccctgtggctgctggtggccctggccgccctgggcctgctggcccacttcctgcctgctgccctgcgggccgccctgctgggccgcctgcggaccctgctgccctgggcctag

SEQ ID NO: 157847 - DNA, 1161 bp, synthetic construct
  misc_feature 1..1161: note = Description of Artificial Sequence: Synthetic coding sequence
  source 1..1161: mol_type = other DNA
atggaggagctggatgccctgctggaggagctggagaggagcaccctgcaggacagtgatgagtacagcaacccagcccccctgcccctggaccagcacagcaggaaggagaccaacctggatgagaccagcgagatcctgagcatccaggacaacaccagccccctgcctgcccagctggtgtacaccaccaacatccaggagctgaatgtgtacagcgaggcccaggagcccaaggagagccccccacccagcaagaccagcgctgctgcccagctggatgagctgatggcccacctgacagagatgcaggccaaggtggccgtgcgggcagatgctgggaagaagcacctgcctgacaagcaggaccacaaggccagcctggacagcatgctgggcggcctggagcaggagctgcaggacctgggcatcgccaccgtgcccaagggccactgtgccagctgccagaagcccatcgccggcaaggtgattcatgccctgggccagagctggcaccctgagcactttgtgtgcacccactgcaaggaggagatcggcagcagccccttctttgagaggagcggcctggcctactgccccaatgactaccaccagctgttcagcccccgctgtgcctactgtgccgcccccatcctggacaaggtgctgacagccatgaaccagacctggcaccctgagcacttcttctgcagccactgtggggaggtgtttggagctgagggcttccacgagaaggacaagaagccctactgcaggaaggacttcctggccatgttcagccccaagtgtggcggctgcaacagacctgtgctggagaactacctgagcgccatggacacagtgtggcaccctgagtgctttgtgtgtggggactgcttcaccagcttcagcacaggcagcttctttgagctggatggccggcccttctgtgagctgcactaccaccaccggcggggcaccctgtgccacggctgcggccagcccatcaccggccgctgcatcagcgccatgggctacaagttccaccctgagcactttgtgtgtgccttctgcctgacccagctgagcaagggcatcttccgggagcagaatgacaagacctactgccagccctgcttcaacaagctgttccccctgtag

SEQ ID NO: 157848 - DNA, 1176 bp, synthetic construct
  misc_feature 1..1176: note = Description of Artificial Sequence: Synthetic coding sequence
  source 1..1176: mol_type = other DNA
atgagcaccctgctgatcagcagcagtgatgccctgctggaggagctggagaggagcaccctgcaggacagtgatgagtacagcaacccagcccccctgcccctggaccagcacagcaggaaggagaccaacctggatgagaccagcgagatcctgagcatccaggacaacaccagccccctgcctgcccagctggtgtacaccaccaacatccaggagctgaatgtgtacagcgaggcccaggagcccaaggagagccccccacccagcaagaccagcgctgctgcccagctggatgagctgatggcccacctgacagagatgcaggccaaggtggccgtgcgggcagatgctgggaagaagcacctgcctgacaagcaggaccacaaggccagcctggacagcatgctgggcggcctggagcaggagctgcaggacctgggcatcgccaccgtgcccaagggccactgtgccagctgccagaagcccatcgccggcaaggtgatccacgccctgggccagagctggcaccctgagcactttgtgtgcacccactgcaaggaggagatcggcagcagccccttctttgagaggagcggcctggcctactgccccaatgactaccaccagctgttcagcccccgctgtgcctactgtgccgcccccatcctggacaaggtgctgacagccatgaaccagacctggcaccctgagcacttcttctgcagccactgtggggaggtgtttggagctgagggcttccacgagaaggacaagaagccctactgcaggaaggacttcctggccatgttcagccccaagtgtggcggctgcaacagacctgtgctggagaactacctgagcgccatggacacagtgtggcacccagaatgttttgtgtgtggggactgcttcaccagcttcagcacaggcagcttctttgagctggatggccggcccttctgtgagctgcactaccaccacagaagaggcaccctgtgccacggctgcggccagcccatcaccggccgctgcatcagcgccatgggctacaagttccaccctgagcactttgtgtgtgccttctgcctgacccagctgagcaagggcatcttccgggagcagaatgacaagacctactgccagccctgcttcaacaagctgttccccctgtag

SEQ ID NO: 157849 - DNA, 1131 bp, synthetic construct
  misc_feature 1..1131: note = Description of Artificial Sequence: Synthetic coding sequence
  source 1..1131: mol_type = other DNA
atgaactatgaatttgagcgggagatcggcttcatcaacagccagcccagcctggccgagtgcctgaccagcttcccccctgtggccgacaccttccagagcagcagcatcaagaccagcaccctgagccacagcaccctcatccccccaccatttgagcagaccatccccagcctgaaccctggcagccaccccaggcatggagctgggggccggcccaagcccagccctgctggcagccggggcagccctgtgcctgctggggccctgcagcccccagagtacccctggatgaaggagaagaaggccgccaagaagacagccctgctgcctgctgctgctgctgctgccacagctgctgccaccggccctgcctgcctgagccacaaggagagcctggagattgctgatggcagcggcggcggcagccggcggctgaggacagcctacaccaacacccagctgctggagctggagaaggagttccacttcaacaagtacctgtgccggccccggcgggtggagattgctgccctgctggacctgacagagcggcaggtgaaggtgtggttccagaacagaaggatgaagcacaagaggcagacccagtgcaaggagaaccagaacagcgagggcaagtgcaagagcctggaggacagcgagaaggtggaggaggatgaggaggagaagaccctgtttgagcaggccctgtctgtgtctggggccctgctggagcgggagggctacaccttccagcagaatgccctgagccagcagcaggccccaaatggccacaacggggacagccagagcttccctgtgagccccctgaccagcaatgagaagaacctgaagcacttccagcaccagagccccaccgtgcccaactgcctgagcaccatgggccagaactgtggggccggcctgaacaatgacagccctgaggccctggaggtgcccagcctgcaggacttcagcgtcttcagcacagacagctgcctgcagctgagtgatgctgtgagccccagcctgcccggcagcctggacagccctgtggacatctctgctgacagcctggacttcttcacagacaccctgaccaccatcgacctgcagcacctgaactactag

SEQ ID NO: 157850 - DNA, 753 bp, synthetic construct
  misc_feature 1..753: note = Description of Artificial Sequence: Synthetic coding sequence
  source 1..753: mol_type = other DNA
atgaccccaggccgctgctgcctggccgctgacatccaggtggagaccttcatcttcacagatggagaagatgaggccctggcccggcacactggaaatgtggtgatcaccaactgcagcgctgcccacagccggcaggccctgagctgcaagatggctgtggagtatgaccgcttcatcgagagcggcaggaagtggttctgccacgtggatgatgacaactacgtgaacctgcgggccctgctgcggctgctggccagctacccccacaccagagatgtgtatgtgggcaagcccagcctggaccggcccatccaggccatggagcgggtgtctgagaacaaggtgcggcctgtgcacttctggtttgccactggaggagctggcttctgcatcagccggggcctggccctgaagatgagcccctgggccagcggcggccacttcatgaacacagctgagcgcatccggctgcctgatgactgcaccatcggctacatcgtggaggccctgctgggcgtgcccctcatccgcagcggcctcttccacagccacctggagaacctgcagcaggtgcccaccagcgagctgcacgagcaggtgaccctgtcctatggcatgtttgagaacaagagaaatgctgtgcacgtgaagggccccttctctgtggaggccgaccccagccgcttccgcagcatccactgccacctgtacccagacaccccctggtgccccaggacagccatcttctag

SEQ ID NO: 157851 - DNA, 1086 bp, synthetic construct
  misc_feature 1..1086: note = Description of Artificial Sequence: Synthetic coding sequence
  source 1..1086: mol_type = other DNA
atgctgaagagatgtggccgccgcctgctgctggccctggccggggccctgctggcctgcctgctggtgctgacagctgaccccccacctccacccctgcctgctgagcggggcagaagagccctgcggagcctggccggccctgctggagctgccccagcccctggcctgggcgctgctgctgctgcccctggggccctggtgagagatgtgcacagcctgtctgagtacttcagcctgctgacccgggccaggagagatgctggccccccacctggggccgcccccaggcctgcagatggccacccccggcccctggccgagcccctggcccccagagatgtgttcatcgctgtgaagaccaccaagaagttccaccgggcccggctggacctgctgctggagacctggatcagccgccacaaggagatgaccttcatcttcacagatggagaagatgaggccctggcccggcacactggaaatgtggtgatcaccaactgcagcgctgcccacagccggcaggccctgagctgcaagatggctgtggagtatgaccgcttcattgaaagtggcaggaagtggttctgccacgtggatgatgacaactacgtgaacctgcgggccctgctgcggctgctggccagctacccccacaccagagatgtgtatgtgggcaagcccagcctggaccggcccatccaggccatggagcgggtgtctgagaacaaggtgcggcctgtgcacttctggtttgccaccggcggggccggcttctgcatcagccggggcctggccctgaagatgagcccctgggccagcggcggccacttcatgaacacagctgagcgcatccggctgcctgatgactgcaccatcggctacatcgtggaggccctgctgggcgtgcccctcatccgcagcggcctcttccacagccacctggagaacctgcagcaggtgcccaccagcgagctgcacgagcaggtgaccctgtcctatggcatgtttgagaacaagagaaatgctgtgcacgtgaagggccccttctctgtggaggccgaccccagccgctggggcaactag

SEQ ID NO: 157852 - DNA, 753 bp, synthetic construct; identical to SEQ ID NO: 157850
  misc_feature 1..753: note = Description of Artificial Sequence: Synthetic coding sequence
  source 1..753: mol_type = other DNA

SEQ ID NO: 157853 - DNA, 927 bp, synthetic construct
  misc_feature 1..927: note = Description of Artificial Sequence: Synthetic coding sequence
  source 1..927: mol_type = other DNA
atggatgagcagacaggccgcctgcggctggacacctactgcatgtctgccaagcagatctgggcctggagcaaatgttctggccgcctgtgggatgagcacatgaagtggatggagggctggacagaccgctggacagatggctggatggatggctggatggatgagtggagccccaccccagccctgcggagctatggaggcggcctgagccagcagaccttcatcttcacagatggagaagatgaggccctggcccggcacactggaaatgtggtgatcaccaactgcagcgctgcccacagccggcaggccctgagctgcaagatggctgtggagtatgaccgcttcatcgagagcggcaggaagtggttctgccacgtggatgatgacaactacgtgaacctgcgggccctgctgcggctgctggccagctacccccacaccagagatgtgtatgtgggcaagcccagcctggaccggcccatccaggccatggagcgggtgtctgagaacaaggtgcggcctgtgcacttctggtttgccactggaggagctggcttctgcatcagccggggcctggccctgaagatgagcccctgggccagcggcggccacttcatgaacacagctgagcgcatccggctgcctgatgactgcaccatcggctacatcgtggaggccctgctgggcgtgcccctcatccgcagcggcctcttccacagccacctggagaacctgcagcaggtgcccaccagcgagctgcacgagcaggtgaccctgtcctatggcatgtttgagaacaagagaaatgctgtgcacgtgaagggccccttctctgtggaggccgaccccagccgcttccgcagcatccactgccacctgtacccagacaccccctggtgccccaggacagccatcttctag

SEQ ID NO: 157854 - DNA, 1302 bp, synthetic construct
  misc_feature 1..1302: note = Description of Artificial Sequence: Synthetic coding sequence
  source 1..1302: mol_type = other DNA
atgcagaggatgatccagcagtttgctgctgagtacaccagcaagaacagcagcacccaggaccccagccagcccaacagcaccaagaaccagagcctgcccaaggccagccctgtgaccaccagccccacagctgccaccacccagaaccctgtgctgagcaagctgctgatggctgaccaggacagccccctggacctgactgtgaggaagagccagagcgagcccagcgagcaggatggagtgctggacctgagcaccaagaagagcccctgtgccggcagcaccagcctgagccacagccctggctgcagcagcacccagggcaatggccggcccggccggcccagccagtacagaccagatggcctgcggtctggagatggagtgcccccaagaagcctgcaggacggcacccgggagggcttcggccacagcaccagcctgaaggtgcccctggcccggagcctgcagatcagcgaggagctgctgagcaggaaccagctgagcacagctgccagcctgggccccagcggcctgcagaaccacggccagcacctgatcctgagccgggaggcctcctgggccaagccccactatgagttcaacctgagcaggatgaagttcagaggaaatggagccctgagcaacatcagtgacctgcccttcctggccgagaacagcgccttccccaagatggccctgcaggccaagcaggacggcaagaaggatgtgagccacagcagccctgtggacctgaagatcccccaggtgcggggcatggacctgtcctgggagagcaggactggagaccagtacagctacagcagcctggtgatgggcagccagacagagagcgccctgagcaagaagctgcgggccatcctgcccaagcagagcaggaagtccatgctggatgctggccctgacagctggggcagtgatgctgagcagagcaccagcggccagccctaccccaccagtgaccaggagggggaccccggcagcaagcagcccaggaagaagaggggccgctaccggcagtacaacagcgagatcctggaggaggccatctctgtggtgatgtctgggaagatgtctgtgtccaaggcccagagcatctacggcatcccccacagcaccctggagtacaaggtgaaggagcggctgggcaccctgaagaacccccccaagaagaagatgaagctgatgaggtctgagggcccagatgtgtctgtgaagattgagctggacccccagggcgaggccgcccagagcgccaatgaaagcaagaatgaatag

SEQ ID NO: 157855 - DNA, 1302 bp, synthetic construct; identical to SEQ ID NO: 157854
  misc_feature 1..1302: note = Description of Artificial Sequence: Synthetic coding sequence
  source 1..1302: mol_type = other DNA

SEQ ID NO: 157856 - DNA, 1302 bp, synthetic construct; identical to SEQ ID NO: 157854
  misc_feature 1..1302: note = Description of Artificial Sequence: Synthetic coding sequence
  source 1..1302: mol_type = other DNA

SEQ ID NO: 157857 - DNA, 1221 bp, synthetic construct
  misc_feature 1..1221: note = Description of Artificial Sequence: Synthetic coding sequence
  source 1..1221: mol_type = other DNA
atgcagaggatgatccagcagtttgctgctgagtacaccagcaagaacagcagcacccaggaccccagccagcccaacagcaccaagaaccagagcctgcccaaggccagccctgtgaccaccagccccacagctgccaccacccagaaccctgtgctgagcaagctgctgatggctgaccaggacagccccctggacctgactgtgaggaagagccagagcgagcccagcgagcaggatggagtgctggacctgagcaccaagaagagcccctgtgccggcagcaccagcctgagccacagccctggctgcagcagcacccagggcaatggccggcccggccggcccagccagtacagaccagatggcctgcggtctggagatggagtgcccccaagaagcctgcaggacggcacccgggagggcttcggccacagcaccagcctgaaggtgcccctggcccggagcctgcagatcagcgaggagctgctgagcaggaaccagctgagcacagctgccagcctgggccccagcggcctgcagaaccacggccagcacctgatcctgagccgggaggcctcctgggccaagccccactatgagttcaacctgagcaggatgaagttcagaggaaatggagccctgagcaacatcagtgacctgcccttcctggccgagaacagcgccttccccaagatggccctgcaggccaagcaggacggcaagaaggatgtgagccacagcagccctgtggacctgaagatcccccaggtgcggggcatggacctgtcctgggagagcaggactggagaccagtacagctacagcagcctggtgatgggcagccagacagagagcgccctgagcaagaagctgcgggccatcctgcccaagcagagcaggaagtccatgctggatgctggccctgacagctggggcagtgatgctgagcagagcaccagcggccagccctaccccaccagtgaccaggagggggaccccggcagcaagcagcccaggaagaagaggggccgctaccggcagtacaacagcgagatcctggaggaggccatctctgtggtgatgtctgggaagatgtctgtgtccaaggcccagagcatctacggcatcccccacagcaccctggagtacaaggtgaaggagcggctgggcaccctgaagaacccccccaagaagaagatgaagctgatgtctggatag

SEQ ID NO: 157858 - DNA, 957 bp, synthetic construct
  misc_feature 1..957: note = Description of Artificial Sequence: Synthetic coding sequence
  source 1..957: mol_type = other DNA
atggacaagggccgggagaggatggctgctgctgctgctgctgctgctgctgctgctgctgctgcccagtgccgcagcccccgctgtgccgctgagcggcggggcttcagaagagagctggacagctggaggcaccggctgatgcactgtgtgggctttgagagcatcctggagggcctgtatggcccccggctgcggcgggacctgagcctgtttgaggactgtgagcctgaggagctgacagactggagcatggatgagaagtgcagcttctgcaacctgcagcgggaggccgtgtctgactgcatccccagcctggacagcagccagagcacccccacagaggagctgagcagccagggccagagcaacacagacaagattgagtgccaggccgagaactacctgaatgccctcttcaggaagaaggacctgccccagaactgtgaccccaacatccccctggtggcccaggagctgatgaagaagatgatccggcagtttgccatcgagtacatcagcaagagcggcaagacccaggagaacagaaatggcagcatcggccccagcatcgtgtgcaagagcatccagatgaaccaggccgagaacagcctgcaggaggagcaggagggccccctggacctgactgtgaacaggatgcaggagcagaacacccagcagggagatggagtgctggacctgagcaccaagaagaccagcatcaagtctgaggagagcagcatctgtgaccccagcagcgagaacagcgtggccggcatgctgcaggtgaagacagatgagaagctgaatgtgtctgatgagaacacagccagctgccccctgagccccatcaagatgtgcctgaaccggcccatcgagtggaacctgaacctgaccacagccagcctgaccagctgcaccgtgcacaaccagaacctgaagtctgaggagaagtag

SEQ ID NO: 157859 - DNA, 1557 bp, synthetic construct
  misc_feature 1..1557: note = Description of Artificial Sequence: Synthetic coding sequence
  source 1..1557: mol_type = other DNA
atggatgagaagtgcagcttctgcaacctgcagcgggaggccgtgtctgactgcatccccagcctggacagcagccagagcacccccacagaggagctgagcagccagggccagagcaacacagacaagattgagtgccaggccgagaactacctgaatgccctcttcaggaagaaggacctgccccagaactgtgaccccaacatccccctggtggcccaggagctgatgaagaagatgatccggcagtttgccatcgagtacatcagcaagagcggcaagacccaggagaacagaaatggcagcatcggccccagcatcgtgtgcaagagcatccagatgaaccaggccgagaacagcctgcaggaggagcaggagggccccctggacctgactgtgaacaggatgcaggagcagaacacccagcagggagatggagtgctggacctgagcaccaagaagaccagcatcaagtctgaggagagcagcatctgtgaccccagcagcgagaacagcgtggccggccgcctgcacaggaaccgggaggactatgtggagaggtctgctgagtttgctgatggcctgctgagcaaggccctgaaggacatccagagcggggccctggacatcaacaaggccggcatcctgtatggcatcccccagaagaccctgctgctgcacctggaggccctgcctgctgggaagccagccagcttcaagaacaagacccgggacttccatgacagctacagctacaaggacagcaaggagacctgtgctgtgctgcagaaggtggccctgtgggcccgggcccaggccgagaggacagagaagagcaagctgaacctgctggagaccagcgagatcaagttccccacagccagcacctacctgcaccagctgaccctgcagaagatggtgacccagttcaaggagaagaatgaaagcctgcagtatgagaccagcaaccccaccgtgcagctgaagatcccccagctgcgggtgtcctctgtgtccaagagccagccagatggcagcggcctgctggatgtgatgtaccaggtgtccaagaccagctctgtgctggagggcagcgccctgcagaagctgaagaacatcctgcccaagcagaacaagattgaatgttctggccctgtgacccacagctctgtggacagctacttcctgcatggagacctgagccccctgtgcctgaacagcaagaatggaacagtggatggcaccagtgaaaatacagaagatggcctggacaggaaggacagcaagcagcccaggaagaagaggggccgctaccggcagtatgaccacgagatcatggaggaggccatcgccatggtgatgtctgggaagatgtctgtgtccaaggcccagggcatctatggagtgccccacagcaccctggagtacaaggtgaaggagaggagcggcaccctgaagaccccacccaagaagaagctgcggctgcctgacaccggcctgtacaacatgacagacagcggcaccggcagctgcaagaacagcagcaagcctgtgtag

SEQ ID NO: 157860 - DNA, 1809 bp, synthetic construct
  misc_feature 1..1809: note = Description of Artificial Sequence: Synthetic coding sequence
  source 1..1809: mol_type = other DNA
atggacaagggccgggagaggatggctgctgctgctgctgctgctgctgctgctgctgctgctgcccagtgccgcagcccccgctgtgccgctgagcggcggggcttcagaagagagctggacagctggaggcaccggctgatgcactgtgtgggctttgagagcatcctggagggcctgtatggcccccggctgcggcgggacctgagcctgtttgaggactgtgagcctgaggagctgacagactggagcatggatgagaagtgcagcttctgcaacctgcagcgggaggccgtgtctgactgcatccccagcctggacagcagccagagcacccccacagaggagctgagcagccagggccagagcaacacagacaagattgagtgccaggccgagaactacctgaatgccctcttcaggaagaaggacctgccccagaactgtgaccccaacatccccctggtggcccaggagctgatgaagaagatgatccggcagtttgccatcgagtacatcagcaagagcggcaagacccaggagaacagaaatggcagcatcggccccagcatcgtgtgcaagagcatccagatgaaccaggccgagaacagcctgcaggaggagcaggagggccccctggacctgactgtgaacaggatgcaggagcagaacacccagcagggagatggagtgctggacctgagcaccaagaagaccagcatcaagtctgaggagagcagcatctgtgaccccagcagcgagaacagcgtggccggccgcctgcacaggaaccgggaggactatgtggagaggtctgctgagtttgctgatggcctgctgagcaaggccctgaaggacatccagagcggggccctggacatcaacaaggccggcatcctgtatggcatcccccagaagaccctgctgctgcacctggaggccctgcctgctgggaagccagccagcttcaagaacaagacccgggacttccatgacagctacagctacaaggacagcaaggagacctgtgctgtgctgcagaaggtggccctgtgggcccgggcccaggccgagaggacagagaagagcaagctgaacctgctggagaccagcgagatcaagttccccacagccagcacctacctgcaccagctgaccctgcagaagatggtgacccagttcaaggagaagaatgaaagcctgcagtatgagaccagcaaccccaccgtgcagctgaagatcccccagctgcgggtgtcctctgtgtccaagagccagccagatggcagcggcctgctggatgtgatgtaccaggtgtccaagaccagctctgtgctggagggcagcgccctgcagaagctgaagaacatcctgcccaagcagaacaagattgaatgttctggccctgtgacccacagctctgtggacagctacttcctgcatggagacctgagccccctgtgcctgaacagcaagaatggaacagtggatggcaccagtgaaaatacagaagatggcctggacaggaaggacagcaagcagcccaggaagaagaggggccgctaccggcagtatgaccacgagatcatggaggaggccatcgccatggtgatgtctgggaagatgtctgtgtccaaggcccagggcatctatggagtgccccacagcaccctggagtacaaggtgaaggagaggagcggcaccctgaagaccccacccaagaagaagctgcggctgcctgacaccggcctgtacaacatgacagacagcggcaccggcagctgcaagaacagcagcaagcctgtgtag

SEQ ID NO: 157861 - DNA, 435 bp, synthetic construct
  misc_feature 1..435: note = Description of Artificial Sequence: Synthetic coding sequence
  source 1..435: mol_type = other DNA
atggaccacggctatgaggagacctctgtgtacctgaaggactgcatccccagcctggacagcagccagagcacccccacagaggagctgagcagccagggccagagcaacacagacaagattgagtgccaggccgagaactacctgaatgccctcttcaggaagaaggacctgccccagaactgtgaccccaacatccccctggtggcccaggagctgatgaagaagatgatccggcagtttgccatcgagtacatcagcaagagcggcaagacccaggagaacagaaatggcagcatcggccccagcatcgtgtgcaagagcatccagatgaaccaggccgagaacagcctgcaggaggagcaggagggccccctggacctgactgtgaacaggatgcaggagcagaacacccagcaggcctgctacaagtag

SEQ ID NO: 157862 - DNA, 2187 bp, synthetic construct
  misc_feature 1..2187: note = Description of Artificial Sequence: Synthetic coding sequence
  source 1..2187: mol_type = other DNA
atgaaccagcctgagagcgccaatgaccctgagcccctgtgtgctgtgtgtggccaggcccacagcctggaggagaaccacttctacagctacccagaggaggtggatgatgacctgatctgccacatctgcctgcaggccctgctggaccccctggacaccccctgtggccacacctactgcaccctgtgcctgaccaacttcctggtggagaaggacttctgccccatggacaggaagcccctggtgctgcagcactgcaagaagagcagcatcctggtgaacaagctgctgaacaagctgctggtgacctgccccttccgggagcactgcacccaggtgctgcagagatgtgacctggagcaccacttccagaccagctgcaagggggccagccactacggcctgaccaaggacaggaagaggaggagccaggacggctgcccagatggctgtgccagcctgacagccacagcccccagccctgaggtgtctgctgctgccaccatcagcctgatgacagatgagcccggcctggacaacccagcctacgtgtcctctgcagaagatggccagcctgccatcagccctgtggacagcggccgcagcaacagaacccgggcccggccctttgagaggagcaccatccgcagccgctccttcaagaagatcaacagagccctgtctgtgctgcggaggaccaagagcggcagcgctgtggccaaccacgccgaccagggcagagaaaattctgagaacaccacagcccctgaggtgttcccccggctgtaccacctgatcccagatggagagatcaccagcatcaagatcaacagagtggaccccagcgagagcctgagcatccggctggtgggcggcagcgagacccccctggtgcacatcatcatccagcacatctacagagatggagtcatcgccagagatggccgcctgctgcccggggacatcatcctgaaggtgaatggcatggacatcagcaatgtgccccacaactatgctgtgcggctgctgcggcagccctgccaggtgctgtggctgactgtgatgagggagcagaagttccgcagcaggaacaacggccaggccccagatgcctaccggcccagagatgacagcttccacgtgatcctgaacaagagcagccctgaggagcagctgggcatcaagctggtgaggaaggtggatgagcccggggtcttcatcttcaacgtgctggatggaggagtggcctaccgccacggccagctggaggagaatgacagagtgctggccatcaatggacatgacctgcgctatggcagccctgagagcgctgcccacctgatccaggccagcgagcggcgggtgcacctggtggtgtcccggcaggtgcggcagaggagcccagacatcttccaggaggccggctggaacagcaatggctcctggagccctggccctggagagaggagcaacacccccaagcccctgcaccccaccatcacctgccacgagaaggtggtgaacatccagaaggaccccggggagagcctgggcatgacagtggccggcggggccagccaccgggagtgggacctgcccatctacgtgatctctgtggagcccggcggcgtcatcagcagagatggccgcatcaagacaggagacatcctgctgaatgtggatggagtggagctgacagaggtgagccgctctgaggccgtggccctgctgaagaggaccagcagcagcatcgtgctgaaggccctggaggtgaaggagtatgagccccaggaggactgcagcagccctgctgccctggacagcaaccacaacatggcccccccaagtgactggagccccagctgggtgatgtggctggagctgccccgctgcctgtacaactgcaaggacatcgtgctgcggaggaacacagctggcagcctgggcttctgcatcgtgggcggctatgaggagtacaatggaaacaagcccttcttcatcaagagcatcgtggagggcaccccagcctacaatgatggccgcatccgctgtggggacatcctgctggccgtgaatggccgcagcaccagcggcatgatccacgcctgcctggcccggctgctgaaggagctgaagggccgcatcaccctgaccatcgtgtcctggccaggcaccttcctgtag

SEQ ID NO: 157863 - DNA, 1899 bp, synthetic construct
  misc_feature 1..1899: note = Description of Artificial Sequence: Synthetic coding sequence
  source 1..1899: mol_type = other DNA
atgaaggccctgctgctgctggtgctgccctggctgagccctgccaactacatcgacaacgtgggcaacctgcacttcctgtacagcgagctgtgcaagggggccagccactacggcctgaccaaggacaggaagaggaggagccaggacggctgcccagatggctgtgccagcctgacagccacagcccccagccctgaggtgtctgctgctgccaccatcagcctgatgacagatgagcccggcctggacaacccagcctacgtgtcctctgcagaagatggccagcctgccatcagccctgtggacagcggccgcagcaacagaacccgggcccggccctttgagaggagcaccatccgcagccgctccttcaagaagatcaacagagccctgtctgtgctgcggaggaccaagagcggcagcgctgtggccaaccacgccgaccagggcagagaaaattctgagaacaccacagcccctgaggtgttcccccggctgtaccacctgatcccagatggagagatcaccagcatcaagatcaacagagtggaccccagcgagagcctgagcatccggctggtgggcggcagcgagacccccctggtgcacatcatcatccagcacatctacagagatggagtcatcgccagagatggccgcctgctgcccggggacatcatcctgaaggtgaatggcatggacatcagcaatgtgccccacaactatgctgtgcggctgctgcggcagccctgccaggtgctgtggctgactgtgatgagggagcagaagttccgcagcaggaacaacggccaggccccagatgcctaccggcccagagatgacagcttccacgtgatcctgaacaagagcagccctgaggagcagctgggcatcaagctggtgaggaaggtggatgagcccggggtcttcatcttcaacgtgctggatggaggagtggcctaccgccacggccagctggaggagaatgacagagtgctggccatcaatggacatgacctgcgctatggcagccctgagagcgctgcccacctgatccaggccagcgagcggcgggtgcacctggtggtgtcccggcaggtgcggcagaggagcccagacatcttccaggaggccggctggaacagcaatggctcctggagccctggccctggagagaggagcaacacccccaagcccctgcaccccaccatcacctgccacgagaaggtggtgaacatccagaaggaccccggggagagcctgggcatgacagtggccggcggggccagccaccgggagtgggacctgcccatctacgtgatctctgtggagcccggcggcgtcatcagcagagatggccgcatcaagacaggagacatcctgctgaatgtggatggagtggagctgacagaggtgagccgctctgaggccgtggccctgctgaagaggaccagcagcagcatcgtgctgaaggccctggaggtgaaggagtatgagccccaggaggactgcagcagccctgctgccctggacagcaaccacaacatggcccccccaagtgactggagccccagctgggtgatgtggctggagctgccccgctgcctgtacaactgcaaggacatcgtgctgcggaggaacacagctggcagcctgggcttctgcatcgtgggcggctatgaggagtacaatggaaacaagcccttcttcatcaagagcatcgtggagggcaccccagcctacaatgatggccgcatccgctgtggggacatcctgctggccgtgaatggccgcagcaccagcggcatgatccacgcctgcctggcccggctgctgaaggagctgaagggccgcatcaccctgaccatcgtgtcctggccaggcaccttcctgtag

SEQ ID NO: 157864 - DNA, 21 bp, synthetic construct
  misc_feature 1..21: note = Description of Artificial Sequence: Synthetic coding sequence
  source 1..21: mol_type = other DNA
atgaaccagcctgagagctag

SEQ ID NO: 157865 - DNA, 51 bp, synthetic construct
  misc_feature 1..51: note = Description of Artificial Sequence: Synthetic coding sequence
  source 1..51: mol_type = other DNA
atgaaccagcctgagagcgccaatgaccctgagcccctgtgtgctgtgtag

SEQ ID NO: 157866 - DNA, 300 bp, synthetic construct
  misc_feature 1..300: note = Description of Artificial Sequence: Synthetic coding sequence
  source 1..300: mol_type = other DNA
atgaaccagcctgagagcgccaatgaccctgagcccctgtgtgctgtgtgtggccaggcccacagcctggaggagaaccacttctacagctacccagaggaggtggatgatgacctgatctgccacatctgcctgcaggccctgctggaccccctggacaccccctgtggccacacctactgcaccctgtgcctgaccaacttcctggtggagaaggacttctgccccatggacaggaagcccctggtgctgcagcactgcaagaagagcagcatcctggtgaacaagctgctgaactag

SEQ ID NO: 157867 - DNA, 273 bp, synthetic construct
  misc_feature 1..273: note = Description of Artificial Sequence: Synthetic coding sequence
  source 1..273: mol_type = other DNA
atgaaccagcctgagagcgccaatgaccctgagcccctgtgtgctgtgtgtggccaggcccacagcctggaggagaaccacttctacagctacccagaggaggtggatgatgacctgatctgccacatctgcctgcaggccctgctggaccccctggacaccccctgtggccacacctactgcaccctgtgcctgaccaacttcctggtggagaaggacttctgccccatggacaggaagcccctggtgctgcagcactgcaagaagagctag

SEQ ID NO: 157868 - DNA, 381 bp, synthetic construct
  misc_feature 1..381: note = Description of Artificial Sequence: Synthetic coding sequence
  source 1..381: mol_type = other DNA
atgaaccagcctgagagcgccaatgaccctgagcccctgtgtgctgtgtgtggccaggcccacagcctggaggagaaccacttctacagctacccagaggaggtggatgatgacctgatctgccacatctgcctgcaggccctgctggaccccctggacaccccctgtggccacacctactgcaccctgtgcctgaccaacttcctggtggagaaggacttctgccccatggacaggaagcccctggtgctgcagcactgcaagaagagcagcatcctggtgaacaagctgctgaacaagctgctggtgacctgccccttccgggagcactgcacccaggtgctgcagagatgtgacctggagcaccacttccagacctag

SEQ ID NO: 157869 - DNA, 1701 bp, synthetic construct
  misc_feature 1..1701: note = Description of Artificial Sequence: Synthetic coding sequence
  source 1..1701: mol_type = other DNA
atggctgtgcagacagctgtgcgggccagccagccccggctgccccccctggacaacccagcctacgtgtcctctgcagaagatggccagcctgccatcagccctgtggacagcggccgcagcaacagaacccgggcccggccctttgagaggagcaccatccgcagccgctccttcaagaagatcaacagagccctgtctgtgctgcggaggaccaagagcggcagcgctgtggccaaccacgccgaccagggcagagaaaattctgagaacaccacagcccctgaggtgttcccccggctgtaccacctgatcccagatggagagatcaccagcatcaagatcaacagagtggaccccagcgagagcctgagcatccggctggtgggcggcagcgagacccccctggtgcacatcatcatccagcacatctacagagatggagtcatcgccagagatggccgcctgctgcccggggacatcatcctgaaggtgaatggcatggacatcagcaatgtgccccacaactatgctgtgcggctgctgcggcagccctgccaggtgctgtggctgactgtgatgagggagcagaagttccgcagcaggaacaacggccaggccccagatgcctaccggcccagagatgacagcttccacgtgatcctgaacaagagcagccctgaggagcagctgggcatcaagctggtgaggaaggtggatgagcccggggtcttcatcttcaacgtgctggatggaggagtggcctaccgccacggccagctggaggagaatgacagagtgctggccatcaatggacatgacctgcgctatggcagccctgagagcgctgcccacctgatccaggccagcgagcggcgggtgcacctggtggtgtcccggcaggtgcggcagaggagcccagacatcttccaggaggccggctggaacagcaatggctcctggagccctggccctggagagaggagcaacacccccaagcccctgcaccccaccatcacctgccacgagaaggtggtgaacatccagaaggaccccggggagagcctgggcatgacagtggccggcggggccagccaccgggagtgggacctgcccatctacgtgatctctgtggagcccggcggcgtcatcagcagagatggccgcatcaagacaggagacatcctgctgaatgtggatggagtggagctgacagaggtgagccgctctgaggccgtggccctgctgaagaggaccagcagcagcatcgtgctgaaggccctggaggtgaaggagtatgagccccaggaggactgcagcagccctgctgccctggacagcaaccacaacatggcccccccaagtgactggagccccagctgggtgatgtggctggagctgccccgctgcctgtacaactgcaaggacatcgtgctgcggaggaacacagctggcagcctgggcttctgcatcgtgggcggctatgaggagtacaatggaaacaagcccttcttcatcaagagcatcgtggagggcaccccagcctacaatgatggccgcatccgctgtggggacatcctgctggccgtgaatggccgcagcaccagcggcatgatccacgcctgcctggcccggctgctgaaggagctgaagggccgcatcaccctgaccatcgtgtcctggccaggcaccttcctgtag

SEQ ID NO: 157870 - DNA, 2073 bp, synthetic construct
  misc_feature 1..2073: note = Description of Artificial Sequence: Synthetic coding sequence
  source 1..2073: mol_type = other DNA
atgggcaccaccagtgatgagatggtgtctgtggagcagaccagcagcagcagcctgaaccccctgtgctttgaatgtggccagcagcactggacccgggagaaccacctgtacaactaccagaatgaggtggatgatgacctggtgtgccacatctgcctgcagcccctgctgcagcccctggacaccccctgtggccacaccttctgctacaagtgcctgaggaacttcctgcaggagaaggacttctgccccctggacaggaagaggctgcacttcaagctgtgcaagaagagcagcatcctggtgcacaagctgctggacaagctgctggtgctgtgccccttcagctctgtgtgcaaggatgtgatgcagagatgtgacctggaggcccacctgaagaaccgctgccctggggccagccacagaagagtggccctggagaggaggaagaccagcaggacccaggccgagattgaaaatgaaaatggccccaccctgctggaccctgctggcaccctgagccctgaggccgactgcctgggcactggagctgtgcctgtggagcggcacctgaccagcgccagcctgagcacctggagcgaggagcccggcctggacaacccagcctttgaggagagcgctggagctgacaccacccagcagcccctgagcctgcctgagggggagatcaccaccatcgagatccacaggagcaacccctacatccagctgggcatcagcatcgtgggcggcaatgagacccccctcatcaacatcgtcatccaggaggtgtacagagatggagtgattgccagagatggccgcctgctggccggggaccagatcctgcaggtgaacaactacaacatcagcaatgtgagccacaactatgcccgggctgtgctgagccagccctgcaacaccctgcacctgactgtgctgcgggagcggcgcttcggcaacagagcccacaaccacagcgacagcaacagcccccgggaggagatcttccaggtggccctgcacaagagggacagcggggagcagctgggcatcaagctggtgagaagaacagatgagcccggggtcttcatcctggacctgctggagggcggcctggccgcccaggacggccgcctgagcagcaatgacagagtgctggccatcaatggacatgacctgaagtatggcaccccagagctggccgcccagatcatccaggccagcggggagcgggtgaacctgaccatcgcccggcctgggaagccccagcccggcaacaccatccgggaggccggcaaccacagcagcagcagccagcaccacaccccaccaccctactacagccggcccagcagccacaaggacctgacccagtgtgtgacctgccaggagaagcacatcaccgtgaagaaggagccccatgagagcctgggcatgacagtggccggcggccggggcagcaagtctggagagctgcccatctttgtgacctctgtgcccccccacggctgcctggccagagatggccgcatcaagagaggagatgtgctgctgaacatcaatggaattgacctgaccaacctgagccacagcgaggccgtggccatgctgaaggccagcgctgccagccctgctgtggccctgaaggccctggaggtgcagatcgtggaggaggccacccagaatgctgaggagcagcccagcaccttctctgaaaatgaatatgatgcctcctggagccccagctgggtgatgtggctgggcctgcccagcaccctgcacagctgccacgacatcgtgctgcggcgcagctacctgggctcctggggcttcagcatcgtgggcggctatgaggagaaccacaccaaccagcccttcttcatcaagaccatcgtgctgggcaccccagcctactatgatggccgcctgaagtgtggggacatgattgtggccgtgaatggcctgagcacagtgggcatgagccacagcgccctggtgcccatgctgaaggagcagaggaacaaggtgaccctgaccgtcatctgctggccaggcagcctggtgtag

SEQ ID NO: 157871 - DNA, 2115 bp, synthetic construct
  misc_feature 1..2115: note = Description of Artificial Sequence: Synthetic coding sequence
  source 1..2115: mol_type = other DNA
atgctgggcatctgccggggccgcaggaagttcctggccgccagcctgagcctgctgtgcatcccagccatcacctggatctacctgttcagcggcagctttgaagatggcaagcctgtgtccctgagccccctggagagccaggcccacagcccccgctacacagccagcagccagcgggagcgggagagcctggaggtgaggatgagggaggtggaggaggagaacagagccctgcggcggcagctgagcctggcccagggccgggcccccagccaccggcggggcaaccacagcaagacctacagcatggaggagggcaccggggacagcgagaacctgcgggccggcatcgtggccggcaacagcagtgaatgtggccagcagcctgtggtggagaagtgtgagaccatccacgtggccatcgtgtgtgccggctacaatgccagcagagatgtggtgaccctggtgaagtctgtgctcttccacagaagaaaccccctgcacttccacctgattgctgacagcattgctgagcagatcctggccaccctcttccagacctggatggtgcctgctgtgcgggtggacttctacaatgctgatgagctgaagtctgaggtgtcctggatccccaacaagcactacagcggcatctacggcctgatgaagctggtgctgaccaagaccctgcctgccaacctggagcgggtgattgtgctggacacagacatcacctttgccacagacattgctgagctgtgggccgtgttccacaagttcaagggccagcaggtgctgggcctggtggagaaccagagcgactggtacctgggcaacctgtggaagaaccaccggccctggccagccctgggccggggctacaacacaggagtcatcctgctgctgctggacaagctgaggaagatgaagtgggagcagatgtggaggctgacagctgagcgggagctgatgggcatgctgagcaccagcctggccgaccaggacatcttcaatgctgtgatcaagcagaaccccttcctggtgtaccagctgccctgcttctggaatgtgcagctgagtgaccacaccaggtctgagcagtgctacagagatgtgtctgacctgaagctgcagaagcagctgtctgagctggatgaagatgacctgtgctatgagttcagaagagagcgcttcaccgtgcacaggacccacctgtacttcctgcactatgaatatgagcctgctgctgacagcacagatgtgaccctggtggcccagctgtccatggaccggctgcagatgctggaggccatctgcaagcactgggagggccccatcagcctggccctgtacctgagtgatgctgaggcccagcagttcctgcgctatgcccagggcagcgaggtgctgatgagccgccacaacgtgggctaccacatcgtgtacaaggagggccagttctaccctgtgaacctgctgagaaatgtggccatgaagcacatcagcaccccctacatgttcctgagtgacatcgacttcctgcccatgtatggcctgtatgagtacctgaggaagagcgtcatccagctggacctggccaacaccaagaaggccatgattgtgcctgcctttgagaccctgcgctaccgcctgtccttccccaagagcaaggccgagctgctgtccatgctggacatgggcaccctcttcaccttccgctaccacgtgtggaccaagggccacgcccccaccaactttgccaagtggaggacagccaccaccccctacagagtggagtgggaggccgactttgagccctacgtggtggtgcggcgggactgcccagaatatgacagaagatttgtgggcttcggctggaacaaggtggcccacatcatggagctggatgtgcaggagtatgagttcatcgtgctgcccaatgcctacatgatccacatgccccacgcccccagctttgacatcaccaagttccgcagcaacaagcagtaccgcatctgcctgaagaccctgaaggaggagttccagcaggacatgagccgccgctatggctttgctgccctgaagtacctgacagctgagaacaacagctag

SEQ ID NO: 157872 - DNA, 2271 bp, synthetic construct
  misc_feature 1..2271: note = Description of Artificial Sequence: Synthetic coding sequence
  source 1..2271: mol_type = other DNA
atgctgggcatctgccggggccgcaggaagttcctggccgccagcctgagcctgctgtgcatcccagccatcacctggatctacctgttcagcggcagctttgaagatggcaagcctgtgtccctgagccccctggagagccaggcccacagcccccgctacacagccagcagccagcgggagcgggagagcctggaggtgaggatgagggaggtggaggaggagaacagagccctgcggcggcagctgagcctggcccagggccgggcccccagccaccggcggggcaaccacagcaagacctacagcatggaggagggcaccggggacagcgagaacctgcgggccggcatcgtggccggcaacagcagtgaatgtggccagcagcctgtggtggagaagtgtgagaccatccacgtggccatcgtgtgtgccggctacaatgccagcagagatgtggtgaccctggtgaagtctgtgctcttccacagaagaaaccccctgcacttccacctgattgctgacagcattgctgagcagatcctggccaccctcttccagacctggatggtgcctgctgtgcgggtggacttctacaatgctgatgagctgaagtctgaggtgtcctggatccccaacaagcactacagcggcatctacggcctgatgaagctggtgctgaccaagaccctgcctgccaacctggagcgggtgattgtgctggacacagacatcacctttgccacagacattgctgagctgtgggccgtgttccacaagttcaagggccagcaggtgctgggcctggtggagaaccagagcgactggtacctgggcaacctgtggaagaaccaccggccctggccagccctgggccggggctacaacacaggagtcatcctgctgctgctggacaagctgaggaagatgaagtgggagcagatgtggaggctgacagctgagcgggagctgatgggcatgctgagcaccagcctggccgaccaggacatcttcaatgctgtgatcaagcagaaccccttcctggtgtaccagctgccctgcttctggaatgtgcagctgagtgaccacaccaggtctgagcagtgctacagagatgtgtctgacctgaaggtgatccactggaacagccccaagaagctgcgggtgaagaacaagcacgtggagttcttcaggaacctgtacctgaccttcctggagtatgatggcaacctgctgcggcgggagctgtttggctgccccagcgaggctgatgtgaacagcgagaacctgcagaagcagctgtctgagctggatgaagatgacctgtgctatgagttcagaagagagcgcttcaccgtgcacaggacccacctgtacttcctgcactatgaatatgagcctgctgctgacagcacagatgtgaccctggtggcccagctgtccatggaccggctgcagatgctggaggccatctgcaagcactgggagggccccatcagcctggccctgtacctgagtgatgctgaggcccagcagttcctgcgctatgcccagggcagcgaggtgctgatgagccgccacaacgtgggctaccacatcgtgtacaaggagggccagttctaccctgtgaacctgctgagaaatgtggccatgaagcacatcagcaccccctacatgttcctgagtgacatcgacttcctgcccatgtatggcctgtatgagtacctgaggaagagcgtcatccagctggacctggccaacaccaagaaggccatgattgtgcctgcctttgagaccctgcgctaccgcctgtccttccccaagagcaaggccgagctgctgtccatgctggacatgggcaccctcttcaccttccgctaccacgtgtggaccaagggccacgcccccaccaactttgccaagtggaggacagccaccaccccctacagagtggagtgggaggccgactttgagccctacgtggtggtgcggcgggactgcccagaatatgacagaagatttgtgggcttcggctggaacaaggtggcccacatcatggagctggatgtgcaggagtatgagttcatcgtgctgcccaatgcctacatgatccacatgccccacgcccccagctttgacatcaccaagttccgcagcaacaagcagtaccgcatctgcctgaagaccctgaaggaggagttccagcaggacatgagccgccgctatggctttgctgccctgaagtacctgacagctgagaacaacagctag

SEQ ID NO: 157873 - DNA, 2271 bp, synthetic construct; identical to SEQ ID NO: 157872
  misc_feature 1..2271: note = Description of Artificial Sequence: Synthetic coding sequence
  source 1..2271: mol_type = other DNA

SEQ ID NO: 157874 - DNA, 2115 bp, synthetic construct; identical to SEQ ID NO: 157871
  misc_feature 1..2115: note = Description of Artificial Sequence: Synthetic coding sequence
  source 1..2115: mol_type = other DNA

SEQ ID NO: 157875 - DNA, 408 bp, synthetic construct
  misc_feature 1..408: note = Description of Artificial Sequence: Synthetic coding sequence
  source 1..408: mol_type = other DNA
atgctgggcatctgccggggccgcaggaagttcctggccgccagcctgagcctgctgtgcatcccagccatcacctggatctacctgttcagcggcagctttgaagatggcaagcctgtgtccctgagccccctggagagccaggcccacagcccccgctacacagccagcagccagcgggagcgggagagcctggaggtgaggatgagggaggtggaggaggagaacagagccctgcggcggcagctgagcctggcccagggccgggcccccagccaccggcggggcaaccacagcaagacctacagcatggaggagggcaccggggacagcgagaacctgcgggccggcatcgtggccggcaacagcagtgaatgtggccagcagcctgtggtggagaagtgctag

SEQ ID NO: 157876 - DNA, 144 bp, synthetic construct
  misc_feature 1..144: note = Description of Artificial Sequence: Synthetic coding sequence
  source 1..144: mol_type = other DNA
atgctgggcatctgccggggccgcaggaagttcctggccgccagcctgagcctgctgtgcatcccagccatcacctggatctacctgttcagcggcagctttgaagatggcaagcctgtgtccctgagccccctggagagctag

SEQ ID NO: 157877 - DNA, 411 bp, synthetic construct
  misc_feature 1..411: note = Description of Artificial Sequence: Synthetic coding sequence
  source 1..411: mol_type = other DNA
atgctgggcatctgccggggccgcaggaagttcctggccgccagcctgagcctgctgtgcatcccagccatcacctggatctacctgttcagcggcagctttgaagatggcaagcctgtgtccctgagccccctggagagccaggcccacagcccccgctacacagccagcagccagcgggagcgggagagcctggaggtgaggatgagggaggtggaggaggagaacagagccctgcggcggcagctgagcctggcccagggccgggcccccagccaccggcggggcaaccacagcaagacctacagcatggaggagggcaccggggacagcgagaacctgcgggccggcatcgtggccggcaacagcagtgaatgtggccagcagcctgtggtggagaagtgtgagtag

SEQ ID NO: 157878 - DNA, 183 bp, synthetic construct
  misc_feature 1..183: note = Description of Artificial Sequence: Synthetic coding sequence
  source 1..183: mol_type = other DNA
atgctgggcatctgccggggccgcaggaagttcctggccgccagcctgagcctgctgtgcatcccagccatcacctggatctacctgttcagcggcagctttgaagatggcaagcctgtgtccctgagccccctggagagccaggcccacagcccccgctacacagccagcagccagaggtag

SEQ ID NO: 157879 - DNA, 330 bp, synthetic construct
  misc_feature 1..330: note = Description of Artificial Sequence: Synthetic coding sequence
  source 1..330: mol_type = other DNA
atgctgggcatctgccggggccgcaggaagttcctggccgccagcctgagcctgctgtgcatcccagccatcacctggatctacctgttcagcggcagctttgaagatggcaagcctgtgtccctgagccccctggagagccaggcccacagcccccgctacacagccagcagccagcgggagcgggagagcctggaggtgaggatgagggaggtggaggaggagaacagagccctgcggcggcagctgagcctggcccagggccgggcccccagccaccggcggggcaaccacagcaagacctacagcatggaggagggcaccggctag

SEQ ID NO: 157880 - DNA, 2124 bp, synthetic construct
  misc_feature 1..2124: note = Description of Artificial Sequence: Synthetic coding sequence
  source 1..2124: mol_type = other DNA
atgctgggcatctgccggggccgcaggaagttcctggccgccagcctgagcctgctgtgcatcccagccatcacctggatctacctgttcagcggcagctttgaagatggcaagcctgtgtccctgagccccctggagagccaggcccacagcccccgctacacagccagcagccagcgggagcgggagagcctggaggtgaggatgagggaggtggaggaggagaacagagccctgcggcggcagctgagcctggcccagggccgggcccccagccaccggcggggcaaccacagcaagacctacagcatggaggagggcaccggggacagcgagaacctgcgggccggcatcgtggccggcaacagcagtgaatgtggccagcagcctgtggtggagaagtgtgagaccatccacgtggccatcgtgtgtgccggctacaatgccagcagagatgtggtgaccctggtgaagtctgtgctcttccacagaagaaaccccctgcacttccacctgattgctgacagcattgctgagcagatcctggccaccctcttccagacctggatggtgcctgctgtgcgggtggacttctacaatgctgatgagctgaagtctgaggtgtcctggatccccaacaagcactacagcggcatctacggcctgatgaagctggtgctgaccaagaccctgcctgccaacctggagcgggtgattgtgctggacacagacatcacctttgccacagacattgctgagctgtgggccgtgttccacaagttcaagggccagcaggtgctgggcctggtggagaaccagagcgactggtacctgggcaacctgtggaagaaccaccggccctggccagccctgggccggggctacaacacaggagtcatcctgctgctgctggacaagctgaggaagatgaagtgggagcagatgtggaggctgacagctgagcgggagctgatgggcatgctgagcaccagcctggccgaccaggacatcttcaatgctgtgatcaagcagaaccccttcctggtgtaccagctgccctgcttctggaatgtgcagctgagtgaccacaccaggtctgagcagtgctacagagatgtgtctgacctgaaggtgatccactggaacagccccaagaagctgcgggtgaagaacaagcacgtggagttcttcaggaacctgtacctgaccttcctggagtatgatggcaacctgctgcggcgggagctgtttggctgccccagcgaggctgatgtgaacagcgagaacctgcagaagcagctgtctgagctggatgaagatgacctgtgctatgagttcagaagagagcgcttcaccgtgcacaggacccacctgtacttcctgcactatgaatatgagcctgctgctgacagcacagatgtgaccctggtggcccagctgtccatggaccggctgcagatgctggaggccatctgcaagcactgggagggccccatcagcctggccctgtacctgagtgatgctgaggcccagcagttcctgcgctatgcccagggcagcgaggtgctgatgagccgccacaacgtgggctaccacatcgtgtacaaggagggccagttctaccctgtgaacctgctgagaaatgtggccatgaagcacatcagcaccccctacatgttcctgagtgacatcgacttcctgcccatgtatggcctgtatgagtacctgcgctaccacgtgtggaccaagggccacgcccccaccaactttgccaagtggaggacagccaccaccccctacagagtggagtgggaggccgactttgagccctacgtggtggtgagaagagactgcccagaatatgacagaagatttgtgggcttcggctggaacaaggtggcccacatcatggagctggatgtgcaggagtatgagttcatcgtgctgcccaatgcctacatgatccacatgcctcatgcccccagctttgacatcaccaagttccgcagcaacaagcagtaccgcatctgcctgaagaccctgaaggaggagttccagcaggacatgagcagaagatatggctttgctgccctgaagtacctgacagctgagaacaacagctag

SEQ ID NO: 157881 - DNA, 1668 bp, synthetic construct
  misc_feature 1..1668: note = Description of Artificial Sequence: Synthetic coding sequence
  source 1..1668: mol_type = other DNA
atgctgatctggagcgaggtgtcctggatccccaacaagcactacagcggcatctacggcctgatgaagctggtgctgaccaagaccctgcctgccaacctggagagggtcatcgtgctggacacagacatcacctttgccacagacattgctgagctgtgggccgtgttccacaagttcaagggccagcaggtgctgggcctggtggagaaccagagcgactggtacctgggcaacctgtggaagaaccaccggccctggccagccctgggccggggctacaacacaggagtcatcctgctgctgctggacaagctgaggaagatgaagtgggagcagatgtggaggctgacagctgagcgggagctgatgggcatgctgagcaccagcctggccgaccaggacatcttcaatgctgtgatcaagcagaaccccttcctggtgtaccagctgccctgcttctggaatgtgcagctgagtgaccacaccaggtctgagcagtgctacagagatgtgtctgacctgaaggtgatccactggaacagccccaagaagctgcgggtgaagaacaagcacgtggagttcttcaggaacctgtacctgaccttcctggagtatgatggcaacctgctgcggcgggagctgtttggctgccccagcgaggctgatgtgaacagcgagaacctgcagaagcagctgtctgagctggatgaagatgacctgtgctatgagttccggcgggagcgcttcaccgtgcacaggacccacctgtacttcctgcactatgaatatgagcctgctgctgacagcacagatgtgaccctggtggcccagctgtccatggaccggctgcagatgctggaggccatctgcaagcactgggagggccccatcagcctggccctgtacctgagtgatgctgaggcccagcagttcctgcgctatgcccagggcagcgaggtgctgatgagccgccacaacgtgggctaccacatcgtgtacaaggagggccagttctaccctgtgaacctgctgagaaatgtggccatgaagcacatcagcaccccctacatgttcctgagtgacatcgacttcctgcccatgtatggcctgtatgagtacctgaggaagagcgtcatccagctggacctggccaacaccaagaaggccatgattgtgcctgcctttgagaccctgcgctaccgcctgtccttccccaagagcaaggccgagctgctgtccatgctggacatgggcaccctcttcaccttccgctaccacgtgtggaccaagggccacgcccccaccaactttgccaagtggaggacagccaccaccccctacagagtggagtgggaggccgactttgagccctacgtggtggtgagaagagactgcccagaatatgacagaagatttgtgggcttcggctggaacaaggtggcccacatcatggagctggatgtgcaggagtatgagttcatcgtgctgcccaatgcctacatgatccacatgcctcatgcccccagctttgacatcaccaagttccgcagcaacaagcagtaccgcatctgcctgaagaccctgaaggaggagttccagcaggacatgagcagaagatatggctttgctgccctgaagtacctgacagctgagaacaacagctag

SEQ ID NO: 157882 - DNA, 1098 bp, synthetic construct
  misc_feature 1..1098: note = Description of Artificial Sequence: Synthetic coding sequence
  source 1..1098: mol_type = other DNA
atggccaaggtggccaaggacctgaaccctggggtgaagaagatgagcctgggccagctgcagagcgcccggggcgtggcctgcctgggctgcaagggcacctgcagcggctttgagccccacagctggaggaagatctgcaagagctgcaagtgcagccaggaggaccactgcctgaccagtgacctggaggatgacaggaagattggccgcctgctgatggacagcaagtacagcaccctgacagcccgggtgaagggaggagatggcatccgcatctacaagaggaacaggatgatcatgaccaaccccatcgccaccgggaaggaccccacctttgacaccatcacctatgagtgggcccctcctggggtgacccagaagctgggcctgcagtacatggagctgatccccaaggagaagcagcctgtgactggaacagaaggagccttctacagaagacggcagctgatgcaccagctgcccatctatgaccaggaccccagccgctgccggggcctgctggagaatgagctgaagctgatggaggagtttgtgaagcagtacaagtctgaggccctgggcgtgggggaggtggccctgcccggccagggcggcctgcccaaggaggagggcaagcagcaggagaagccagagggcgctgagaccacagctgccaccaccaacggcagcctgagtgaccccagcaaggaggtggagtatgtgtgtgagctgtgcaagggagctgcccccccagacagccctgtggtgtacagcgaccgggccggctacaacaagcagtggcaccccacctgctttgtgtgtgccaagtgcagcgagcccctggtggacctgatctacttctggaaggatggagccccctggtgtggccgccactactgtgagagcctgcggccccgctgcagcggctgtgatgagatcatctttgctgaggactaccagagggtggaggacctggcctggcacaggaagcactttgtgtgtgagggctgtgagcagctgctgagcggccgggcctacatcgtgaccaagggccagctgctgtgccccacctgcagcaagagcaagaggagctag

SEQ ID NO: 157883 - DNA, 762 bp, synthetic construct
  misc_feature 1..762: note = Description of Artificial Sequence: Synthetic coding sequence
  source 1..762: mol_type = other DNA
atgtttggcatgcagggagatgtgtttggcctgcgggccaccttcatggagggcctgcagtacatggagctgatccccaaggagaagcagcctgtgactggaacagaaggagccttctacagaagacggcagctgatgcaccagctgcccatctatgaccaggaccccagccgctgccggggcctgctggagaatgagctgaagctgatggaggagtttgtgaagcagtacaagtctgaggccctgggcgtgggggaggtggccctgcccggccagggcggcctgcccaaggaggagggcaagcagcaggagaagccagagggcgctgagaccacagctgccaccaccaacggcagcctgagtgaccccagcaaggaggtggagtatgtgtgtgagctgtgcaagggagctgcccccccagacagccctgtggtgtacagcgaccgggccggctacaacaagcagtggcaccccacctgctttgtgtgtgccaagtgcagcgagcccctggtggacctgatctacttctggaaggatggagccccctggtgtggccgccactactgtgagagcctgcggccccgctgcagcggctgtgatgagatcatctttgctgaggactaccagagggtggaggacctggcctggcacaggaagcactttgtgtgtgagggctgtgagcagctgctgagcggccgggcctacatcgtgaccaagggccagctgctgtgccccacctgcagcaagagcaagaggagctag

SEQ ID NO: 157884 - DNA, 879 bp, synthetic construct
  misc_feature 1..879: note = Description of Artificial Sequence: Synthetic coding sequence
  source 1..879: mol_type = other DNA
atggacagcaagtacagcaccctgacagcccgggtgaagggaggagatggcatccgcatctacaagaggaacaggatgatcatgaccaaccccatcgccaccgggaaggaccccacctttgacaccatcacctatgagtgggcccctcctggggtgacccagaagctgggcctgcagtacatggagctgatccccaaggagaagcagcctgtgactggaacagagggcgccttctacagaagacggcagctgatgcaccagctgcccatctatgaccaggaccccagccgctgccggggcctgctggagaatgagctgaagctgatggaggagtttgtgaagcagtacaagtctgaggccctgggcgtgggggaggtggccctgcccggccagggcggcctgcccaaggaggagggcaagcagcaggagaagccagagggcgctgagaccacagctgccaccaccaacggcagcctgagtgaccccagcaaggaggtggagtatgtgtgtgagctgtgcaagggggccgcccccccagacagccctgtggtgtacagcgacagagctggctacaacaagcagtggcaccccacctgctttgtgtgtgccaagtgcagcgagcccctggtggacctgatctacttctggaaggatggagccccctggtgtggccgccactactgtgagagcctgcggccccgctgcagcggctgtgatgagatcatctttgctgaggactaccagagggtggaggacctggcctggcacaggaagcactttgtgtgtgagggctgtgagcagctgctgagcggccgggcctacatcgtgaccaagggccagctgctgtgccccacctgcagcaagagcaagaggagctag

SEQ ID NO: 157885 - DNA, 744 bp, synthetic construct
  misc_feature 1..744: note = Description of Artificial Sequence: Synthetic coding sequence
  source 1..744: mol_type = other DNA
atggccaaggtggccaaggacctgaaccctggggtgaagaagatgagcctgggccagctgcagagcgcccggggcgtggcctgcctgggctgcaagggcacctgcagcggctttgagccccacagctggaggaagatctgcaagagctgcaagtgcagccaggaggaccactgcctgaccagtgacctggaggatgacaggaagattggccgcctgctgatggacagcaagtacagcaccctgacagcccgggtgaagggaggagatggcatccgcatctacaagaggaacaggatgatcatgaccaaccccatcgccaccgggaaggaccccacctttgacaccatcacctatgagtgggcccctcctggggtgacccagaagctgggcctgcagtacatggagctgatccccaaggagaagcagcctgtgactggaacagaaggagccttctacagaagacggcagctgatgcaccagctgcccatctatgaccaggaccccagccgctgccggggcctgctggagaatgagctgaagctgatggaggagtttgtgaagcagtacaagtctgaggccctgggcgtgggggaggtggccctgcccggccagggcggcctgcccaaggaggagggcaagcagcaggagaagccagagggcgctgagaccacagctgccaccaccaacggcagcctgagtgaccccagcaaggaggtggagtacaagcctgtgcccctggtgtag

SEQ ID NO: 157886 - DNA, 786 bp, synthetic construct
  misc_feature 1..786: note = Description of Artificial Sequence: Synthetic coding sequence
  source 1..786: mol_type = other DNA
atgaaccccaactgtgcccgctgtgggaagatcgtgtaccccacagagaaggtgaactgcctggacaagttctggcacaaggcctgcttccactgtgagacctgcaagatgaccctgaacatgaagaactacaagggctatgagaagaagccctactgcaatgcccactaccccaagcagagcttcaccatggtggccgacaccccagagaacctgcggctgaagcagcagagcgagctgcagagccaggtgcgctacaaggaggagtttgagaagaacaagggcaagggcttctctgtggtggccgacaccccagagctgcagaggatcaagaagacccaggaccagatcagcaacatcaagtaccacgaggagtttgagaagagcaggatgggccccagcggcggggagggcatggagcctgagcggcgggacagccaggacggcagcagctacagaagacccctggagcagcagcagccccaccacatccccaccagcgcccctgtgtaccagcagccccagcagcagcctgtggcccagagctatggaggctacaaggagcctgctgcccctgtgtccatccagaggtctgcccctgggggcggcggcaagcgctacagagctgtgtatgactacagcgctgctgatgaagatgaggtgtccttccaggatggagacaccatcgtgaatgtgcagcagattgatgatggctggatgtatggaacagtggagaggactggagacaccggcatgctgcctgccaactacgtggaggccatctag

SEQ ID NO: 157887 - DNA, 501 bp, synthetic construct
  misc_feature 1..501: note = Description of Artificial Sequence: Synthetic coding sequence
  source 1..501: mol_type = other DNA
atgaccctgaacatgaagaactacaagggctatgagaagaagccctactgcaatgcccactaccccaagcagagcttcaccatggtggccgacaccccagagaacctgcggctgaagcagcagagcgagctgcagagccaggtgcgctacaaggaggagtttgagaagaacaagggcaagggcttctctgtggtggccgacaccccagagctgcagaggatcaagaagacccaggaccagatcagcaacatcaagtaccacgaggagtttgagaagagcaggatgggccccagcggcggggagggcatggagcctgagcggcgggacagccaggacggcagcagctacagaagacccctggagcagcagcagccccaccacatccccaccagcgcccctgtgtaccagcagccccagcagcagcctgtggcccagagctatggaggctacaaggagcctgctgcccctgtgtccatccagaggtctgcccctgggggctag

SEQ ID NO: 157888 - DNA, 618 bp, synthetic construct
  misc_feature 1..618: note = Description of Artificial Sequence: Synthetic coding sequence
  source 1..618: mol_type = other DNA
atgctgcccctgcgggacctgcaggatgacacagaacatgaggagctgcagggcctgcgggaggaggccctgctgcagagggtgcgctacaaggaggagtttgagaagaacaagggcaagggcttctctgtggtggccgacaccccagagctgcagaggatcaagaagacccaggaccagatcagcaacatcaagtaccacgaggagtttgagaagagcaggatgggccccagcggcggggagggcatggagcctgagcggcgggacagccaggacggcagcagctacagaagacccctggagcagcagcagccccaccacatccccaccagcgcccctgtgtaccagcagccccagcagcagcctgtggcccagagctatggaggctacaaggagcctgctgcccctgtgtccatccagaggtctgcccctgggggcggcggcaagcgctacagagctgtgtatgactacagcgctgctgatgaagatgaggtgtccttccaggatggagacaccatcgtgaatgtgcagcagattgatgatggctggatgtatggaacagtggagaggactggagacaccggcatgctgcctgccaactacgtggaggccatctag

SEQ ID NO: 157889 - DNA, 786 bp, synthetic construct; identical to SEQ ID NO: 157886
  misc_feature 1..786: note = Description of Artificial Sequence: Synthetic coding sequence
  source 1..786: mol_type = other DNA

SEQ ID NO: 157890 - DNA, 378 bp, synthetic construct
  misc_feature 1..378: note = Description of Artificial Sequence: Synthetic coding sequence
  source 1..378: mol_type = other DNA
atgaaccccaactgtgcccgctgtgggaagatcgtgtaccccacagagaaggtgaactgcctggacaagttctggcacaaggcctgcttccactgtgagacctgcaagatgaccctgaacatgaagaactacaagggctatgagaagaagccctactgcaatgcccactaccccaagcagagcttcaccatggtggccgacaccccagagaacctgcggctgaagcagcagagcgagctgcagagccaggtgcgctacaaggaggagtttgagaagaacaagggcaagggcttctctgtggtggccgacaccccagagctgcagaggagcagcctgggcttcctgtggaatgagatcccccccagcccccacctgtag

SEQ ID NO: 157891 - DNA, 4050 bp, synthetic construct
  misc_feature 1..4050: note = Description of Artificial Sequence: Synthetic coding sequence
  source 1..4050: mol_type = other DNA
atgaagaagatccgcatctgccacatcttcaccttctacagctggatgtcctatgatgtgctcttccagaggacagagctgggcgccctggagatctggaggcagctgatctgtgcccacgtgtgcatctgtgtgggctggctgtacctgcgggacagagtgtgcagcaagaaggacatcatcctgaggacagagcagaacagcggccgcaccatcctgatcaaggctgtgacagagaagaactttgagaccaaggacttccgggccagcctggagaatggagtgctgctgtgtgacctgatcaacaagctgaagccaggagtcatcaagaagatcaaccggctgagcacccccatcgccggcctggacaacatcaacgtgttcctgaaggcctgtgagcagatcggcctgaaggaggcccagctgttccaccctggggacctgcaggacctgagcaacagagtgacagtgaagcaggaggagacagaccggcgggtgaagaatgtgctgatcaccctgtactggctgggcaggaaggcccagagcaacccctactacaacggcccccacctgaacctgaaggcctttgagaacctgctgggccaggccctgaccaaggccctggaggacagcagcttcctgaagaggagcggccgggacagcggctatggagacatctggtgcccagagcggggggagttcctggccccacccaggcaccacaagcgggaggacagctttgagagcctggacagcctgggcagccgcagcctgaccagctgcagcagtgacatcaccctgcggggcggccgggagggctttgaaagtgacacagacagcgagttcaccttcaagatgcaggactacaacaaggatgacatgagctaccgccgcatctctgctgtggagcccaagacagccctgcccttcaaccgcttcctgcccaacaagagccggcagcccagctatgtgcctgcccccctgaggaagaagaagccagacaagcatgaggacaacagaagatcctgggccagccctgtgtacacagaagcagatggcaccttcagccgcctcttccagaagatctatggagaaaatggcagcaagtccatgtctgatgtgtctgcagaagatgtgcagaacctgcggcagctgcgctatgaggagatgcagaagatcaagagccagctgaaggagcaggaccagaagtggcaggatgacctggccaagtggaaggacaggaggaagagctacaccagtgacctgcagaagaagaaggaggagcgggaggagattgagaagcaggccctggagaagagcaagaggagcagcaagaccttcaaggagatgctgcaggaccgggagagccagaaccagaagagcacagtgcccagcagaagaaggatgtacagctttgatgatgtgctggaggagggcaagaggcctcccaccatgacagtgtctgaggccagctaccagagcgagcgggtggaggagaagggggccacctaccccagcgagatccccaaggaggacagcaccacctttgccaagcgggaggacagagtgaccacagagatccagctgcccagccagagccctgtggaggagcagagccctgccagcctgagcagcctgcggagccgcagcacccagatggagagcaccagggtgtctgccagcctgcccaggagctacaggaagacagacacagtgcggctgacctctgtggtgaccccccggcccttcggcagccagacccggggcatcagcagcctgcccaggagctacaccatggatgatgcctggaagtacaatggagatgtggaggacatcaagaggacccccaacaacgtggtgtccaccccagcccccagcccagatgccagccagctggccagcagcctgagcagccagaaggaggtggccgccacagaagaagatgtgacccggctgcccagccccaccagccccttcagcagcctgagccaggaccaggccgccaccagcaaggccaccctgagcagcaccagcggcctggacctgatgtctgagagcggggagggggagatcagcccccagcgggaggtgagccgcagccaggaccagttcagtgacatgaggatcagcatcaaccagaccccaggcaagagcctggactttggcttcaccatcaagtgggacatccctggcatctttgtggcctctgtggaggccggcagccctgctgagttcagccagctgcaggtggatgatgagatcatcgccatcaacaacaccaagttctcctacaatgacagcaaggagtgggaggaggccatggccaaggcccaggagaccggccacctggtgatggatgtgcggcgctatggcaaggccggcagccctgagaccaagtggattgatgccaccagcggcatctacaacagcgagaagagcagcaacctgtctgtgaccacagacttcagcgagagcctgcagagcagcaacatcgagagcaaggagatcaatggcatccatgatgagagcaatgcctttgagagcaaggccagcgagagcatcagcctgaagaacctgaagagaagaagccagttctttgagcagggcagcagtgacagcgtggtgcctgacctgcctgtgcccaccatcagcgcccccagccgctgggtgtgggaccaggaggaggagaggaagaggcaggagcgctggcagaaggagcaggaccggctgctgcaggagaagtaccagcgggagcaggagaagctgcgggaggagtggcagagggccaagcaggaggccgagcgggagaacagcaagtacctggatgaggagctgatggtgctgagcagcaacagcatgagcctgaccacccgggagcccagcctggccacctgggaggccacctggagcgagggcagcaagagcagtgaccgggagggcaccagggctggggaggaggagcggcggcagccccaggaggaggtggtgcatgaggaccagggcaagaagccccaggaccagctggtgattgaaagagagaggaagtgggagcagcagctgcaggaggagcaggagcagaagaggctgcaggccgaggccgaggagcagaagaggcctgctgaggagcagaagaggcaggccgagattgagcgggagacctctgtgcgcatctaccagtacagaagacctgtggacagctatgacatccccaagacagaggaggccagcagcggcttcctgcccggggacaggaacaagagccgcagcaccacagagctggatgactacagcaccaacaagaatggaaacaacaagtacctggaccagatcggcaacatgaccagcagccagaggaggagcaagaaggagcaggtgcccagcggggctgagctggagcggcagcagatcctgcaggagatgaggaagaggacccccctgcacaatgacaacagctggatccggcagaggtctgcctctgtgaacaaggagcctgtgtccctgcccggcatcatgagaagaggagagagcctggacaacctggacagccccaggagcaacagctggaggcagcccccctggctgaaccagcccaccggcttctacgccagcagctctgtgcaggacttcagccggcccccaccccagctggtgtccaccagcaacagagcctacatgaggaaccccagcagctctgtgcccccacccagcgctggctctgtgaagaccagcaccactggagtggccaccacccagagccccacccccaggagccacagccccagcgccagccagagcggcagccagctgaggaacagatctgtgtctgggaagaggatctgcagctactgcaacaacatcctgggcaaaggagctgccatgatcatcgagagcctgggcctgtgctaccacctgcactgcttcaagtgtgtggcctgtgaatgtgacctgggcggcagcagcagtggagctgaggtgcgcatccggaaccaccagctgtactgcaatgactgctacctgcgcttcaagagcggccggcccacagccatgtag

SEQ ID NO: 157892 - DNA, 5013 bp, synthetic construct
  misc_feature 1..5013: note = Description of Artificial Sequence: Synthetic coding sequence
  source 1..5013: mol_type = other DNA
atgaagaagatccgcatctgccacatcttcaccttctacagctggatgtcctatgatgtgctcttccagaggacagagctgggcgccctggagatctggaggcagctgatctgtgcccacgtgtgcatctgtgtgggctggctgtacctgcgggacagagtgtgcagcaagaaggacatcatcctgaggacagagcagaacagcggccgcaccatcctgatcaaggctgtgacagagaagaactttgagaccaaggacttccgggccagcctggagaatggagtgctgctgtgtgacctgatcaacaagctgaagccaggagtcatcaagaagatcaaccggctgagcacccccatcgccggcctggacaacatcaacgtgttcctgaaggcctgtgagcagatcggcctgaaggaggcccagctgttccaccctggggacctgcaggacctgagcaacagagtgacagtgaagcaggaggagacagaccggcgggtgaagaatgtgctgatcaccctgtactggctgggcaggaaggcccagagcaacccctactacaacggcccccacctgaacctgaaggcctttgagaacctgctgggccaggccctgaccaaggccctggaggacagcagcttcctgaagaggagcggccgggacagcggctatggagacatctggtgcccagagcggggggagttcctggccccacccaggcaccacaagcgggaggacagctttgagagcctggacagcctgggcagccgcagcctgaccagctgcagcagtgacatcaccctgcggggcggccgggagggctttgaaagtgacacagacagcgagttcaccttcaagatgcaggactacaacaaggatgacatgagctaccgccgcatctctgctgtggagcccaagacagccctgcccttcaaccgcttcctgcccaacaagagccggcagcccagctatgtgcctgcccccctgaggaagaagaagccagacaagcatgaggacaacagaagatcctgggccagccctgtgtacacagaagcagatggcaccttcagcagcaaccagaggcgcatctggggcaccaacgtggagaactggcccaccgtgcagggcaccagcaagagcagctgctacctggaggaggagaaggccaagaccaggagcatccccaacatcgtgaaggatgacctgtatgtgaggaagctgagccctgtgatgcccaaccctggaaatgcctttgaccagttcctgcccaagtgctggaccccagaagatgtgaactggaagaggatcaagcgggagacctacaagccctggtacaaggagttccagggcttcagccagttcctgctgctgcaggccctgcagacctacagtgatgacatcctgagcagcgagacccacaccaagattgaccccaccagcggccccaggctcatcaccaggaggaagaacctgtcctatgcccctggctacagaagagatgacctggagatggccgccctggaccctgacctggagaatgatgacttctttgtgaggaagacaggagccttccacgccaacccctacgtgctgcgggcctttgaggacttcaggaagttcagcgagcaggatgattctgtggagcgggacatcatcctgcagtgccgggagggggagctggtgctgcctgacctggagaaggatgacatgattgtgcggcgcatcccagcccagaagaaggaggtgcccctgagcggggccccagaccgctaccaccctgtgcccttccctgagccctggaccctgcccccagagatccaggccaagttcctgtgtgtgctggagaggacctgccccagcaaggagaagagcaacagctgccgcatcctggtgcccagctaccggcagaagaaggatgacatgctgaccaggaagatccagagctggaagctgggcaccaccgtgccccccatctccttcaccccaggcccctgcagcgaggccgacctgaagcgctgggaggccatccgggaggccagccggctgcggcacaagaagaggctgatggtggagcggctcttccagaagatctatggagaaaatggcagcaagtccatgtctgatgtgtctgcagaagatgtgcagaacctgcggcagctgcgctatgaggagatgcagaagatcaagagccagctgaaggagcaggaccagaagtggcaggatgacctggccaagtggaaggacaggaggaagagctacaccagtgacctgcagaagaagaaggaggagcgggaggagattgagaagcaggccctggagaagagcaagaggagcagcaagaccttcaaggagatgctgcaggaccgggagagccagaaccagaagagcacagtgcccagcagaagaaggatgtacagctttgatgatgtgctggaggagggcaagaggcctcccaccatgacagtgtctgaggccagctaccagagcgagcgggtggaggagaagggggccacctaccccagcgagatccccaaggaggacagcaccacctttgccaagcgggaggacagagtgaccacagagatccagctgcccagccagagccctgtggaggagcagagccctgccagcctgagcagcctgcggagccgcagcacccagatggagagcaccagggtgtctgccagcctgcccaggagctacaggaagacagacacagtgcggctgacctctgtggtgaccccccggcccttcggcagccagacccggggcatcagcagcctgcccaggagctacaccatggatgatgcctggaagtacaatggagatgtggaggacatcaagaggacccccaacaacgtggtgtccaccccagcccccagcccagatgccagccagctggccagcagcctgagcagccagaaggaggtggccgccacagaagaagatgtgacccggctgcccagccccaccagccccttcagcagcctgagccaggaccaggccgccaccagcaaggccaccctgagcagcaccagcggcctggacctgatgtctgagagcggggagggggagatcagcccccagcgggaggtgagccgcagccaggaccagttcagtgacatgaggatcagcatcaaccagaccccaggcaagagcctggactttggcttcaccatcaagtgggacatccctggcatctttgtggcctctgtggaggccggcagccctgctgagttcagccagctgcaggtggatgatgagatcatcgccatcaacaacaccaagttctcctacaatgacagcaaggagtgggaggaggccatggccaaggcccaggagaccggccacctggtgatggatgtgcggcgctatggcaaggccggcagccctgagaccaagtggattgatgccaccagcggcatctacaacagcgagaagagcagcaacctgtctgtgaccacagacttcagcgagagcctgcagagcagcaacatcgagagcaaggagatcaatggcatccatgatgagagcaatgcctttgagagcaaggccagcgagagcatcagcctgaagaacctgaagagaagaagccagttctttgagcagggcagcagtgacagcgtggtgcctgacctgcctgtgcccaccatcagcgcccccagccgctgggtgtgggaccaggaggaggagaggaagaggcaggagcgctggcagaaggagcaggaccggctgctgcaggagaagtaccagcgggagcaggagaagctgcgggaggagtggcagagggccaagcaggaggccgagcgggagaacagcaagtacctggatgaggagctgatggtgctgagcagcaacagcatgagcctgaccacccgggagcccagcctggccacctgggaggccacctggagcgagggcagcaagagcagtgaccgggagggcaccagggctggggaggaggagcggcggcagccccaggaggaggtggtgcatgaggaccagggcaagaagccccaggaccagctggtgattgaaagagagaggaagtgggagcagcagctgcaggaggagcaggagcagaagaggctgcaggccgaggccgaggagcagaagaggcctgctgaggagcagaagaggcaggccgagattgagcgggagacctctgtgcgcatctaccagtacagaagacctgtggacagctatgacatccccaagacagaggaggccagcagcggcttcctgcccggggacaggaacaagagccgcagcaccacagagctggatgactacagcaccaacaagaatggaaacaacaagtacctggaccagatcggcaacatgaccagcagccagaggaggagcaagaaggagcaggtgcccagcggggctgagctggagcggcagcagatcctgcaggagatgaggaagaggacccccctgcacaatgacaacagctggatccggcagaggtctgcctctgtgaacaaggagcctgtgtccctgcccggcatcatgagaagaggagagagcctggacaacctggacagccccaggagcaacagctggaggcagcccccctggctgaaccagcccaccggcttctacgccagcagctctgtgcaggacttcagccggcccccaccccagctggtgtccaccagcaacagagcctacatgaggaaccccagcagctctgtgcccccacccagcgctggctctgtgaagaccagcaccactggagtggccaccacccagagccccacccccaggagccacagccccagcgccagccagagcggcagccagctgaggaacagcgtgctgcctgtgtctgtgaccagcgaggccctgccccaggagctgaagagcggcagcgagaccaccaactgcacagccaccacagccatcagtgacagcaacctggatggccagcccccctgtgatgtgtccctgcacaccaaggccctgctgcagatcgaggaggaggtggtggccgcccacgtggacctgtag

SEQ ID NO: 157893 - DNA, 4845 bp, synthetic construct
  misc_feature 1..4845: note = Description of Artificial Sequence: Synthetic coding sequence
  source 1..4845: mol_type = other DNA
atgaagaagatccgcatctgccacatcttcaccttctacagctggatgtcctatgatgtgctcttccagaggacagagctgggcgccctggagatctggaggcagctgatctgtgcccacgtgtgcatctgtgtgggctggctgtacctgcgggacagagtgtgcagcaagaaggacatcatcctgaggacagagcagaacagcggccgcaccatcctgatcaaggctgtgacagagaagaactttgagaccaaggacttccgggccagcctggagaatggagtgctgctgtgtgacctgatcaacaagctgaagccaggagtcatcaagaagatcaaccggctgagcacccccatcgccggcctggacaacatcaacgtgttcctgaaggcctgtgagcagatcggcctgaaggaggcccagctgttccaccctggggacctgcaggacctgagcaacagagtgacagtgaagcaggaggagacagaccggcgggtgaagaatgtgctgatcaccctgtactggctgggcaggaaggcccagagcaacccctactacaacggcccccacctgaacctgaaggcctttgagaacctgctgggccaggccctgaccaaggccctggaggacagcagcttcctgaagaggagcggccgggacagcggctatggagacatctggtgcccagagcggggggagttcctggccccacccaggcaccacaagcgggaggacagctttgagagcctggacagcctgggcagccgcagcctgaccagctgcagcagtgacatcaccctgcggggcggccgggagggctttgaaagtgacacagacagcgagttcaccttcaagatgcaggactacaacaaggatgacatgagctaccgccgcatctctgctgtggagcccaagacagccctgcccttcaaccgcttcctgcccaacaagagccggcagcccagctatgtgcctgcccccctgaggaagaagaagccagacaagcatgaggacaacagaagatcctgggccagccctgtgtacacagaagcagatggcaccttcagcagcaaccagaggcgcatctggggcaccaacgtggagaactggcccaccgtgcagggcaccagcaagagcagctgctacctggaggaggagaaggccaagaccaggagcatccccaacatcgtgaaggatgacctgtatgtgaggaagctgagccctgtgatgcccaaccctggaaatgcctttgaccagttcctgcccaagtgctggaccccagaagatgtgaactggaagaggatcaagcgggagacctacaagccctggtacaaggagttccagggcttcagccagttcctgctgctgcaggccctgcagacctacagtgatgacatcctgagcagcgagacccacaccaagattgaccccaccagcggccccaggctcatcaccaggaggaagaacctgtcctatgcccctggctacagaagagatgacctggagatggccgccctggaccctgacctggagaatgatgacttctttgtgaggaagacaggagccttccacgccaacccctacgtgctgcgggcctttgaggacttcaggaagttcagcgagcaggatgattctgtggagcgggacatcatcctgcagtgccgggagggggagctggtgctgcctgacctggagaaggatgacatgattgtgcggcgcatcccagcccagaagaaggaggtgcccctgagcggggccccagaccgctaccaccctgtgcccttccctgagccctggaccctgcccccagagatccaggccaagttcctgtgtgtgctggagaggacctgccccagcaaggagaagagcaacagctgccgcatcctggtgcccagctaccggcagaagaaggatgacatgctgaccaggaagatccagagctggaagctgggcaccaccgtgccccccatctccttcaccccaggcccctgcagcgaggccgacctgaagcgctgggaggccatccgggaggccagccggctgcggcacaagaagaggctgatggtggagcggctcttccagaagatctatggagaaaatggcagcaagtccatgtctgatgtgtctgcagaagatgtgcagaacctgcggcagctgcgctatgaggagatgcagaagatcaagagccagctgaaggagcaggaccagaagtggcaggatgacctggccaagtggaaggacaggaggaagagctacaccagtgacctgcagaagaagaaggaggagcgggaggagattgagaagcaggccctggagaagagcaagaggagcagcaagaccttcaaggagatgctgcaggaccgggagagccagaaccagaagagcacagtgcccagcagaagaaggatgtacagctttgatgatgtgctggaggagggcaagaggcctcccaccatgacagtgtctgaggccagctaccagagcgagcgggtggaggagaagggggccacctaccccagcgagatccccaaggaggacagcaccacctttgccaagcgggaggacagagtgaccacagagatccagctgcccagccagagccctgtggaggagcagagccctgccagcctgagcagcctgcggagccgcagcacccagatggagagcaccagggtgtctgccagcctgcccaggagctacaggaagacagacacagtgcggctgacctctgtggtgaccccccggcccttcggcagccagacccggggcatcagcagcctgcccaggagctacaccatggatgatgcctggaagtacaatggagatgtggaggacatcaagaggacccccaacaacgtggtgtccaccccagcccccagcccagatgccagccagctggccagcagcctgagcagccagaaggaggtggccgccacagaagaagatgtgacccggctgcccagccccaccagccccttcagcagcctgagccaggaccaggccgccaccagcaaggccaccctgagcagcaccagcggcctggacctgatgtctgagagcggggagggggagatcagcccccagcgggaggtgagccgcagccaggaccagttcagtgacatgaggatcagcatcaaccagaccccaggcaagagcctggactttggcttcaccatcaagtgggacatccctggcatctttgtggcctctgtggaggccggcagccctgctgagttcagccagctgcaggtggatgatgagatcatcgccatcaacaacaccaagttctcctacaatgacagcaaggagtgggaggaggccatggccaaggcccaggagaccggccacctggtgatggatgtgcggcgctatggcaaggccggcagccctgagaccaagtggattgatgccaccagcggcatctacaacagcgagaagagcagcaacctgtctgtgaccacagacttcagcgagagcctgcagagcagcaacatcgagagcaaggagatcaatggcatccatgatgagagcaatgcctttgagagcaaggccagcgagagcatcagcctgaagaacctgaagagaagaagccagttctttgagcagggcagcagtgacagcgtggtgcctgacctgcctgtgcccaccatcagcgcccccagccgctgggtgtgggaccaggaggaggagaggaagaggcaggagcgctggcagaaggagcaggaccggctgctgcaggagaagtaccagcgggagcaggagaagctgcgggaggagtggcagagggccaagcaggaggccgagcgggagaacagcaagtacctggatgaggagctgatggtgctgagcagcaacagcatgagcctgaccacccgggagcccagcctggccacctgggaggccacctggagcgagggcagcaagagcagtgaccgggagggcaccagggctggggaggaggagcggcggcagccccaggaggaggtggtgcatgaggaccagggcaagaagccccaggaccagctggtgattgaaagagagaggaagtgggagcagcagctgcaggaggagcaggagcagaagaggctgcaggccgaggccgaggagcagaagaggcctgctgaggagcagaagaggcaggccgagattgagcgggagacctctgtgcgcatctaccagtacagaagacctgtggacagctatgacatccccaagacagaggaggccagcagcggcttcctgcccggggacaggaacaagagccgcagcaccacagagctggatgactacagcaccaacaagaatggaaacaacaagtacctggaccagatcggcaacatgaccagcagccagaggaggagcaagaaggagcaggtgcccagcggggctgagctggagcggcagcagatcctgcaggagatgaggaagaggacccccctgcacaatgacaacagctggatccggcagaggtctgcctctgtgaacaaggagcctgtgtccctgcccggcatcatgagaagaggagagagcctggacaacctggacagccccaggagcaacagctggaggcagcccccctggctgaaccagcccaccggcttctacgccagcagctctgtgcaggacttcagccggcccccaccccagctggtgtccaccagcaacagagcctacatgaggaaccccagcagctctgtgcccccacccagcgctggctctgtgaagaccagcaccactggagtggccaccacccagagccccacccccaggagccacagccccagcgccagccagagcggcagccagctgaggaacagctggacagccaacagacatgtgatgtag

SEQ ID NO: 157894 - DNA, 4158 bp, synthetic construct
  misc_feature 1..4158: note = Description of Artificial Sequence: Synthetic coding sequence
  source 1..4158: mol_type = other DNA
atgcaggactacaacaaggatgacatgagctaccgccgcatctctgctgtggagcccaagacagccctgcccttcaaccgcttcctgcccaacaagagccggcagcccagctatgtgcctgcccccctgaggaagaagaagccagacaagcatgaggacaacagaagatcctgggccagccctgtgtacacagaagcagatggcaccttcagcagcaaccagaggcgcatctggggcaccaacgtggagaactggcccaccgtgcagggcaccagcaagagcagctgctacctggaggaggagaaggccaagaccaggagcatccccaacatcgtgaaggatgacctgtatgtgaggaagctgagccctgtgatgcccaaccctggaaatgcctttgaccagttcctgcccaagtgctggaccccagaagatgtgaactggaagaggatcaagcgggagacctacaagccctggtacaaggagttccagggcttcagccagttcctgctgctgcaggccctgcagacctacagtgatgacatcctgagcagcgagacccacaccaagattgaccccaccagcggccccaggctcatcaccaggaggaagaacctgtcctatgcccctggctacagaagagatgacctggagatggccgccctggaccctgacctggagaatgatgacttctttgtgaggaagacaggagccttccacgccaacccctacgtgctgcgggcctttgaggacttcaggaagttcagcgagcaggatgacagcgtggagcgggacatcatcctgcagtgccgggagggggagctggtgctgcctgacctggagaaggatgacatgattgtgcggcgcatcccagcccagaagaaggaggtgcccctgagcggggccccagaccgctaccaccctgtgcccttccctgagccctggaccctgcccccagagatccaggccaagttcctgtgtgtgctggagaggacctgccccagcaaggagaagagcaacagctgccgcatcctggtgcccagctaccggcagaagaaggatgacatgctgaccaggaagatccagagctggaagctgggcaccaccgtgccccccatctccttcaccccaggcccctgcagcgaggccgacctgaagcgctgggaggccatccgggaggccagccggctgcggcacaagaagaggctgatggtggagcggctcttccagaagatctacggggagaatggcagcaagtccatgtctgatgtgtctgcagaagatgtgcagaacctgcggcagctgcgctatgaggagatgcagaagatcaagagccagctgaaggagcaggaccagaagtggcaggatgacctggccaagtggaaggacaggaggaagagctacaccagtgacctgcagaagaagaaggaggagcgggaggagattgagaagcaggccctggagaagagcaagaggagcagcaagaccttcaaggagatgctgcaggaccgggagagccagaaccagaagagcacagtgcccagcagaagaaggatgtacagctttgatgatgtgctggaggagggcaagaggcctcccaccatgacagtgtctgaggccagctaccagagcgagcgggtggaggagaagggggccacctaccccagcgagatccccaaggaggacagcaccacctttgccaagagagaagatagagtgaccacagagatccagctgcccagccagagccctgtggaggagcagagccctgccagcctgagcagcctgcggagccgcagcacccagatggagagcaccagggtgtctgccagcctgcccaggagctacaggaagacagacacagtgcggctgacctctgtggtgaccccccggcccttcggcagccagacccggggcatcagcagcctgcccaggagctacaccatggatgatgcctggaagtacaatggagatgtggaggacatcaagaggacccccaacaacgtggtgtccaccccagcccccagcccagatgccagccagctggccagcagcctgagcagccagaaggaggtggccgccacagaggaggatgtgacccggctgcccagccccaccagccccttcagcagcctgagccaggaccaggccgccaccagcaaggccaccctgagcagcaccagcggcctggacctgatgtctgagagcggggagggggagatcagcccccagcgggaggtgagccgcagccaggaccagttcagtgacatgaggatcagcatcaaccagacccctgggaagagcctggactttggcttcaccatcaagtgggacatccctggcatctttgtggcctctgtggaggccggcagccctgctgagttcagccagctgcaggtggatgatgagatcatcgccatcaacaacaccaagttctcctacaatgacagcaaggagtgggaggaggccatggccaaggcccaggagaccggccacctggtgatggatgtgagaagatatggcaaggccggcagccctgagaccaagtggattgatgccaccagcggcatctacaacagcgagaagagcagcaacctgtctgtgaccacagacttcagcgagagcctgcagagcagcaacatcgagagcaaggagatcaatggcatccatgatgagagcaatgcctttgagagcaaggccagcgagagcatcagcctgaagaacctgaagaggaggagccagttctttgagcagggcagcagtgacagcgtggtgcctgacctgcctgtgcccaccatcagcgcccccagccgctgggtgtgggaccaggaggaggagaggaagaggcaggagcgctggcagaaggagcaggaccggctgctgcaggagaagtaccagcgggagcaggagaagctgcgggaggagtggcagagggccaagcaggaggccgagcgggagaacagcaagtacctggatgaggagctgatggtgctgagcagcaacagcatgagcctgaccacccgggagcccagcctggccacctgggaggccacctggagcgagggcagcaagagcagtgaccgggagggcacccgggccggggaggaggagcggcggcagccccaggaggaggtggtgcatgaggaccagggcaagaagccccaggaccagctggtgattgagcgggagaggaagtgggagcagcagctgcaggaggagcaggagcagaagaggctgcaggccgaggccgaggagcagaagaggcctgctgaggagcagaagaggcaggccgagattgaaagagagacctctgtgcgcatctaccagtacagaagacctgtggacagctatgacatccccaagacagaggaggccagcagcggcttcctgcccggggacaggaacaagagccgcagcaccacagagctggatgactacagcaccaacaagaatggaaacaacaagtacctggaccagatcggcaacatgaccagcagccagaggaggagcaagaaggagcaggtgcccagcggggctgagctggagcggcagcagatcctgcaggagatgaggaagaggacccccctgcacaatgacaacagctggatccggcagaggtctgcctctgtgaacaaggagcctgtgtccctgcccggcatcatgagaagaggagagagcctggacaacctggacagccccaggagcaacagctggaggcagcccccctggctgaaccagcccaccggcttctacgccagcagctctgtgcaggacttcagccggcccccaccccagctggtgtccaccagcaacagagcctacatgaggaaccccagcagctctgtgcccccaccttctgctggctctgtgaagaccagcaccaccggggtggccaccacccagagccccacccccaggagccacagccccagcgccagccagagcggcagccagctgagaaattctgtgctgcctgtgtctgtgaccagcgaggccctgccccaggagctgaagagcggcagcgagaccaccaactgcacagccaccacagccatcagtgacagcaacctggatggccagcccccctgtgatgtgtccctgcacaccaaggccctgctgcagatcgaggaggaggtggtggccgcccacgtggacctgtag

SEQ ID NO: 157895 - DNA, 2280 bp, synthetic construct
  misc_feature 1..2280: note = Description of Artificial Sequence: Synthetic coding sequence
  source 1..2280: mol_type = other DNA
atggagagcagccccttcaacagacggcagtggaccagcctgagcctgcgggtgacagccaaggagctgagcctggtgaacaagaacaagagcagcgccatcgtggagatcttcagcaagtaccagaaggctgctgaggagaccaacatggagaagaagaggagcaacacagagaacctgagccagcacttcaggaagggcaccctgactgtgctgaagaagaagtgggagaaccctggcctgggcgctgagagccacacagacagcctgaggaacagcagcacagagatccgccacagagctgaccaccccccagctgaggtgaccagccacgccgccagcggggccaaggctgaccaggaggagcagatccaccccaggagccggctgcggagccccccagaggccctggtgcagggccgctacccccacatcaaggatggagaggacctgaaggaccacagcacagagagcaagaagatggagaactgcctgggggagagcagacatgaggtggagaagtctgagatcagtgaaaatacagatgccagcggcaagattgagaagtacaacgtgcccctgaaccggctgaagatgatgtttgagaagggggagcccacccagaccaagatcctgcgggcccagagccgcagcgccagcggcaggaagatcagcgagaacagctacagcctggatgacctggagatcggccctggccagctgagcagcagcacctttgacagcgagaagaatgaaagcagaagaaacctggagctgccccggctgtctgagaccagcatcaaggacaggatggccaagtaccaggccgctgtgtccaagcagagcagcagcaccaactacaccaatgagctgaaggccagcggcggggagatcaagatccacaagatggagcagaaggaaaatgtgcccccaggccctgaggtgtgcatcacccaccaggagggggagaagatcagcgccaatgaaaacagcctggccgtgcgcagcaccccagcagaagatgacagccgggacagccaggtgaagtctgaggtgcagcagcctgtgcaccccaagcccctgagcccagacagccgggccagcagcctgtctgagagcagcccccccaaggccatgaagaagttccaggccccagcccgggagacctgtgtggagtgccagaagacagtgtaccccatggagcggctgctggccaaccagcaggtgttccacatcagctgcttccgctgcagctactgcaacaacaagctgagcctgggcacctacgccagcctgcacggccgcatctactgcaagccccacttcaaccagctgttcaagagcaaaggaaattatgatgagggcttcggccaccggccccacaaggacctgtgggccagcaagaatgaaaatgaggagatcctggagaggcctgcccagctggccaatgcccgggagaccccccacagccctggggtggaggatgcccccatcgccaaggtgggcgtgctggccgcctccatggaggccaaggccagcagccagcaggagaaggaggacaagccagctgagaccaagaagctgcgcatcgcctggcccccacccacagagctgggcagcagcggcagcgccctggaggagggcatcaagatgagcaagcccaagtggcccccagaagatgagatcagcaagccagaggtgcctgaagatgtggacctggacctgaagaagctgcggcgcagcagcagcctgaaggagaggagccggcccttcaccgtggccgccagcttccagagcacctctgtgaagagccccaagacagtgagcccccccatcaggaagggctggagcatgtctgagcagagcgaggagagcgtgggcggccgggtggccgagaggaagcaggtggagaatgccaaggccagcaagaagaatggaaatgtgggcaagaccacctggcagaacaaggagagcaaaggagagaccgggaagaggagcaaggagggccacagcctggagatggagaatgaaaacctggtggagaatggagctgacagtgatgaagatgacaacagcttcctgaagcagcagagcccccaggagcccaagagcctgaactggagcagctttgtggacaacacctttgctgaggagttcaccacccagaaccagaagagccaggatgtggagctgtgggagggggaggtggtgaaggagctgtctgtggaggagcagatcaagaggaaccgctactatgatgaagatgaagatgaggagtag

SEQ ID NO: 157896 - DNA, 2283 bp, synthetic construct
  misc_feature 1..2283: note = Description of Artificial Sequence: Synthetic coding sequence
  source 1..2283: mol_type = other DNA
atggagagcagccccttcaacagacggcagtggaccagcctgagcctgcgggtgacagccaaggagctgagcctggtgaacaagaacaagagcagcgccatcgtggagatcttcagcaagtaccagaaggctgctgaggagaccaacatggagaagaagaggagcaacacagagaacctgagccagcacttcaggaagggcaccctgactgtgctgaagaagaagtgggagaaccctggcctgggcgctgagagccacacagacagcctgaggaacagcagcacagagatccgccacagagctgaccaccccccagctgaggtgaccagccacgccgccagcggggccaaggctgaccaggaggagcagatccaccccaggagccggctgcggagccccccagaggccctggtgcagggccgctacccccacatcaaggatggagaggacctgaaggaccacagcacagagagcaagaagatggagaactgcctgggggagagcagacatgaggtggagaagtctgagatcagtgaaaatacagatgccagcggcaagattgagaagtacaacgtgcccctgaaccggctgaagatgatgtttgagaagggggagcccacccagaccaagatcctgcgggcccagagccgcagcgccagcggcaggaagatcagcgagaacagctacagcctggatgacctggagatcggccctggccagctgagcagcagcacctttgacagcgagaagaatgaaagcagaagaaacctggagctgccccggctgtctgagaccagcatcaaggacaggatggccaagtaccaggccgctgtgtccaagcagagcagcagcaccaactacaccaatgagctgaaggccagcggcggggagatcaagatccacaagatggagcagaaggaaaatgtgcccccaggccctgaggtgtgcatcacccaccaggagggggagaagatcagcgccaatgaaaacagcctggccgtgcgcagcaccccagcagaagatgacagccctggggacagccaggtgaagtctgaggtgcagcagcctgtgcaccccaagcccctgagcccagacagccgggccagcagcctgtctgagagcagcccccccaaggccatgaagaagttccaggccccagcccgggagacctgtgtggagtgccagaagacagtgtaccccatggagcggctgctggccaaccagcaggtgttccacatcagctgcttccgctgcagctactgcaacaacaagctgagcctgggcacctacgccagcctgcacggccgcatctactgcaagccccacttcaaccagctgttcaagagcaagggcaactatgatgagggcttcggccaccggccccacaaggacctgtgggccagcaagaatgaaaatgaggagatcctggagaggcctgcccagctggccaatgcccgggagaccccccacagccctggggtggaggatgcccccatcgccaaggtgggcgtgctggccgcctccatggaggccaaggccagcagccagcaggagaaggaggacaagccagctgagaccaagaagctgagaattgcctggcccccacccacagagctgggcagcagcggcagcgccctggaggagggcatcaagatgagcaagcccaagtggcccccagaagatgagatcagcaagccagaggtgcctgaagatgtggacctggacctgaagaagctgcggcgcagcagcagcctgaaggagaggagccggcccttcaccgtggccgccagcttccagagcacctctgtgaagagccccaagacagtgtccccacccatcaggaagggctggagcatgtctgagcagagcgaggagagcgtgggcggccgggtggccgagaggaagcaggtggagaatgccaaggccagcaagaagaatggaaatgtgggcaagaccacctggcagaacaaggagagcaagggggagaccgggaagaggagcaaggagggccacagcctggagatggagaatgaaaacctggtggagaatggagctgacagtgatgaagatgacaacagcttcctgaagcagcagagcccccaggagcccaagagcctgaactggagcagctttgtggacaacacctttgctgaggagttcaccacccagaaccagaagagccaggatgtggagctgtgggagggggaggtggtgaaggagctgtctgtggaggagcagatcaagaggaaccgctactatgatgaagatgaagatgaggagtag

SEQ ID NO: 157897 - DNA, 2037 bp, synthetic construct
  misc_feature 1..2037: note = Description of Artificial Sequence: Synthetic coding sequence
  source 1..2037: mol_type = other DNA
atgtggcagggctgcaactgcagccagctgtctgaaacagctgtggaccaggagcagctgggcgtgctgaccttcatcctgcagaggaccacctgcctgaatgtgtctgctgaccaggaggagcagatccaccccaggagccggctgcggagccccccagaggccctggtgcagggccgctacccccacatcaaggatggagaggacctgaaggaccacagcacagagagcaagaagatggagaactgcctgggggagagcagacatgaggtggagaagtctgagatcagcgagaacacagatgccagcggcaagattgagaagtacaacgtgcccctgaaccggctgaagatgatgtttgagaagggggagcccacccagaccaagatcctgcgggcccagagccgcagcgccagcggcaggaagatcagtgaaaattcctacagcctggatgacctggagatcggccctggccagctgagcagcagcacctttgattctgagaagaatgaaagcagaagaaacctggagctgccccggctgtctgagaccagcatcaaggacaggatggccaagtaccaggccgctgtgtccaagcagagcagcagcaccaactacaccaatgagctgaaggccagcggcggggagatcaagatccacaagatggagcagaaggaaaatgtgcccccaggccctgaggtgtgcatcacccaccaggagggggagaagatcagcgccaatgaaaacagcctggccgtgcgcagcaccccagcagaagatgacagccgggacagccaggtgaagtctgaggtgcagcagcctgtgcaccccaagcccctgagcccagacagccgggccagcagcctgtctgagagcagcccccccaaggccatgaagaagttccaggccccagcccgggagacctgtgtggagtgccagaagacagtgtaccccatggagcggctgctggccaaccagcaggtgttccacatcagctgcttccgctgcagctactgcaacaacaagctgagcctgggcacctacgccagcctgcacggccgcatctactgcaagccccacttcaaccagctgttcaagagcaagggcaactatgatgagggcttcggccaccggccccacaaggacctgtgggccagcaagaatgaaaatgaggagatcctggagaggcctgcccagctggccaatgcccgggagaccccccacagccctggggtggaggatgcccccatcgccaaggtgggcgtgctggccgcctccatggaggccaaggccagcagccagcaggagaaggaggacaagccagctgagaccaagaagctgagaattgcctggcccccacccacagagctgggcagcagcggcagcgccctggaggagggcatcaagatgagcaagcccaagtggcccccagaagatgagatcagcaagccagaggtgcctgaagatgtggacctggacctgaagaagctgcggcgcagcagcagcctgaaggagaggagccggcccttcaccgtggccgccagcttccagagcacctctgtgaagagccccaagacagtgtccccacccatcaggaagggctggagcatgtctgagcagagcgaggagagcgtgggcggccgggtggccgagaggaagcaggtggagaatgccaaggccagcaagaagaatggaaatgtgggcaagaccacctggcagaacaaggagagcaagggggagaccgggaagaggagcaaggagggccacagcctggagatggagaatgaaaacctggtggagaatggagctgacagtgatgaagatgacaacagcttcctgaagcagcagagcccccaggagcccaagagcctgaactggagcagctttgtggacaacacctttgctgaggagttcaccacccagaaccagaagagccaggatgtggagctgtgggagggggaggtggtgaaggagctgtctgtggaggagcagatcaagaggaaccgctactatgatgaagatgaagatgaggagtag

SEQ ID NO: 157898 - DNA, 1374 bp, synthetic construct
  misc_feature 1..1374: note = Description of Artificial Sequence: Synthetic coding sequence
  source 1..1374: mol_type = other DNA
atggagcagaaggaaaatgtgcccccaggccctgaggtgtgcatcacccaccaggagggggagaagatcagcgccaatgaaaacagcctggccgtgcgcagcaccccagcagaagatgacagccgggacagccaggtgaagtctgaggtgcagcagcctgtgcaccccaagcccctgagcccagacagccgggccagcagcctgtctgagagcagcccccccaaggccatgaagaagttccaggccccagcccgggagacctgtgtggagtgccagaagacagtgtaccccatggagcggctgctggccaaccagcaggtgttccacatcagctgcttccgctgcagctactgcaacaacaagctgagcctgggcacctacgccagcctgcacggccgcatctactgcaagccccacttcaaccagctgttcaagagcaaaggaaattatgatgagggcttcggccaccggccccacaaggacctgtgggccagcaagaatgaaaatgaggagatcctggagaggcctgcccagctggccaatgcccgggagaccccccacagccctggggtggaggatgcccccatcgccaaggtgggcgtgctggccgcctccatggaggccaaggccagcagccagcaggagaaggaggacaagccagctgagaccaagaagctgcgcatcgcctggcccccacccacagagctgggcagcagcggcagcgccctggaggagggcatcaagatgagcaagcccaagtggcccccagaagatgagatcagcaagccagaggtgcctgaagatgtggacctggacctgaagaagctgcggcgcagcagcagcctgaaggagaggagccggcccttcaccgtggccgccagcttccagagcacctctgtgaagagccccaagacagtgagcccccccatcaggaagggctggagcatgtctgagcagagcgaggagagcgtgggcggccgggtggccgagaggaagcaggtggagaatgccaaggccagcaagaagaatggaaatgtgggcaagaccacctggcagaacaaggagagcaaaggagagaccgggaagaggagcaaggagggccacagcctggagatggagaatgaaaacctggtggagaatggagctgacagtgatgaagatgacaacagcttcctgaagcagcagagcccccaggagcccaagagcctgaactggagcagctttgtggacaacacctttgctgaggagttcaccacccagaaccagaagagccaggatgtggagctgtgggagggggaggtggtgaaggagctgtctgtggaggagcagatcaagaggaaccgctactatgatgaagatgaagatgaggagtag

SEQ ID NO: 157899 - DNA, 336 bp, synthetic construct
  misc_feature 1..336: note = Description of Artificial Sequence: Synthetic coding sequence
  source 1..336: mol_type = other DNA
atggagagcagccccttcaacagacggcagtggaccagcctgagcctgcgggtgacagccaaggagctgagcctggtgaacaagaacaagagcagcgccatcgtggagatcttcagcaagtaccagaaggctgctgaggagaccaacatggagaagaagaggagcaacacagagaacctgagccagcacttcaggaagggcaccctgactgtgctgaagaagaagtgggagaaccctggcctgggcgctgagagccacacagacagcctgaggaacagcagcacagagatccgccacagagctgaccaccccccagctgaggtgaccagccactag

SEQ ID NO: 157900 - DNA, 393 bp, synthetic construct
  misc_feature 1..393: note = Description of Artificial Sequence: Synthetic coding sequence
  source 1..393: mol_type = other DNA
atggagagcagccccttcaacagacggcagtggaccagcctgagcctgcgggtgacagccaaggagctgagcctggtgaacaagaacaagagcagcgccatcgtggagatcttcagcaagtaccagaaggctgctgaggagaccaacatggagaagaagaggagcaacacagagaacctgagccagcacttcaggaagggcaccctgactgtgctgaagaagaagtgggagaaccctggcctgggcgctgagagccacacagacagcctgaggaacagcagcacagagatccgccacagagctgaccaccccccagctgaggtgaccagccacgccgccagcggggccaaggctgaccaggaggagcagatccaccccaggagccggctgtag

SEQ ID NO: 157901 - DNA, 1371 bp, synthetic construct
  misc_feature 1..1371: note = Description of Artificial Sequence: Synthetic coding sequence
  source 1..1371: mol_type = other DNA
atggagcagaaggaaaatgtgcccccaggccctgaggtgtgcatcacccaccaggagggggagaagatcagcgccaatgaaaacagcctggccgtgcgcagcaccccagcagaagatgacagccgggacagccaggtgaagtctgaggtgcagcagcctgtgcaccccaagcccctgagcccagacagccgggccagcagcctgtctgagagcagcccccccaaggccatgaagttccaggccccagcccgggagacctgtgtggagtgccagaagacagtgtaccccatggagcggctgctggccaaccagcaggtgttccacatcagctgcttccgctgcagctactgcaacaacaagctgagcctgggcacctacgccagcctgcacggccgcatctactgcaagccccacttcaaccagctgttcaagagcaagggcaactatgatgagggcttcggccaccggccccacaaggacctgtgggccagcaagaatgaaaatgaggagatcctggagaggcctgcccagctggccaatgcccgggagaccccccacagccctggggtggaggatgcccccatcgccaaggtgggcgtgctggccgcctccatggaggccaaggccagcagccagcaggagaaggaggacaagccagctgagaccaagaagctgagaattgcctggcccccacccacagagctgggcagcagcggcagcgccctggaggagggcatcaagatgagcaagcccaagtggcccccagaagatgagatcagcaagccagaggtgcctgaagatgtggacctggacctgaagaagctgcggcgcagcagcagcctgaaggagaggagccggcccttcaccgtggccgccagcttccagagcacctctgtgaagagccccaagacagtgtccccacccatcaggaagggctggagcatgtctgagcagagcgaggagagcgtgggcggccgggtggccgagaggaagcaggtggagaatgccaaggccagcaagaagaatggaaatgtgggcaagaccacctggcagaacaaggagagcaagggggagaccgggaagaggagcaaggagggccacagcctggagatggagaatgaaaacctggtggagaatggagctgacagtgatgaagatgacaacagcttcctgaagcagcagagcccccaggagcccaagagcctgaactggagcagctttgtggacaacacctttgctgaggagttcaccacccagaaccagaagagccaggatgtggagctgtgggagggggaggtggtgaaggagctgtctgtggaggagcagatcaagaggaaccgctactatgatgaagatgaagatgaggagtag

SEQ ID NO: 157902 - DNA, 1803 bp, synthetic construct
  misc_feature 1..1803: note = Description of Artificial Sequence: Synthetic coding sequence
  source 1..1803: mol_type = other DNA
atggagaactgcctgggggagagcagacatgaggtggagaagtctgagatcagtgaaaatacagatgccagcggcaagattgagaagtacaacgtgcccctgaaccggctgaagatgatgtttgagaagggggagcccacccagaccaagatcctgcgggcccagagccgcagcgccagcggcaggaagatcagcgagaacagctacagcctggatgacctggagatcggccctggccagctgagcagcagcacctttgacagcgagaagaatgaaagcagaagaaacctggagctgccccggctgtctgagaccagcatcaaggacaggatggccaagtaccaggccgctgtgtccaagcagagcagcagcaccaactacaccaatgagctgaaggccagcggcggggagatcaagatccacaagatggagcagaaggaaaatgtgcccccaggccctgaggtgtgcatcacccaccaggagggggagaagatcagcgccaatgaaaacagcctggccgtgcgcagcaccccagcagaagatgacagccctggggacagccaggtgaagtctgaggtgcagcagcctgtgcaccccaagcccctgagcccagacagccgggccagcagcctgtctgagagcagcccccccaaggccatgaagaagttccaggccccagcccgggagacctgtgtggagtgccagaagacagtgtaccccatggagcggctgctggccaaccagcaggtgttccacatcagctgcttccgctgcagctactgcaacaacaagctgagcctgggcacctacgccagcctgcacggccgcatctactgcaagccccacttcaaccagctgttcaagagcaagggcaactatgatgagggcttcggccaccggccccacaaggacctgtgggccagcaagaatgaaaatgaggagatcctggagaggcctgcccagctggccaatgcccgggagaccccccacagccctggggtggaggatgcccccatcgccaaggtgggcgtgctggccgcctccatggaggccaaggccagcagccagcaggagaaggaggacaagccagctgagaccaagaagctgagaattgcctggcccccacccacagagctgggcagcagcggcagcgccctggaggagggcatcaagatgagcaagcccaagtggcccccagaagatgagatcagcaagccagaggtgcctgaagatgtggacctggacctgaagaagctgcggcgcagcagcagcctgaaggagaggagccggcccttcaccgtggccgccagcttccagagcacctctgtgaagagccccaagacagtgtccccacccatcaggaagggctggagcatgtctgagcagagcgaggagagcgtgggcggccgggtggccgagaggaagcaggtggagaatgccaaggccagcaagaagaatggaaatgtgggcaagaccacctggcagaacaaggagagcaagggggagaccgggaagaggagcaaggagggccacagcctggagatggagaatgaaaacctggtggagaatggagctgacagtgatgaagatgacaacagcttcctgaagcagcagagcccccaggagcccaagagcctgaactggagcagctttgtggacaacacctttgctgaggagttcaccacccagaaccagaagagccaggatgtggagctgtgggagggggaggtggtgaaggagctgtctgtggaggagcagatcaagaggaaccgctactatgatgaagatgaagatgaggagtag

SEQ ID NO: 157903 - DNA, 1800 bp, synthetic construct
  misc_feature 1..1800: note = Description of Artificial Sequence: Synthetic coding sequence
  source 1..1800: mol_type = other DNA
atggagaactgcctgggggagagcagacatgaggtggagaagtctgagatcagtgaaaatacagatgccagcggcaagattgagaagtacaacgtgcccctgaaccggctgaagatgatgtttgagaagggggagcccacccagaccaagatcctgcgggcccagagccgcagcgccagcggcaggaagatcagcgagaacagctacagcctggatgacctggagatcggccctggccagctgagcagcagcacctttgacagcgagaagaatgaaagcagaagaaacctggagctgccccggctgtctgagaccagcatcaaggacaggatggccaagtaccaggccgctgtgtccaagcagagcagcagcaccaactacaccaatgagctgaaggccagcggcggggagatcaagatccacaagatggagcagaaggaaaatgtgcccccaggccctgaggtgtgcatcacccaccaggagggggagaagatcagcgccaatgaaaacagcctggccgtgcgcagcaccccagcagaagatgacagccgggacagccaggtgaagtctgaggtgcagcagcctgtgcaccccaagcccctgagcccagacagccgggccagcagcctgtctgagagcagcccccccaaggccatgaagaagttccaggccccagcccgggagacctgtgtggagtgccagaagacagtgtaccccatggagcggctgctggccaaccagcaggtgttccacatcagctgcttccgctgcagctactgcaacaacaagctgagcctgggcacctacgccagcctgcacggccgcatctactgcaagccccacttcaaccagctgttcaagagcaaaggaaattatgatgagggcttcggccaccggccccacaaggacctgtgggccagcaagaatgaaaatgaggagatcctggagaggcctgcccagctggccaatgcccgggagaccccccacagccctggggtggaggatgcccccatcgccaaggtgggcgtgctggccgcctccatggaggccaaggccagcagccagcaggagaaggaggacaagccagctgagaccaagaagctgcgcatcgcctggcccccacccacagagctgggcagcagcggcagcgccctggaggagggcatcaagatgagcaagcccaagtggcccccagaagatgagatcagcaagccagaggtgcctgaagatgtggacctggacctgaagaagctgcggcgcagcagcagcctgaaggagaggagccggcccttcaccgtggccgccagcttccagagcacctctgtgaagagccccaagacagtgagcccccccatcaggaagggctggagcatgtctgagcagagcgaggagagcgtgggcggccgggtggccgagaggaagcaggtggagaatgccaaggccagcaagaagaatggaaatgtgggcaagaccacctggcagaacaaggagagcaaaggagagaccgggaagaggagcaaggagggccacagcctggagatggagaatgaaaacctggtggagaatggagctgacagtgatgaagatgacaacagcttcctgaagcagcagagcccccaggagcccaagagcctgaactggagcagctttgtggacaacacctttgctgaggagttcaccacccagaaccagaagagccaggatgtggagctgtgggagggggaggtggtgaaggagctgtctgtggaggagcagatcaagaggaaccgctactatgatgaagatgaagatgaggagtag

SEQ ID NO: 157904 - DNA, 1128 bp, synthetic construct
  misc_feature 1..1128: note = Description of Artificial Sequence: Synthetic coding sequence
  source 1..1128: mol_type = other DNA
atgctggacagagatgtgggccccacccccatgtacccacccacctacctggagcccggcatcggccgccacaccccctacggcaaccagacagactaccgcatctttgagctgaacaagaggctgcagaactggacagaggagtgtgacaacctgtggtgggatgccttcaccacagagttctttgaagatgatgccatgctgaccatcaccttctgcctggaggatggccccaagcgctacaccatcggccgcaccctcatcccccgctacttccgcagcatctttgagggcggggccacagagctgtactacgtgctgaagcaccccaaggaggccttccacagcaactttgtgtccctggactgtgaccagggctccatggtgacccagcacggcaagcccatgttcacccaggtgtgtgtggagggccgcctgtacctggagttcatgtttgatgacatgatgaggatcaagacctggcacttcagcatccggcagcaccgggagctgatccccaggagcatcctggccatgcacgcccaggacccccagatgctggaccagctgagcaagaacatcacccgctgtggcctgagcaacagcaccctgaactacctgcggctgtgtgtgatcctggagcccatgcaggagctgatgagccgccacaagacctacagcctgagcccccgggactgcctgaagacctgcctcttccagaagtggcagaggatggtggcccccccagctgagcccacccggcagcagcccagcaagaggaggaagaggaagatgtctgggggcagcaccatgagcagcggcggcggcaacaccaacaacagcaacagcaagaagaagagccctgccagcacctttgccctgagcagccaggtgcctgatgtgatggtggtgggggagcccaccctgatgggcggggagtttggagatgaagatgagcggctcatcacccggctggagaacacccagtttgatgctgccaacggcattgatgatgaagattccttcaacaacagccctgccctgggcgccaacagcccctggaacagcaagccacccagcagccaggagagcaagtctgagaaccccaccagccaggccagccagtag

SEQ ID NO: 157905 - DNA, 1236 bp, synthetic construct
  misc_feature 1..1236: note = Description of Artificial Sequence: Synthetic coding sequence
  source 1..1236: mol_type = other DNA
atgtctgtgggctgtgcctgccccggctgcagcagcaagagcttcaagctgtacagccccaaggagcccccaaatggaaatgccttcccccccttccaccctggcaccatgctggacagagatgtgggccccacccccatgtacccacccacctacctggagcccggcatcggccgccacaccccctacggcaaccagacagactaccgcatctttgagctgaacaagaggctgcagaactggacagaggagtgtgacaacctgtggtgggatgccttcaccacagagttctttgaagatgatgccatgctgaccatcaccttctgcctggaggatggccccaagcgctacaccatcggccgcaccctcatcccccgctacttccgcagcatctttgagggcggggccacagagctgtactacgtgctgaagcaccccaaggaggccttccacagcaactttgtgtccctggactgtgaccagggctccatggtgacccagcacggcaagcccatgttcacccaggtgtgtgtggagggccgcctgtacctggagttcatgtttgatgacatgatgaggatcaagacctggcacttcagcatccggcagcaccgggagctgatccccaggagcatcctggccatgcacgcccaggacccccagatgctggaccagctgagcaagaacatcacccgctgtggcctgagcaacagcaccctgaactacctgcggctgtgtgtgatcctggagcccatgcaggagctgatgagccgccacaagacctacagcctgagcccccgggactgcctgaagacctgcctcttccagaagtggcagaggatggtggcccccccagctgagcccacccggcagcagcccagcaagaggaggaagaggaagatgtctgggggcagcaccatgagcagcggcggcggcaacaccaacaacagcaacagcaagaagaagagccctgccagcacctttgccctgagcagccaggtgcctgatgtgatggtggtgggggagcccaccctgatgggcggggagtttggagatgaagatgagcggctcatcacccggctggagaacacccagtttgatgctgccaacggcattgatgatgaagattccttcaacaacagccctgccctgggcgccaacagcccctggaacagcaagccacccagcagccaggagagcaagtctgagaaccccaccagccaggccagccagtag

SEQ ID NO: 157906 - DNA, 1122 bp, synthetic construct
  misc_feature 1..1122: note = Description of Artificial Sequence: Synthetic coding sequence
  source 1..1122: mol_type = other DNA
atgagcagcacccctcatgaccccttctacagcagccccttcggccccttctacagaagacacaccccctacatggtgcagcctgagtaccgcatctatgagatgaacaagaggctgcagagcaggacagaggacagcgacaacctgtggtgggatgcctttgccacagagttctttgaagatgatgccaccctgaccctgtccttctgcctggaggatggccccaagcgctacaccatcggccgcaccctcatcccccgctacttcagcacagtgtttgaaggaggagtgacagacctgtactacatcctgaagcacagcaaggagagctaccacaacagcagcatcaccgtggactgtgaccagtgcaccatggtgacccagcacggcaagcccatgttcaccaaggtgtgcacagagggccgcctcatcctggagttcacctttgatgacctgatgaggatcaagacctggcacttcaccatccggcagtaccgggagctggtgcccaggagcatcctggccatgcacgcccaggacccccaggtgctggaccagctgagcaagaacatcaccaggatgggcctgaccaacttcaccctgaactacctgcggctgtgtgtgatcctggagcccatgcaggagctgatgagccgccacaagacctacaacctgagcccccgggactgcctgaagacctgcctcttccagaagtggcagaggatggtggcccctcctgctgagcccacccggcagcccaccaccaagaggaggaagaggaagaacagcaccagcagcaccagcaacagcagcgctggcaacaatgccaacagcacaggcagcaagaagaagaccacagctgccaacctgagcctgagcagccaggtgcctgatgtgatggtggtgggggagcccaccctgatgggcggggagtttggagatgaagatgagcggctcatcacccggctggagaacacccagtatgatgctgccaacggcatggatgatgaggaggacttcaacaacagccctgccctgggcaacaacagcccctggaacagcaagcccccagccacccaggagaccaagtcagaaaatcctccaccccaggccagccagtag

SEQ ID NO: 157907 - DNA, 996 bp, synthetic construct
  misc_feature 1..996: note = Description of Artificial Sequence: Synthetic coding sequence
  source 1..996: mol_type = other DNA
atgagcagcacccctcatgaccccttctacagcagccccttcggccccttctacagaagacacaccccctacatggtgcagcctgagtaccgcatctatgagatgaacaagaggctgcagagcaggacagaggacagcgacaacctgtggtgggatgcctttgccacagagttctttgaagatgatgccaccctgaccctgtccttctgcctggaggatggccccaagcgctacaccatcggccgcaccctcatcccccgctacttcagcacagtgtttgaaggaggagtgacagacctgtactacatcctgaagcacagcaaggagagctaccacaacagcagcatcaccgtggactgtgaccagtgcaccatggtgacccagcacggcaagcccatgttcaccaaggtgtgcacagagggccgcctcatcctggagttcacctttgatgacctgatgaggatcaagacctggcacttcaccatccggcagtaccgggagctggtgcccaggagcatcctggccatgcacgcccaggacccccaggtgctggaccagctgagcaagaacatcaccaggatgggcctgaccaacttcaccctgaactacctgcggctgtgtgtgatcctggagcccatgcaggagctgatgagccgccacaagacctacaacctgagcccccgggactgcctgaagacctgcctcttccagaagtggcagaggatggtggcccctcctgctgagcccacccggcagcccaccaccaagaggaggaagaggaagaacagcaccagcagcaccagcaacagcagcgctggcaacaatgccaacagcacaggcagcaagaagaagaccacagctgccaacctgagcctgagcagccaggtgcccggcctgggcgccatccccaactgcagcctgaaccctggaagagatggagacctgtgccacagcacagctgtgacccccagcggccagttcaaggagaagcactag

SEQ ID NO: 157908 - DNA, 942 bp, synthetic construct
  misc_feature 1..942: note = Description of Artificial Sequence: Synthetic coding sequence
  source 1..942: mol_type = other DNA
atgagcagcacccctcatgaccccttctacagcagccccttcggccccttctacagaagacacaccccctacatggtgcagcctgagtaccgcatctatgagatgaacaagaggctgcagagcaggacagaggacagcgacaacctgtggtgggatgcctttgccacagagttctttgaagatgatgccaccctgaccctgtccttctgcctggaggatggccccaagcgctacaccatcggccgcaccctcatcccccgctacttcagcacagtgtttgaaggaggagtgacagacctgtactacatcctgaagcacagcaaggagagctaccacaacagcagcatcaccgtggactgtgaccagtgcaccatggtgacccagcacggcaagcccatgttcaccaaggtgtgcacagagggccgcctcatcctggagttcacctttgatgacctgatgaggatcaagacctggcacttcaccatccggcagtaccgggagctggtgcccaggagcatcctggccatgcacgcccaggacccccaggtgctggaccagctgagcaagaacatcaccaggatgggcctgaccaacttcaccctgaactacctgcggctgtgtgtgatcctggagcccatgcaggagctgatgagccgccacaagacctacaacctgagcccccgggactgcctgaagacctgcctcttccagaagtggcagaggatggtggcccctcctgctgagcccacccggcagcccaccaccaagaggaggaagaggaagaacagcaccagcagcaccagcaacagcagcgctggcaacaatgccaacagcacaggcagcaagaagaagaccacagctgccaacctgagcctgagcagccaggtgcccatcgccagcatcgcccggagccctgtgtctggctgtgccctgcggacctag

SEQ ID NO: 157909 - DNA, 570 bp, synthetic construct
  misc_feature 1..570: note = Description of Artificial Sequence: Synthetic coding sequence
  source 1..570: mol_type = other DNA
atggtgacccagcacggcaagcccatgttcaccaaggtgtgcacagagggccgcctcatcctggagttcacctttgatgacctgatgaggatcaagacctggcacttcaccatccggcagtaccgggagctggtgcccaggagcatcctggccatgcacgcccaggacccccaggtgctggaccagctgagcaagaacatcaccaggatgggcctgaccaacttcaccctgaactacctgcggctgtgtgtgatcctggagcccatgcaggagctgatgagccgccacaagacctacaacctgagcccccgggactgcctgaagacctgcctcttccagaagtggcagaggatggtggcccctcctgctgagcccacccggcagcccaccaccaagaggaggaagaggaagaacagcaccagcagcaccagcaacagcagcgctggcaacaatgccaacagcacaggcagcaagaagaagaccacagctgccaacctgagcctgagcagccaggtgcccatcgccagcatcgcccggagccctgtgtctggctgtgccctgcggacctag

SEQ ID NO: 157910 - DNA, 495 bp, synthetic construct
  misc_feature 1..495: note = Description of Artificial Sequence: Synthetic coding sequence
  source 1..495: mol_type = other DNA
atggtgcagcctgagtaccgcatctatgagatgaacaagaggctgcagagcaggacagaggacagcgacaacctgtggtgggatgcctttgccacagagttctttgaagatgatgccaccctgaccctgtccttctgcctggaggatggccccaagcgctacaccatcggccgcaccctcatcccccgctacttcagcacagtgtttgaaggaggagtgacagacctgtactacatcctgaagcacagcaaggagagctaccacaacagcagcatcaccgtggactgtgaccagtgcaccatggtgacccagcacggcaagcccatgttcaccaaggtgtgcacagagggccgcctcatcctggagttcacctttgatgacctgatgaggatcaagacctggcacttcaccatccggcagtaccgggagctggtgcccaggagcatcctggccatgcacgcccaggacccccaggtgctggaccagctgtcctag

SEQ ID NO: 157911 - DNA, 333 bp, synthetic construct
  misc_feature 1..333: note = Description of Artificial Sequence: Synthetic coding sequence
  source 1..333: mol_type = other DNA
atgagcagcacccctcatgaccccttctacagcagccccttcggccccttctacagaagacacaccccctacatggtgcagcctgagtaccgcatctatgagatgaacaagaggctgcagagcaggacagaggacagcgacaacctgtggtgggatgcctttgccacagagttctttgaagatgatgccaccctgaccctgtccttctgcctggaggatggccccaagcgctacatcgtgcacagcgctgctgatgcccggggcaactgcaaccagctgggggacagcgagccagatgcctgtgatggcctgctgcagttccccatcatgtag

SEQ ID NO: 157912 - DNA, 321 bp, synthetic construct
  misc_feature 1..321: note = Description of Artificial Sequence: Synthetic coding sequence
  source 1..321: mol_type = other DNA
atgagcagcacccctcatgaccccttctacagcagccccttcggccccttctacagaagacacaccccctacatggtgcagcctgagtaccgcatctatgagatgaacaagaggctgcagagcaggacagaggacagcgacaacctgtggtgggatgcctttgccacagagttctttgaagatgatgccaccctgaccctgtccttctgcctggaggatggccccaagcgctaccgcaccaagaacctgcggcccatcggggagaagatgaacatcaatggcaagtgctaccggcaggacccccacccccccctgctgtag

SEQ ID NO: 157913 - DNA, 1116 bp, synthetic construct
  misc_feature 1..1116: note = Description of Artificial Sequence: Synthetic coding sequence
  source 1..1116: mol_type = other DNA
atgagcagcacccctcatgaccccttctacagcagccccttcggccccttctacagaagacacaccccctacatggtgcagcctgagtaccgcatctatgagatgaacaagaggctgcagagcaggacagaggacagcgacaacctgtggtgggatgcctttgccacagagttctttgaagatgatgccaccctgaccctgtccttctgcctggaggatggccccaagcgctacaccatcggccgcaccctcatcccccgctacttcagcacagtgtttgaaggaggagtgacagacctgtactacatcctgaagcacagcaaggagagctaccacaacagcagcatcaccgtggactgtgaccagtgcaccatggtgacccagcacggcaagcccatgttcaccaaggtgtgcacagagggccgcctcatcctggagttcacctttgatgacctgatgaggatcaagacctggcacttcaccatccggcagtaccgggagctggtgcccaggagcatcctggccatgcacgcccaggacccccaggtgctggaccagctgagcaagaacatcaccaggatgggcctgaccaacttcaccctgaactacctgcggctgtgtgtgatcctggagcccatgcaggagctgatgagccgccacaagacctacaacctgagcccccgggactgcctgaagacctgcctcttccagaagtggcagaggatggtggcccctcctgctgagcccacccggcagcccaccaccaagaggaggaagaggaagaacagcaccagcagcaccagcaacagcagcgctggcaacaatgccaacagcacaggcagcaagaagaagaccacagctgccaacctgagcctgagcagccaggatgtgatggtggtgggggagcccaccctgatgggcggggagtttggagatgaagatgagcggctcatcacccggctggagaacacccagtatgatgctgccaacggcatggatgatgaggaggacttcaacaacagccctgccctgggcaacaacagcccctggaacagcaagcccccagccacccaggagaccaagtcagaaaatcctccaccccaggccagccagtag

SEQ ID NO: 157914 - DNA, 1854 bp, synthetic construct
  misc_feature 1..1854: note = Description of Artificial Sequence: Synthetic coding sequence
  source 1..1854: mol_type = other DNA
atgagctacagcgtgaccctgaccggccctggcccctggggcttccggctgcagggcggcaaggacttcaacatgcccctgaccatcagccgcatcaccccaggcagcaaggccgcccagagccagctgagccagggcgacctggtggtggccattgatggagtgaacacagacaccatgacccacctggaggcccagaacaagatcaagagcgccagctacaacctgagcctgaccctgcagaagagcaagaggcccatccccatcagcaccacagcccctcctgtgcagacccccctgcctgtgatcccccaccagaaggtggtggtgaacagccctgccaatgctgactaccaggagcgcttcaaccccagcgccctgaaggacagcgccctgagcacccacaagcccatcgaggtgaagggcctgggcggcaaggccaccatcatccacgcccagtacaacacccccatctccatgtacagccaggatgccatcatggatgccatcgccggccaggcccaggcccagggcagtgacttcagcggcagcctgcccatcaaggacctggccgtggacagcgccagccctgtgtaccaggccgtcatcaagagccagaacaagccagaagatgaagcagatgagtgggcccggcgcagcagcaacctgcagagccgctccttccgcatcctggcccagatgactggaacagagttcatgcaggaccctgatgaggaggccctgcggcgcagccggccccaggccagcagctacagccctgctgtggccgccagcagcgccccagccacccacaccagctacagcgagggccctgctgccccagcccccaagccccgggtggtgaccacagccagcatccggcccagcgtgtaccagcctgtgcctgccagcacctacagccccagccctggggccaactacagccccaccccctacacccccagccctgccccagcctacacccccagccctgccccagcctacacccccagccctgtgcccacctacacccccagccctgccccagcctacacccccagccctgcccccaactacaacccagcccccagcgtggcctacagcggcggccctgctgagcccgccagccggcccccctgggtgacagatgacagcttcagccagaagtttgcccctgggaagagcaccaccagcatcagcaagcagaccctgccccggggcggccctgcctacaccccagctggcccccaggtgccccccctggcccggggcaccgtgcagagagctgagcgcttccctgccagcagcaggacccccctgtgtggccactgcaacaacgtcatccggggccccttcctggtggccatgggccgctcctggcaccctgaggagttcacctgtgcctactgcaagaccagcctggctgatgtgtgctttgtggaggagcagaacaacgtgtactgtgagcgctgctatgagcagttctttgcccccctgtgtgccaagtgcaacaccaagatcatgggagaggtgatgcacgccctgcggcagacctggcacaccacctgctttgtgtgtgccgcctgcaagaagccctttggaaacagcctcttccacatggaggatggagagccctactgtgagaaggactacatcaacctcttcagcaccaagtgccacggctgtgacttccctgtggaggccggggacaagttcatcgaggccctgggccacacctggcatgacacctgcttcatctgtgctgtgtgccacgtgaacctggagggccagcccttctacagcaagaaggaccggcccctgtgcaagaagcacgcccacaccatcaacctgtag

SEQ ID NO: 157915 - DNA, 993 bp, synthetic construct
  misc_feature 1..993: note = Description of Artificial Sequence: Synthetic coding sequence
  source 1..993: mol_type = other DNA
atgagctacagcgtgaccctgaccggccctggcccctggggcttccggctgcagggcggcaaggacttcaacatgcccctgaccatcagccgcatcaccccaggcagcaaggccgcccagagccagctgagccagggcgacctggtggtggccattgatggagtgaacacagacaccatgacccacctggaggcccagaacaagatcaagagcgccagctacaacctgagcctgaccctgcagaagagcaagaggcccatccccatcagcaccacagcccctcctgtgcagacccccctgcctgtgatcccccaccagaaggaccctgccctggacaccaacggcagcctggtggcccccagccccagccctgaggcccgggccagccctggcaccccaggcaccccagagctgcggcccaccttcagccctgccttcagccggcccagcgccttcagcagcctggccgaggccagtgaccccggccccccccgggccagcctgcgggccaagaccagccctgagggcgcccgggacctgctgggccccaaggccctgcccggcagcagccagccccggcagtacaacaaccccatcggcctgtacagcgctgagaccctgcgggagatggcccagatgtaccagatgagcctgcggggcaaggccagcggcgtgggcctgcccggcggcagcctgcccatcaaggacctggccgtggacagcgccagccctgtgtaccaggccgtcatcaagagccagaacaagccagaagatgaagcagatgagtgggcccggcgcagcagcaacctgcagagccgctccttccgcatcctggcccagatgactggaacagagttcatgcaggaccctgatgaggaggccctgcggcgcagccgggagagatttgaaacagagaggaacagccccaggtttgccaagctgaggaactggcaccacggcctgagcgcccagatcctgaatgtgaagagctag

SEQ ID NO: 157916 - DNA, 1413 bp, synthetic construct
  misc_feature 1..1413: note = Description of Artificial Sequence: Synthetic coding sequence
  source 1..1413: mol_type = other DNA
atgagctacagcgtgaccctgaccggccctggcccctggggcttccggctgcagggcggcaaggacttcaacatgcccctgaccatcagccgcatcaccccaggcagcaaggccgcccagagccagctgagccagggcgacctggtggtggccattgatggagtgaacacagacaccatgacccacctggaggcccagaacaagatcaagagcgccagctacaacctgagcctgaccctgcagaagagcaagaggcccatccccatcagcaccacagcccctcctgtgcagacccccctgcctgtgatcccccaccagaaggccagcagctacagccctgctgtggccgccagcagcgccccagccacccacaccagctacagcgagggccctgctgccccagcccccaagccccgggtggtgaccacagccagcatccggcccagcgtgtaccagcctgtgcctgccagcacctacagccccagccctggggccaactacagccccaccccctacacccccagccctgccccagcctacacccccagccctgccccagcctacacccccagccctgtgcccacctacacccccagccctgccccagcctacacccccagccctgcccccaactacaacccagcccccagcgtggcctacagcggcggccctgctgagcccgccagcaggcctccctgggtgacagatgacagcttcagccagaagtttgcccctgggaagagcaccaccagcatcagcaagcagaccctgccccggggcggccctgcctacaccccagctggcccccaggtgccccccctggcccggggcaccgtgcagagagctgagcgcttccctgccagcagcaggacccccctgtgtggccactgcaacaacgtcatccggggccccttcctggtggccatgggccgctcctggcaccctgaggagttcacctgtgcctactgcaagaccagcctggctgatgtgtgctttgtggaggagcagaacaacgtgtactgtgagcgctgctatgagcagttctttgcccccctgtgtgccaagtgcaacaccaagatcatgggagaggtgatgcacgccctgcggcagacctggcacaccacctgctttgtgtgtgccgcctgcaagaagcccttcggcaacagcctcttccacatggaggatggagagccctactgtgagaaggactacatcaacctcttcagcaccaagtgccacggctgtgacttccctgtggaggccggggacaagttcatcgaggccctgggccacacctggcatgacacctgcttcatctgtgctgtgtgccacgtgaacctggagggccagcccttctacagcaagaaggaccggcccctgtgcaagaagcacgcccacaccatcaacctgtag

SEQ ID NO: 157917 - DNA, 2184 bp, synthetic construct
  misc_feature 1..2184: note = Description of Artificial Sequence: Synthetic coding sequence
  source 1..2184: mol_type = other DNA
atgagctacagcgtgaccctgaccggccctggcccctggggcttccggctgcagggcggcaaggacttcaacatgcccctgaccatcagccgcatcaccccaggcagcaaggccgcccagagccagctgagccagggcgacctggtggtggccattgatggagtgaacacagacaccatgacccacctggaggcccagaacaagatcaagagcgccagctacaacctgagcctgaccctgcagaagagcaagaggcccatccccatcagcaccacagcccctcctgtgcagacccccctgcctgtgatcccccaccagaaggaccctgccctggacaccaacggcagcctggtggcccccagccccagccctgaggcccgggccagccctggcaccccaggcaccccagagctgcggcccaccttcagccctgccttcagccggcccagcgccttcagcagcctggccgaggccagtgaccccggccccccccgggccagcctgcgggccaagaccagccctgagggcgcccgggacctgctgggccccaaggccctgcccggcagcagccagccccggcagtacaacaaccccatcggcctgtacagcgctgagaccctgcgggagatggcccagatgtaccagatgagcctgcggggcaaggccagcggcgtgggcctgcccggcggcagcctgcccatcaaggacctggccgtggacagcgccagccctgtgtaccaggccgtcatcaagagccagaacaagccagaagatgaagcagatgagtgggcccggcgcagcagcaacctgcagagccgctccttccgcatcctggcccagatgactggaacagagttcatgcaggaccctgatgaggaggccctgcggcgcagcagcacccccatcgagcacgcccctgtgtgcaccagccaggccaccacccccctgctgcctgccagcgcccagcccccagctgctgccagccccagcgctgccagcccccccctggccacagctgctgcccacacagccatcgccagcgccagcaccacagccccagccagcagccctgctgacagcccccggccccaggccagcagctacagccctgctgtggccgccagcagcgccccagccacccacaccagctacagcgagggccctgctgccccagcccccaagccccgggtggtgaccacagccagcatccggcccagcgtgtaccagcctgtgcctgccagcacctacagccccagccctggggccaactacagccccaccccctacacccccagccctgccccagcctacacccccagccctgccccagcctacacccccagccctgtgcccacctacacccccagccctgccccagcctacacccccagccctgcccccaactacaacccagcccccagcgtggcctacagcggcggccctgctgagcccgccagccggcccccctgggtgacagatgacagcttcagccagaagtttgcccctgggaagagcaccaccagcatcagcaagcagaccctgccccggggcggccctgcctacaccccagctggcccccaggtgccccccctggcccggggcaccgtgcagagagctgagcgcttccctgccagcagcaggacccccctgtgtggccactgcaacaacgtcatccggggccccttcctggtggccatgggccgctcctggcaccctgaggagttcacctgtgcctactgcaagaccagcctggctgatgtgtgctttgtggaggagcagaacaacgtgtactgtgagcgctgctatgagcagttctttgcccccctgtgtgccaagtgcaacaccaagatcatgggagaggtgatgcacgccctgcggcagacctggcacaccacctgctttgtgtgtgccgcctgcaagaagccctttggaaacagcctcttccacatggaggatggagagccctactgtgagaaggactacatcaacctcttcagcaccaagtgccacggctgtgacttccctgtggaggccggggacaagttcatcgaggccctgggccacacctggcatgacacctgcttcatctgtgctgtgtgccacgtgaacctggagggccagcccttctacagcaagaaggaccggcccctgtgcaagaagcacgcccacaccatcaacctgtag

SEQ ID NO: 157918 - DNA, 1197 bp, synthetic construct
  misc_feature 1..1197: note = Description of Artificial Sequence: Synthetic coding sequence
  source 1..1197: mol_type = other DNA
atgagctacagcgtgaccctgaccggccctggcccctggggcttccggctgcagggcggcaaggacttcaacatgcccctgaccatcagccgcatcaccccaggcagcaaggccgcccagagccagctgagccagggcgacctggtggtggccattgatggagtgaacacagacaccatgacccacctggaggcccagaacaagatcaagagcgccagctacaacctgagcctgaccctgcagaagagcaagaggcccatccccatcagcaccacagcccctcctgtgcagacccccctgcctgtgatcccccaccagaaggaccctgccctggacaccaacggcagcctggtggcccccagccccagccctgaggcccgggccagccctggcaccccaggcaccccagagctgcggcccaccttcagccctgccttcagccggcccagcgccttcagcagcctggccgaggccagtgaccccggccccccccgggccagcctgcgggccaagaccagccctgagggcgcccgggacctgctgggccccaaggccctgcccggcagcagccagccccggcagtacaacaaccccatcggcctgtacagcgctgagaccctgcgggagatggcccagatgtaccagatgagcctgcggggcaaggccagcggcgtgggcctgcccggcggcgctgactaccaggagcgcttcaaccccagcgccctgaaggacagcgccctgagcacccacaagcccatcgaggtgaagggcctgggcggcaaggccaccatcatccacgcccagtacaacacccccatctccatgtacagccaggatgccatcatggatgccatcgccggccaggcccaggcccagggcagtgacttcagcggcagcctgcccatcaaggacctggccgtggacagcgccagccctgtgtaccaggccgtcatcaagagccagaacaagccagaagatgaagcagatgagtgggcccggcgcagcagcaacctgcagagccgctccttccgcatcctggcccagatgactggaacagagttcatgcaggaccctgatgaggaggccctgcggcgcagccgggagagatttgaaacagagaggaacagccccaggtttgccaagctgaggaactggcaccacggcctgagcgcccagatcctgaatgtgaagagctag

SEQ ID NO: 157919 - DNA, 852 bp, synthetic construct
  misc_feature 1..852: note = Description of Artificial Sequence: Synthetic coding sequence
  source 1..852: mol_type = other DNA
atgagctacagcgtgaccctgaccggccctggcccctggggcttccggctgcagggcggcaaggacttcaacatgcccctgaccatcagccgcatcaccccaggcagcaaggccgcccagagccagctgagccagggcgacctggtggtggccattgatggagtgaacacagacaccatgacccacctggaggcccagaacaagatcaagagcgccagctacaacctgagcctgaccctgcagaagagcaagaggcccatccccatcagcaccacagcccctcctgtgcagacccccctgcctgtgatcccccaccagaaggtggtggtgaacagccctgccaatgctgactaccaggagcgcttcaaccccagcgccctgaaggacagcgccctgagcacccacaagcccatcgaggtgaagggcctgggcggcaaggccaccatcatccacgcccagtacaacacccccatctccatgtacagccaggatgccatcatggatgccatcgccggccaggcccaggcccagggcagtgacttcagcggcagcctgcccatcaaggacctggccgtggacagcgccagccctgtgtaccaggccgtcatcaagagccagaacaagccagaagatgaagcagatgagtgggcccggcgcagcagcaacctgcagagccgctccttccgcatcctggcccagatgactggaacagagttcatgcaggaccctgatgaggaggccctgcggcgcagccgggagagatttgaaacagaaagaaacagccccaggtttgccaagctgaggaactggcaccacggcctgagcgcccagatcctgaatgtgaagagctag

SEQ ID NO: 157920 - DNA, 2199 bp, synthetic construct
  misc_feature 1..2199: note = Description of Artificial Sequence: Synthetic coding sequence
  source 1..2199: mol_type = other DNA
atgagctacagcgtgaccctgaccggccctggcccctggggcttccggctgcagggcggcaaggacttcaacatgcccctgaccatcagccgcatcaccccaggcagcaaggccgcccagagccagctgagccagggcgacctggtggtggccattgatggagtgaacacagacaccatgacccacctggaggcccagaacaagatcaagagcgccagctacaacctgagcctgaccctgcagaagagcaagaggcccatccccatcagcaccacagcccctcctgtgcagacccccctgcctgtgatcccccaccagaaggaccctgccctggacaccaacggcagcctggtggcccccagccccagccctgaggcccgggccagccctggcaccccaggcaccccagagctgcggcccaccttcagccctgccttcagccggcccagcgccttcagcagcctggccgaggccagtgaccccggccccccccgggccagcctgcgggccaagaccagccctgagggcgcccgggacctgctgggccccaaggccctgcccggcagcagccagccccggcagtacaacaaccccatcggcctgtacagcgctgagaccctgcgggagatggcccagatgtaccagatgagcctgcggggcaaggccagcggcgtgggcctgcccggcggcgctgactaccaggagcgcttcaaccccagcgccctgaaggacagcgccctgagcacccacaagcccatcgaggtgaagggcctgggcggcaaggccaccatcatccacgcccagtacaacacccccatctccatgtacagccaggatgccatcatggatgccatcgccggccaggcccaggcccagggcagtgacttcagcggcagcctgcccatcaaggacctggccgtggacagcgccagccctgtgtaccaggccgtcatcaagagccagaacaagccagaagatgaagcagatgagtgggcccggcgcagcagcaacctgcagagccgctccttccgcatcctggcccagatgactggaacagagttcatgcaggaccctgatgaggaggccctgcggcgcagccggccccaggccagcagctacagccctgctgtggccgccagcagcgccccagccacccacaccagctacagcgagggccctgctgccccagcccccaagccccgggtggtgaccacagccagcatccggcccagcgtgtaccagcctgtgcctgccagcacctacagccccagccctggggccaactacagccccaccccctacacccccagccctgccccagcctacacccccagccctgccccagcctacacccccagccctgtgcccacctacacccccagccctgccccagcctacacccccagccctgcccccaactacaacccagcccccagcgtggcctacagcggcggccctgctgagcccgccagcaggcctccctgggtgacagatgacagcttcagccagaagtttgcccctgggaagagcaccaccagcatcagcaagcagaccctgccccggggcggccctgcctacaccccagctggcccccaggtgccccccctggcccggggcaccgtgcagagagctgagcgcttccctgccagcagcaggacccccctgtgtggccactgcaacaacgtcatccggggccccttcctggtggccatgggccgctcctggcaccctgaggagttcacctgtgcctactgcaagaccagcctggctgatgtgtgctttgtggaggagcagaacaacgtgtactgtgagcgctgctatgagcagttctttgcccccctgtgtgccaagtgcaacaccaagatcatgggagaggtgatgcacgccctgcggcagacctggcacaccacctgctttgtgtgtgccgcctgcaagaagcccttcggcaacagcctcttccacatggaggatggagagccctactgtgagaaggactacatcaacctcttcagcaccaagtgccacggctgtgacttccctgtggaggccggggacaagttcatcgaggccctgggccacacctggcatgacacctgcttcatctgtgctgtgtgccacgtgaacctggagggccagcccttctacagcaagaaggaccggcccctgtgcaagaagcacgcccacaccatcaacctgtag

SEQ ID NO: 157921 - DNA, 1854 bp, synthetic construct; identical to SEQ ID NO: 157914
  misc_feature 1..1854: note = Description of Artificial Sequence: Synthetic coding sequence
  source 1..1854: mol_type = other DNA

SEQ ID NO: 157922 - DNA, 1947 bp, synthetic construct
  misc_feature 1..1947: note = Description of Artificial Sequence: Synthetic coding sequence
  source 1..1947: mol_type = other DNA
atgagctacagcgtgaccctgaccggccctggcccctggggcttccggctgcagggcggcaaggacttcaacatgcccctgaccatcagccgcatcaccccaggcagcaaggccgcccagagccagctgagccagggcgacctggtggtggccattgatggagtgaacacagacaccatgacccacctggaggcccagaacaagatcaagagcgccagctacaacctgagcctgaccctgcagaagagcaagaggcccatccccatcagcaccacagcccctcctgtgcagacccccctgcctgtgatcccccaccagaaggaccctgccctggacaccaacggcagcctggtggcccccagccccagccctgaggcccgggccagccctggcaccccaggcaccccagagctgcggcccaccttcagccctgccttcagccggcccagcgccttcagcagcctggccgaggccagtgaccccggccccccccgggccagcctgcgggccaagaccagccctgagggcgcccgggacctgctgggccccaaggccctgcccggcagcagccagccccggcagtacaacaaccccatcggcctgtacagcgctgagaccctgcgggagatggcccagatgtaccagatgagcctgcggggcaaggccagcggcgtgggcctgcccggcggcagcctgcccatcaaggacctggccgtggacagcgccagccctgtgtaccaggccgtcatcaagagccagaacaagccagaagatgaagcagatgagtgggcccggcgcagcagcaacctgcagagccgctccttccgcatcctggcccagatgactggaacagagttcatgcaggaccctgatgaggaggccctgcggcgcagccggccccaggccagcagctacagccctgctgtggccgccagcagcgccccagccacccacaccagctacagcgagggccctgctgccccagcccccaagccccgggtggtgaccacagccagcatccggcccagcgtgtaccagcctgtgcctgccagcacctacagccccagccctggggccaactacagccccaccccctacacccccagccctgtgcccacctacacccccagccctgccccagcctacacccccagccctgcccccaactacaacccagcccccagcgtggcctacagcggcggccctgctgagcccgccagcaggcctccctgggtgacagatgacagcttcagccagaagtttgcccctgggaagagcaccaccagcatcagcaagcagaccctgccccggggcggccctgcctacaccccagctggcccccaggtgccccccctggcccggggcaccgtgcagagagctgagcgcttccctgccagcagcaggacccccctgtgtggccactgcaacaacgtcatccggggccccttcctggtggccatgggccgctcctggcaccctgaggagttcacctgtgcctactgcaagaccagcctggctgatgtgtgctttgtggaggagcagaacaacgtgtactgtgagcgctgctatgagcagttctttgcccccctgtgtgccaagtgcaacaccaagatcatgggagaggtgatgcacgccctgcggcagacctggcacaccacctgctttgtgtgtgccgcctgcaagaagcccttcggcaacagcctcttccacatggaggatggagagccctactgtgagaaggactacatcaacctcttcagcaccaagtgccacggctgtgacttccctgtggaggccggggacaagttcatcgaggccctgggccacacctggcatgacacctgcttcatctgtgctgtgtgccacgtgaacctggagggccagcccttctacagcaagaaggaccggcccctgtgcaagaagcacgcccacaccatcaacctgtag

SEQ ID NO: 157923 - DNA, 696 bp, synthetic construct
  misc_feature 1..696: note = Description of Artificial Sequence: Synthetic coding sequence
  source 1..696: mol_type = other DNA
atgagctacagcgtgaccctgaccggccctggcccctggggcttccggctgcagggcggcaaggacttcaacatgcccctgaccatcagccgcatcaccccaggcagcaaggccgcccagagccagctgagccagggcgacctggtggtggccattgatggagtgaacacagacaccatgacccacctggaggcccagaacaagatcaagagcgccagctacaacctgagcctgaccctgcagaagagcaagaggcccatccccatcagcaccacagcccctcctgtgcagacccccctgcctgtgatcccccaccagaaggaccctgccctggacaccaacggcagcctggtggcccccagccccagccctgaggcccgggccagccctggcaccccaggcaccccagagctgcggcccaccttcagccctgccttcagccggcccagcgccttcagcagcctggccgaggccagtgaccccggccccccccgggccagcctgcgggccaagaccagccctgagggcgcccgggacctgctgggccccaaggccctgcccggcagcagccagccccggcagtacaacaaccccatcggcctgtacagcgctgagaccctgcgggagatggcccagatgtaccagatgagcctgcggggcaaggccagcggcgtgggcctgcccggcggctggtag

SEQ ID NO: 157924 - DNA, 1839 bp, synthetic construct
  misc_feature 1..1839: note = Description of Artificial Sequence: Synthetic coding sequence
  source 1..1839: mol_type = other DNA
atgagccaccccagctggctgccccccaagagcactggagagcccctgggccacgtgcctgccaggatggagaccacccacagctttggaaaccccagcatctctgtgtccacccagcagccccccaagaagtttgcccctgtggtggcccccaagcccaagtacaacccctacaagcagcctggaggagagggggacttcctgcccccacctcctccacccctggatgacagcagcgccctgcccagcatcagcggcaacttccccccacctccacccctggatgaggaggccttcaaggtgcagggcaaccctgggggcaagaccctggaggagaggaggagcagcctggatgctgagattgacagcctgaccagcatcctggccgacctggagtgcagcagcccctacaagcccaggcctccccagagcagcacaggcagcacagccagcccccctgtgtccacccctgtgacaggccacaagaggatggtgatccccaaccagccccccctgacagccaccaagaagagcaccctgaagccccagcctgccccccaggccggccccatccctgtggcccccatcggcaccctgaagccccagccccagcctgtgcctgccagctacaccacagccagcaccagcagccggcccaccttcaacgtgcaggtgaagagcgcccagcccagcccccactacatggccgcccccagcagcggccagatctacggcagcggcccccagggctacaacacccagcctgtgcctgtgtctggccagtgccccccacccagcacccggggcggcatggactatgcctacatccccccacctggcctgcagcctgagcccggctacggctacgcccccaaccagggccgctactatgagggctactatgctgctggccctggctatggaggaagaaatgacagcgaccccacctacggccagcagggccaccccaacacctggaagcgggagcccggctacaccccacctggagctggcaaccagaaccccccaggcatgtaccctgtgacaggccccaagaagacctacatcacagatcctgtgtctgccccctgtgccccacccctgcagcccaagggcggccacagcggccagctgggccccagctctgtggcccccagcttccggccagaagatgagctggagcacctgaccaagaagatgctgtatgacatggagaaccccccagcagatgagtacttcggccgctgtgcccgctgtggagaaaatgtggtgggggagggcaccggctgcacagccatggaccaggtgttccacgtggactgcttcacctgcatcatctgcaacaacaagctgcggggccagcccttctatgctgtggagaagaaggcctactgtgagccctgctacatcaacaccctggagcagtgcaatgtgtgcagcaagcccatcatggagcgcatcctgcgggccaccgggaaggcctaccacccccactgcttcacctgtgtgatgtgccacaggagcctggatggcatccccttcaccgtggatgctgggggcctcatccactgcatcgaggacttccacaagaagtttgccccccgctgcagcgtgtgcaaggagcccatcatgcctgcccctggccaggaggagaccgtgagaattgtggccctggaccgggacttccacgtgcactgctaccgctgtgaggactgtggcggcctgctgtctgagggggacaaccagggctgctaccccctggatggccacatcctgtgcaagacctgcaacagcgcccgcatccgggtgctgacagccaaggccagcacagacctgtag

SEQ ID NO: 157925 - DNA, 282 bp, synthetic construct
  misc_feature 1..282: note = Description of Artificial Sequence: Synthetic coding sequence
  source 1..282: mol_type = other DNA
atgagccaccccagctggctgccccccaagagcactggagagcccctgggccacgtgcctgccaggatggagaccacccacagctttggaaaccccagcatctctgtgtccacccagcagccccccaagaagtttgcccctgtggtggcccccaagcccaagtacaacccctacaagcagcctggaggagagggggacttcctgcccccacctcctccacccctggatgacagcagcgccctgcccagcatcagcggcaacttccccccacctccaccctag

SEQ ID NO: 157926 - DNA, 456 bp, synthetic construct
  misc_feature 1..456: note = Description of Artificial Sequence: Synthetic coding sequence
  source 1..456: mol_type = other DNA
atgagccaccccagctggctgccccccaagagcactggagagcccctgggccacgtgcctgccaggatggagaccacccacagctttggaaaccccagcatctctgtgtccacccagcagccccccaagaagtttgcccctgtggtggcccccaagcccaagtacaacccctacaagcagcctggaggagagggggacttcctgcccccacctcctccacccctggatgacagcagcgccctgcccagcatcagcggcaacttccccccacctccacccctggatgaggaggccttcaaggtgcagggcaaccctgggggcaagaccctggaggagaggaggagcagcctggatgctgagattgacagcctgaccagcatcctggccgacctggagtgcagcagcccctacaagcccaggcctccccagagcagcacaggcagcacagccagctag

SEQ ID NO: 157927 - DNA, 336 bp, synthetic construct
  misc_feature 1..336: note = Description of Artificial Sequence: Synthetic coding sequence
  source 1..336: mol_type = other DNA
atgagccaccccagctggctgccccccaagagcactggagagcccctgggccacgtgcctgccaggatggagaccacccacagctttggaaaccccagcatctctgtgtccacccagcagccccccaagaagtttgcccctgtggtggcccccaagcccaagtacaacccctacaagcagcctggaggagagggggacttcctgcccccacctcctccacccctggatgacagcagcgccctgcccagcatcagcggcaacttccccccacctccacccctggatgaggaggccttcaaggtgcagggcaaccctgggggcaagaccctggagtag

SEQ ID NO: 157928 - DNA, 201 bp, synthetic construct
  misc_feature 1..201: note = Description of Artificial Sequence: Synthetic coding sequence
  source 1..201: mol_type = other DNA
atgagccaccccagctggctgccccccaagagcactggagagcccctgggccacgtgcctgccaggatggagaccacccacagctttggaaaccccagcatctctgtgtccacccagcagccccccaagaagtttgcccctgtggtggcccccaagcccaagtacaacccctacaagcagcctggaggagagggggactag

SEQ ID NO: 157929 - DNA, 162 bp, synthetic construct
  misc_feature 1..162: note = Description of Artificial Sequence: Synthetic coding sequence
  source 1..162: mol_type = other DNA
atgagccaccccagctggctgccccccaagagcactggagagcccctgggccacgtgcctgccaggatggagaccacccacagctttggaaaccccagcatctctgtgtccacccagcagccccccaagaagtttgcccctgtggtggcccccaagccctag

SEQ ID NO: 157930 - DNA, 144 bp, synthetic construct
  misc_feature 1..144: note = Description of Artificial Sequence: Synthetic coding sequence
  source 1..144: mol_type = other DNA
atgagccaccccagctggctgccccccaagagcactggagagcccctgggccacgtgcctgccaggatggagaccacccacagctttggaaaccccagcatctctgtgtccacccagcagccccccaagaagtttgccccctag

SEQ ID NO: 157931 - DNA, 1287 bp, synthetic construct
  misc_feature 1..1287: note = Description of Artificial Sequence: Synthetic coding sequence
  source 1..1287: mol_type = other DNA
atgagccaccccagctggctgccccccaagagcactggagagcccctgggccacgtgcctgccaggatggagaccacccacagctttggaaaccccagcatctctgtgtccacccagcagccccccaagaagtttgcccctgtggtggcccccaagcccaagtacaacccctacaagcagcctggaggagagggggacttcctgcccccacctcctccacccctggatgacagcagcgccctgcccagcatcagcggcaacttccccccacctccacccctggatgaggaggccttcaaggtgcagggcaaccctgggggcaagaccctggaggagaggaggagcagcctggatgctgagattgacagcctgaccagcatcctggccgacctggagtgcagcagcccctacaagcccaggcctccccagagcagcacaggcagcacagccagcccccctgtgtccacccctgtgacaggccacaagaggatggtgatccccaaccagccccccctgacagccaccaagaagagcaccctgaagccccagcctgccccccaggccggccccatccctgtggcccccatcggcaccctgaagccccagccccagcctgtgcctgccagctacaccacagccagcaccagcagccggcccaccttcaacgtgcaggtgaagagcgcccagcccagcccccactacatggccgcccccagcagcggccagatctacggcagcggcccccagggctacaacacccagcctgtgcctgtgtctggccagtgccccccacccagcacccggggcggcatggactatgcctacatccccccacctggcctgcagcctgagcccggctacggctacgcccccaaccagggccgctactatgagggctactatgctgctggccctggctatggaggaagaaatgacagcgaccccacctacggccagcagggccaccccaacacctggaagcgggagcccggctacaccccacctggagctggcaaccagaaccccccaggcatgtaccctgtgacaggccccaagaagacctacatcacagatcctgtgtctgccccctgtgccccacccctgcagcccaagggcggccacagcggccagctgggccccagctctgtggcccccagcttccggccagaagatgagctggagcacctgaccaagaagatgctgtatgacatggagaaccccccagcagatgagtactttggagagtggggcctggagctgaccagcgaggtgaccatcctgctgtag

SEQ ID NO: 157932 - DNA, 198 bp, synthetic construct
  misc_feature 1..198: note = Description of Artificial Sequence: Synthetic coding sequence
  source 1..198: mol_type = other DNA
atgagccaccccagctggctgccccccaagagcactggagagcccctgggccacgtgcctgccaggatggagaccacccacagctttggaaaccccagcatctctgtgtccacccagcagccccccaagaagtttgcccctgtggtggcccccaagcccaagtacaacccctacaagcagcctggaggagagggctag

SEQ ID NO: 157933 - DNA, 174 bp, synthetic construct
  misc_feature 1..174: note = Description of Artificial Sequence: Synthetic coding sequence
  source 1..174: mol_type = other DNA
atgagccaccccagctggctgccccccaagagcactggagagcccctgggccacgtgcctgccaggatggagaccacccacagctttggaaaccccagcatctctgtgtccacccagcagccccccaagaagtttgcccctgtggtggcccccaagcccaagtacaacccctag

SEQ ID NO: 157934 - DNA, 1839 bp, synthetic construct; identical to SEQ ID NO: 157924
  misc_feature 1..1839: note = Description of Artificial Sequence: Synthetic coding sequence
  source 1..1839: mol_type = other DNA

SEQ ID NO: 157935 - DNA, 471 bp, synthetic construct
  misc_feature 1..471: note = Description of Artificial Sequence: Synthetic coding sequence
  source 1..471: mol_type = other DNA
atgcagaagaaggagaagagctttggcatccagatgctgtctgtgcagcctgacaccaagcccaagggctgtgccggctgcaacaggaagatcaaggaccgctacctgctgaaggccctggacaagtactggcatgaggactgcctgaagtgtgcctgctgtgactgccgcctgggggaggtgggcagcaccctgtacaccaaggccaacctgatcctgtgcagaagagactacctgcggctgtttggagtgactggaaactgtgccgcctgcagcaagctgatcccagcctttgagatggtgatgagggccaaggacaacgtgtaccacctggactgctttgcctgccagctgtgcaaccagcgcttctgtgtgggggacaagttcttcctgaagaacaacatgatcctgtgccagacagattatgaggagggcctgatgaaggagggctacgccccccaggtgaggtag

SEQ ID NO: 157936 - DNA, 438 bp, synthetic construct
  misc_feature 1..438: note = Description of Artificial Sequence: Synthetic coding sequence
  source 1..438: mol_type = other DNA
atgctgtctgtgcagcctgacaccaagcccaagggctgtgccggctgcaacaggaagatcaaggaccgctacctgctgaaggccctggacaagtactggcatgaggactgcctgaagtgtgcctgctgtgactgccgcctgggggaggtgggcagcaccctgtacaccaaggccaacctgatcctgtgccggcgggactacctgcggctgtttggagtgacaggcaactgtgccgcctgcagcaagctgatcccagcctttgagatggtgatgagggccaaggacaacgtgtaccacctggactgctttgcctgccagctgtgcaaccagcgcttctgtgtgggggacaagttcttcctgaagaacaacatgatcctgtgccagacagattatgaggagggcctgatgaaggagggctacgccccccaggtgaggtag

SEQ ID NO: 157937 - DNA, 438 bp, synthetic construct; identical to SEQ ID NO: 157936
  misc_feature 1..438: note = Description of Artificial Sequence: Synthetic coding sequence
  source 1..438: mol_type = other DNA

SEQ ID NO: 157938 - DNA, 438 bp, synthetic construct; identical to SEQ ID NO: 157936
  misc_feature 1..438: note = Description of Artificial Sequence: Synthetic coding sequence
  source 1..438: mol_type = other DNA

SEQ ID NO: 157939 - DNA, 438 bp, synthetic construct; identical to SEQ ID NO: 157936
  misc_feature 1..438: note = Description of Artificial Sequence: Synthetic coding sequence
  source 1..438: mol_type = other DNA

SEQ ID NO: 157940 - DNA, 438 bp, synthetic construct; identical to SEQ ID NO: 157936
  misc_feature 1..438: note = Description of Artificial Sequence: Synthetic coding sequence
  source 1..438: mol_type = other DNA

SEQ ID NO: 157941 - DNA, 438 bp, synthetic construct; identical to SEQ ID NO: 157936
  misc_feature 1..438: note = Description of Artificial Sequence: Synthetic coding sequence
  source 1..438: mol_type = other DNA

SEQ ID NO: 157942 - DNA, 438 bp, synthetic construct; identical to SEQ ID NO: 157936
  misc_feature 1..438: note = Description of Artificial Sequence: Synthetic coding sequence
  source 1..438: mol_type = other DNA

SEQ ID NO: 157943 - DNA, 357 bp, synthetic construct
  misc_feature 1..357: note = Description of Artificial Sequence: Synthetic coding sequence
  source 1..357: mol_type = other DNA
atgctgtctgtgcagcctgacaccaagcccaagggctgtgccggctgcaacaggaagatcaaggaccgctacctgctgaaggccctggacaagtactggcatgaggactgcctgaagtgtgcctgctgtgactgccgcctgggggaggtgggcagcaccctgtacaccaaggccaacctgatcctgtgccggcgggactacctgcggctgtttggagtgacaggcaactgtgccgcctgcagcaagctgatcccagcctttgagatggtgatgagggccaaggacaacgtgtaccacctggactgctttgcctgccagctgtgcaaccagcgcttctgtgtgggggacaagttctag

SEQ ID NO: 157944 - DNA, 177 bp, synthetic construct
  misc_feature 1..177: note = Description of Artificial Sequence: Synthetic coding sequence
  source 1..177: mol_type = other DNA
atgctgtctgtgcagcctgacaccaagcccaagggctgtgccggctgcaacaggaagatcaaggaccgctacctgctgaaggccctggacaagtactggcatgaggactgcctgaagtgtgcctgctgtgactgccgcctgggggaggtgggcagcaccctgtacaccaaggcctag

SEQ ID NO: 157945 - DNA, 294 bp, synthetic construct
  misc_feature 1..294: note = Description of Artificial Sequence: Synthetic coding sequence
  source 1..294: mol_type = other DNA
atgctgtctgtgcagcctgacaccaagcccaagggctgtgccggctgcaacaggaagatcaaggaccgctacctgctgaaggccctggacaagtactggcatgaggactgcctgaagtgtgcctgctgtgactgccgcctgggggaggtgggcagcaccctgtacaccaaggccaacctgatcctgtgccggcgggactacctgcggctgtttggagtgacaggcaactgtgccgcctgcagcaagctgatcccagcctttgagatggtgatgagggccaaggacaacgtgtag

SEQ ID NO: 157946 - DNA, 357 bp, synthetic construct; identical to SEQ ID NO: 157943
  misc_feature 1..357: note = Description of Artificial Sequence: Synthetic coding sequence
  source 1..357: mol_type = other DNA

SEQ ID NO: 157947 - DNA, 255 bp, synthetic construct
  misc_feature 1..255: note = Description of Artificial Sequence: Synthetic coding sequence
  source 1..255: mol_type = other DNA
atgctgtctgtgcagcctgacaccaagcccaagggctgtgccggctgcaacaggaagatcaaggaccgctacctgctgaaggccctggacaagtactggcatgaggactgcctgaagtgtgcctgctgtgactgccgcctgggggaggtgggcagcaccctgtacaccaaggccaacctgatcctgtgccggcgggactacctgcggctgtttggagtgacaggcaactgtgccgcctgcagcaagctgatctag

SEQ ID NO: 157948 - DNA, 438 bp, synthetic construct; identical to SEQ ID NO: 157936
  misc_feature 1..438: note = Description of Artificial Sequence: Synthetic coding sequence
  source 1..438: mol_type = other DNA

SEQ ID NO: 157949 - DNA, 492 bp, synthetic construct
  misc_feature 1..492: note = Description of Artificial Sequence: Synthetic coding sequence
  source 1..492: mol_type = other DNA
atgctgatggagggcggccgggctgctgctgccagaaatgtgagcagcatccagatgctgtctgtgcagcctgacaccaagcccaagggctgtgccggctgcaacaggaagatcaaggaccgctacctgctgaaggccctggacaagtactggcatgaggactgcctgaagtgtgcctgctgtgactgccgcctgggggaggtgggcagcaccctgtacaccaaggccaacctgatcctgtgccggcgggactacctgcggctgtttggagtgacaggcaactgtgccgcctgcagcaagctgatcccagcctttgagatggtgatgagggccaaggacaacgtgtaccacctggactgctttgcctgccagctgtgcaaccagcgcttctgtgtgggggacaagttcttcctgaagaacaacatgatcctgtgccagacagattatgaggagggcctgatgaaggagggctacgccccccaggtgaggtag

SEQ ID NO: 157950 - DNA, 438 bp, synthetic construct; identical to SEQ ID NO: 157936
  misc_feature 1..438: note = Description of Artificial Sequence: Synthetic coding sequence
  source 1..438: mol_type = other DNA

SEQ ID NO: 157951 - DNA, 378 bp, synthetic construct
  misc_feature 1..378: note = Description of Artificial Sequence: Synthetic coding sequence
  source 1..378: mol_type = other DNA
atgctgtctgtgcagcctgacaccaagcccaagggctgtgccggctgcaacaggaagatcaaggaccgctacctgctgaaggccctggacaagtactggcatgaggactgcctgaagtgtgcctgctgtgactgccgctgggagcggctgtttggagtgacaggcaactgtgccgcctgcagcaagctgatcccagcctttgagatggtgatgagggccaaggacaacgtgtaccacctggactgctttgcctgccagctgtgcaaccagcgcttctgtgtgggggacaagttcttcctgaagaacaacatgatcctgtgccagacagattatgaggagggcctgatgaaggagggctacgccccccaggtgaggtag

SEQ ID NO: 157952 - DNA, 267 bp, synthetic construct
  misc_feature 1..267: note = Description of Artificial Sequence: Synthetic coding sequence
  source 1..267: mol_type = other DNA
atgctgtctgtgcagcctgacaccaagcccaagggctgtgccggctgcaacaggaagatcaaggaccgctacctgctgaaggccctggacaagtactggcatgaggactgcctgaagtgtgcctgctgtgactgccgcctgggggaggtgggcagcaccctgtacaccaaggccaacctgatcctgtgccggcgggactacctgcggctgtttggagtgacaggcaactgtgccgcctgcagcaagctgatcccagcctttgaatag

SEQ ID NO: 157953 - DNA, 333 bp, synthetic construct
  misc_feature 1..333: note = Description of Artificial Sequence: Synthetic coding sequence
  source 1..333: mol_type = other DNA
atgctgtctgtgcagcctgacaccaagcccaagggctgtgccggctgcaacaggaagatcaaggaccgctacctgctgaaggccctggacaagtactggcatgaggactgcctgaagtgtgcctgctgtgactgccgcctgggggaggtgggcagcaccctgtacaccaaggccaacctgatcctgtgccggcgggactacctgcggctgtttggagtgacaggcaactgtgccgcctgcagcaagctgatcccagcctttgagatggtgatgagggccaaggacaacgtgtaccacctggactgctttgcctgccagctgtgcaaccagtag

SEQ ID NO: 157954 - DNA, 357 bp, synthetic construct; identical to SEQ ID NO: 157943
  misc_feature 1..357: note = Description of Artificial Sequence: Synthetic coding sequence
  source 1..357: mol_type = other DNA

SEQ ID NO: 157955 - DNA, 498 bp, synthetic construct
  misc_feature 1..498: note = Description of Artificial Sequence: Synthetic coding sequence
  source 1..498: mol_type = other DNA
atggtgaaccctggcagcagcagccagcccccacctgtgacagctggcagcctgtcctggaagagatgtgccggctgcggcggcaagattgctgaccgcttcctgctgtatgccatggacagctactggcacagccgctgcctgaagtgcagctgctgccaggcccagctgggggacatcggcaccagctgctacaccaagagcggcatgatcctgtgcagaaatgactacatccggctgtttggaaacagcggggcctgcagcgcctgtggccagagcatcccagccagcgagctggtgatgagggcccagggcaatgtgtaccacctgaagtgcttcacctgcagcacctgcaggaaccggctggtgcctggggaccgcttccactacatcaatggcagcctcttctgtgaacatgaccggcccacagccctgatcaatggccacctgaacagcctgcagagcaaccccctgctgcctgaccagaaggtgtgctag

SEQ ID NO: 157956 - DNA, 498 bp, synthetic construct; identical to SEQ ID NO: 157955
  misc_feature 1..498: note = Description of Artificial Sequence: Synthetic coding sequence
  source 1..498: mol_type = other DNA

SEQ ID NO: 157957 - DNA, 2031 bp, synthetic construct
  misc_feature 1..2031: note = Description of Artificial Sequence: Synthetic coding sequence
  source 1..2031: mol_type = other DNA
atggacaagtatgatgacctgggcctggaggccagcaagttcatcgaggacctgaacatgtatgaggccagcaaggatggcctcttccgggtggacaagggagctggcaacaaccctgagtttgaggagaccaggagagtgtttgccaccaagatggccaagatccacctgcagcagcagcagcagcagctgctgcaggaggagaccctgccccggggcagccggggccctgtgaatggaggcggccgcctgggcccccaggcccgctgggaggtggtgggcagcaagctgactgtggatggagctgccaagccacccctggccgccagcactggagcccctggagctgtgaccaccctggccgccggccagcccccctacccaccccaggagcagaggagccggccctacctgcacggcaccaggcatggcagccaggactgtggcagccgggagagcctggccaccagcgagatgtctgccttccaccagcccggcccctgtgaggaccccagctgcctgacccacggggactactatgacaacctgagcctggccagccccaagtggggagacaagccaggagtgagccccagcatcggcctgtctgtgggcagcggctggcccagcagccctggcagtgacccccccctgcccaagccctgtggggaccaccccctgaaccaccggcagctgagcctgagcagcagccgcagcagcgagggcagcctgggcggccagaacagcggcattggaggccgcagcagcgagaagcccaccggcctgtggagcacagccagcagccagagggtgtccccaggcctgcccagccccaacctggagaatggagccccagctgtgggccctgtgcagcccaggacccccagcgtgtctgcccccctggccctgagctgcccccggcagggcggcctgcccaggagcaacagcggcctgggcggggaggtgtctggagtgatgagcaagcccaacgtggacccccagccctggttccaggacggccccaagagctacctgagcagcagcgcccccagcagcagccctgctggcctggatggcagccagcagggcgctgtgcccggcctgggccccaagccaggctgcacagacctgggcaccggccccaagctgagccccaccagcctggtgcaccctgtgatgagcaccctgcctgagctgagctgcaaggagggccccctgggctggagcagtgatggcagcctgggctctgtgctgctggacagccccagcagcccccgggtgcggctgccctgccagcccctggtgcccggccctgagctgcggcccagcgctgctgagctgaagctggaggccctgacccagaggctggagcgggagatggatgcccaccccaaggctgactactttggagcctgtgtgaagtgcagcaaaggagtgtttggagctggccaggcctgccaggccatgggcaacctgtaccatgacacctgcttcacctgtgccgcctgcagcaggaagctgcggggcaaggccttctactttgtgaatggcaaggtgttctgtgaggaggacttcctgtacagcggcttccagcagagcgctgaccgctgcttcctgtgtggccacctgatcatggacatgatcctgcaggccctgggcaagagctaccaccctggctgcttccgctgtgtgatctgcaatgaatgtctggatggagtgcccttcaccgtggacagcgagaacaagatctactgtgtgcgggactaccacaaggtgctggcccccaagtgtgccgcctgtggcctgcccatcctgcccccagagggcagtgatgagaccatccgggtggtgtccatggaccgggactaccacgtggagtgctaccactgtgaggactgtggcctggagctgaatgatgaagatggccaccgctgctaccccctggaggaccacctgttctgccacagctgccacgtgaagaggctggagaagaggcccagcagcacagccctgcaccagcaccacttctag

SEQ ID NO: 157958 - DNA, 1221 bp, synthetic construct
  misc_feature 1..1221: note = Description of Artificial Sequence: Synthetic coding sequence
  source 1..1221: mol_type = other DNA
atggtgcactgtgccggctgcaagaggcccatcctggaccgcttcctgctgaatgtgctggaccgggcctggcacgtgaagtgtgtgcagtgctgtgagtgcaagtgcaacctgacagagaagtgcttcagccgggagggcaagctgtactgcaagaatgacttcttccgctgcttcggcaccaagtgtgccggctgtgcccagggcatcagccccagcgacctggtgagaagagcccggagcaaggtgttccacctgaactgcttcacctgcatgatgtgcaacaagcagctgagcactggagaggagctgtacatcattgatgagaacaagtttgtgtgcaaggaggactacctgagcaacagctctgtggccaaggagaacagcctgcacagcgccaccactggaagtgaccccagcctgagcccagacagccaggaccccagccaggatgatgccaaggacagcgagagcgccaacgtgtctgacaaggaggccggcagcaatgaaaatgatgaccagaacctgggcgccaagaggcggggccccaggaccaccatcaaggccaagcagctggagaccctgaaggccgcctttgctgccacccccaagcccaccaggcacatccgggagcagctggcccaggagaccggcctgaacatgagggtcatccaggtgtggttccagaacagaagaagcaaggagaggaggatgaagcagctgagcgccctgggcgccaggagacatgccttcttccgcagccccaggaggatgaggcccctggtggaccggctggagcctggagagctgatccccaacggccccttctccttctatggagactaccagagcgagtactacggccctgggggcaactatgacttcttcccccagggcccccccagcagccaggcccagacccctgtggacctgccctttgtgcccagcagcggccccagcggcacccccctgggcggcctggagcaccccctgcccggccaccaccccagcagcgaggcccagcgcttcacagacatcctggcccaccccccaggggacagccccagccctgagcccagcctgcccggccccctgcacagcatgtctgctgaggtgtttggccccagcccccccttcagcagcctgtctgtgaatggaggagccagctatggcaaccacctgagccaccccccagagatgaatgaagctgctgtgtggtag

SEQ ID NO: 157959 - DNA, 1221 bp, synthetic construct
  misc_feature 1..1221: note = Description of Artificial Sequence: Synthetic coding sequence
  source 1..1221: mol_type = other DNA
atgctgttccacagcctgagcggccctgaggtgcacggcgtgattgatgagatggaccggcgggccaagtctgaggccccagccatcagcagcgccatcgacagaggagacacagagaccaccatgcccagcatcagcagtgaccgggccgccctgtgtgccggctgcggcggcaagatcagtgaccgctactacctgctggccgtggacaagcagtggcacatgcgctgcctgaagtgctgtgagtgcaagctgaacctggagagcgagctgacctgcttcagcaaggatggcagcatctactgcaaggaggactactaccgccgcttctctgtgcagagatgtgcccgctgccacctgggcatcagcgccagcgagatggtgatgagggcccgggacctggtgtaccacctgaactgcttcacctgcaccacctgcaacaagatgctgaccaccggggaccacttcggcatgaaggacagcctggtgtactgccgcctgcactttgaggccctgctgcagggcgagtacccagcccacttcaaccacgcagatgtggccgctgctgctgctgctgctgctgctgccaagtctgctggcctgggcgccgccggggccaaccccctgggcctgccctactacaatggagtgggcaccgtgcagaagggccggcccaggaagaggaagagccctggccctggagctgacctggccgcctacaatgctgccctgagctgcaatgaaaatgatgctgagcacctggaccgggaccagccctaccccagcagccagaagaccaagaggatgaggaccagcttcaagcaccaccagctgcggaccatgaagagctactttgccatcaaccacaacccagatgccaaggacctgaagcagctggcccagaagacaggcctgaccaagagggtgctgcaggtgtggttccagaatgcccgggccaagttcagaagaaacctgctgcggcaggagaacacaggagtggacaagagcacagatgctgccctgcagacaggcaccccatctggccctgccagcgagctgagcaatgccagcctgagccccagcagcacccccaccaccctgacagacctgaccagccccaccctgcccaccgtgacctctgtgctgacctctgtgcccggcaacctggagggccacgagccccacagccccagccagaccaccctgaccaacctcttctag

SEQ ID NO: 157960 - DNA, 1194 bp, synthetic construct
  misc_feature 1..1194: note = Description of Artificial Sequence: Synthetic coding sequence
  source 1..1194: mol_type = other DNA
atggaggcccggggggagctgggccctgcccgggagagcgctggaggagacctgctgctggccctgctggccaggagagctgacctgcggcgggagatccccctgtgtgccggctgtgaccagcacatcctggaccgcttcatcctgaaggccacagccaccggcacagcctctgtgtcctctgctgccacagccacccccctggccgagcgctgcttcagcagaggagagagcgtgtactgcaaggatgacttcttcaagagatttggcaccaagtgtgccgcctgccagctgggcatcccccccacccaggtggtgagaagagcccaggactttgtgtaccacctgcactgctttgcctgtgtggtgtgcaagaggcagctggccactggagatgagttctacctgatggaggacagccggctggtgtgcaaggctgactatgaaacagccaagcagcgggaggccgaggccacagccaagaggcccaggaccaccatcacagccaagcagctggagaccctgaagagcgcctacaacaccagccccaagccagcccggcacgtgcgggagcagctgagcagcgagaccggcctggacatgagggtggtgcaggtgtggttccagaacagaagagccaaggagaagaggctgaagaaggatgctggccggcagcgctggggccagtacttcaggaacatgaagaggagcagaggaggcagcaagagtgacaaggacagcgtgcaggagggccaggacagtgatgctgaggtgtccttccctgtgtccctgccctggaggaagtgggcccggcccatggccagcactggagcctggggccaccctggcctgggccctgccctgggcagccctggccagctgctgcccggggcctggaggcctggccggcccagggctgtgccccgggccgccagccggcagcccctgcgctgcccccccatccccaggaggcctgctgagcccccctggccacccctgctgagcagcctggtgtacccagacaccagcctgggcctggtgcccagcggggcccctgggggccccccacccatgagggtgctggccggaaatggccccagcagtgacctgagcacaggcagcagcggcggctacccagacttccctgccagccctgcctcctggctggatgaggtggaccacgcccagttctag

SEQ ID NO: 157961 - DNA, 1209 bp, synthetic construct
  misc_feature 1..1209: note = Description of Artificial Sequence: Synthetic coding sequence
  source 1..1209: mol_type = other DNA
atggaggcccggggggagctgggccctgcccgggagagcgctggaggagacctgctgctggccctgctggccaggagagctgacctgcggcgggagatccccctgtgtgccggctgtgaccagcacatcctggaccgcttcatcctgaaggccctggacagacactggcacagcaagtgcctgaagtgcagcgactgccacacccccctggccgagcgctgcttcagcagaggagagagcgtgtactgcaaggatgacttcttcaagagatttggcaccaagtgtgccgcctgccagctgggcatcccccccacccaggtggtgagaagagcccaggactttgtgtaccacctgcactgctttgcctgtgtggtgtgcaagaggcagctggccactggagatgagttctacctgatggaggacagccggctggtgtgcaaggctgactatgaaacagccaagcagcgggaggccgaggccacagccaagaggcccaggaccaccatcacagccaagcagctggagaccctgaagagcgcctacaacaccagccccaagccagcccggcacgtgcgggagcagctgagcagcgagaccggcctggacatgagggtggtgcaggtgtggttccagaacagaagagccaaggagaagaggctgaagaaggatgctggccggcagcgctggggccagtacttcaggaacatgaagaggagcagaggaggcagcaagagtgacaaggacagcgtgcaggagggccaggacagtgatgctgaggtgtccttcccagatgagcccagcctggccgagatgggccctgccaacggcctgtatggcagcctgggggagcccacccaggccctgggccggcccagcggggccctgggcaacttcagcctggagcacggcggcctggccggccctgagcagtaccgggagctgcggcccggcagcccctacggcgtgccccccagccctgctgccccccagagcctgcccggcccccagcccctgctgagcagcctggtgtacccagacaccagcctgggcctggtgcccagcggggcccctgggggccccccacccatgagggtgctggccggaaatggccccagcagtgacctgagcacaggcagcagcggcggctacccagacttccctgccagccctgcctcctggctggatgaggtggaccacgcccagttctag

SEQ ID NO: 157962 - DNA, 1194 bp, synthetic construct
  misc_feature 1..1194: note = Description of Artificial Sequence: Synthetic coding sequence
  source 1..1194: mol_type = other DNA
atgctgctggagaccggcctggagcgggaccgggcccggcctggagctgctgctgtgtgcaccctgggcggcacccgggagatccccctgtgtgccggctgtgaccagcacatcctggaccgcttcatcctgaaggccctggacagacactggcacagcaagtgcctgaagtgcagcgactgccacacccccctggccgagcgctgcttcagcagaggagagagcgtgtactgcaaggatgacttcttcaagcgcttcggcaccaagtgtgccgcctgccagctgggcatcccccccacccaggtggtgcggcgggcccaggactttgtgtaccacctgcactgctttgcctgtgtggtgtgcaagaggcagctggccactggagatgagttctacctgatggaggacagccggctggtgtgcaaggctgactatgaaacagccaagcagcgggaggccgaggccacagccaagaggcccaggaccaccatcacagccaagcagctggagaccctgaagagcgcctacaacaccagccccaagccagcccggcacgtgcgggagcagctgagcagcgagaccggcctggacatgagggtggtgcaggtgtggttccagaacagaagagccaaggagaagaggctgaagaaggatgctggccggcagcgctggggccagtacttcaggaacatgaagaggagccggggcggcagcaagagtgacaaggacagcgtgcaggagggccaggacagtgatgctgaggtgtccttcccagatgagcccagcctggccgagatgggccctgccaacggcctgtatggcagcctgggggagcccacccaggccctgggccggcccagcggggccctgggcaacttcagcctggagcacggcggcctggccggccctgagcagtaccgggagctgcggcccggcagcccctatggagtgccccccagccctgctgccccccagagcctgcccggcccccagcccctgctgagcagcctggtgtacccagacaccagcctgggcctggtgcccagcggggcccctgggggccccccacccatgagggtgctggccggaaatggccccagcagtgacctgagcacaggcagcagcggcggctacccagacttccctgccagccctgcctcctggctggatgaggtggaccacgcccagttctag

SEQ ID NO: 157963 - DNA, 1173 bp, synthetic construct
  misc_feature 1..1173: note = Description of Artificial Sequence: Synthetic coding sequence
  source 1..1173: mol_type = other DNA
atgatgcagagcgccaccgtgcctgctgagggcgctgtgaagggcctgcctgagatgctgggcgtgcccatgcagcagatcccccagtgtgccggctgcaaccagcacatcctggacaagttcatcctgaaggtgctggacagacactggcacagcagctgcctgaagtgtgccgactgccagatgcagctggccgaccgctgcttcagccgggccggctctgtgtactgcaaggaggacttcttcaagagatttggcaccaagtgcacagcctgccagcagggcatcccccccacccaggtggtgaggaaggcccaggactttgtgtaccacctgcactgctttgcctgcatcatctgcaaccggcagctggccactggagatgagttctacctgatggaggatggccgcctggtgtgcaaggaggactatgaaacagccaagcagaatgatgattctgaggccggggccaagaggcccaggaccaccatcacagccaagcagctggagaccctgaagaatgcctacaagaacagccccaagccagcccggcacgtgcgggagcagctgagcagcgagaccggcctggacatgagggtggtgcaggtgtggttccagaacagaagagccaaggagaagaggctgaagaaggatgctggccgccaccgctggggccagttctacaagtctgtgaagaggagccggggcagcagcaagcaggagaaggagagcagcgctgaggactgtggggtgtctgacagcgagctgtccttccgggaggaccagatcctgtctgagctgggccacaccaaccgcatctatggaaatgtgggagatgtgactggaggccagctgatgaatggcagcttctccatggatggcaccggccagagctaccaggacctgagagatggcagcccctacggcatcccccagagccccagcagcatcagcagcctgcccagccacgcccccctgctgaatggcctggactacacagtggacagcaacctgggcatcatcgcccacgccggccagggcgtgtcccagaccctgcgggccatggccggcggccccaccagtgacatcagcacaggcagctctgtgggctacccagacttccccaccagccctggctcctggctggatgagatggaccacccccccttctag

SEQ ID NO: 157964 - DNA, 1209 bp, synthetic construct
  misc_feature 1..1209: note = Description of Artificial Sequence: Synthetic coding sequence
  source 1..1209: mol_type = other DNA
atgatggtgcactgtgccggctgtgagcggcccatcctggaccgcttcctgctgaatgtgctggaccgggcctggcacatcaagtgtgtgcagtgctgtgagtgcaagaccaacctgtctgagaagtgcttcagccgggagggcaagctgtactgcaagaatgacttcttccgccgcttcggcaccaagtgtgccggctgtgcccagggcatcagccccagcgacctggtgaggaaggcccggagcaaggtgttccacctgaactgcttcacctgcatggtgtgcaacaagcagctgagcactggagaggagctgtatgtgattgatgagaacaagtttgtgtgcaaggatgactacctgagcagcagcagcctgaaggagggcagcctgaacagcgtgagcagctgcacagacaggagcctgagcccagacctgcaggatgccctgcaggatgaccccaaggagacagacaacagcaccagcagtgacaaggagacagccaacaatgaaaatgaggagcagaacagcggcaccaagaggcggggccccaggaccaccatcaaggccaagcagctggagaccctgaaggccgcctttgctgccacccccaagcccaccaggcacatccgggagcagctggcccaggagaccggcctgaacatgagggtcatccaggtgtggttccagaacagaagaagcaaggagaggaggatgaagcagctgagcgccctgggcgccaggagacatgccttcttccgcagccccaggaggatgaggcccctgggcggccgcctggatgagagcgagatgctgggcagcaccccctacacctactatggagactaccagggcgactactatgcccctggcagcaactatgacttctttgcccacggcccccccagccaggcccagagccctgctgacagcagcttcctggccgccagcggccctggcagcacccccctgggcgccctggagccccccctggccggcccccatgctgctgacaacccccgcttcacagacatgatcagccacccagacacccccagccctgagcccggcctgcccggcaccctgcaccccatgcctggagaggtgttcagcggcggccccagcccccccttccccatgagcggcaccagcggctacagcggccccctgagccaccccaaccctgagctgaatgaagctgctgtgtggtag

SEQ ID NO: 157965 - DNA, 1071 bp, synthetic construct
  misc_feature 1..1071: note = Description of Artificial Sequence: Synthetic coding sequence
  source 1..1071: mol_type = other DNA
atgcagatcctgagccgctgccagggcctgatgtctgaggagtgtggccgcaccacagccctggccgccggccgcaccaggaagggggccggggaggagggcctggtgtccccagagggcgctggagatgaggacagctgcagcagcagcgcccccctgagccccagcagcagccccaggtccatggccagcggcagcggctgccccccaggaaaatgtgtgtgcaacagctgtggcctggagatcgtggacaagtacctgctgaaggtgaatgacctgtgctggcacgtgcgctgcctgagctgcagcgtgtgcaggaccagcctgggccgccacaccagctgctacatcaaggacaaggacatcttctgcaagctggactacttccgccgctatggcacccgctgcagccgctgtggccgccacatccacagcacagactgggtgcggcgggccaagggaaatgtgtaccacctggcctgctttgcctgcttcagctgcaagaggcagctgagcactggagaggagtttgccctggtggaggagaaggtgctgtgccgggtgcactatgactgcatgctggacaacctgaagcgggaggtggagaatggaaatggcatctctgtggagggcgccctgctgacagagcaggatgtgaaccaccccaagccagccaagagggcccggaccagcttcaccgctgaccagctgcaggtgatgcaggcccagtttgcccaggacaacaacccagatgcccagaccctgcagaagctggccgagaggacaggcctgagccggcgggtcatccaggtgtggttccagaactgccgggcccggcacaagaagcacgtgagccccaaccacagcagcagcacccctgtgacagctgtgccccccagccggctgagcccccccatgctggaggagatggcctacagcgcctacgtgccccaggacggcaccatgctgacagccctgcacagctacatggatgcccacagccccaccaccctgggcctgcagcccctgctgccccacagcatgacccagctgcccatcagccacacctag

SEQ ID NO: 157966 - DNA, 1041 bp, synthetic construct
  misc_feature 1..1041: note = Description of Artificial Sequence: Synthetic coding sequence
  source 1..1041: mol_type = other DNA
atgtctgaggagtgtggccgcaccacagccctggccgccggccgcaccaggaagggggccggggaggagggcctggtgtccccagagggcgctggagatgaggacagctgcagcagcagcgcccccctgagccccagcagcagccccaggtccatggccagcggcagcggctgccccccaggaaaatgtgtgtgcaacagctgtggcctggagatcgtggacaagtacctgctgaaggtgaatgacctgtgctggcacgtgcgctgcctgagctgcagcgtgtgcaggaccagcctgggccgccacaccagctgctacatcaaggacaaggacatcttctgcaagctggactacttccgccgctatggcacccgctgcagccgctgtggccgccacatccacagcacagactgggtgcggcgggccaagggaaatgtgtaccacctggcctgctttgcctgcttcagctgcaagaggcagctgagcactggagaggagtttgccctggtggaggagaaggtgctgtgccgggtgcactatgactgcatgctggacaacctgaagcgggaggtggagaatggaaatggcatctctgtggagggcgccctgctgacagagcaggatgtgaaccaccccaagccagccaagagggcccggaccagcttcaccgctgaccagctgcaggtgatgcaggcccagtttgcccaggacaacaacccagatgcccagaccctgcagaagctggccgagaggacaggcctgagccggcgggtcatccaggtgtggttccagaactgccgggcccggcacaagaagcacgtgagccccaaccacagcagcagcacccctgtgacagctgtgccccccagccggctgagcccccccatgctggaggagatggcctacagcgcctacgtgccccaggacggcaccatgctgacagccctgcacagctacatggatgcccacagccccaccaccctgggcctgcagcccctgctgccccacagcatgacccagctgcccatcagccacacctag

SEQ ID NO: 157967 - DNA, 1194 bp, synthetic construct
  misc_feature 1..1194: note = Description of Artificial Sequence: Synthetic coding sequence
  source 1..1194: mol_type = other DNA
atggagatcgtgggctgcagagctgaggacaacagctgccccttccggcccccagccatgctgttccacggcatcagcggcggccacatccagggcatcatggaggagatggagaggaggagcaagacagaggcccggctggccaagggggcccagctgaatggaagagatgctggcatgccacccctgagccctgagaagccagccctgtgtgccggctgcggcggcaagatcagtgaccgctactacctgctggccgtggacaagcagtggcacctgcgctgcctgaagtgctgtgagtgcaagctggccctggagagcgagctgacctgctttgccaaggatggcagcatctactgcaaggaggactactaccgccgcttctctgtgcagagatgtgcccgctgccacctgggcatcagcgccagcgagatggtgatgagggcccgggacagcgtgtaccacctgagctgcttcacctgcagcacctgcaacaagaccctgaccaccggggaccacttcggcatgaaggacagcctggtgtactgccgggcccactttgagaccctgctgcagggcgagtacccaccccagctgagctacacagagctggccgccaagagcggcggcctggccctgccctacttcaatggaactggaacagtgcagaagggccggcccaggaagaggaagagccctgccctgggcgtggacatcgtgaactacaacagcggctgcaatgaaaatgaagctgaccacctggaccgggaccagcagccctacccacccagccagaagaccaagaggatgaggaccagcttcaagcaccaccagctgcggaccatgaagagctactttgccatcaaccacaacccagatgccaaggacctgaagcagctggcccagaagacaggcctgaccaagagggtgctgcaggtgtggttccagaatgcccgggccaagttcagaagaaacctgctgcggcaggagaatggaggagtggacaaggcagatggcaccagcctgcctgcccctccttctgctgacagcggggccctgaccccacctggaacagccaccaccctgacagacctgaccaaccccaccatcaccgtggtgacctctgtgaccagcaacatggacagccatgaaagtggcagccccagccagaccaccctgaccaacctcttctag

SEQ ID NO: 157968 - DNA, 1167 bp, synthetic construct
  misc_feature 1..1167: note = Description of Artificial Sequence: Synthetic coding sequence
  source 1..1167: mol_type = other DNA
atgctgaatggcaccaccctggaggccgccatgctgttccacggcatcagcggcggccacatccagggcatcatggaggagatggagcggcgcagcaagacagaggcccggctggccaagggggcccagctgaatggaagagatgctggcatgccacccctgagccctgagaagccagccctgtgtgccggctgcggcggcaagatcagtgaccgctactacctgctggccgtggacaagcagtggcacctgcgctgcctgaagtgctgtgagtgcaagctggccctggagagcgagctgacctgctttgccaaggatggcagcatctactgcaaggaggactactaccgccgcttctctgtgcagagatgtgcccgctgccacctgggcatcagcgccagcgagatggtgatgagggcccgggacagcgtgtaccacctgagctgcttcacctgcagcacctgcaacaagaccctgaccactggagaccacttcggcatgaaggacagcctggtgtactgccgggcccactttgagaccctgctgcagggcgagtacccaccccagctgagctacacagagctggccgccaagagcggcggcctggccctgccctacttcaacggcaccggcaccgtgcagaagggccggcccaggaagaggaagagccctgccctgggcgtggacatcgtgaactacaacagcggctgcaatgaaaatgaggccgaccacctggaccgggaccagcagccctacccacccagccagaagaccaagaggatgaggaccagcttcaagcaccaccagctgcggaccatgaagagctactttgccatcaaccacaacccagatgccaaggacctgaagcagctggcccagaagacaggcctgaccaagagggtgctgcaggtgtggttccagaatgcccgggccaagttcagaagaaacctgctgcggcaggagaatggaggagtggacaaggcagatggcaccagcctgcctgccccacccagcgctgacagcggggccctgaccccacctggaacagccaccaccctgacagacctgaccaaccccaccatcaccgtggtgacctctgtgaccagcaacatggacagccatgagagcggcagccccagccagaccaccctgaccaacctcttctag

SEQ ID NO: 157969 - DNA, 1149 bp, synthetic construct
  misc_feature 1..1149: note = Description of Artificial Sequence: Synthetic coding sequence
  source 1..1149: mol_type = other DNA
atgctggatggcctgaagatggaggagaacttccagagcgccatcgacaccagcgccagcttcagcagcctgctgggccgggctgtgagccccaagtctgtgtgtgagggctgccagagggtcatcctggaccgcttcctgctgcggctgaatgacagcttctggcatgagcagtgtgtgcagtgtgccagctgcaaggagcccctggagaccacctgcttctacagagacaagaagctgtactgcaagtatgactatgagaagctgtttgctgtgaagtgtggcggctgctttgaggccatcgccccaaatgaatttgtgatgagggcccagaagtctgtgtaccacctgagctgcttctgctgctgcgtgtgtgagcggcagctgcagaagggagatgaatttgtgctgaaggagggccagctgctgtgcaagggggactatgagaaggagcgggagctgctgagcctggtgtccccagctgccagtgacagcggcaagagtgatgatgaggagagcctgtgcaagagcgcccatggagctggaaaaggaacagctgaggagggcaaggaccacaagaggcccaagaggcccaggaccatcctgaccacccagcagaggcgggccttcaaggccagctttgaggtgagcagcaagccctgcaggaaggtgcgggagaccctggccgctgagaccggcctgtctgtgcgggtggtgcaggtgtggttccagaaccagagggccaagatgaagaagctggcccggcggcagcagcagcagcagcaggaccagcagaacacccagaggctgagcagcgcccagaccaacggcggcggcagcgctggcatggagggcatcatgaacccctacacagccctgcccaccccccagcagctgctggccatcgagcagagcgtgtacagcagtgaccccttccggcagggcctgaccccaccccagatgcctggggaccacatgcacccctatggagctgagcccctcttccatgacctggacagtgatgacaccagcctgagcaacctgggggactgcttcctggccaccagcgaggccggccccctgcagagccgggtgggcaaccccatcgaccacctgtacagcatgcagaacagctacttcaccagctag

SEQ ID NO: 157970 - DNA, 1149 bp, synthetic construct; identical to SEQ ID NO: 157969
  misc_feature 1..1149: note = Description of Artificial Sequence: Synthetic coding sequence
  source 1..1149: mol_type = other DNA

SEQ ID NO: 157971 - DNA, 1149 bp, synthetic construct; identical to SEQ ID NO: 157969
  misc_feature 1..1149: note = Description of Artificial Sequence: Synthetic coding sequence
  source 1..1149: mol_type = other DNA

SEQ ID NO: 157972 - DNA, 1221 bp, synthetic construct
  misc_feature 1..1221: note = Description of Artificial Sequence: Synthetic coding sequence
  source 1..1221: mol_type = other DNA
atggacatcgccactggacctgagagcctggagcgctgcttcccccggggccagacagactgtgccaagatgctggatggcatcaagatggaggagcacgccctgcggcccggccctgccaccctgggcgtgctgctgggcagtgactgcccccaccctgctgtgtgtgagggctgccagaggcccatcagtgaccgcttcctgatgagggtgaatgaaagctcctggcatgaagaatgtctgcagtgtgccgcctgccagcaggccctgaccaccagctgctacttccgggacaggaagctgtactgcaagcaggactaccagcagctgtttgctgccaagtgcagcggctgcatggagaagatcgcccccacagaatttgtgatgagggccctggagtgtgtgtaccacctgggctgcttctgctgctgcgtgtgtgagcggcagctgaggaaaggagatgaatttgtgctgaaggagggccagctgctgtgcaagggggactatgagaaggagaaggacctgctgagctctgtgtccccagatgaaagtgacagcgtgaagtcagaagatgaagatggagacatgaagccagccaagggccagggcagccagagcaaaggaagtggagatgatggcaaggacccccggcggcccaagaggcccaggaccatcctgaccacccagcagaggcgggccttcaaggccagctttgaggtgagcagcaagccctgcaggaaggtgcgggagaccctggccgctgagaccggcctgtctgtgcgggtggtgcaggtgtggttccagaaccagagggccaagatgaagaagctggcccggcggcaccagcagcagcaggagcagcagaacagccagaggctgggccagggcgagcccggccctggccagggcctgggccaggaggtgctgagcagcaggatggagggcatgatggccagctacacccccctggccccaccccagcagcagatcgtggccatggagcagagcccctacggcagcagtgaccccttccagcagggcctgaccccaccccagatgcctggaaatgacagcatcttccatgacatcgacagcgacaccagcctgaccagcctgagtgactgcttcctgggcagcagtgatgtgggcagcctgcaggcccgggtgggcaaccccatcgaccggctgtacagcatgcagagcagctactttgccagctag

SEQ ID NO: 157973 - DNA, 1209 bp, synthetic construct
  misc_feature 1..1209: note = Description of Artificial Sequence: Synthetic coding sequence
  source 1..1209: mol_type = other DNA
atggacatcgccactggacctgagagcctggagcgctgcttcccccggggccagacagactgtgccaagatgctggatggcatcaagatggaggagcacgccctgcggcccggccctgccaccctgggcgtgctgctgggcagtgactgcccccaccctgctgtgtgtgagggctgccagaggcccatcagtgaccgcttcctgatgagggtgaatgaaagctcctggcatgaagaatgtctgcagtgtgccgcctgccagcaggccctgaccaccagctgctacttccgggacaggaagctgtactgcaagcaggactaccagcagctgtttgctgccaagtgcagcggctgcatggagaagatcgcccccacagaatttgtgatgagggccctggagtgtgtgtaccacctgggctgcttctgctgctgcgtgtgtgagcggcagctgaggaaaggagatgaatttgtgctgaaggagggccagctgctgtgcaagggggactatgagaaggagaaggacctgctgagctctgtgtccccagatgaaagtgacagcgtgaagtcagaagatgaagatggagacatgaagccagccaagggccagggcagccagagcaaaggaagtggagatgatggcaaggacccccggcggcccaagaggcccaggaccatcctgaccacccagcagaggcgggccttcaaggccagctttgaggtgagcagcaagccctgcaggaaggtgcgggagaccctggccgctgagaccggcctgtctgtgcgggtggtgcaggtgtggttccagaaccagagggccaagatgaagaagctggcccggcggcaccagcagcagcaggagcagcagaacagccagaggctgggccaggaggtgctgagcagcaggatggagggcatgatggccagctacacccccctggccccaccccagcagcagatcgtggccatggagcagagcccctacggcagcagtgaccccttccagcagggcctgaccccaccccagatgcctggggaccacatgaacccctatggaaatgacagcatcttccatgacatcgacagcgacaccagcctgaccagcctgagtgactgcttcctgggcagcagtgatgtgggcagcctgcaggcccgggtgggcaaccccatcgaccggctgtacagcatgcagagcagctactttgccagctag

SEQ ID NO: 157974 - DNA, 1119 bp, synthetic construct
  misc_feature 1..1119: note = Description of Artificial Sequence: Synthetic coding sequence
  source 1..1119: mol_type = other DNA
atgctggatggcatcaagatggaggagcacgccctgcggcccggccctgccaccctgggcgtgctgctgggcagtgactgcccccaccctgctgtgtgtgagggctgccagaggcccatcagtgaccgcttcctgatgagggtgaatgaaagctcctggcatgaggagtgcctgcagtgtgccgcctgccagcaggccctgaccaccagctgctacttccgggacaggaagctgtactgcaagcaggactaccagcagctgtttgctgccaagtgcagcggctgcatggagaagatcgcccccacagaatttgtgatgagggccctggagtgtgtgtaccacctgggctgcttctgctgctgcgtgtgtgagcggcagctgaggaaaggagatgaatttgtgctgaaggagggccagctgctgtgcaagggggactatgagaaggagaaggacctgctgagctctgtgtccccagatgaaagtgacagcgtgaagtcagaagatgaagatggagacatgaagccagccaagggccagggcagccagagcaagggcagcggagatgatggcaaggacccccggcggcccaagaggcccaggaccatcctgaccacccagcagaggcgggccttcaaggccagctttgaggtgagcagcaagccctgcaggaaggtgcgggagaccctggccgctgagaccggcctgtctgtgcgggtggtgcaggtgtggttccagaaccagagggccaagatgaagaagctggcccggcggcaccagcagcagcaggagcagcagaacagccagaggctgggccaggaggtgctgagcagcaggatggagggcatgatggccagctacacccccctggccccaccccagcagcagatcgtggccatggagcagagcccctacggcagcagtgaccccttccagcagggcctgaccccaccccagatgcctggaaatgacagcatcttccatgacatcgacagcgacaccagcctgaccagcctgagtgactgcttcctgggcagcagtgatgtgggcagcctgcaggcccgggtgggcaaccccatcgaccggctgtacagcatgcagagcagctactttgccagctag

SEQ ID NO: 157975 - DNA, 1188 bp, synthetic construct
  misc_feature 1..1188: note = Description of Artificial Sequence: Synthetic coding sequence
  source 1..1188: mol_type = other DNA
atggacatcgccactggacctgagagcctggagcgctgcttcccccggggccagacagactgtgccaagatgctggatggcatcaagatggaggagcacgccctgcggcccggccctgccaccctgggcgtgctgctgggcagtgactgcccccaccctgctgtgtgtgagggctgccagaggcccatcagtgaccgcttcctgatgagggtgaatgaaagctcctggcatgaagaatgtctgcagtgtgccgcctgccagcaggccctgaccaccagctgctacttccgggacaggaagctgtactgcaagcaggactaccagcagctgtttgctgccaagtgcagcggctgcatggagaagatcgcccccacagaatttgtgatgagggccctggagtgtgtgtaccacctgggctgcttctgctgctgcgtgtgtgagcggcagctgaggaaaggagatgaatttgtgctgaaggagggccagctgctgtgcaagggggactatgagaaggagaaggacctgctgagctctgtgtccccagatgaaagtgacagcgtgaagtcagaagatgaagatggagacatgaagccagccaagggccagggcagccagagcaaaggaagtggagatgatggcaaggacccccggcggcccaagaggcccaggaccatcctgaccacccagcagaggcgggccttcaaggccagctttgaggtgagcagcaagccctgcaggaaggtgcgggagaccctggccgctgagaccggcctgtctgtgcgggtggtgcaggtgtggttccagaaccagagggccaagatgaagaagctggcccggcggcaccagcagcagcaggagcagcagaacagccagaggctgggccaggaggtgctgagcagcaggatggagggcatgatggccagctacacccccctggccccaccccagcagcagatcgtggccatggagcagagcccctacggcagcagtgaccccttccagcagggcctgaccccaccccagatgcctggaaatgacagcatcttccatgacatcgacagcgacaccagcctgaccagcctgagtgactgcttcctgggcagcagtgatgtgggcagcctgcaggcccgggtgggcaaccccatcgaccggctgtacagcatgcagagcagctactttgccagctag

SEQ ID NO: 157976 - DNA, 318 bp, synthetic construct
  misc_feature 1..318: note = Description of Artificial Sequence: Synthetic coding sequence
  source 1..318: mol_type = other DNA
atgagcatctacttccccatccactgcccagactacctgcggagcgccaagatgacagaggtgatgatgaacacccagcccatggaggagatcggcctgagccccaggaaggatggcctgagctaccagatcttcccagaccccagcgactttgaccgctgctgcaagctgaaggaccggctgcccagcatcgtggtggagcccacagaaggagaggtggagagcggggagctgcgctggcccccagaggagttcctggtgcaggaggatgagcaggacaactgtgaggagacagccaaggagaacaaggagcagtag

SEQ ID NO: 157977 - DNA, 264 bp, synthetic construct
  misc_feature 1..264: note = Description of Artificial Sequence: Synthetic coding sequence
  source 1..264: mol_type = other DNA
atggtgtcctctgtggtgggcttctacagcctgcgcttcttcggcaacttcacccccaagaaggatgacaccaccatgaccaagatcatcggcaactgtgtgtccatcctggtgctgagcagcgccctgcctgtgatgagcaggaccctgggcctgcacaagctgcacctgcccaacaccagccgggacagcgagacagcctctgtgatgaccagcagcgcccgggacaccggcttccaccacctgcaggccctgatgtgctag

SEQ ID NO: 157978 - DNA, 687 bp, synthetic construct
  misc_feature 1..687: note = Description of Artificial Sequence: Synthetic coding sequence
  source 1..687: mol_type = other DNA
atggagggccaggatgaggtgtctgcccgggagcagcacttccacagccaggtgcgggagagcaccatctgcttcctgctgtttgccatcctgtatgtggtgtcctacttcatcatcacccgctacaagaggaagagtgatgagcaggaggatgaagatgccatcgtgaaccgcatcagcctcttcctgagcaccttcaccctggccgtgtctgctggagctgtgctgctgctgcccttcagcatcatcagcaatgagatcctgctgtccttcccccagaactactacatccagtggctgaatggcagcctcatccacggcctgtggaacctggccagcctcttcagcaacctgtgcctgtttgtgctgatgccctttgccttcttcttcctggagagcgagggctttgctggcctgaagaagggcatccgggcccgcatcctggagaccctggtgatgctgctgctgctggccctgctgatcctgggcatcgtgtgggtggccagcgccctgattgacaatgatgctgcctccatggagagcctgtatgacctgtgggagttctacctgccctacctgtacagctgcatcagcctgatgggctgcctgctgctgcacctgcccaacaccagccgggacagcgagacagccaagcccagcgtgaatggccaccagaaggccctgtag

SEQ ID NO: 157979 - DNA, 1473 bp, synthetic construct
  misc_feature 1..1473: note = Description of Artificial Sequence: Synthetic coding sequence
  source 1..1473: mol_type = other DNA
atggagggccaggatgaggtgtctgcccgggagcagcacttccacagccaggtgcgggagagcaccatctgcttcctgctgtttgccatcctgtatgtggtgtcctacttcatcatcacccgctacaagaggaagagtgatgagcaggaggatgaagatgccatcgtgaaccgcatcagcctcttcctgagcaccttcaccctggccgtgtctgctggagctgtgctgctgctgcccttcagcatcatcagcaatgagatcctgctgtccttcccccagaactactacatccagtggctgaatggcagcctcatccacggcctgtggaacctggccagcctcttcagcaacctgtgcctgtttgtgctgatgccctttgccttcttcttcctggagagcgagggctttgctggcctgaagaagggcatccgggcccgcatcctggagaccctggtgatgctgctgctgctggccctgctgatcctgggcatcgtgtgggtggccagcgccctgattgacaatgatgctgcctccatggagagcctgtatgacctgtgggagttctacctgccctacctgtacagctgcatcagcctgatgggctgcctgctgctgctgctgtgcacccctgtgggcctgagcaggatgttcaccgtgatgggccagctgctggtgaagcccaccatcctggaggacctggatgagcagatctacatcatcaccctggaggaggaggccctgcagaggcggctgaatggcctgagcagctctgtggagtacaacatcatggagctggagcaggagctggagaatgtgaagaccctgaagaccaagctggagaggaggaagaaggccagcgcctgggagaggaacctggtgtacccagctgtgatggtgctgctgctgattgagaccagcatctctgtgctgctggtggcctgcaacatcctgtgcctgctggtggatgaaacagccatgcccaagggcacccggggccctggcattggaaatgccagcctgagcacctttggatttgtgggcgccgccctggagatcatcctgatcttctacctgatggtgtcctctgtggtgggcttctacagcctgcgcttcttcggcaacttcacccccaagaaggatgacaccaccatgaccaagatcatcggcaactgtgtgtccatcctggtgctgagcagcgccctgcctgtgatgagcaggaccctgggcatcaccaggtttgacctgctgggggactttggccgcttcaactggctgggcaacttctacatcgtgctgagctacaacctgctgtttgccatcgtgaccaccctgtgcctggtgaggaagttcaccagcgctgtgcgggaggagctgttcaaggccctgggcctgcacaagctgcacctgcccaacaccagccgggacagcgagacagccaagcccagcgtgaatggccaccagaaggccctgtag

SEQ ID NO: 157980 - DNA, 1596 bp, synthetic construct
  misc_feature 1..1596: note = Description of Artificial Sequence: Synthetic coding sequence
  source 1..1596: mol_type = other DNA
atggagggccaggatgaggtgtctgcccgggagcagcacttccacagccaggtgcgggagagcaccatctgcttcctgctgtttgccatcctgtatgtggtgtcctacttcatcatcacccgctacaagaggaagagtgatgagcaggaggatgaagatgccatcgtgaaccgcatcagcctcttcctgagcaccttcaccctggccgtgtctgctggagctgtgctgctgctgcccttcagcatcatcagcaatgagatcctgctgtccttcccccagaactactacatccagtggctgaatggcagcctcatccacggcctgtggaacctggccagcctcttcagcaacctgtgcctgtttgtgctgatgccctttgccttcttcttcctggagagcgagggctttgctggcctgaagaagggcatccgggcccgcatcctggagaccctggtgatgctgctgctgctggccctgctgatcctgggcatcgtgtgggtggccagcgccctgattgacaatgatgctgcctccatggagagcctgtatgacctgtgggagttctacctgccctacctgtacagctgcatcagcctgatgggctgcctgctgctgctgctgtgcacccctgtgggcctgagcaggatgttcaccgtgatgggccagctgctggtgaagcccaccatcctggaggacctggatgagcagatctacatcatcaccctggaggaggaggccctgcagaggcggctgaatgtgggcatgctgtgtgccggcaaccctgaggtggccaccggccggcaggtgcctgaggagcaggccggccagctgctgctgggcaagtggatccaggagggcggggacatgattgccaacccccggctgagcagctctgtggagtacaacatcatggagctggagcaggagctggagaatgtgaagaccctgaagaccaagctggagaggaggaagaaggccagcgcctgggagaggaacctggtgtacccagctgtgatggtgctgctgctgattgagaccagcatctctgtgctgctggtggcctgcaacatcctgtgcctgctggtggatgaaacagccatgcccaagggcacccggggccctggcattggaaatgccagcctgagcaccttcggctttgtgggcgccgccctggagatcatcctgatcttctacctgatggtgtcctctgtggtgggcttctacagcctgcgcttctttggaaacttcacccccaagaaggatgacaccaccatgaccaagatcatcggcaactgtgtgtccatcctggtgctgagcagcgccctgcctgtgatgagcaggaccctgggcatcaccaggtttgacctgctgggggactttggccgcttcaactggctgggcaacttctacatcgtgctgagctacaacctgctgtttgccatcgtgaccaccctgtgcctggtgaggaagttcaccagcgctgtgcgggaggagctgttcaaggccctgggcctgcacaagctgcacctgcccaacaccagccgggacagcgagacagccaagcccagcgtgaatggccaccagaaggccctgtag

SEQ ID NO: 157981 - DNA, 855 bp, synthetic construct
  misc_feature 1..855: note = Description of Artificial Sequence: Synthetic coding sequence
  source 1..855: mol_type = other DNA
atgctgctgctgctggccctgctgatcctgggcatcgtgtgggtggccagcgccctgattgacaatgatgctgcctccatggagagcctgtatgacctgtgggagttctacctgccctacctgtacagctgcatcagcctgatgggctgcctgctgctgctgctgtgcacccctgtgggcctgagcaggatgttcaccgtgatgggccagctgctggtgaagcccaccatcctggaggacctggatgagcagatctacatcatcaccctggaggaggaggccctgcagaggcggctgaatggcctgagcagctctgtggagtacaacatcatggagctggagcaggagctggagaatgtgaagaccctgaagaccaagctggagaggaggaagaaggccagcgcctgggagaggaacctggtgtacccagctgtgatggtgctgctgctgattgagaccagcatctctgtgctgctggtggcctgcaacatcctgtgcctgctggtggatgaaacagccatgcccaagggcacccggggccctggcattggaaatgccagcctgagcacctttggatttgtgggcgccgccctggagatcatcctgatcttctacctgatggtgtcctctgtggtgggcttctacagcctgcgcttcttcggcaacttcacccccaagaaggatgacaccaccatgaccaagatcatcggcaactgtgtgtccatcctggtgctgagcagcgccctgcctgtgatgagcaggaccctgggcctgcacaagctgcacctgcccaacaccagccgggacagcgagacagccaagcccagcgtgaatggccaccagaaggccctgtag

SEQ ID NO: 157982 - DNA, 1590 bp, synthetic construct
  misc_feature 1..1590: note = Description of Artificial Sequence: Synthetic coding sequence
  source 1..1590: mol_type = other DNA
ggccaggatgaggtgtctgcccgggagcagcacttccacagccaggtgcgggagagcaccatctgcttcctgctgtttgccatcctgtatgtggtgtcctacttcatcatcacccgctacaagaggaagagtgatgagcaggaggatgaagatgccatcgtgaaccgcatcagcctcttcctgagcaccttcaccctggccgtgtctgctggagctgtgctgctgctgcccttcagcatcatcagcaatgagatcctgctgtccttcccccagaactactacatccagtggctgaatggcagcctcatccacggcctgtggaacctggccagcctcttcagcaacctgtgcctgtttgtgctgatgccctttgccttcttcttcctggagagcgagggctttgctggcctgaagaagggcatccgggcccgcatcctggagaccctggtgatgctgctgctgctggccctgctgatcctgggcatcgtgtgggtggccagcgccctgattgacaatgatgctgcctccatggagagcctgtatgacctgtgggagttctacctgccctacctgtacagctgcatcagcctgatgggctgcctgctgctgctgctgtgcacccctgtgggcctgagcaggatgttcaccgtgatgggccagctgctggtgaagcccaccatcctggaggacctggatgagcagatctacatcatcaccctggaggaggaggccctgcagaggcggctgaatgtgggcatgctgtgtgccggcaaccctgaggtggccaccggccggcaggtgcctgaggagcaggccggccagctgctgctgggcaagtggatccaggagggcggggacatgattgccaacccccggctgagcagctctgtggagtacaacatcatggagctggagcaggagctggagaatgtgaagaccctgaagaccaagctggagaggaggaagaaggccagcgcctgggagaggaacctggtgtacccagctgtgatggtgctgctgctgattgagaccagcatctctgtgctgctggtggcctgcaacatcctgtgcctgctggtggatgaaacagccatgcccaagggcacccggggccctggcattggaaatgccagcctgagcaccttcggctttgtgggcgccgccctggagatcatcctgatcttctacctgatggtgtcctctgtggtgggcttctacagcctgcgcttctttggaaacttcacccccaagaaggatgacaccaccatgaccaagatcatcggcaactgtgtgtccatcctggtgctgagcagcgccctgcctgtgatgagcaggaccctgggcatcaccaggtttgacctgctgggggactttggccgcttcaactggctgggcaacttctacatcgtgctgagctacaacctgctgtttgccatcgtgaccaccctgtgcctggtgaggaagttcaccagcgctgtgcgggaggagctgttcaaggccctgggcctgcacaagctgcacctgcccaacaccagccgggacagcgagacagccaagcccagcgtgaatggccaccagaaggccctgtag

SEQ ID NO: 157983 - DNA, 1248 bp, synthetic construct
  misc_feature 1..1248: note = Description of Artificial Sequence: Synthetic coding sequence
  source 1..1248: mol_type = other DNA
atgaaggaggatggccgggccggccggggcgtgggcgctggggccgccctgccccagcccagcgctggggtgcatgatgagcaggaggatgaagatgccatcgtgaaccgcatcagcctcttcctgagcaccttcaccctggccgtgtctgctggagctgtgctgctgctgcccttcagcatcatcagcaatgagatcctgctgtccttcccccagaactactacatccagtggctgaatggcagcctcatccacggcctgtggaacctggccagcctcttcagcaacctgtgcctgtttgtgctgatgccctttgccttcttcttcctggagagcgagggctttgctggcctgaagaagggcatccgggcccgcatcctggagaccctggtgatgctgctgctgctggccctgctgatcctgggcatcgtgtgggtggccagcgccctgattgacaatgatgctgcctccatggagagcctgtatgacctgtgggagttctacctgccctacctgtacagctgcatcagcctgatgggctgcctgctgctgctgctgtgcacccctgtgggcctgagcaggatgttcaccgtgatgggccagctgctggtgaagcccaccatcctggaggacctggatgagcagatctacatcatcaccctggaggaggaggccctgcagaggcggctgaatggcctgagcagctctgtggagtacaacatcatggagctggagcaggagctggagaatgtgaagaccctgaagaccaagctggagaggaggaagaaggccagcgcctgggagaggaacctggtgtacccagctgtgatggtgctgctgctgattgagaccagcatctctgtgctgctggtggcctgcaacatcctgtgcctgctggtggatgaaacagccatgcccaagggcacccggggccctggcattggaaatgccagcctgagcaccttcggctttgtgggcgccgccctggagatcatcctgatcttctacctgatggtgtcctctgtggtgggcttctacagcctgcgcttctttggaaacttcacccccaagaaggatgacaccaccatgaccaagatcatcggcaactgtgtgtccatcctggtgctgagcagcgccctgcctgtgatgagcaggaccctgggcctgcacaagctgcacctgcccaacaccagccgggacagcgagacagccaagcccagcgtgaatggccaccagaaggccctgtag

SEQ ID NO: 157984 - DNA, 1470 bp, synthetic construct
  misc_feature 1..1470: note = Description of Artificial Sequence: Synthetic coding sequence
  source 1..1470: mol_type = other DNA
atggaggccccagactatgaggtgctgtctgtgcgggagcagctgttccacgagcgcatccgggagtgcatcatcagcaccctgctgtttgccaccctgtacatcctgtgccacatcttcctgacccgcttcaagaagccagctgagttcaccaccgtggatgatgaagatgccaccgtgaacaagatcgccctggagctgtgcaccttcaccctggccatcgccctgggcgctgtgctgctgctgcccttcagcatcatcagcaatgaggtgctgctgagcctgcccaggaactactacatccagtggctgaatggcagcctcatccacggcctgtggaacctggtgttcctgttcagcaacctgagcctcatcttcctgatgccctttgcctacttcttcacagaaagtgagggctttgctggcagcaggaaaggagtgctgggccgggtgtatgagaccgtggtgatgctgatgctgctgaccctgctggtgctgggcatggtgtgggtggccagcgccatcgtggacaagaacaaggccaaccgggagagcctgtatgacttctgggagtactacctgccctacctgtacagctgcatctccttcctgggcgtgctgctgctgctggtgtgcacccccctgggcctggccaggatgttttctgtgacaggcaagctgctggtgaagccccggctgctggaggacctggaggagcagctgtactgcagcgcctttgaggaggccgccctgacccggcgcatctgcaaccccaccagctgctggctgcccctggacatggagctgctgcaccggcaggtgctggccctgcagacccagagggtgctgctggagaagaggaggaaggccagcgcctggcagaggaacctgggctaccccctggccatgctgtgcctgctggtgctgaccggcctgtctgtgctgattgtggccatccacatcctggagctgctgattgatgaagctgccatgccccggggcatgcagggcaccagcctgggccaggtgtccttcagcaagctgggcagctttggagctgtgatccaggtggtgctgatcttctacctgatggtgtcctctgtggtgggcttctacagcagccccctcttccgcagcctgcggccccgctggcatgacacagccatgacccagatcatcggcaactgtgtgtgcctgctggtgctgagcagcgccctgcctgtgttcagcaggaccctgggcctgaccaggtttgacctgctgggggactttggccgcttcaactggctgggcaacttctacatcgtgttcctgtacaatgctgcctttgctggcctgaccaccctgtgcctggtgaagaccttcaccgctgctgtgcgggcagagctgatccgggccttcggcctggaccggctgcccctgcctgtgtctggcttcccccaggccagcaggaagacccagcaccagtag

SEQ ID NO: 157985 - DNA, 1455 bp, synthetic construct
  misc_feature 1..1455: note = Description of Artificial Sequence: Synthetic coding sequence
  source 1..1455: mol_type = other DNA
atggtgaatgtgaaggccctgtgtgagcctgaggtgagcaactgctggatgaatgtcatcactggaactggatctgtgagcagccccctgctggtgctgccccagcccggccctgagaccagcctgatgaccggggagcctgtggatgatgaagatgccaccgtgaacaagatcgccctggagctgtgcaccttcaccctggccatcgccctgggcgctgtgctgctgctgcccttcagcatcatcagcaatgaggtgctgctgagcctgcccaggaactactacatccagtggctgaatggcagcctcatccacggcctgtggaacctggtgttcctgttcagcaacctgagcctcatcttcctgatgccctttgcctacttcttcacagagagcgagggctttgctggcagcaggaagggcgtgctgggccgggtgtatgaaacagtggtgatgctgatgctgctgaccctgctggtgctgggcatggtgtgggtggccagcgccatcgtggacaagaacaaggccaaccgggagagcctgtatgacttctgggagtactacctgccctacctgtacagctgcatctccttcctgggcgtgctgctgctgctggtgtgcacccccctgggcctggccaggatgttttctgtgacaggcaagctgctggtgaagccccggctgctggaggacctggaggagcagctgtactgcagcgcctttgaggaggccgccctgacccggcgcatctgcaaccccaccagctgctggctgcccctggacatggagctgctgcaccggcaggtgctggccctgcagacccagagggtgctgctggagaagaggaggaaggccagcgcctggcagaggaacctgggctaccccctggccatgctgtgcctgctggtgctgaccggcctgtctgtgctgattgtggccatccacatcctggagctgctgattgatgaggccgccatgccccggggcatgcagggcaccagcctgggccaggtgtccttcagcaagctgggcagctttggagctgtgatccaggtggtgctgatcttctacctgatggtgtcctctgtggtgggcttctacagcagccccctcttccgcagcctgcggccccgctggcatgacacagccatgacccagatcatcggcaactgtgtgtgcctgctggtgctgagcagcgccctgcccgtcttcagcaggaccctgggcctgaccaggtttgacctgctgggggactttggccgcttcaactggctgggcaacttctacatcgtgttcctgtacaatgctgcctttgctggcctgaccaccctgtgcctggtgaagaccttcaccgctgctgtgcgggcagagctgatccgggccttcggcctggaccggctgcccctgcctgtgtctggcttcccccaggccagcaggaagacccagcaccagtag

SEQ ID NO: 157986 - DNA, 1410 bp, synthetic construct
  misc_feature 1..1410: note = Description of Artificial Sequence: Synthetic coding sequence
  source 1..1410: mol_type = other DNA
atggaggccccagactatgaggtgctgtctgtgcgggagcagctgttccacgagcgcatccgggagtgcatcatcagcaccctgctgtttgccaccctgtacatcctgtgccacatcttcctgacccgcttcaagaagccagctgagttcaccaccgtggatgatgaagatgccaccgtgaacaagatcgccctggagctgtgcaccttcaccctggccatcgccctgggcgctgtgctgctgctgcccttcagcatcatcagcaatgaggtgctgctgagcctgcccaggaactactacatccagtggctgaatggcagcctcatccacggcctgtggaacctggtgttcctgttcagcaacctgagcctcatcttcctgatgccctttgcctacttcttcacagaaagtgagggctttgctggcagcaggaaaggagtgctgggccgggtgtatgagaccgtggtgatgctgatgctgctgaccctgctggtgctgggcatggtgtgggtggccagcgccatcgtggacaagaacaaggccaaccgggagagcctgtatgacttctgggagtactacctgccctacctgtacagctgcatctccttcctgggcgtgctgctgctgctggtgtgcacccccctgggcctggccaggatgttttctgtgacaggcaagctgctggtgaagccccggctgctggaggacctggaggagcagctgtactgcagcgcctttgaggaggccgccctgacccggcgcatctgcaaccccaccagctgctggctgcccctggacatggagctgctgcaccggcaggtgctggccctgcagacccagagggtgctgctggagaagaggaggaaggccagcgcctggcagaggaacctgggctaccccctggccatgctgtgcctgctggtgctgaccggcctgtctgtgctgattgtggccatccacatcctggagctgctgattgatgaagctgccatgccccggggcatgcaggtggtgctgatcttctacctgatggtgtcctctgtggtgggcttctacagcagccccctcttccgcagcctgcggccccgctggcatgacacagccatgacccagatcatcggcaactgtgtgtgcctgctggtgctgagcagcgccctgcctgtgttcagcaggaccctgggcctgaccaggtttgacctgctgggggactttggccgcttcaactggctgggcaacttctacatcgtgttcctgtacaatgctgcctttgctggcctgaccaccctgtgcctggtgaagaccttcaccgctgctgtgcgggcagagctgatccgggccttcggcctggaccggctgcccctgcctgtgtctggcttcccccaggccagcaggaagacccagcaccagtag

SEQ ID NO: 157987 - DNA, 384 bp, synthetic construct
  misc_feature 1..384: note = Description of Artificial Sequence: Synthetic coding sequence
  source 1..384: mol_type = other DNA
atggaggccccagactatgaggtgctgtctgtgcgggagcagctgttccacgagcgcatccgggagtgcatcatcagcaccctgctgtttgccaccctgtacatcctgtgccacatcttcctgacccgcttcaagaagccagctgagttcaccaccgtggatgatgaagatgccaccgtgaacaagatcgccctggagctgtgcaccttcaccctggccatcgccctgggcgctgtgctgctgctgcccttcagcatcatcagcaatgaggtgctgctgagcctgcccaggaactactacatccagtggctgaatggcagcctcatccacggcctgtggaacctggtgttcctgttcagcaacctgagcctcatcttcctgtag

SEQ ID NO: 157988 - DNA, 1017 bp, synthetic construct
  misc_feature 1..1017: note = Description of Artificial Sequence: Synthetic coding sequence
  source 1..1017: mol_type = other DNA
atggtgagaagagtgcagcctgacaggaagcagctgcccctggtgctgctgcggctgctgtgcctgctgcccaccggcctgcctgtgcgctctgtggacttcaacagaggaacagacaacatcaccgtgcggcagggcgacacagccatcctgcgctgtgtggtggaggacaagaacagcaaggtggcctggctgaacagaagtggcatcatctttgctggccatgacaagtggagcctggacccccgggtggagctggagaagaggcacagcctggagtacagcctgcgcatccagaaggtggatgtgtatgatgagggcagctacacctgcagcgtgcagacccagcacgagcccaagaccagccaggtgtacctgattgtgcaggtgccccccaagatcagcaacatcagcagtgatgtgacagtgaatgaaggcagcaatgtgaccctggtgtgcatggccaacggccggcctgagcctgtgatcacctggaggcacctgacccccaccggccgggagtttgaaggagaggaggagtacctggagatcctgggcatcacccgggagcagagcggcaagtatgagtgcaaggccgccaatgaggtgtcctctgcagatgtgaagcaggtgaaggtgacagtgaactacccacccaccatcacagagagcaagagcaatgaggccaccaccggccggcaggccagcctgaagtgtgaggccagcgctgtgcctgccccagactttgagtggtacagagatgacacccgcatcaacagcgccaacggcctggagatcaagagcacagagggccagagcagcctgactgtgaccaacgtgacagaggagcactacggcaactacacctgtgtggccgccaacaagctgggcgtgaccaatgccagcctggtgctcttccggcccggctctgtgcggggcatcaatggcagcatcagcctggccgtgcccctgtggctgctggccgccagcctgctgtgcctgctgagcaaatgttag

SEQ ID NO: 157989 - DNA, 1077 bp, synthetic construct
  misc_feature 1..1077: note = Description of Artificial Sequence: Synthetic coding sequence
  source 1..1077: mol_type = other DNA
atgaggacctactggctgcacagcgtgtgggtgctgggcttcttcctgagcctcttcagcctgcagggcctgcctgtgcgctctgtggacttcaacagaggaacagacaacatcaccgtgcggcagggcgacacagccatcctgcgctgtgtggtggaggacaagaacagcaaggtggcctggctgaacagaagtggcatcatctttgctggccatgacaagtggagcctggacccccgggtggagctggagaagaggcacagcctggagtacagcctgcgcatccagaaggtggatgtgtatgatgagggcagctacacctgcagcgtgcagacccagcacgagcccaagaccagccaggtgtacctgattgtgcaggtgccccccaagatcagcaacatcagcagtgatgtgacagtgaatgaaggcagcaatgtgaccctggtgtgcatggccaacggccggcctgagcccgtcatcacctggaggcacctgacccccaccggccgggagtttgaaggagaggaggagtacctggagatcctgggcatcacccgggagcagagcggcaagtatgagtgcaaggccgccaatgaggtgagcagcgcagatgtgaagcaggtgaaggtgacagtgaactacccacccaccatcacagagagcaagagcaatgaggccaccaccggccggcaggccagcctgaagtgtgaggccagcgctgtgcctgccccagactttgagtggtacagagatgacacccgcatcaacagcgccaacggcctggagatcaagagcacagagggccagagcagcctgactgtgaccaacgtgacagaggagcactacggcaactacacctgtgtggccgccaacaagctgggcgtgaccaatgccagcctggtgctcttcaagagggtgctgcccaccatcccccaccccatccaggagatcggcaccaccgtgcacttcaagcagaagggccctggctctgtgcggggcatcaatggcagcatcagcctggccgtgcccctgtggctgctggccgccagcctgctgtgcctgctgagcaaatgttag

SEQ ID NO: 157990 - DNA, 753 bp, synthetic construct
  misc_feature 1..753: note = Description of Artificial Sequence: Synthetic coding sequence
  source 1..753: mol_type = other DNA
atggccgagggcggggccagcaagggcggcggggaggagcccgggaagctgcctgagcctgctgaggaggagagccaggtgctgcggggcaccggccactgcaagtggttcaacgtgaggatgggcttcggcttcatctccatgatcaaccgggagggcagccccctggacatccctgtggatgtgtttgtgcaccagagcaagctgttcatggagggcttccgcagcctgaaggagggggagcctgtggagttcaccttcaagaagagcagcaagggcctggagagcatccgggtgacaggccctgggggcagcccctgcctgggcagcgagcggcggcccaagggcaagaccctgcagaagaggaagcccaagggggaccgctgctacaactgtggcggcctggaccaccacgccaaggaatgttccctgcccccccagcccaagaagtgccactactgccagagcatcatgcacatggtggccaactgcccccacaagaatgtggcccagcccccagccagcagccagggccggcaggaggccgagagccagccctgcaccagcaccctgccccgggaggtgggcggcggccacggctgcaccagcccccccttcccccaggaggcccgggcagagatcagcgagaggagcggccgcagcccccaggaggccagcagcaccaagagcagcatcgcccctgaggagcagagcaagaagggccccagcgtgcagaagaggaagaagacctag

SEQ ID NO: 157991 - DNA, 2250 bp, synthetic construct
  misc_feature 1..2250: note = Description of Artificial Sequence: Synthetic coding sequence
  source 1..2250: mol_type = other DNA
atggaggtggtgcctgctgaggtgaacagcctgctgcctgaggagatcatggacaccggcatcaccctggtggatgatgacagcattgaagctgtgattgtgagcagccccatccccatggagacagagctggaggagatcgtgaacatcaacagcactggagacagcacagccacccccatcagcacagagcccatcaccgtgtacagcaaccacaccaaccaggtggccgtgaacaccaccatcaccaaggctgacagcaacaccaccgtgaagccagccttccccagcggcctgcagaagctgggcgcccagacccctgtgaccatcagcgccaaccagatcatcctgaacaaggtgtcccagaccagtgacctgaagctgggcaaccagaccctgaagccagatggccagaagctgatcctgaccaccctgggcaagagcggcagccccatcgtgctggccctgccccacagccagctgccccaggcccagaaggtgaccacccaggcccagagcggagatgccaagctgcccccccagcagatcaaggtggtgaccatcggcggccggcctgaggtgaagcctgtgattggagtgtctgccctgaccccaggcagccagctgatcaacaccaccacccagcccagcgtgctgcagacccagcagctgaagacagtgcagatcgccaagaagcccaggacccccaccagcggccctgtgatcaccaagctgatctttgccaagcccatcaacagcaaggctgtgacaggccagaccacccaggtgtccccacctgtgattgctggccgggtgctgagccagagcaccccaggcacccccagcaagaccatcaccatcagcgagagcggcgtgattggcagcaccctgaacagcaccacccagacccccaacaagatcgccatcagccccctgaagagccccaacaaggctgtgaagagcacagtgcagaccatcaccgtgggcggcgtgtccaccagccagttcaagaccatcatccccctggccacagccccaaatgtgcagcagatccaggtgcccggcagcaagttccactacgtgcggctggtgacagccaccagcgccagcagcagcacccagcctgtgtcccagaaccccagcaccaacacccagcccctgcagcaggccaagcctgtggtggtgaacaccacccctgtgaggatgtctgtgcccatcgtgtctgcccaggccgtgaagcaggtggtgcccaagcccatcaaccccaccagccagatcgtgaccaccagccagccccagcagaggctcatcatgcctgccacccccctgccccagatccagcccaacctgaccaacctgcccccaggcaccgtgctggccccagcccctggcactggaaatgtgggctatgctgtgctgcctgcccagtatgtgacccagctgcagcagagcagctatgtgtccatcgccagcaacagcaccttcaccggcaccagcggcatccagacccaggcccggctgcccttcaacggcatcatccccagcgagagcgccagccggcccaggaagccctgcaactgcaccaagagcctgtgcctgaagctgtactgtgactgctttgccaacggggagttctgcaacaactgcaactgcaccaactgctacaacaacctggagcatgaaaatgaaaggcagaaggccatcaaggcctgcctggacaggaaccctgaggccttcaagcccaagattggcaagggcaaggagggggagagtgacagaagacacagcaagggctgcaactgcaagaggagcggctgcctgaagaactactgtgagtgctatgaggccaagatcatgtgcagcagcatctgcaagtgcatcggctgcaagaactttgaggagagccctgagaggaagaccctgatgcacctggctgatgctgctgaggtgcgggtgcagcagcagacagctgccaagaccaagctgagcagccagatcagtgacctgctgacccggcccaccccagccctgaacagcggcggcggcaagctgcccttcacctttgtgaccaaggaggtggccgaggccacctgcaactgcctgctggcccaggccgagcaggccgacaagaagggcaagagcaaggctgctgctgagaggatgatcctggaggagtttggccgctgcctgatgtctgtcatcaacagcgctgggaaggccaagagtgacccctgtgccatgaactgctag

SEQ ID NO: 157992 - DNA, 732 bp, synthetic construct
  misc_feature 1..732: note = Description of Artificial Sequence: Synthetic coding sequence
  source 1..732: mol_type = other DNA
atggaggtggtgcctgctgaggtgaacagcctgctgcctgaggagatcatggacaccggcatcaccctggtggatgatgacagcattgaagctgtgattgtgagcagccccatccccatggagacagagctggaggagatcgtgaacatcaacagcactggagacagcacagccacccccatcagcacagagcccatcaccgtgtacagcaaccacaccaaccaggtggccgtgaacaccaccatcaccaaggctgacagcaacaccaccgtgaagccagccttccccagcggcctgcagaagctgggcgcccagacccctgtgaccatcagcgccaaccagatcatcctgaacaaggtgtcccagaccagtgacctgaagctgggcaaccagaccctgaagccagatggccagaagctgatcctgaccaccctgggcaagagcggcagccccatcgtgctggccctgccccacagccagctgccccaggcccagaaggtgaccacccaggcccagagcggagatgccaagctgcccccccagcagatcaaggtggtgaccatcggcggccggcctgaggtgaagcctgtgattggagtgtctgccctgaccccaggcagccagctgatcaacaccaccacccagcccagcgtgctgcagacccagcagctgaagacagtgcaggtgggcttcttccacagcctgctgcctgagctgcaccagaggccctag

SEQ ID NO: 157993 - DNA, 1983 bp, synthetic construct
  misc_feature 1..1983: note = Description of Artificial Sequence: Synthetic coding sequence
  source 1..1983: mol_type = other DNA
atggaggtggtgcctgctgaggtgaacagcctgctgcctgaggagatcatggacaccggcatcaccctggtggatgatgacagcattgaagctgtgattgtgagcagccccatccccatggagacagagctggaggagatcgtgaacatcaacagcactggagacagcacagccacccccatcagcacagagcccatcaccgtgtacagcaaccacaccaaccaggtggccgtgaacaccaccatcaccaaggctgacagcaacaccaccgtgaagccagccttccccagcggcctgcagaagctgggcgcccagacccctgtgaccatcagcgccaaccagatcatcctgaacaaggtgtcccagaccagtgacctgaagctgggcaaccagaccctgaagccagatggccagaagctgatcctgaccaccctgggcaagagcggcagccccatcgtgctggccctgccccacagccagctgccccaggcccagaaggtgaccacccaggcccagagcggagatgccaagctgcccccccagcagatcaaggtggtgaccatcggcggccggcctgaggtgaagcctgtgattggagtgtctgccctgaccccaggcagccagctgatcaacaccaccacccagcccagcgtgctgcagacccagcagctgaagacagtgcaggccgtgaagagcacagtgcagaccatcaccgtgggcggcgtgtccaccagccagttcaagaccatcatccccctggccacagcccccaacgtgcagcagatccaggtgcccggcagcaagttccactacgtgcggctggtgacagccaccagcgccagcagcagcacccagcctgtgtcccagaaccccagcaccaacacccagcccctgcagcaggccaagcctgtggtggtgaacaccacccctgtgaggatgtctgtgcccatcgtgtctgcccaggccgtgaagcaggtggtgcccaagcccatcaaccccaccagccagatcgtgaccaccagccagccccagcagaggctcatcatgcctgccacccccctgccccagatccagcccaacctgaccaacctgcccccaggcaccgtgctggccccagcccctggcactggaaatgtgggctatgctgtgctgcctgcccagtatgtgacccagctgcagcagagcagctatgtgtccatcgccagcaacagcaccttcaccggcaccagcggcatccagacccaggcccggctgcccttcaacggcatcatccccagcgagagcgccagccggcccaggaagccctgcaactgcaccaagagcctgtgcctgaagctgtactgtgactgctttgccaatggagagttctgcaacaactgcaactgcaccaactgctacaacaacctggagcatgaaaatgaaaggcagaaggccatcaaggcctgcctggacagaaatcctgaggccttcaagcccaagattggcaagggcaaggagggggagagtgaccggcggcacagcaagggctgcaactgcaagaggagcggctgcctgaagaactactgtgaatgttatgaggccaagatcatgtgcagcagcatctgcaagtgcatcggctgcaagaactttgaggagagccctgagaggaagaccctgatgcacctggctgatgctgctgaggtgcgggtgcagcagcagacagctgccaagaccaagctgagcagccagatcagtgacctgctgacccggcccaccccagccctgaacagcggcggcggcaagctgcccttcacctttgtgaccaaggaggtggccgaggccacctgcaactgcctgctggcccaggccgagcaggccgacaagaagggcaagagcaaggctgctgctgagaggatgatcctggaggagtttggccgctgcctgatgtctgtcatcaacagcgctgggaaggccaagagtgacccctgtgccatgaactgctag

SEQ ID NO: 157994 - DNA, 1587 bp, synthetic construct
  misc_feature 1..1587: note = Description of Artificial Sequence: Synthetic coding sequence
  source 1..1587: mol_type = other DNA
atggaggtggtgcctgctgagatcgccaagaagcccaggacccccaccagcggccctgtgatcaccaagctgatctttgccaagcccatcaacagcaaggctgtgacaggccagaccacccaggtgagcccccctgtgattgctggccgggtgctgagccagagcaccccaggcacccccagcaagaccatcaccatcagcgagagcggggtcatcggcagcaccctgaacagcaccacccagacccccaacaagatcgccatcagccccctgaagagccccaacaaggctgtgaagagcacagtgcagaccatcaccgtgggcggcgtgtccaccagccagttcaagaccatcatccccctggccacagcccccaacgtgcagcagatccaggtgcccggcagcaagttccactacgtgcggctggtgacagccaccagcgccagcagcagcacccagcctgtgtcccagaaccccagcaccaacacccagcccctgcagcaggccaagcctgtggtggtgaacaccacccctgtgaggatgtctgtgcccatcgtgtctgcccaggccgtgaagcaggtggtgcccaagcccatcaaccccaccagccagatcgtgaccaccagccagccccagcagaggctcatcatgcctgccacccccctgccccagatccagcccaacctgaccaacctgcccccaggcaccgtgctggccccagcccctggcactggaaatgtgggctatgctgtgctgcctgcccagtatgtgacccagctgcagcagagcagctatgtgtccatcgccagcaacagcaccttcaccggcaccagcggcatccagacccaggcccggctgcccttcaacggcatcatccccagcgagagcgccagccggcccaggaagccctgcaactgcaccaagagcctgtgcctgaagctgtactgtgactgctttgccaatggagagttctgcaacaactgcaactgcaccaactgctacaacaacctggagcatgaaaatgaaaggcagaaggccatcaaggcctgcctggacagaaatcctgaggccttcaagcccaagattggcaagggcaaggagggggagagtgaccggcggcacagcaagggctgcaactgcaagaggagcggctgcctgaagaactactgtgaatgttatgaggccaagatcatgtgcagcagcatctgcaagtgcatcggctgcaagaactttgaggagagccctgagaggaagaccctgatgcacctggctgatgctgctgaggtgcgggtgcagcagcagacagctgccaagaccaagctgagcagccagatcagtgacctgctgacccggcccaccccagccctgaacagcggcggcggcaagctgcccttcacctttgtgaccaaggaggtggccgaggccacctgcaactgcctgctggcccaggccgagcaggccgacaagaagggcaagagcaaggctgctgctgagaggatgatcctggaggagtttggccgctgcctgatgtctgtcatcaacagcgctgggaaggccaagagtgacccctgtgccatgaactgctag

SEQ ID NO: 157995 - DNA, 1587 bp, synthetic construct; identical to SEQ ID NO: 157994
  misc_feature 1..1587: note = Description of Artificial Sequence: Synthetic coding sequence
  source 1..1587: mol_type = other DNA

SEQ ID NO: 157996 - DNA, 2250 bp, synthetic construct; identical to SEQ ID NO: 157991
  misc_feature 1..2250: note = Description of Artificial Sequence: Synthetic coding sequence
  source 1..2250: mol_type = other DNA

SEQ ID NO: 157997 - DNA, 1587 bp, synthetic construct; identical to SEQ ID NO: 157994
  misc_feature 1..1587: note = Description of Artificial Sequence: Synthetic coding sequence
  source 1..1587: mol_type = other DNA

SEQ ID NO: 157998 - DNA, 2025 bp, synthetic construct
  misc_feature 1..2025: note = Description of Artificial Sequence: Synthetic coding sequence
  source 1..2025: mol_type = other DNA
atgtggcatgaggccaggaagcatgagaggaagctgcggggcatgatggtggactacaagaagagagctgagcggcggcgggagtactatgagaagatcaagaaggaccctgcccagttcctgcaggtgcacggccgggcctgcaaggtgcacctggacagcgctgtggccctggccgctgagagccctgtgaacatgatgccctggcagggcgacaccaacaacatgattgacagatttgatgtgcgggcccacctggaccacatcccagactacaccccacccctgctgaccaccatcagccctgagcaggagagtgatgagaggaagtgcaactatgagcgctaccggggcctggtgcagaatgactttgctggcatcagcgaggagcagtgcctgtaccagatctacattgatgagctgtatggaggcctgcagaggccttctgaagatgagaagaagaagctggccgagaagaaggccagcatcggctacacctatgaggacagcacagtggccaaggtggagaaggctgctgagaagccagaggaggaggagagcgctgctgaggaggagagcaacagtgatgaagatgaggtgatcccagacattgatgtggaggtggatgtggatgagctgaaccaggagcaggtggccgacctgaacaagcaggccaccacctacggcatggctgatggagactttgtgaggatgctgaggaaggacaaggaggaggccgaggccatcaagcacgccaaggccctggaggaggagaaggccatgtacagcggcagaagaagccggcggcagaggcgggagttccgggagaagaggctgcggggcaggaagatcagcccccccagctatgcccggcgggacagccccacctatgacccctacaagaggagccccagcgagagcagcagcgagagccgcagccgcagccgcagccccaccccaggccgggaggagaagatcaccttcatcaccagctttggaggcagtgatgaggaggccgctgctgctgctgctgctgctgctgccagcggcgtgaccaccgggaagcccccagccccaccccagcccggcggccctgcccctggaagaaatgccagcgccaggagaagaagcagcagcagcagcagcagcagcagcgccagcaggaccagcagcagccgcagcagcagccgcagcagcagccgcagcagaagaggaggcggctactacagaagtggaagacatgcccggagccgcagccgctcctggagccgcagccgcagccgcagccgccgctacagccgcagccgcagccggggccgccgccacagcggcggcggcagcagagatggccaccgctacagccgcagccctgccaggagaggaggctacggccccaggagaagaagccgcagccgcagccacagcggggaccgctaccgccggggcggccggggcctgcggcaccacagcagcagccgcagccgcagctcctggagcctgagccccagccgcagccgcagcctgaccaggagccgcagccacagccccagccccagccagagccgcagccgcagccgcagccgcagccagagccccagccccagccctgcccgggagaagctgaccaggcctgctgccagccctgctgtgggggagaagctgaagaagacagagcctgctgctgggaaggagactggagctgccaagcccaagctgaccccccaggagaagctgaagctgaggatgcagaaggccctgaaccggcagttcaaggctgacaagaaggccgcccaggagaagatgatccagcaggagcacgagcggcaggagcgggaggatgagctgcgggccatggccaggaagatccgcatgaaggagcgggagcggcgggagaaggagcgggaggagtgggagcggcagtacagccggcagagccgcagccccagcccccgctacagccgggagtacagcagcagcagaagaagaagccgcagccgcagccgcagcccccactaccgccactag

SEQ ID NO: 157999 - DNA, 594 bp, synthetic construct
  misc_feature 1..594: note = Description of Artificial Sequence: Synthetic coding sequence
  source 1..594: mol_type = other DNA
atggccgccctgggggagcctgtgcggctggagcgggacatctgccgggccatcgagctgctggagaagctgcagaggtctggagaggtgcccccccagaagctgcaggccctgcagagggtgctgcagagcgagttctgcaatgctgtgcgggaggtgtatgagcacgtgtatgagaccgtggacatcagcagcagccctgaggtgcgggccaatgccacagccaaggccaccgtggccgcctttgctgccagcgagggccacagccacccccgggtggtggagctgcccaagacagaggagggcctgggcttcaacatcatgggcggcaaggagcagaacagccccatctacatcagccgcatcatccctgggggcattgctgacagacatggaggcctgaagagaggagaccagctgctgtctgtgaatggagtgtctgtggagggggagcaccacgagaaggctgtggagctgctgaaggccgcccagggcaaggtgaagctggtggtgcgctacacccccaaggtgctggaggagatggagagcagatttgagaagatgaggtctgccaagaggcggcagcagacctag

SEQ ID NO: 158000 - DNA, 759 bp, synthetic construct
  misc_feature 1..759: note = Description of Artificial Sequence: Synthetic coding sequence
  source 1..759: mol_type = other DNA
atggaggaggccatcctggtgccctgtgtgctgggcctgctgctgctgcccatcctggccatgctgatggccctgtgtgtgcactgccaccggctgcccggcagctatgacagcaccagcagtgacagcctgtacccccggggcatccagttcaagaggccccacacagtggccccctggcccccagcctacccacctgtgaccagctacccacccctgagccagcctgacctgctgcccatccccaggagcccccagccccggcgggacagtgatggagccaacagcgtggccagctatgaaaatgaaggagccagcggcatccggggggcccaggccggctggggcgtgtggggccccagctggacccggctgacccctgtgtccctgcccccagagcccgcctgtgaagatgctgatgaagatgaagatgactaccacaaccctggctacctggtggtgctgcctgacagcaccccagccaccagcacagctgcccccagcgccccagccctgagcaccccaggcatccgggacagcgccttctccatggagagcattgatgattatgtgaatgtgcctgagagcggggagagcgctgaggccagcctggatggcagccgggagtatgtgaatgtgtcccaggagctgcaccctggagctgccaagacagagcctgctgccctgagcagccaggaggccgaggaggtggaggaggagggcgccccagactatgagaacctgcaggagctgaactag

SEQ ID NO: 158001 - DNA, 789 bp, synthetic construct
  misc_feature 1..789: note = Description of Artificial Sequence: Synthetic coding sequence
  source 1..789: mol_type = other DNA
atggaggaggccatcctggtgccctgtgtgctgggcctgctgctgctgcccatcctggccatgctgatggccctgtgtgtgcactgccaccggctgcccggcagctatgacagcaccagcagtgacagcctgtacccccggggcatccagttcaagaggccccacacagtggccccctggcccccagcctacccacctgtgaccagctacccacccctgagccagcctgacctgctgcccatccccaggagcccccagcccctgggcggcagccacaggacccccagcagccggcgggacagtgatggagccaacagcgtggccagctatgaaaatgaaggagccagcggcatccggggggcccaggccggctggggcgtgtggggccccagctggacccggctgacccctgtgtccctgcccccagagcccgcctgtgaagatgctgatgaagatgaagatgactaccacaaccctggctacctggtggtgctgcctgacagcaccccagccaccagcacagctgcccccagcgccccagccctgagcaccccaggcatccgggacagcgccttctccatggagagcattgatgattatgtgaatgtgcctgagagcggggagagcgctgaggccagcctggatggcagccgggagtatgtgaatgtgtcccaggagctgcaccctggagctgccaagacagagcctgctgccctgagcagccaggaggccgaggaggtggaggaggagggcgccccagactatgagaacctgcaggagctgaactag

SEQ ID NO: 158002 - DNA, 702 bp, synthetic construct
  misc_feature 1..702: note = Description of Artificial Sequence: Synthetic coding sequence
  source 1..702: mol_type = other DNA
atggaggaggccatcctggtgccctgtgtgctgggcctgctgctgctgcccatcctggccatgctgatggccctgtgtgtgcactgccaccggctgcccggcagctatgacagcaccagcagtgacagcctgtacccccggggcatccagttcaagaggccccacacagtggccccctggcccccagcctacccacctgtgaccagctacccacccctgagccagcctgacctgctgcccatccccaggagcccccagcccctgggcggcagccacaggacccccagcagccggcgggacagtgatggagccaacagcgtggccagctatgaaaatgaggagcccgcctgtgaagatgctgatgaagatgaagatgactaccacaaccctggctacctggtggtgctgcctgacagcaccccagccaccagcacagctgcccccagcgccccagccctgagcaccccaggcatccgggacagcgccttctccatggagagcattgatgattatgtgaatgtgcctgagagcggggagagcgctgaggccagcctggatggcagccgggagtatgtgaatgtgtcccaggagctgcaccctggggccgccaagacagagcctgctgccctgagcagccaggaggccgaggaggtggaggaggagggcgccccagactatgagaacctgcaggagctgaactag

SEQ ID NO: 158003 - DNA, 810 bp, synthetic construct
  misc_feature 1..810: note = Description of Artificial Sequence: Synthetic coding sequence
  source 1..810: mol_type = other DNA
atggaggccacagctgcctcctggcaggtggccgtgcctgtgctgggcggggccagccggcccctgggccccagaggagctgccagcctgctgcgggcccccctgcagatggaggaggccatcctggtgccctgtgtgctgggcctgctgctgctgcccatcctggccatgctgatggccctgtgtgtgcactgccaccggctgcccggcagctatgacagcaccagcagtgacagcctgtacccccggggcatccagttcaagaggccccacacagtggccccctggcccccagcctacccacctgtgaccagctacccacccctgagccagcctgacctgctgcccatccccaggagcccccagcccctgggcggcagccacaggacccccagcagccggcgggacagtgatggagccaacagcgtggccagctatgaaaatgaggagcccgcctgtgaagatgctgatgaagatgaagatgactaccacaaccctggctacctggtggtgctgcctgacagcaccccagccaccagcacagctgcccccagcgccccagccctgagcaccccaggcatccgggacagcgccttctccatggagagcattgatgattatgtgaatgtgcctgagagcggggagagcgctgaggccagcctggatggcagccgggagtatgtgaatgtgtcccaggagctgcaccctggggccgccaagacagagcctgctgccctgagcagccaggaggccgaggaggtggaggaggagggcgccccagactatgagaacctgcaggagctgaactag

SEQ ID NO: 158004 - DNA, 699 bp, synthetic construct
  misc_feature 1..699: note = Description of Artificial Sequence: Synthetic coding sequence
  source 1..699: mol_type = other DNA
atggaggaggccatcctggtgccctgtgtgctgggcctgctgctgctgcccatcctggccatgctgatggccctgtgtgtgcactgccaccggctgcccggcagctatgacagcaccagcagtgacagcctgtacccccggggcatccagttcaagaggccccacacagtggccccctggcccccagcctacccacctgtgaccagctacccacccctgagccagcctgacctgctgcccatccccagcccccagcccctgggcggcagccacaggacccccagcagcagaagagacagtgatggagccaacagcgtggccagctatgaaaatgaggagcccgcctgtgaagatgctgatgaagatgaagatgactaccacaaccctggctacctggtggtgctgcctgacagcaccccagccaccagcacagctgcccccagcgccccagccctgagcaccccaggcatccgggacagcgccttctccatggagagcattgatgattatgtgaatgtgcctgagagcggggagagcgctgaggccagcctggatggcagccgggagtatgtgaatgtgtcccaggagctgcaccctggagctgccaagacagagcctgctgccctgagcagccaggaggccgaggaggtggaggaggagggcgccccagactatgagaacctgcaggagctgaactag

SEQ ID NO: 158005 - DNA, 732 bp, synthetic construct
  misc_feature 1..732: note = Description of Artificial Sequence: Synthetic coding sequence
  source 1..732: mol_type = other DNA
atgagcagcggcacagagctgctgtggccaggggccgccctgctggtgctgctgggcgtggccgccagcctgtgtgtgcgctgcagcaggcctggggccaagaggtctgagaagatctaccagcagaggagcctgcgggaggaccagcagagcttcaccggcagcaggacctacagcctggtgggccaggcctggccaggccccctggccgacatggcccccaccaggaaggacaagctgctgcagttctaccccagcctggaggaccctgccagcagccgctaccagaacttcagcaagggcagccgccacggcagcgaggaggcctacatcgaccccatcgccatggagtactacaactggggccgcttcagcaagcccccagaagatgatgatgccaacagctatgaaaatgtgctgatctgcaagcagaagaccacagaaacaggagcccagcaggagggcatcggcggcctgtgccgcggggacctgagcctgagcctggccctgaagacaggccccaccagcggcctgtgccccagcgccagccctgaggaggatgaggagagcgaggactaccagaacagcgccagcatccaccagtggagggagagcaggaaggtgatgggccagctgcagcgggaggccagccctggccctgtgggcagcccagatgaagaagatggagagccagactatgtgaatggagaggtggccgccacagaggcctag

SEQ ID NO: 158006 - DNA, 732 bp, synthetic construct; identical to SEQ ID NO: 158005
  misc_feature 1..732: note = Description of Artificial Sequence: Synthetic coding sequence
  source 1..732: mol_type = other DNA

SEQ ID NO: 158007 - DNA, 195 bp, synthetic construct
  misc_feature 1..195: note = Description of Artificial Sequence: Synthetic coding sequence
  source 1..195: mol_type = other DNA
atgagcagcggcacagagctgctgtggccaggggccgccctgctggtgctgctgggcgtggccgccagcctgtgtgtgcgctgcagcaggcctggggccaagaggtctgagaagatctaccagcagaggagcctgcgggaggaccagcagagcttcaccggcagcaggacctacagcctggtgggccaggcctag

SEQ ID NO: 158008 - DNA, 732 bp, synthetic construct; identical to SEQ ID NO: 158005
  misc_feature 1..732: note = Description of Artificial Sequence: Synthetic coding sequence
  source 1..732: mol_type = other DNA

SEQ ID NO: 158009 - DNA, 732 bp, synthetic construct; identical to SEQ ID NO: 158005
  misc_feature 1..732: note = Description of Artificial Sequence: Synthetic coding sequence
  source 1..732: mol_type = other DNA

SEQ ID NO: 158010 - DNA, 177 bp, synthetic construct
  misc_feature 1..177: note = Description of Artificial Sequence: Synthetic coding sequence
  source 1..177: mol_type = other DNA
atgagcagcggcacagagctgctgtggccaggggccgccctgctggtgctgctgggcgtggccgccagcctgtgtgtgcgctgcagcaggcctggggccaagaggtctgagaagatctaccagcagaggagcctgcgggaggaccagcagagcttcaccggcagcaggacctactag

SEQ ID NO: 158011 - DNA, 303 bp, synthetic construct
  misc_feature 1..303: note = Description of Artificial Sequence: Synthetic coding sequence
  source 1..303: mol_type = other DNA
atgagcagcggcacagagctgctgtggccaggggccgccctgctggtgctgctgggcgtggccgccagcctgtgtgtgcgctgcagcaggcctggggccaagaggtctgagaagatctaccagcagaggagcctgcgggaggaccagcagagcttcaccggcagcaggacctacagcctggtgggccaggcctggccaggccccctggccgacatggcccccaccaggaaggacaagctgctgcagttctaccccagcctggaggaccctgccagcagccgctaccagaacttcagcaagtag

SEQ ID NO: 158012 - DNA, 1704 bp, synthetic construct
  misc_feature 1..1704: note = Description of Artificial Sequence: Synthetic coding sequence
  source 1..1704: mol_type = other DNA
atgaggccagacagccccaccatggccgccccagctgagagcctgcggcggaggaagacaggctacagcgaccctgagcctgagagccccccagcccctggccggggccctgctggcagccctgcccacctgcacacaggcaccttctggctgacccgcatcgtgctgctgaaggccctggcctttgtgtactttgtggccttcctggtggccttccaccagaacaagcagctgattggagaccggggcctgctgccctgcagggtcttcctgaagaacttccagcagtacttccaggacaggacctcctgggaggtgttctcctacatgcccaccatcctgtggctgatggactggagcgacatgaacagcaacctggacctgctggccctgctgggcctgggcatcagcagctttgtgctgatcaccggctgtgccaacatgctgctgatggccgccctgtggggcctgtacatgagcctggtgaatgtgggccacgtgtggtacagctttggctgggagagccagctgctggagaccggcttcctgggcatcttcctgtgccccctgtggaccctgagccggctgccccagcacacccccaccagcagaattgtgctgtggggcttccgctggctgatcttccgcatcatgctgggcgccggcctcatcaagatccggggggaccgctgctggagggacctgacctgcatggacttccactatgagacccagcccatgcccaaccctgtggcctactacctgcaccacagcccctggtggttccacagatttgagaccctgagcaaccacttcatcgagctgctggtgcccttcttcctgttcctgggcagaagagcctgcatcatccatggagtgctgcagatcctcttccaggccgtgctgattgtgtctggcaacctgtccttcctgaactggctgaccatggtgcccagcctggcctgctttgatgatgccaccctgggcttcctgttccccagcggccctggcagcctgaaggacagagtgctgcagatgcagagggacatccggggggcccggcctgagcccaggtttggatctgtggtgcggcgggccgccaacgtgtccctgggcgtgctgctggcctggctgtctgtgcctgtggtgctgaacctgctgagcagccggcaggtgatgaacacccacttcaacagcctgcacatcgtgaacacctacggggccttcggcagcatcaccaaggagagagctgaggtgatcctgcagggcacagccagcagcaatgccagcgccccagatgccatgtgggaggactatgagttcaagtgcaagccaggggaccccagccggcggccctgcctgatcagcccctaccactaccgcctggactggctgatgtggtttgctgccttccagacctatgagcacaatgactggatcatccacctggccggcaagctgctggccagtgatgctgaggccctgagcctgctggcccacaacccctttgctggccggcccccaccccgctgggtgcggggggagcactaccgctacaagttcagcaggcctgggggcagacatgctgctgagggcaagtggtgggtgaggaagagaattggagcctacttcccccccctgagcctggaggagctgcggccctacttccgggaccggggctggcccctgcccggccccctgtag

SEQ ID NO: 158013 - DNA, 1704 bp, synthetic construct
  misc_feature 1..1704: note = Description of Artificial Sequence: Synthetic coding sequence
  source 1..1704: mol_type = other DNA
atgaggccagacagccccaccatggccgccccagctgagagcctgcggcggaggaagacaggctacagcgaccctgagcctgagagccccccagcccctggccggggccctgctggcagccctgcccacctgcacacaggcaccttctggctgacccgcatcgtgctgctgaaggccctggcctttgtgtactttgtggccttcctggtggccttccaccagaacaagcagctgattggagaccggggcctgctgccctgcagggtcttcctgaagaacttccagcagtacttccaggacaggacctcctgggaggtgttctcctacatgcccaccatcctgtggctgatggactggagcgacatgaacagcaacctggacctgctggccctgctgggcctgggcatcagcagctttgtgctgatcaccggctgtgccaacatgctgctgatggccgccctgtggggcctgtacatgagcctggtgaatgtgggccacgtgtggtacagcttccgctgggagagccagctgctggagaccggcttcctgggcatcttcctgtgccccctgtggaccctgagccggctgccccagcacacccccaccagcagaattgtgctgtggggcttccgctggctgatcttccgcatcatgctgggcgccggcctcatcaagatccggggggaccgctgctggagggacctgacctgcatggacttccactatgagacccagcccatgcccaaccctgtggcctactacctgcaccacagcccctggtggttccacagatttgagaccctgagcaaccacttcatcgagctgctggtgcccttcttcctgttcctgggcagaagagcctgcatcatccatggagtgctgcagatcctcttccaggccgtgctgattgtgtctggcaacctgtccttcctgaactggctgaccatggtgcccagcctggcctgctttgatgatgccaccctgggcttcctgttccccagcggccctggcagcctgaaggacagagtgctgcagatgcagagggacatccggggggcccggcctgagcccaggtttggatctgtggtgcggcgggccgccaacgtgtccctgggcgtgctgctggcctggctgtctgtgcctgtggtgctgaacctgctgagcagccggcaggtgatgaacacccacttcaacagcctgcacatcgtgaacacctacggggccttcggcagcatcaccaaggagagagctgaggtgatcctgcagggcacagccagcagcaatgccagcgccccagatgccatgtgggaggactatgagttcaagtgcaagccaggggaccccagccggcggccctgcctgatcagcccctaccactaccgcctggactggctgatgtggtttgctgccttccagacctatgagcacaatgactggatcatccacctggccggcaagctgctggccagtgatgctgaggccctgagcctgctggcccacaacccctttgctggccggcccccaccccgctgggtgcggggggagcactaccgctacaagttcagcaggcctgggggcagacatgctgctgagggcaagtggtgggtgaggaagagaattggagcctacttcccccccctgagcctggaggagctgcggccctacttccgggaccggggctggcccctgcccggccccctgtag

SEQ ID NO: 158014 - DNA, 558 bp, synthetic construct
  misc_feature 1..558: note = Description of Artificial Sequence: Synthetic coding sequence
  source 1..558: mol_type = other DNA
atgaggccagacagccccaccatggccgccccagctgagagcctgcggcggaggaagacaggctacagcgaccctgagcctgagagccccccagcccctggccggggccctgctggcagccctgcccacctgcacacaggcaccttctggctgacccgcatcgtgctgctgaaggccctggcctttgtgtactttgtggccttcctggtggccttccaccagaacaagcagctgattggagaccggggcctgctgccctgcagggtcttcctgaagaacttccagcagtacttccaggacaggacctcctgggaggtgttctcctacatgcccaccatcctgtggctgatggactggagcgacatgaacagcaacctggacctgctggccctgctgggcctgggcatcagcagctttgtgctgatcaccggctgtgccaacatgctgctgatggccgccctgtggggcctgtacatgagcctggtgaatgtgggccacgtgtggtgccccagcctggccagcgccatcagcctgcccagcatgcacggcggccagtag

SEQ ID NO: 158015 - DNA, 501 bp, synthetic construct
  misc_feature 1..501: note = Description of Artificial Sequence: Synthetic coding sequence
  source 1..501: mol_type = other DNA
atggccgccccagctgagagcctgcggcggaggaagacaggctacagcgaccctgagcctgagagccccccagcccctggccggggccctgctggcagccctgcccacctgcacacaggcaccttctggctgaccagaattgtgctgctgaaggccctggcctttgtgtactttgtggccttcctggtggccttccaccagaacaagcagctgattggagaccggggcctgctgccctgcagggtcttcctgaagaacttccagcagtacttccaggacaggacctcctgggaggtgttctcctacatgcccaccatcctgtggctgatggactggagcgacatgaacagcaacctggacctgctggccctgctgggcctgggcatcagcagctttgtgctgatcaccggctgtgccaacatgctgctgatggccgccctgtggggcctgtacatgagcctggtgaatgtgggccacgtgtggtacagctttgggaagtag

SEQ ID NO: 158016 - DNA, 1053 bp, synthetic construct
  misc_feature 1..1053: note = Description of Artificial Sequence: Synthetic coding sequence
  source 1..1053: mol_type = other DNA
atgagaggagctggcctcatcaagatccggggggaccgctgctggagggacctgacctgcatggacttccactatgagacccagcccatgcccaaccctgtggcctactacctgcaccacagcccctggtggttccacagatttgagaccctgagcaaccacttcatcgagctgctggtgcccttcttcctgttcctgggccggcgggcctgcatcatccacggcgtgctgcagatcctcttccaggccgtgctgattgtgtctggcaacctgtccttcctgaactggctgaccatggtgcccagcctggcctgctttgatgatgccaccctgggcttcctgttccccagcggccctggcagcctgaaggacagagtgctgcagatgcagagggacatccggggggcccggcctgagccccgcttcggctctgtggtgagaagagctgccaacgtgtccctgggcgtgctgctggcctggctgtctgtgcctgtggtgctgaacctgctgagcagccggcaggtgatgaacacccacttcaacagcctgcacatcgtgaacacctatggagccttcggcagcatcaccaaggagcgggcagaggtgatcctgcagggcacagccagcagcaatgccagcgccccagatgccatgtgggaggactatgagttcaagtgcaagccaggggaccccagcagaagaccctgcctgatcagcccctaccactaccgcctggactggctgatgtggtttgctgccttccagacctatgagcacaatgactggatcatccacctggccggcaagctgctggccagtgatgctgaggccctgagcctgctggcccacaacccctttgctggccggcccccaccccgctgggtgcggggggagcactaccgctacaagttcagcaggcctgggggcagacatgctgctgagggcaagtggtgggtgaggaagagaattggagcctacttcccccccctgagcctggaggagctgcggccctacttccgggaccggggctggcccctgcccggccccctgtag

SEQ ID NO: 158017 - DNA, 993 bp, synthetic construct
  misc_feature 1..993: note = Description of Artificial Sequence: Synthetic coding sequence
  source 1..993: mol_type = other DNA
atggacttccactatgagacccagcccatgcccaaccctgtggcctactacctgcaccacagcccctggtggttccacagatttgagaccctgagcaaccacttcatcgagctgctggtgcccttcttcctgttcctgggccggcgggcctgcatcatccacggcgtgctgcagatcctcttccaggccgtgctgattgtgtctggcaacctgtccttcctgaactggctgaccatggtgcccagcctggcctgctttgatgatgccaccctgggcttcctgttccccagcggccctggcagcctgaaggacagagtgctgcagatgcagagggacatccggggggcccggcctgagccccgcttcggctctgtggtgagaagagctgccaacgtgtccctgggcgtgctgctggcctggctgtctgtgcctgtggtgctgaacctgctgagcagccggcaggtgatgaacacccacttcaacagcctgcacatcgtgaacacctatggagccttcggcagcatcaccaaggagcgggcagaggtgatcctgcagggcacagccagcagcaatgccagcgccccagatgccatgtgggaggactatgagttcaagtgcaagccaggggaccccagcagaagaccctgcctgatcagcccctaccactaccgcctggactggctgatgtggtttgctgccttccagacctatgagcacaatgactggatcatccacctggccggcaagctgctggccagtgatgctgaggccctgagcctgctggcccacaacccctttgctggccggcccccaccccgctgggtgcggggggagcactaccgctacaagttcagcaggcctgggggcagacatgctgctgagggcaagtggtgggtgaggaagagaattggagcctacttcccccccctgagcctggaggagctgcggccctacttccgggaccggggctggcccctgcccggccccctgtag

SEQ ID NO: 158018 - DNA, 792 bp, synthetic construct
  misc_feature 1..792: note = Description of Artificial Sequence: Synthetic coding sequence
  source 1..792: mol_type = other DNA
atgcccaaccctgtggcctactacctgcaccacagcccctggtggttccacagatttgagaccctgagcaaccacttcatcgagctgctggtgcccttcttcctgttcctgggcagaagagcctgcatcatccatggagtgctgcagatcctcttccaggccgtgctgattgtgtctggcaacctgtccttcctgaactggctgaccatggtgcccagcctggcctgctttgatgatgccaccctgggcttcctgttccccagcggccctggcagcctgaaggacagagtgctgcagatgcagagggacatccggggggcccggcctgagcccaggtttggatctgtggtgcggcgggccgccaacgtgtccctgggcgtgctgctggcctggctgtctgtgcctgtggtgctgaacctgctgagcagccggcaggtgatgaacacccacttcaacagcctgcacatcgtgaacacctacggggccttcggcagcatcaccaaggagagagctgaggtgatcctgcagggcacagccagcagcaatgccagcgccccagatgccatgtgggaggactatgagttcaagtgcaagccaggggaccccagccggcggccctgcctgatcagcccctaccactaccgcctggactggctgatgtggtttgctgccttccagacctatgagcacaatgactggatcatccacctggccggcaagctgctggccagtgatgctgaggccctgagcctgctggcccacaacccctttgctggccggcccccaccctag

SEQ ID NO: 158019 - DNA, 1503 bp, synthetic construct
  misc_feature 1..1503: note = Description of Artificial Sequence: Synthetic coding sequence
  source 1..1503: mol_type = other DNA
atgagcaacagcgtgcccctgctgtgcttctggagcctgtgctactgctttgctgctggcagccctgtgccctttggacctgagggccgcctggaggacaagctgcacaagcccaaggccacccagacagaggtgaagcccagcgtgcgcttcaacctgcggaccagcaaggaccctgagcacgagggctgctacctgtctgtgggccacagccagcccctggaggactgcagcttcaacatgacagccaagaccttcttcatcatccacggctggaccatgagcggcatctttgagaactggctgcacaagctggtgtctgccctgcacacccgggagaaggatgccaacgtggtggtggtggactggctgcccctggcccaccagctgtacacagatgctgtgaacaacaccagggtggtgggccacagcatcgccaggatgctggactggctgcaggagaaggatgacttcagcctgggcaatgtgcacctgattggctacagcctgggcgcccacgtggccggctacgccggcaactttgtgaagggcaccgtgggccgcatcaccggcctggaccctgctggccccatgtttgaaggagctgacatccacaagaggctgagcccagatgatgctgactttgtggatgtgctgcacacctacaccaggagctttggcctgagcatcggcatccagatgcctgtgggccacatcgacatctaccccaacggcggggacttccagcccggctgcggcctgaatgatgtgctgggcagcatcgcctacggcaccatcacagaggtggtgaagtgtgagcacgagagagctgtgcacctgtttgtggacagcctggtgaaccaggacaagcccagctttgccttccagtgcacagacagcaaccgcttcaagaagggcatctgcctgagctgcaggaagaaccgctgcaacagcatcggctacaatgccaagaagatgaggaacaagaggaacagcaagatgtacctgaagacccgggccggcatgcccttccgggtgtaccactaccagatgaagatccacgtgttctcctacaagaacatgggagaaattgagcccaccttctacgtgaccctgtatggcaccaatgctgacagccagaccctgcccctggagatcgtggagcgcatcgagcagaatgccaccaacaccttcctggtgtacacagaggaggacctgggggacctgctgaagatccagctgacctgggagggcgccagccagagctggtacaacctgtggaaggagttccgcagctacctgagccagcccaggaaccctggccgggagctgaacatccgccgcatccgggtgaagtctggagagacccagaggaagctgaccttctgcacagaagatcctgagaacaccagcatcagccctggccgggagctgtggttcaggaagtgcagagatggctggaggatgaagaatgagaccagccccaccgtggagctgccctag

SEQ ID NO: 158020 - DNA, 1281 bp, synthetic construct
  misc_feature 1..1281: note = Description of Artificial Sequence: Synthetic coding sequence
  source 1..1281: mol_type = other DNA
atgagcaacagcgtgcccctgctgtgcttctggagcctgtgctactgctttgctgctggcagccctgtgccctttggacctgagggccgcctggaggacaagctgcacaagcccaaggccacccagacagaggtgaagcccagcgtgcgcttcaacctgcggaccagcaaggaccctgagcacgagggctgctacctgtctgtgggccacagccagcccctggaggactgcagcttcaacatgacagccaagaccttcttcatcatccacggctggaccatgagcggcatctttgagaactggctgcacaagctggtgtctgccctgcacacccgggagaaggatgccaacgtggtggtggtggactggctgcccctggcccaccagctgtacacagatgctgtgaacaacaccagggtggtgggccacagcatcgccaggatgctggactggctgcaggagaaggatgacttcagcctgggcaatgtgcacctgattggctacagcctgggcgcccacgtggccggctacgccggcaactttgtgaagggcaccgtgggccgcatcacagccatcacagaggtggtgaagtgtgagcacgagagagctgtgcacctgtttgtggacagcctggtgaaccaggacaagcccagctttgccttccagtgcacagacagcaaccgcttcaagaagggcatctgcctgagctgcaggaagaaccgctgcaacagcatcggctacaatgccaagaagatgaggaacaagaggaacagcaagatgtacctgaagacccgggccggcatgcccttccgggtgtaccactaccagatgaagatccacgtgttctcctacaagaacatgggagaaattgagcccaccttctacgtgaccctgtatggcaccaatgctgacagccagaccctgcccctggagatcgtggagcgcatcgagcagaatgccaccaacaccttcctggtgtacacagaggaggacctgggggacctgctgaagatccagctgacctgggagggcgccagccagagctggtacaacctgtggaaggagttccgcagctacctgagccagcccaggaaccctggccgggagctgaacatccgccgcatccgggtgaagtctggagagacccagaggaagctgaccttctgcacagaagatcctgagaacaccagcatcagccctggccgggagctgtggttcaggaagtgcagagatggctggaggatgaagaatgagaccagccccaccgtggagctgccctag

SEQ ID NO: 158021 - DNA, 1101 bp, synthetic construct
  misc_feature 1..1101: note = Description of Artificial Sequence: Synthetic coding sequence
  source 1..1101: mol_type = other DNA
atgaacatcagccagatcatctcctactggggctacccagatgaggagtatgacatcgtgacagaagatggctacatcctgggcctgtaccgcatcccctactggaggacagacaacaacaagaacctggcccagagggtggtggtgtacctgcagcacggcctgctgaccagcgccagctcctggatcagcaacctgcccaacaacagcctgggcttcatcctggctgatgctggctatgatgtgtggatgggcaacagccggggcaacacctggagcaggaagcacctgtacctggagaccagcagcaaggagttctgggccttctcctttgatgagatggccaagtatgacctgcctgccagcattgacttcaccgtgaagcagacccggcaggaggagatcttctacgtgggccacagccagggcaccaccatcggcttcatcaccttcagcaccatcagcaagattgctgagcgcatcaagatcttctttgccctggcccctgtgttcagcaccaagtacctgaagagccccctcatccgcatgacctacaagtggaagagcatcgtgatggccttcagcggcaacaaggacttcctgcccaagaccagcttcaagaagttcatcggcagcaagctgtgccccctgcagatctttgacaagatctgcctgaacatcctcttcatgatgtttggctatgaccccaagaacctgaacatgagccggctggatgtgtacttcagccacaacccagctggcacctctgtgcagaacatgctgcactggagccagctgctgaacagcacccacctgaaggcctatgactggggcagcccagacctgaacctggtgcactacaaccagaccaccagccccctgtacaacatgaccaacatgaatgtggccacagccatctggaatggcaagagtgacctgctggccgaccctgaagatgtgaacatcctgcacagcgagatcaccaaccacatctactacaagaccatctcctactacaaccacatcgacagcctgtttggcctggatgtgtatgaccaggtgtaccacgagatcatcgacatcatccaggacaacctgtag

SEQ ID NO: 158022 - DNA, 1200 bp, synthetic construct
  misc_feature 1..1200: note = Description of Artificial Sequence: Synthetic coding sequence
  source 1..1200: mol_type = other DNA
atgtggcagctgctggccgccgcctgctggatgctgctgctgggctccatgtatggctatgacaagaagggcaacaatgccaaccctgaggccaacatgaacatcagccagatcatctcctactggggctacccctatgaggagtatgatgtgaccaccaaggatggctacatcctgggcatctaccgcatcccccacggccggggctgccccggccgcacagcccccaagccagctgtgtacctgcagcacggcctgattgccagcgccagcaactggatctgcaacctgcccaacaacagcctggccttcctgctggccgacagcggctatgatgtgtggctgggcaacagccggggcaacacctggagcaggaagcacctgaagctgagccccaagagccctgagtactgggccttcagcctggatgagatggccaagtatgacctgcctgccaccatcaacttcatcatcgagaagacaggccagaagaggctgtactacgtgggccacagccagggcaccaccatcgccttcatcgccttcagcaccaaccctgagctggccaagaagatcaagatcttctttgccctggcccctgtggtgacagtgaagtacacccagagccccatgaagaagctgaccaccctgagcagaagagtggtgaaggtgctgtttggagacaagatgttccacccccacaccctgtttgaccagttcatcgccaccaaggtgtgcaacaggaagctgttccgccgcatctgcagcaacttcctgttcaccctgagcggctttgacccccagaacctgaacatgagccggctggatgtgtacctgagccacaacccagctggcacctctgtgcagaacatgctgcactgggcccaggccgtgaacagcggccagctgcaggcctttgactggggcaacagcgaccagaacatgatgcacttccaccagctgaccccacccctgtacaacatcaccaagatggaggtgcccacagccatctggaatggaggccaggacatcgtggccgaccccaaggatgtggagaacctgctgccccagatcgccaacctgatctactacaagctgatcccccactacaaccacgtggacttctacctgggagaagatgccccccaggagatctaccaggacctgatcatcctgatggaggagtacctgcagaactag

SEQ ID NO: 158023 - DNA, 1272 bp, synthetic construct
  misc_feature 1..1272: note = Description of Artificial Sequence: Synthetic coding sequence
  source 1..1272: mol_type = other DNA
atgctggagaccctgagccggcagtggatcgtgagccacaggatggagatgtggctgctgatcctggtggcctacatgttccagagaaatgtgaacagcgtgcacatgcccaccaaggctgtggaccctgaggccttcatgaacatcagcgagatcatccagcaccagggctacccctgtgaggagtatgaggtggccacagaagatggctacatcctgtctgtgaaccgcatcccccggggcctggtgcagcccaagaagacaggcagcaggcctgtggtgctgctgcagcacggcctggtgggcggggccagcaactggatcagcaacctgcccaacaacagcctgggcttcatcctggctgatgctggctttgatgtgtggatgggcaacagcagaggaaatgcctggagcaggaagcacaagaccctgagcattgaccaggatgagttctgggccttctcctatgatgagatggccaggtttgacctgcctgctgtgatcaacttcatcctgcagaagacaggccaggagaagatctactacgtgggctacagccagggcaccaccatgggcttcatcgccttcagcaccatgcctgagctggcccagaagatcaagatgtactttgccctggcccccatcgccaccgtgaagcacgccaagagccctggcaccaagttcctgctgctgcctgacatgatgatcaagggcctgtttgggaagaaggagttcctgtaccagacccgcttcctgcggcagctggtgatctacctgtgtggccaggtgatcctggaccagatctgcagcaacatcatgctgctgctgggcggcttcaacaccaacaacatgaacatgagccgggcctctgtgtatgctgcccacaccctggccggcacctctgtgcagaacatcctgcactggagccaggccgtgaacagcggggagctgcgggcctttgactggggcagcgagaccaagaacctggagaagtgcaaccagcccacccctgtgcgctacagagtgcgggacatgacagtgcccacagccatgtggacaggaggccaggactggctgagcaacccagaagatgtgaagatgctgctgtctgaggtgaccaacctgatctaccacaagaacatccctgagtgggcccacgtggacttcatctggggcctggatgccccccacaggatgtacaatgagatcatccacctgatgcagcaggaggagaccaacctgagccagggccgctgtgaggccgtgctgtag

SEQ ID NO: 158024 - DNA, 1152 bp, synthetic construct
  misc_feature 1..1152: note = Description of Artificial Sequence: Synthetic coding sequence
  source 1..1152: mol_type = other DNA
atgacccggcccctggacaggaagcagagcgagatcatccagcaccagggctacccctgtgaggagtatgaggtggccacagaagatggctacatcctgtctgtgaaccgcatcccccggggcctggtgcagcccaagaagacaggcagcaggcctgtggtgctgctgcagcacggcctggtgggcggggccagcaactggatcagcaacctgcccaacaacagcctgggcttcatcctggctgatgctggctttgatgtgtggatgggcaacagcagaggaaatgcctggagcaggaagcacaagaccctgagcattgaccaggatgagttctgggccttctcctatgatgagatggccaggtttgacctgcctgctgtgatcaacttcatcctgcagaagacaggccaggagaagatctactacgtgggctacagccagggcaccaccatgggcttcatcgccttcagcaccatgcctgagctggcccagaagatcaagatgtactttgccctggcccccatcgccaccgtgaagcacgccaagagccctggcaccaagttcctgctgctgcctgacatgatgatcaagggcctgtttgggaagaaggagttcctgtaccagacccgcttcctgcggcagctggtgatctacctgtgtggccaggtgatcctggaccagatctgcagcaacatcatgctgctgctgggcggcttcaacaccaacaacatgaacatgagccgggcctctgtgtatgctgcccacaccctggccggcacctctgtgcagaacatcctgcactggagccaggccgtgaacagcggggagctgcgggcctttgactggggcagcgagaccaagaacctggagaagtgcaaccagcccacccctgtgcgctacagagtgcgggacatgacagtgcccacagccatgtggacaggaggccaggactggctgagcaacccagaagatgtgaagatgctgctgtctgaggtgaccaacctgatctaccacaagaacatccctgagtgggcccacgtggacttcatctggggcctggatgccccccacaggatgtacaatgagatcatccacctgatgcagcaggaggagaccaacctgagccagggccgctgtgaggccgtgctgtag

SEQ ID NO: 158025 - DNA, 1197 bp, synthetic construct
  misc_feature 1..1197: note = Description of Artificial Sequence: Synthetic coding sequence
  source 1..1197: mol_type = other DNA
atgatgtggctgctgctgaccaccacctgcctgatctgtggcaccctgaatgctgggggcttcctggacctggagaatgaggtgaaccctgaggtgtggatgaacaccagcgagatcatcatctacaacggctaccccagcgaggagtatgaggtgaccacagaagatggctacatcctgctggtgaaccgcatcccctacggccgcacccacgcccggagcacaggccccaggcctgtggtgtacatgcagcacgccctgtttgctgacaatgcctactggctggagaactatgccaacggcagcctgggcttcctgctggctgatgctggctatgatgtgtggatgggcaacagccggggcaacacctggagccgccgccacaagaccctgtctgaaacagatgagaagttctgggccttctcctttgatgagatggccaagtatgacctgcccggggtgattgacttcatcgtgaacaagacaggccaggagaagctgtacttcatcggccacagcctgggcaccaccatcggctttgtggccttcagcaccatgcctgagctggcccagaggatcaagatgaactttgccctgggccccaccatctccttcaagtaccccaccggcatcttcacccgcttcttcctgctgcccaacagcatcatcaaggctgtgtttggcaccaagggcttcttcctggaggacaagaagaccaagatcgccagcaccaagatctgcaacaacaagatcctgtggctgatctgcagcgagttcatgagcctgtgggccggcagcaacaagaagaacatgaaccagagcaggatggatgtgtacatgagccacgcccccaccggcagctctgtgcacaacatcctgcacatcaagcagctgtaccacagtgatgagttccgggcctatgactggggcaatgatgctgacaacatgaagcactacaaccagagccacccccccatctatgacctgacagccatgaaggtgcccacagccatctgggccggcggccatgatgtgctggtgaccccccaggatgtggcccgcatcctgccccagatcaagagcctgcactacttcaagctgctgcctgactggaaccactttgattttgtgtggggcctggatgccccccagaggatgtacagcgagatcatcgccctgatgaaggcctacagctag

SEQ ID NO: 158026 - DNA, 1500 bp, synthetic construct
  misc_feature 1..1500: note = Description of Artificial Sequence: Synthetic coding sequence
  source 1..1500: mol_type = other DNA
atggacaccagccccctgtgcttcagcatcctgctggtgctgtgcatcttcatccagagcagcgccctgggccagagcctgaagccagagcccttcggccggcgggcccaggccgtggagaccaacaagaccctgcacgagatgaagacccgcttcctgctgtttggagagaccaaccagggctgccagatccgcatcaaccacccagacaccctgcaggagtgtggcttcaacagcagcctgcccctggtgatgatcatccacggctggagcgtggatggagtgctggagaactggatctggcagatggtggccgccctgaagagccagcctgcccagcctgtgaatgtgggcctggtggactggatcaccctggcccatgaccactacaccatcgctgtgaggaacacccggctggtgggcaaggaggtggccgccctgctgcgctggctggaggagagcgtgcagctgagccgcagccacgtgcacctgattggctacagcctgggcgcccacgtgtctggctttgctggcagcagcattggaggcacccacaagattggccgcatcaccggcctggatgctgctggccccctgtttgagggcagcgcccccagcaaccggctgagcccagatgatgccaactttgtggatgccatccacaccttcacccgggagcacatgggcctgtctgtgggcatcaagcagcccatcggccactatgacttctaccccaacggcggcagcttccagcccggctgccacttcctggagctgtaccgccacatcgcccagcacggcttcaatgccatcacccagaccatcaagtgcagccatgagaggtctgtgcacctgttcatcgacagcctgctgcatgctggcacccagagcatggcctacccctgtggggacatgaacagcttcagccagggcctgtgcctgagctgcaagaagggccgctgcaacaccctgggctaccacgtgcggcaggagcccaggagcaagagcaagaggctcttcctggtgacccgggcccagagccccttcaaggtgtaccactaccagttcaagatccagttcatcaaccagacagagacccccatccagaccaccttcaccatgagcctgctgggcaccaaggagaagatgcagaagatccccatcaccctgggcaagggcatcgccagcaacaagacctacagcttcctgatcaccctggatgtggacatcggggagctgatcatgatcaagttcaagtgggagaacagcgctgtgtgggccaacgtgtgggacacagtgcagaccatcatcccctggagcacaggccccaggcacagcggcctggtgctgaagaccatccgggtgaaggccggggagacccagcagaggatgaccttctgcagtgaaaatacagatgacctgctgctgcggcccacccaggagaagatctttgtgaagtgtgagatcaagagcaagaccagcaagaggaagatcagatag

SEQ ID NO: 158027 - DNA, 1500 bp, synthetic construct; identical to SEQ ID NO: 158026
  misc_feature 1..1500: note = Description of Artificial Sequence: Synthetic coding sequence
  source 1..1500: mol_type = other DNA

SEQ ID NO: 158028 - DNA, 3231 bp, synthetic construct
  misc_feature 1..3231: note = Description of Artificial Sequence: Synthetic coding sequence
  source 1..3231: mol_type = other DNA
atggagcccggcagcaagtctgtgtccagaagtgactggcagcctgagccccaccagaggcccatcacccccctggagcccggccctgagaagacccccatcgcccagcctgagagcaagaccctgcagggcagcaacacccagcagaagccagccagcaaccagaggcccctgacccagcaggagaccccagcccagcatgatgctgagagccagaaggagccccgggcccagcagaagagcgccagccaggaggagttcctggccccccagaagccagccccccagcagagcccctacatccagagggtgctgctgacccagcaggaggccgccagccagcagggccctggcctgggcaaggagagcatcacccagcaggagcccgccctgcggcagagacatgtggcccagcccggccctggccctggagagcccccaccagcccagcaggaggccgagagcaccccagctgcccaggccaagccaggggccaagcgggagcccagcgcccccacagagagcaccagccaggagaccccagagcagagcgacaagcagaccacccctgtgcagggcgccaagagcaagcagggcagcctgacagagctgggcttcctgaccaagctgcaggagctgagcatccagaggtctgccctggagtggaaggccctgtctgagtgggtgacagacagcgagagcgagagtgatgtgggcagcagcagtgacacagacagccctgccaccatgggcggcatggtggcccagggcgtgaagctgggcttcaagggcaagagcggctacaaggtgatgagcggctacagcggcaccagcccccatgagaagaccagcgccaggaaccaccgccactaccaggacacagccagccgcctcatccacaacatggacctgcggaccatgacccagagcctggtgaccctggccgaggacaacatcgccttcttcagcagccagggccctggagaaacagcccagaggctgtctggagtgtttgctggggtgcgggagcaggccctgggcctggagcccgccctgggccgcctgctgggcgtggcccacctgtttgacctggaccctgagaccccagccaacggctaccgcagcctggtgcacacagcccgctgctgcctggcccacctgctgcacaagagccgctacgtggccagcaacagaagaagcatcttcttccgcaccagccacaacctggccgagctggaggcctacctggccgccctgacccagctgcgggccctggtgtactatgcccagaggctgctggtgaccaacagacctggggtgctcttctttgaaggagatgagggcctgacagctgacttcctgcgggagtatgtgaccctgcacaagggctgcttctacggccgctgcctgggcttccagttcaccccagccatccggcccttcctgcagaccatcagcatcggcctggtgtcctttggagagcactacaagagaaatgaaacaggcctgtctgtggccgccagcagcctcttcaccagcggccgctttgccatcgaccctgagctgcggggagctgagtttgagcgcatcacccagaacctggatgtgcacttctggaaggccttctggaacatcacagagatggaggtgctgagcagcctggccaacatggccagcgccaccgtgcgggtgtcccggctgctgagcctgcccccagaggcctttgagatgcccctgacagctgaccccaccctgactgtgaccatcagcccccccctggcccacacaggccctggccctgtgctggtgcggctcatctcctatgacctgcgggagggccaggacagcgaggagctgagcagcctcatcaagagcaatggccagaggagcctggagctgtggccccggccccagcaggcccccaggagccgcagcctgattgtgcacttccatggaggcggctttgtggcccagaccagccgcagccatgagccctacctgaagtcctgggcccaggagctgggcgcccccatcatcagcattgactacagcctggcccctgaggcccccttcccccgggccctggaggagtgcttctttgcctactgctgggccatcaagcactgtgccctgctgggcagcactggagagcgcatctgcctggccggggacagcgctgggggcaacctgtgcttcaccgtggccctgcgggctgctgcctatggagtgcgggtgcctgatggcatcatggccgcctacccagccaccatgctgcagcctgctgccagccccagccggctgctgagcctgatggaccccctgctgcccctgtctgtgctgagcaaatgtgtgtctgcctatgctggggccaagacagaggaccacagcaacagcgaccagaaggccctgggcatgatgggcctggtgcggcgggacacagccctgctgctgcgggacttccggctgggcgccagctcctggctgaacagcttcctggagctgagcggcaggaagagccagaagatgtctgagcccatcgccgagcccatgagaagatctgtgtctgaggccgccctggcccagccccagggccccctgggcacagacagcctgaagaacctgaccctgcgggacctgagcctgcggggcaacagcgagaccagcagtgacaccccagagatgagcctgtctgctgagaccctgagccccagcacccccagtgatgtgaacttcctgctgcccccagaagatgctggggaggaggccgaggccaagaatgagctgagccccatggaccggggcctgggcgtgcgggccgccttccctgagggcttccacccccggcgcagcagccagggcgccacccagatgcccctgtacagcagccccatcgtgaagaaccccttcatgagccccctgctggccccagacagcatgctgaagagcctgccccctgtgcacatcgtggcctgtgccctggaccccatgctggatgacagcgtgatgctggcccggcggctgaggaacctgggccagcctgtgaccctgcgggtggtggaggacctgccccacggcttcctgaccctggccgccctgtgccgggagacccggcaggccgctgagctgtgtgtggagcgcatccggctggtgctgaccccacctgctggagctggccccagcggggagactggagctgctggggtggatggcggctgcggcggccgccactag

SEQ ID NO: 158029 - DNA, 1356 bp, synthetic construct
  misc_feature 1..1356: note = Description of Artificial Sequence: Synthetic coding sequence
  source 1..1356: mol_type = other DNA
atgctgcgcttctacctgttcatcagcctgctgtgcctgagcagaagtgatgctgaggagacctgccccagcttcacccggctgtccttccacagcgctgtggtgggcaccggcctgaatgtgcggctgatgctgtacaccaggaagaacctgacctgtgcccagaccatcaacagcagcgccttcggcaacctgaatgtgaccaagaagaccaccttcatcgtgcacggcttccggcccaccggcagcccccctgtgtggatggatgacctggtgaagggcctgctgtctgtggaggacatgaatgtggtggtggtggactggaacagaggagccaccaccctcatctacacccacgccagcagcaagaccaggaaggtggccatggtgctgaaggagttcatcgaccagatgctggccgagggcgccagcctggatgacatctacatgattggagtgtccctgggcgcccacatcagcggctttgtgggggagatgtatgatggctggctgggccgcatcaccggcctggaccctgctggccccctcttcaacgggaagccccaccaggaccggctggaccccagtgatgcccagtttgtggatgtgatccacagcgacacagatgccctgggctacaaggagcccctgggcaacatcgacttctacccaaatggaggcctggaccagcccggctgccccaagaccatcctgggcggcttccagtacttcaagtgtgaccaccagaggtctgtgtacctgtacctgagcagcctgcgggagagctgcaccatcacagcctacccctgtgacagctaccaggactacagaaatggaaaatgtgtgtcctgtggcaccagccagaaggagagctgccccctgctgggctactatgctgacaactggaaggaccacctgcggggcaaggacccccccatgaccaaggccttctttgacacagctgaggagagccccttctgcatgtaccactactttgtggacatcatcacctggaacaagaatgtgagaagaggagacatcaccatcaagctgcgggacaaggccggcaacaccacagagagcaagatcaaccacgagcccaccaccttccagaagtaccaccaggtgtccctgctggcccgcttcaaccaggacctggacaaggtggccgccatcagcctgatgttcagcacaggcagcctcatcggcccccgctacaagctgcgcatcctgaggatgaagctgcggagcctggcccaccctgagcggccccagctgtgccgctatgacctggtgctgatggagaatgtggagaccgtcttccagcccatcctgtgcccagagctgcagctgtag

SEQ ID NO: 158030 - DNA, 1446 bp, synthetic construct
  misc_feature 1..1446: note = Description of Artificial Sequence: Synthetic coding sequence
  source 1..1446: mol_type = other DNA
atgctgctgaagtgcctgcacaacaacctgtgccagaagtacagcgcccacgccttccagttcagccccagaaatgtgctgtggctgctggtggtgtgcctgcggagtgacaacaagaggccctgcctggagttcagccagctgtctgtgaaggacagcttccgggacctcttcatcccccgcatcgagaccatcctgatgatgtacaccaggaacaacctgaactgtgccgagcccctgtttgagcagaacaacagcctgaatgtgaacttcaacacccagaagaagacagtgtggctgatccacggctacagacctgtgggcagcatccccctgtggctgcagaactttgtgcgcatcctgctgaatgaggaggacatgaatgtcatcgtggtggactggagcagaggagccaccaccttcatctacaacagagctgtgaagaacaccaggaaggtggccgtgtccctgtctgtgcacatcaagaacctgctgaagcatggagccagcctggacaacttccacttcatcggcgtgtccctgggcgcccacatcagcggctttgtgggcaagatcttccacggccagctgggccgcatcaccggcctggaccctgctggcccccgcttcagcaggaagccaccctacagccggctggactacacagatgccaagtttgtggatgtgatccacagcgacagcaatggcctgggcatccaggagcccctgggccacatcgacttctacccaaatggaggcaacaagcagcccggctgccccaagagcatcttcagcggcatccagttcatcaagtgcaaccaccagagagctgtgcacctgttcatggccagcctggagaccaactgcaacttcatctccttcccctgccgcagctacaaggactacaagaccagcctgtgtgtggactgtgactgcttcaaggagaagagctgcccccggctgggctaccaggccaagctgttcaagggcgtgctgaaggagaggatggagggccggcccctgcggaccaccgtcttcctggacaccagcggcacctaccccttctgcacctactactttgtgctgagcatcatcgtgcctgacaagaccatgatggatggcagcttctccttcaagctgctgaaccagctgggcatgattgaggagccccggctgtatgagaagaacaagcccttctacaagctgcaggaggtgaagatcctggcccagttctacaatgactttgtgaacatcagcagcatcggcctgacctacttccagagcagcaacctgcagtgcagcacctgcacctacaagatccagaggctgatgctgaagagcctgacctacccagagcggccccccctgtgccgctacaacatcgtgctgaaggaccgggaggaggtgttcctgaaccccaacacctgcacccccaagaacacctag

SEQ ID NO: 158031 - DNA, 471 bp, synthetic construct
  misc_feature 1..471: note = Description of Artificial Sequence: Synthetic coding sequence
  source 1..471: mol_type = other DNA
atgaatgtcatcgtggtggactggagcagaggagccaccaccttcatctacaacagagctgtgaagaacaccaggaaggtggccgtgtccctgtctgtgcacatcaagaacctgctgaagcatggagccagcctggacaacttccacttcatcggcgtgtccctgggcgcccacatcagcggctttgtgggcaagatcttccacggccagctgggccgcatcaccggcctggaccctgctggcccccgcttcagcaggaagccaccctacagccggctggactacacagatgccaagtttgtggatgtgatccacagcgacagcaatggcatccagttcatcaagtgcaaccaccagagagctgtgcacctgttcatggccagcctggagaccaactgcaacttcatctccttcccctgccgcagctacaaggactacaagaccagcctgtgtgtggactgtgactgctag

SEQ ID NO: 158032 - DNA, 426 bp, synthetic construct
  misc_feature 1..426: note = Description of Artificial Sequence: Synthetic coding sequence
  source 1..426: mol_type = other DNA
tgatacaacagagctgtgaagaacaccaggaaggtggccgtgtccctgtctgtgcacatcaagaacctgctgaagcacggggccagcctggacaacttccacttcatcggcgtgtccctgggcgcccacatcagcggctttgtgggcaagatcttccacggccagctgggccgcatcaccggcctggaccctgctggcccccgcttcagcaggaagccaccctacagccggctggactacacagatgccaagtttgtggatgtgatccacagcgacagcaatggcatccagttcatcaagtgcaaccaccagagagctgtgcacctgttcatggccagcctggagaccaactgcaacttcatctccttcccctgccgcagctacaaggactacaagaccagcctgtgtgtggactgtgactgctag

SEQ ID NO: 158033 - DNA, 1383 bp, synthetic construct
  misc_feature 1..1383: note = Description of Artificial Sequence: Synthetic coding sequence
  source 1..1383: mol_type = other DNA
atgagggtgtacatcttcctgtgcctgatgtgctgggtgcggagtgacaacaagaggccctgcctggagttcagccagctgtctgtgaaggacagcttccgggacctcttcatccccagaattgagaccatcctgatgatgtacaccaggaacaacctgaactgtgccgagcccctgtttgagcagaacaacagcctgaatgtgaacttcaacacccagaagaagacagtgtggctgattcatggctacagacctgtgggcagcatccccctgtggctgcagaactttgtgcgcatcctgctgaatgaggaggacatgaatgtgattgtggtggactggagcagaggagccaccaccttcatctacaacagagctgtgaagaacaccaggaaggtggccgtgtccctgtctgtgcacatcaagaacctgctgaagcacggggccagcctggacaacttccacttcatcggcgtgtccctgggcgcccacatcagcggctttgtgggcaagatcttccacggccagctgggccgcatcaccggcctggaccctgctggcccccgcttcagcaggaagccaccctacagccggctggactacacagatgccaagtttgtggatgtgatccacagcgacagcaatggcctgggcatccaggagcccctgggccacatcgacttctaccccaacggcggcaacaagcagcccggctgccccaagagcatcttcagcggcatccagttcatcaagtgcaaccaccagagagctgtgcacctgttcatggccagcctggagaccaactgcaacttcatctccttcccctgccgcagctacaaggactacaagaccagcctgtgtgtggactgtgactgcttcaaggagaagagctgcccccggctgggctaccaggccaagctgttcaagggcgtgctgaaggagaggatggagggccggcccctgcggaccaccgtcttcctggacaccagcggcacctaccccttctgcacctactactttgtgctgagcatcatcgtgcctgacaagaccatgatggatggcagcttctccttcaagctgctgaaccagctgggcatgattgaggagccccggctgtatgagaagaacaagcccttctacaagctgcaggaggtgaagatcctggcccagttctacaatgactttgtgaacatcagcagcatcggcctgacctacttccagagcagcaacctgcagtgcagcacctgcacctacaagatccagaggctgatgctgaagagcctgacctacccagagaggcctcccctgtgccgctacaacatcgtgctgaaggaccgggaggaggtgttcctgaaccccaacacctgcacccccaagaacacctag

SEQ ID NO: 158034 - DNA, 2673 bp, synthetic construct
  misc_feature 1..2673: note = Description of Artificial Sequence: Synthetic coding sequence
  source 1..2673: mol_type = other DNA
atgaactacgtgggccagctggccggccaggtgtttgtgacagtgaaggagctgtacaagggcctgaacccagccaccctgagcggctgcatcgacatcatcgtcatccggcagcccaacggcaacctgcagtgcagccccttccacgtgcgctttgggaagatgggcgtgctgcggagccgggagaaggtggtggacatcgagatcaacggggagagcgtggacctgcacatgaagctgggggacaatggagaggccttctttgtgcaggagacagacaatgaccaggaggtgatccccatgcacctggccaccagccccatcctgtctgagggcgccagcaggatggagtgccagctgaagaggggctctgtggacaggatgaggggcctggaccccagcaccccagcccaggtgattgcccccagcgagacccccagcagcagctctgtggtgaagaagaggaggaagagaagaaggaagagccagctggacagcctgaagagagatgacaacatgaacaccagtgaagatgaggacatgttccccatcgagatgagcagtgatgaggccatggagctgctggagagcagcaggaccctgcccaatgacatcccccccttccaggatgacatccctgaggagaacctgagcctggccgtcatctacccccagagcgccagctaccccaacagcgaccgggagtggagccccacccccagccccagcggcagccggcccagcacccccaagagtgacagcgagctggtgtccaagagcacagagaggacaggccagaagaaccctgagatgctgtggctgtggggcgagctgccccaggccgccaagagcagcagcccccacaagatgaaggagagcagccccctgagcagcaggaagatctgtgacaagagccacttccaggccatccacagcgagagcagtgacaccttcagtgaccagagccccaccctggtgggcggggccctgctggaccagaacaagccccagacagagatgcagtttgtgaatgaggaggacctggagaccctgggcgccgccgcccccctgctgcccatgattgaggagctgaagccacccagcgcctctgtggtgcagacagccaacaagacagacagccccagcaggaagagggacaagaggagccgccacctgggcgcagatggagtgtacctggatgacctgacagacatggaccctgaggtggccgccctgtacttccccaagaatggagaccccagcggcctggccaagcacgccagtgacaacggggcccggagcgccaaccagagcccccagagcgtgggcagcagtggagtggacagcggcgtggagagcaccagtgatggcctgcgggacctgcccagcatcgccatcagcctgtgtggcggcctgagtgaccaccgggagatcaccaaggatgccttcctggagcaggccgtgtcctaccagcagtttgtggacaacccagccatcattgatgaccccaacctggtggtgaagattggcagcaagtactacaactggaccacagctgcccccctgctgctggccatgcaggccttccagaagcccctgcccaaggccaccgtggagagcatcatgagggacaagatgcccaagaagggcggccgctggtggttctcctggaggggcaggaacaccaccatcaaggaggagagcaagccagagcagtgcctggccggcaaggcccacagcactggagagcagcccccccagctgagcctggccaccagggtgaagcatgagagcagcagcagtgatgaggagagagctgctgccaagcccagcaatgccggccacctgcccctgctgcccaacgtgtcctacaagaagaccctgcggctgaccagcgagcagctgaagagcctgaagctgaagaatggccccaatgatgtggtgttttctgtgaccacccagtaccagggcacctgccgctgtgagggcaccatctacctgtggaactgggatgacaaggtgatcatcagtgacattgatggcaccatcaccaggagtgacaccctgggccacatcctgcccaccctgggcaaggactggacccaccagggcatcgccaagctgtaccacaaggtgtcccagaatggctacaagttcctgtactgcagcgcccgggccatcggcatggctgacatgacccggggctacctgcactgggtgaatgaaagaggaacagtgctgccccagggccccctgctgctgagccccagcagcctcttcagcgccctgcaccgggaggtgattgagaagaagccagagaagttcaaggtgcagtgcctgacagacatcaagaacctcttcttccccaacacagagcccttctacgccgccttcggcaacagaccagcagatgtgtacagctacaagcaggtgggcgtgtccctgaaccgcatcttcaccgtgaaccccaagggggagctggtgcaggagcacgccaagaccaacatcagcagctatgtgcggctgtgtgaggtggtggaccacgtgttccccctgctgaagaggagccacagcagtgacttcccctgcagcgacaccttcagcaacttcaccttctggagggagcccctgcccccatttgagaaccaggacatccacagcgccagcgcctag

SEQ ID NO: 158035 - DNA, 1863 bp, synthetic construct
  misc_feature 1..1863: note = Description of Artificial Sequence: Synthetic coding sequence
  source 1..1863: mol_type = other DNA
atgctgtggctgtggggcgagctgccccaggccgccaagagcagcagcccccacaagatgaaggagagcagccccctgagcagcaggaagatctgtgacaagagccacttccaggccatccacagcgagagcagtgacaccttcagtgaccagagccccaccctggtgggcggggccctgctggaccagaacaagccccagacagagatgcagtttgtgaatgaggaggacctggagaccctgggcgccgccgcccccctgctgcccatgattgaggagctgaagccacccagcgcctctgtggtgcagacagccaacaagacagacagccccagcaggaagagggacaagaggagccgccacctgggcgcagatggagtgtacctggatgacctgacagacatggaccctgaggtggccgccctgtacttccccaagaatggagaccccagcggcctggccaagcacgccagtgacaacggggcccggagcgccaaccagagcccccagagcgtgggcagcagtggagtggacagcggcgtggagagcaccagtgatggcctgcgggacctgcccagcatcgccatcagcctgtgtggcggcctgagtgaccaccgggagatcaccaaggatgccttcctggagcaggccgtgtcctaccagcagtttgtggacaacccagccatcattgatgaccccaacctggtggtgaagattggcagcaagtactacaactggaccacagctgcccccctgctgctggccatgcaggccttccagaagcccctgcccaaggccaccgtggagagcatcatgagggacaagatgcccaagaagggcggccgctggtggttctcctggaggggcaggaacaccaccatcaaggaggagagcaagccagagcagtgcctggccggcaaggcccacagcactggagagcagcccccccagctgagcctggccaccagggtgaagcatgagagcagcagcagtgatgaggagagagctgctgccaagcccagcaatgccggccacctgcccctgctgcccaacgtgtcctacaagaagaccctgcggctgaccagcgagcagctgaagagcctgaagctgaagaatggccccaatgatgtggtgttttctgtgaccacccagtaccagggcacctgccgctgtgagggcaccatctacctgtggaactgggatgacaaggtgatcatcagtgacattgatggcaccatcaccaggagtgacaccctgggccacatcctgcccaccctgggcaaggactggacccaccagggcatcgccaagctgtaccacaaggtgtcccagaatggctacaagttcctgtactgcagcgcccgggccatcggcatggctgacatgacccggggctacctgcactgggtgaatgaaagaggaacagtgctgccccagggccccctgctgctgagccccagcagcctcttcagcgccctgcaccgggaggtgattgagaagaagccagagaagttcaaggtgcagtgcctgacagacatcaagaacctcttcttccccaacacagagcccttctacgccgccttcggcaacagaccagcagatgtgtacagctacaagcaggtgggcgtgtccctgaaccgcatcttcaccgtgaaccccaagggggagctggtgcaggagcacgccaagaccaacatcagcagctatgtgcggctgtgtgaggtggtggaccacgtgttccccctgctgaagaggagccacagcagtgacttcccctgcagcgacaccttcagcaacttcaccttctggagggagcccctgcccccatttgagaaccaggacatccacagcgccagcgcctag

SEQ ID NO: 158036 - DNA, 2799 bp, synthetic construct
  misc_feature 1..2799: note = Description of Artificial Sequence: Synthetic coding sequence
  source 1..2799: mol_type = other DNA
atgagccgggtgcagaccatgaactacgtgggccagctggccggccaggtgtttgtgacagtgaaggagctgtacaagggcctgaacccagccaccctgagcggctgcatcgacatcatcgtcatccggcagcccaacggcaacctgcagtgcagccccttccacgtgcgctttgggaagatgggcgtgctgcggagccgggagaaggtggtggacatcgagatcaacggggagagcgtggacctgcacatgaagctgggggacaatggagaggccttctttgtgcaggagacagacaatgaccaggaggtgatccccatgcacctggccaccagccccatcctgtctgagggcgccagcaggatggagtgccagctgaagaggggctctgtggacaggatgaggggcctggaccccagcaccccagcccaggtgattgcccccagcgagacccccagcagcagctctgtggtgaagaagaggaggaagagaagaaggaagagccagctggacagcctgaagagagatgacaacatgaacaccagtgaagatgaggacatgttccccatcgagatgagcagtgatgaggccatggagctgctggagagcagcaggaccctgcccaatgacatcccccccttccaggatgacatccctgaggagaacctgagcctggccgtcatctacccccagagcgccagctaccccaacagcgaccgggagtggagccccacccccagcagcctggtggactgcaagaggacagccccccacctggccgtggccgctgagggcggcctgagcagcagctgccccccccagagcagcctcttccaccccagcgagagccccagcggcagccggcccagcacccccaagagtgacagcgagctggtgtccaagagcacagagaggacaggccagaagaaccctgagatgctgtggctgtggggcgagctgccccaggccgccaagagcagcagcccccacaagatgaaggagagcagccccctgagcagcaggaagatctgtgacaagagccacttccaggccatccacagcgagagcagtgacaccttcagtgaccagagccccaccctggtgggcggggccctgctggaccagaacaagccccagacagagatgcagtttgtgaatgaggaggacctggagaccctgggcgccgccgcccccctgctgcccatgattgaggagctgaagccacccagcgcctctgtggtgcagacagccaacaagacagacagccccagcaggaagagggacaagaggagccgccacctgggcgcagatggagtgtacctggatgacctgacagacatggaccctgaggtggccgccctgtacttccccaagaatggagaccccagcggcctggccaagcacgccagtgacaacggggcccggagcgccaaccagagcccccagagcgtgggcagcagtggagtggacagcggcgtggagagcaccagtgatggcctgcgggacctgcccagcatcgccatcagcctgtgtggcggcctgagtgaccaccgggagatcaccaaggatgccttcctggagcaggccgtgtcctaccagcagtttgtggacaacccagccatcattgatgaccccaacctggtggtgaagattggcagcaagtactacaactggaccacagctgcccccctgctgctggccatgcaggccttccagaagcccctgcccaaggccaccgtggagagcatcatgagggacaagatgcccaagaagggcggccgctggtggttctcctggaggggcaggaacaccaccatcaaggaggagagcaagccagagcagtgcctggccggcaaggcccacagcactggagagcagcccccccagctgagcctggccaccagggtgaagcatgagagcagcagcagtgatgaggagagagctgctgccaagcccagcaatgccggccacctgcccctgctgcccaacgtgtcctacaagaagaccctgcggctgaccagcgagcagctgaagagcctgaagctgaagaatggccccaatgatgtggtgttttctgtgaccacccagtaccagggcacctgccgctgtgagggcaccatctacctgtggaactgggatgacaaggtgatcatcagtgacattgatggcaccatcaccaggagtgacaccctgggccacatcctgcccaccctgggcaaggactggacccaccagggcatcgccaagctgtaccacaaggtgtcccagaatggctacaagttcctgtactgcagcgcccgggccatcggcatggctgacatgacccggggctacctgcactgggtgaatgaaagaggaacagtgctgccccagggccccctgctgctgagccccagcagcctcttcagcgccctgcaccgggaggtgattgagaagaagccagagaagttcaaggtgcagtgcctgacagacatcaagaacctcttcttccccaacacagagcccttctacgccgccttcggcaacagaccagcagatgtgtacagctacaagcaggtgggcgtgtccctgaaccgcatcttcaccgtgaaccccaagggggagctggtgcaggagcacgccaagaccaacatcagcagctatgtgcggctgtgtgaggtggtggaccacgtgttccccctgctgaagaggagccacagcagtgacttcccctgcagcgacaccttcagcaacttcaccttctggagggagcccctgcccccatttgagaaccaggacatccacagcgccagcgcctag

SEQ ID NO: 158037 - DNA, 1176 bp, synthetic construct
  misc_feature 1..1176: note = Description of Artificial Sequence: Synthetic coding sequence
  source 1..1176: mol_type = other DNA
atgcaggccttccagaagcccctgcccaagagcagctgcctgagctacctgcacgtgatcctggatgccatccgcttctgcttcagcaagatcttcaatgcccagatcgccaccgtggagagcatcatgagggacaagatgcccaagaagggcggccgctggtggttctcctggagaggaagaaacaccaccatcaaggaggagagcaagccagagcagtgcctggccggcaaggcccacagcactggagagcagcccccccagctgagcctggccaccagggtgaagcatgagagcagcagcagtgatgaggagagagctgctgccaagcccagcaatgccggccacctgcccctgctgcccaacgtgtcctacaagaagaccctgcggctgaccagcgagcagctgaagagcctgaagctgaagaatggccccaatgatgtggtgttttctgtgaccacccagtaccagggcacctgccgctgtgagggcaccatctacctgtggaactgggatgacaaggtgatcatcagtgacattgatggcaccatcaccaggagtgacaccctgggccacatcctgcccaccctgggcaaggactggacccaccagggcatcgccaagctgtaccacaaggtgtcccagaatggctacaagttcctgtactgcagcgcccgggccatcggcatggctgacatgacccggggctacctgcactgggtgaatgaaagaggcaccgtgctgccccagggccccctgctgctgagccccagcagcctcttcagcgccctgcaccgggaggtgattgagaagaagccagagaagttcaaggtgcagtgcctgacagacatcaagaacctcttcttccccaacacagagcccttctatgctgcctttggaaacagaccagcagatgtgtacagctacaagcaggtgggcgtgtccctgaaccgcatcttcaccgtgaaccccaagggggagctggtgcaggagcacgccaagaccaacatcagcagctatgtgcggctgtgtgaggtggtggaccacgtgttccccctgctgaagaggagccacagcagtgacttcccctgcagcgacaccttcagcaacttcaccttctggagggagcccctgcccccatttgagaaccaggacatccacagcgccagcgcctag

SEQ ID NO: 158038 - DNA, 87 bp, synthetic construct
  misc_feature 1..87: note = Description of Artificial Sequence: Synthetic coding sequence
  source 1..87: mol_type = other DNA
atgaactacgtgggccagctggccggccaggtgtttgtgacagtgaaggagctgtacaagggcctgaacccagccaccctgtcctag

SEQ ID NO: 158039 - DNA, 2691 bp, synthetic construct
  misc_feature 1..2691: note = Description of Artificial Sequence: Synthetic coding sequence
  source 1..2691: mol_type = other DNA
atgagccgggtgcagaccatgaactacgtgggccagctggccggccaggtgtttgtgacagtgaaggagctgtacaagggcctgaacccagccaccctgagcggctgcatcgacatcatcgtcatccggcagcccaacggcaacctgcagtgcagccccttccacgtgcgctttgggaagatgggcgtgctgcggagccgggagaaggtggtggacatcgagatcaacggggagagcgtggacctgcacatgaagctgggggacaatggagaggccttctttgtgcaggagacagacaatgaccaggaggtgatccccatgcacctggccaccagccccatcctgtctgagggcgccagcaggatggagtgccagctgaagaggggctctgtggacaggatgaggggcctggaccccagcaccccagcccaggtgattgcccccagcgagacccccagcagcagctctgtggtgaagaagaggaggaagagaagaaggaagagccagctggacagcctgaagagagatgacaacatgaacaccagtgaagatgaggacatgttccccatcgagatgagcagtgatgaggccatggagctgctggagagcagcaggaccctgcccaatgacatcccccccttccaggatgacatccctgaggagaacctgagcctggccgtcatctacccccagagcgccagctaccccaacagcgaccgggagtggagccccacccccagccccagcggcagccggcccagcacccccaagagtgacagcgagctggtgtccaagagcacagagaggacaggccagaagaaccctgagatgctgtggctgtggggcgagctgccccaggccgccaagagcagcagcccccacaagatgaaggagagcagccccctgagcagcaggaagatctgtgacaagagccacttccaggccatccacagcgagagcagtgacaccttcagtgaccagagccccaccctggtgggcggggccctgctggaccagaacaagccccagacagagatgcagtttgtgaatgaggaggacctggagaccctgggcgccgccgcccccctgctgcccatgattgaggagctgaagccacccagcgcctctgtggtgcagacagccaacaagacagacagccccagcaggaagagggacaagaggagccgccacctgggcgcagatggagtgtacctggatgacctgacagacatggaccctgaggtggccgccctgtacttccccaagaatggagaccccagcggcctggccaagcacgccagtgacaacggggcccggagcgccaaccagagcccccagagcgtgggcagcagtggagtggacagcggcgtggagagcaccagtgatggcctgcgggacctgcccagcatcgccatcagcctgtgtggcggcctgagtgaccaccgggagatcaccaaggatgccttcctggagcaggccgtgtcctaccagcagtttgtggacaacccagccatcattgatgaccccaacctggtggtgaagattggcagcaagtactacaactggaccacagctgcccccctgctgctggccatgcaggccttccagaagcccctgcccaaggccaccgtggagagcatcatgagggacaagatgcccaagaagggcggccgctggtggttctcctggaggggcaggaacaccaccatcaaggaggagagcaagccagagcagtgcctggccggcaaggcccacagcactggagagcagcccccccagctgagcctggccaccagggtgaagcatgagagcagcagcagtgatgaggagagagctgctgccaagcccagcaatgccggccacctgcccctgctgcccaacgtgtcctacaagaagaccctgcggctgaccagcgagcagctgaagagcctgaagctgaagaatggccccaatgatgtggtgttttctgtgaccacccagtaccagggcacctgccgctgtgagggcaccatctacctgtggaactgggatgacaaggtgatcatcagtgacattgatggcaccatcaccaggagtgacaccctgggccacatcctgcccaccctgggcaaggactggacccaccagggcatcgccaagctgtaccacaaggtgtcccagaatggctacaagttcctgtactgcagcgcccgggccatcggcatggctgacatgacccggggctacctgcactgggtgaatgaaagaggaacagtgctgccccagggccccctgctgctgagccccagcagcctcttcagcgccctgcaccgggaggtgattgagaagaagccagagaagttcaaggtgcagtgcctgacagacatcaagaacctcttcttccccaacacagagcccttctacgccgccttcggcaacagaccagcagatgtgtacagctacaagcaggtgggcgtgtccctgaaccgcatcttcaccgtgaaccccaagggggagctggtgcaggagcacgccaagaccaacatcagcagctatgtgcggctgtgtgaggtggtggaccacgtgttccccctgctgaagaggagccacagcagtgacttcccctgcagcgacaccttcagcaacttcaccttctggagggagcccctgcccccatttgagaaccaggacatccacagcgccagcgcctag

SEQ ID NO: 158040 - DNA, 291 bp, synthetic construct
  misc_feature 1..291: note = Description of Artificial Sequence: Synthetic coding sequence
  source 1..291: mol_type = other DNA
atgaactacgtgggccagctggccggccaggtgtttgtgacagtgaaggagctgtacaagggcctgaacccagccaccctgagcggctgcatcgacatcatcgtcatccggcagcccaacggcaacctgcagtgcagccccttccacgtgcgctttgggaagatgggcgtgctgcggagccgggagaaggtggtggacatcgagatcaacggggagagcgtggacctgcacatgaagctgggggacaatggagaggccttctttgtgcaggagacagacaatgaccagtag

SEQ ID NO: 158041 - DNA, 2928 bp, synthetic construct
  misc_feature 1..2928: note = Description of Artificial Sequence: Synthetic coding sequence
  source 1..2928: mol_type = other DNA
atgggagagcaggacggcatccgcagcagctcctgggagaccagccagggcaagagcagcccagattctgcctggagctggatccccatcatgagggaccccggctggatcagaaatgtgtggagcagcaacatcaacgtgcagaccatgaactacgtgggccagctggccggccaggtgtttgtgacagtgaaggagctgtacaagggcctgaacccagccaccctgagcggctgcatcgacatcatcgtcatccggcagcccaatggaaacctgcagtgcagccccttccacgtgcgctttgggaagatgggcgtgctgcggagccgggagaaggtggtggacatcgagatcaatggagagagcgtggacctgcacatgaagctgggggacaacggggaggccttctttgtgcaggagacagacaatgaccaggaggtgatccccatgcacctggccaccagccccatcctgtctgagggcgccagcaggatggagtgccagctgaagaggggctctgtggacaggatgaggggcctggaccccagcaccccagcccaggtgattgcccccagcgagacccccagcagcagctctgtggtgaagaagaggaggaagagaagaaggaagagccagctggacagcctgaagagagatgacaacatgaacaccagtgaagatgaggacatgttccccatcgagatgagcagtgatgaggccatggagctgctggagagcagcaggaccctgcccaatgacatcccccccttccaggatgacatccctgaggagaacctgagcctggccgtcatctacccccagagcgccagctaccccaacagcgaccgggagtggagccccacccccagcagcctggtggactgcaagaggacagccccccacctggccgtggccgctgagggcggcctgagcagcagctgccccccccagagcagcctcttccaccccagcgagagccccagcggcagccggcccagcacccccaagagtgacagcgagctggtgtccaagagcacagagaggacaggccagaagaaccctgagatgctgtggctgtggggcgagctgccccaggccgccaagagcagcagcccccacaagatgaaggagagcagccccctgagcagcaggaagatctgtgacaagagccacttccaggccatccacagcgagagcagtgacaccttcagtgaccagagccccaccctggtgggcggggccctgctggaccagaacaagccccagacagagatgcagtttgtgaatgaggaggacctggagaccctgggcgctgctgcccccctgctgcccatgattgaggagctgaagcccccatctgcctctgtggtgcagacagccaacaagacagacagccccagcaggaagagggacaagaggagccgccacctgggcgcagatggagtgtacctggatgacctgacagacatggaccctgaggtggccgccctgtacttccccaagaatggagaccccagcggcctggccaagcacgccagtgacaatggagcccggagcgccaaccagagcccccagagcgtgggcagcagcggcgtggacagcggcgtggagagcaccagtgatggcctgcgggacctgcccagcatcgccatcagcctgtgtggcggcctgagtgaccaccgggagatcaccaaggatgccttcctggagcaggccgtgtcctaccagcagtttgtggacaacccagccatcattgatgaccccaacctggtggtgaagattggcagcaagtactacaactggaccacagctgcccccctgctgctggccatgcaggccttccagaagcccctgcccaaggccaccgtggagagcatcatgagggacaagatgcccaagaagggcggccgctggtggttctcctggagaggaagaaacaccaccatcaaggaggagagcaagccagagcagtgcctggccggcaaggcccacagcactggagagcagcccccccagctgagcctggccaccagggtgaagcatgagagcagcagcagtgatgaggagagagctgctgccaagcccagcaatgccggccacctgcccctgctgcccaacgtgtcctacaagaagaccctgcggctgaccagcgagcagctgaagagcctgaagctgaagaatggccccaatgatgtggtgttttctgtgaccacccagtaccagggcacctgccgctgtgagggcaccatctacctgtggaactgggatgacaaggtgatcatcagtgacattgatggcaccatcaccaggagtgacaccctgggccacatcctgcccaccctgggcaaggactggacccaccagggcatcgccaagctgtaccacaaggtgtcccagaatggctacaagttcctgtactgcagcgcccgggccatcggcatggctgacatgacccggggctacctgcactgggtgaatgaaagaggcaccgtgctgccccagggccccctgctgctgagccccagcagcctcttcagcgccctgcaccgggaggtgattgagaagaagccagagaagttcaaggtgcagtgcctgacagacatcaagaacctcttcttccccaacacagagcccttctatgctgcctttggaaacagaccagcagatgtgtacagctacaagcaggtgggcgtgtccctgaaccgcatcttcaccgtgaaccccaagggggagctggtgcaggagcacgccaagaccaacatcagcagctatgtgcggctgtgtgaggtggtggaccacgtgttccccctgctgaagaggagccacagcagtgacttcccctgcagcgacaccttcagcaacttcaccttctggagggagcccctgcccccatttgagaaccaggacatccacagcgccagcgcctag

SEQ ID NO: 158042 - DNA, 1380 bp, synthetic construct
  misc_feature 1..1380: note = Description of Artificial Sequence: Synthetic coding sequence
  source 1..1380: mol_type = other DNA
atgagccgggtgcagaccatgaactacgtgggccagctggccggccaggtgtttgtgacagtgaaggagctgtacaagggcctgaacccagccaccctgagcggctgcatcgacatcatcgtcatccggcagcccaacggcaacctgcagtgcagccccttccacgtgcgctttgggaagatgggcgtgctgcggagccgggagaaggtggtggacatcgagatcaacggggagagcgtggacctgcacatgaagctgggggacaatggagaggccttctttgtgcaggagacagacaatgaccaggaggtgatccccatgcacctggccaccagccccatcctgtctgagggcgccagcaggatggagtgccagctgaagaggggctctgtggacaggatgaggggcctggaccccagcaccccagcccaggtgattgcccccagcgagacccccagcagcagctctgtggtgaagaagaggaggaagagaagaaggaagagccagctggacagcctgaagagagatgacaacatgaacaccagtgaagatgaggacatgttccccatcgagatgagcagtgatgaggccatggagctgctggagagcagcaggaccctgcccaatgacatcccccccttccaggatgacatccctgaggagaacctgagcctggccgtcatctacccccagagcgccagctaccccaacagcgaccgggagtggagccccacccccagcagcctggtggactgcaagaggacagccccccacctggccgtggccgctgagggcggcctgagcagcagctgccccccccagagcagcctcttccaccccagcgagagccccagcggcagccggcccagcacccccaagagtgacagcgagctggtgtccaagagcacagagaggacaggccagaagaaccctgagatgctgtggctgtggggcgagctgccccaggccgccaagagcagcagcccccacaagatgaaggagagcagccccctgagcagcaggaagatctgtgacaagagccacttccaggccatccacagcgagagcagtgacaccttcagtgaccagagccccaccctggtgggcggggccctgctggaccagaacaagccccagacagagatgcagtttgtgaatgaggaggacctggagaccctgggcgccgccgcccccctgctgcccatgattgaggagctgaagccacccagcgcctctgtggtgcagacagccaacaagacagacagccccagcaggaagagggacaagaggagccgccacctgggcgcagatggagtgtacctggatgacctgacagacatggaccctgaggtggccgccctgtacttccccaagaagtag

SEQ ID NO: 158043 - DNA, 2691 bp, synthetic construct
  misc_feature 1..2691: note = Description of Artificial Sequence: Synthetic coding sequence
  source 1..2691: mol_type = other DNA
atgaactacgtgggccagctggccggccaggtgattgtgacagtgaaggagctgtacaagggcatcaaccaggccaccctgagcggctgcattgatgtgattgtggtgcagcagcaggacggcagctaccagtgcagccccttccacgtgcgctttgggaagctgggcgtgctgcggagcaaggagaaggtgattgatattgagatcaatggcagcgctgtggacctgcacatgaagctgggggacaatggagaggccttctttgtggaggagacagaggaggagtatgagaagctgcctgcctacctggccaccagccccatccccacagaggaccagttcttcaaggacatcgacacccccctggtgaagtctggaggagatgagacccccagccagagcagtgacatcagccacgtgctggagacagagaccatcttcacccccagctctgtgaagaagaagaagagaagaaggaagaagtacaagcaggacagcaagaaggaggagcaggccgccagcgctgctgctgaggacacctgtgatgtgggcgtgtccagtgatgatgacaagggggcccaggccgcccggggcagcagcaatgccagcctgaaggaggaggagtgcaaggagcccctgctcttccacagcggggaccactaccccctgagtgatggagactggagccccctggagaccacctacccccagacagcctgccccaagagtgacagcgagctggaggtgaagccagctgagagcctgctgcggtctgagagccacatggagtggacctggggcggcttccctgagagcaccaaggtgtccaagcgggagaggagtgaccaccaccccaggacagccaccatcaccccatctgagaacacccacttccgggtcatccccagcgaggacaacctgatcagcgaggtggagaaggatgcctccatggaggacacagtgtgcaccatcgtgaagcccaagccccgggccctgggcacccagatgtctgaccccacctctgtggccgagctgctggagccccccctggagagcacccagatcagctccatgctggatgctgaccacctgcccaatgctgccctggccgaggcccccagcgagagcaagccagctgccaaggtggacagccccagcaagaagaagggcgtgcacaagaggagccagcaccagggcccagatgacatctacctggatgacctgaagggcctggagcctgaggtggccgccctgtacttccccaagtctgagagcgagcccggcagccggcagtggccagagagtgacaccctgagcggcagccagagcccccagagcgtgggcagcgctgctgctgacagcggcacagaatgtctgagtgacagcgccatggacctgcctgatgtgaccctgagcctgtgtggcggcctgtctgaaaatggagagatcagcaaggagaagttcatggagcacatcatcacctaccacgagtttgctgagaaccctggcctgattgacaaccccaacctggtgatccgcatctacaaccgctactacaactgggccctggccgcccccatgatcctgagcctgcaggtgttccagaagagcctgcccaaggccaccgtggagagctgggtgaaggacaagatgcccaagaagagcggccgctggtggttctggaggaagcgggagagcatgaccaagcagctgcctgagagcaaggagggcaagtctgaggcccccccagccagtgacctgcccagcagcagcaaggagcctgctggggcccggccagcagaaaatgacagcagcagtgatgagggcagccaggagctggaggagagcatcaccgtggaccccatccccacagagcccctgagccacggcagcaccaccagctacaagaagagcctgcggctgagcagtgaccagatcgccaagctgaagctgcatgatggccccaatgatgtggtgttcagcatcaccacccagtaccagggcacctgccgctgtgccggcaccatctacctgtggaactggaatgacaagatcatcatcagtgacattgatggcaccatcaccaagagtgatgccctgggccagatcctgccccagctgggcaaggactggacccaccagggcatcgccaagctgtaccacagcatcaatgaaaatggctacaagttcctgtactgcagcgcccgggccatcggcatggctgacatgacccggggctacctgcactgggtgaatgacaagggcaccatcctgccccggggccccctgatgctgagccccagcagcctcttcagcgccttccaccgggaggtgattgagaagaagccagagaagttcaagattgaatgtctgaatgacatcaagaacctgtttgcccccagcaagcagcccttctatgctgcctttggaaaccggcccaatgatgtgtatgcctacacccaggtgggcgtgcctgactgccgcatcttcaccgtgaaccccaagggggagctgatccaggagaggaccaagggcaacaagagcagctaccaccggctgtctgagctggtggagcacgtgttccccctgctgagcaaggagcagaacagcgccttcccctgcccagagttcagcagcttctgctactggagggaccccatccctgaggtggacctggatgacctgtcctag

SEQ ID NO: 158044 - DNA, 702 bp, synthetic construct
  misc_feature 1..702: note = Description of Artificial Sequence: Synthetic coding sequence
  source 1..702: mol_type = other DNA
atgaactacgtgggccagctggccggccaggtgattgtgacagtgaaggagctgtacaagggcatcaaccaggccaccctgagcggctgcattgatgtgattgtggtgcagcagcaggacggcagctaccagtgcagccccttccacgtgcgctttgggaagctgggcgtgctgcggagcaaggagaaggtgattgatattgagatcaatggcagcgctgtggacctgcacatgaagctgggggacaatggagaggccttctttgtggaggagacagaggaggagtatgagaagctgcctgcctacctggccaccagccccatccccacagaggaccagttcttcaaggacatcgacacccccctggtgaagtctggaggagatgagacccccagccagagcagtgacatcagccacgtgctggagacagagaccatcttcacccccagctctgtgaagaagaagaagagaagaaggaagaagtacaagcaggacagcaagaaggaggagcaggccgccagcgctgctgctgaggacacctgtgatgtgggcgtgtccagtgatgatgacaagggggcccaggccgcccggggcagcagcaatgccagcctgaaggaggaggagtgcaaggagcccctgctcttccacagcggggaccactaccccctgagtgatggagactggagccccctggagacctag

SEQ ID NO: 158045 - DNA, 2556 bp, synthetic construct
  misc_feature 1..2556: note = Description of Artificial Sequence: Synthetic coding sequence
  source 1..2556: mol_type = other DNA
atgaactacgtgggccagctggccgagaccgtgtttggcaccgtgaaggagctgtaccggggcctgaacccagccaccctgagcggcggcattgatgtgctggtggtgaagcaggtggatggcagcttccgctgcagccccttccacgtgcgctttgggaagctgggcgtgctgcggagccgggagaaggtggtggacatcgagctgaatggagagcctgtggacctgcacatgaagctgggggacagcggggaggccttctttgtgcaggagctggagagtgatgatgagcacgtgcccccaggcctgtgcaccagccccatcccctggggcggcctgagcggcttccccagcgacagccagctgggcacagccagcgagcctgagggcctggtgatggccggcacagccagcactggaagaaggaagagaagaagaagaaggaagcccaagcagaaggaggatgctgtggccacagacagcagccctgaggagctggaggccggggctgagagcgagctgagcctgcctgagaagctgcggcctgagcccccaggagtgcagctggaggagaagagcagcctgcagcccaaggacatctacccctacagtgatggagagtggccaccccaggccagcctgtctgctggggagctgaccagccccaagagtgacagcgagctggaggtgaggaccccagagcccagccccctgcgggcagagagccacatgcagtgggcctggggccgcctgcccaaggtggcccgggcagagaggcctgagagctctgtggtgctggagggccgggccggggccaccagccccccccggggcggccccagcacccccagcacctctgtggccggcggcgtggaccccctgggcctgcccatccagcagacagaagctggagctgacctgcagcctgacacagaggaccccaccctggtgggcccccccctgcacaccccagagacagaggagagcaagacccagagcagcggggacatgggcctgcccccagccagcaagtcctggagctgggccaccctggaggtgcctgtgcccaccggccagcctgagcgggtgtcccggggcaagggcagccccaagaggagccagcacctgggccccagcgacatctacctggatgacctgcccagcctggacagtgaaaatgctgccctgtacttcccccagagcgacagcggcctgggcgcccggcgctggagcgagcccagcagccagaagagcctgcgggaccccaaccctgagcacgagcctgagcccaccctggacacagtggacaccatcgccctgagcctgtgtggcggcctggccgacagccgggacatcagcctggagaagttcaaccagcacagcgtgtcctaccaggacctgaccaagaaccctggcctgctggatgaccccaacctggtggtgaagatcaacgggaagcactacaactgggccgtggccgcccccatgatcctgagcctgcaggccttccagaagaacctgcccaagagcaccatggacaagctggagcgggagaagatgcccaggaaaggaggccgctggtggttctcctggaggagaagagacttcctggccgaggagaggtctgcccagaaggagaagacagctgccaaggagcagcagggcgagaagacagaggtgctgagcagtgatgatgatgccccagacagccctgtgatcctggagatccccagcctgccccccagcaccccacccagcacccccacctacaagaagagcctgcggctgagcagtgaccagatccggcggctgaacctgcaggagggcgccaatgatgtggtgttttctgtgaccacccagtaccagggcacctgccgctgcaaggccaccatctacctgtggaagtgggatgacaaggtggtgatcagtgacattgatggcaccatcaccaagagtgatgccctgggccacatcctgccccagctgggcaaggactggacccaccagggcatcaccagcctgtaccacaagatccagctgaatggctacaagttcctgtactgcagcgcccgggccatcggcatggctgacctgaccaagggctacctgcagtgggtgtctgagggcggctgcagcctgcccaagggccccatcctgctgagccccagcagcctcttcagcgccctgcaccgggaggtgattgagaagaagccagaggtgttcaaggtggcctgcctgagtgacatccagcagctgttcctgccccacggccagcccttctacgccgccttcggcaaccggcccaatgatgtgtttgcctaccggcaggtgggcctgcctgagagccgcatcttcaccgtgaaccccagaggagagctgatccaggagctgatcaagaaccacaagagcacctatgagcggctgggggaggtggtggagctgctcttcccccctgtggcccggggccccagcacagacctggccaaccctgagtacagcaacttctgctactggagggagcccctgcctgctgtggacctggacaccctggactag

SEQ ID NO: 158046 - DNA, 1242 bp, synthetic construct
  misc_feature 1..1242: note = Description of Artificial Sequence: Synthetic coding sequence
  source 1..1242: mol_type = other DNA
atgggcctgcccccagccagcaagtcctggagctgggccaccctggaggtgcctgtgcccaccggccagcctgagcgggtgtcccggggcaagggcagccccaagaggagccagcacctgggccccagcgacatctacctggatgacctgcccagcctggacagtgaaaatgctgccctgtacttcccccagagcgacagcggcctgggcgcccggcgctggagcgagcccagcagccagaagagcctgcgggaccccaaccctgagcacgagcctgagcccaccctggacacagtggacaccatcgccctgagcctgtgtggcggcctggccgacagccgggacatcagcctggagaagttcaaccagcacagcgtgtcctaccaggacctgaccaagaaccctggcctgctggatgaccccaacctggtggtgaagatcaacgggaagcactacaactgggccgtggccgcccccatgatcctgagcctgcaggccttccagaagaacctgcccaagaggtctgcccagaaggagaagacagctgccaaggagcagcagggcgagaagacagaggtgctgagcagtgatgatgatgccccagacagccctgtgatcctggagatccccagcctgccccccagcaccccacccagcacccccacctacaagaagagcctgcggctgagcagtgaccagatccggcggctgaacctgcaggagggcgccaatgatgtggtgttttctgtgaccacccagtaccagggcacctgccgctgcaaggccaccatctacctgtggaagtgggatgacaaggtggtgatcagtgacattgatggcaccatcaccaagagtgatgccctgggccacatcctgccccagctgggcaaggactggacccaccagggcatcaccagcctgtaccacaagatccagctgaatggctacaagttcctgtactgcagcgcccgggccatcggcatggctgacctgaccaagggctacctgcagtgggtgtctgagggcggctgcagcctgcccaagggccccatcctgctgagccccagcagcctcttcagcgccctgcaccgggaggtgattgagaagaagccagaggtgttcaaggtggcctgcctgagtgacatccagcagctgttcctgccccacggccagcccttctatgctgcctttggaaaccggcccaatgatgtgtttgcctaccggcaggtgggcctgccctag

SEQ ID NO: 158047 - DNA, 813 bp, synthetic construct
  misc_feature 1..813: note = Description of Artificial Sequence: Synthetic coding sequence
  source 1..813: mol_type = other DNA
tgagtgaagatcaatggcaagcactacaactgggccgtggccgcccccatgatcctgagcctgcaggccttccagaagaacctgcccaagaggtctgcccagaaggagaagacagctgccaaggagcagcagggcgagaagacagaggtgctgagcagtgatgatgatgccccagacagccctgtgatcctggagatccccagcctgccccccagcaccccacccagcacccccacctacaagaagagcctgcggctgagcagtgaccagatccggcggctgaacctgcaggagggcgccaatgatgtggtgttttctgtgaccacccagtaccagggcacctgccgctgcaaggccaccatctacctgtggaagtgggatgacaaggtggtgatcagtgacattgatggcaccatcaccaagagtgatgccctgggccacatcctgccccagctgggcaaggactggacccaccagggcatcaccagcctgtaccacaagatccagctgaatggctacaagttcctgtactgcagcgcccgggccatcggcatggctgacctgaccaagggctacctgcagtgggtgtctgagggcggctgcagcctgcccaagggccccatcctgctgagccccagcagcctcttcagcgccctgcaccgggaggtgattgagaagaagccagaggtgttcaaggtggcctgcctgagtgacatccagcagctgttcctgccccacggccagcccttctacgccgccttcggcaaccggcccaatgatgtgtttgcctaccggcaggtgggcctgccctag

SEQ ID NO: 158048 - DNA, 531 bp, synthetic construct
  misc_feature 1..531: note = Description of Artificial Sequence: Synthetic coding sequence
  source 1..531: mol_type = other DNA
atgaagcccctgctgctggccgtgtccctgggcctgattgctgccctgcaggcccaccacctgctggccagtgatgaggagatccaggatgtgtctggcacctggtacctgaaggccatgacagtggaccgggagttccctgagatgaacctggagagcgtgacccccatgaccctgaccaccctggagggcggcaacctggaggccaaggtgaccatgctgatcagcggccgctgccaggaggtgaaggctgtgctggagaagacagatgagcccgggaagtacacagcagatggcggcaagcacgtggcctacatcatccgcagccacgtgaaggaccactacatcttctactgtgagggggagctgcacggcaagcctgtgcggggcgtgaagctggtgggccgggaccccaagaacaacctggaggccctggaggactttgagaaggccgccggggcccggggcctgagcacagagagcatcctgatcccccggcagagcgagacctgcagccctggcagtgactag

SEQ ID NO: 158049 - DNA, 531 bp, synthetic construct; identical to SEQ ID NO: 158048
  misc_feature 1..531: note = Description of Artificial Sequence: Synthetic coding sequence
  source 1..531: mol_type = other DNA

SEQ ID NO: 158050 - DNA, 564 bp, synthetic construct
  misc_feature 1..564: note = Description of Artificial Sequence: Synthetic coding sequence
  source 1..564: mol_type = other DNA
atgaggcagggcctgctggtgctggccctggtgctggtgctggtgctggtgctggccgccggcagccaggtgcaggagtggtacccccgggagagccacgccctgaactggaacaagttcagcggcttctggtacatcctggccacagccacagatgcccagggcttcctgcctgcccgggacaagaggaagctgggcgcctctgtggtgaaggtgaacaaggtgggccagctgcgggtgctgctggccttcagaagaggccagggctgcggccgggcccagcccaggcaccctggcaccagcggccacctgtgggccagcctgtctgtgaagggcgtgaaggccttccacgtgctgagcacagactacagctatggcctggtgtacctgcggctgggccgggccacccagaactacaagaacctgctgctcttccaccggcagaatgtgagcagcttccagagcctgaaggagttcatggatgcctgtgacatcctgggcctgagcaaggccgccgtcatcctgcccaaggatgccagcaggacccacaccatcctgccctag

SEQ ID NO: 158051 - DNA, 603 bp, synthetic construct
  misc_feature 1..603: note = Description of Artificial Sequence: Synthetic coding sequence
  source 1..603: mol_type = other DNA
atgaggcagggcctgctggtgctggccctggtgctggtgctggtgctggtgctggccgccggcagccaggtgcaggagtggtacccccgggagagccacgccctgaactggaacaagttcagcggcttctggtacatcctggccacagccacagatgcccagggcttcctgcctgcccgggacaagaggaagctgggcgcctctgtggtgaaggtgaacaaggtgggccagctgcgggtgctgctggccttccggcggctgaagggctgccagagccaggaggtgatcctgaggaaggatggcaagaagcctgtgtttggaaatgcctgtgcctatgctgctggcccccgggagggccaggagggcgtgaagggcgtgaaggccttccacgtgctgagcacagactacagctatggcctggtgtacctgcggctgggccgggccacccagaactacaagaacctgctgctcttccaccggcagaatgtgtcctccttccagagcctgaaggagttcatggatgcctgtgacatcctgggcctgagcaaggctgctgtgatcctgcccaaggatgccagcaggacccacaccatcctgccctag

SEQ ID NO: 158052 - DNA, 273 bp, synthetic construct
  misc_feature 1..273: note = Description of Artificial Sequence: Synthetic coding sequence
  source 1..273: mol_type = other DNA
acctttgagctgagtgatgatggccgctttgaggtgtggaatgccatgacccggggccagcactgtgacacctggagctatgtgctgatcccagctgcccagcccggccagttcaccgtggaccacggcgtggacacccgggccggctggcccagcagcggcagcgcctgctgggccggggccggctgctgcctgcccggccgctggaccagcagcagcgcctgggccgagctgcgggccagcaggatgaccaccagcagcagccagatgtag

SEQ ID NO: 158053 - DNA, 579 bp, synthetic construct
  misc_feature 1..579: note = Description of Artificial Sequence: Synthetic coding sequence
  source 1..579: mol_type = other DNA
atgaggctgctgtgtggcctgtggctgtggctgagcctgctgaaggtgctgcaggcccagacccccacccccctgcccctgcccccacccatgcagagcttccagggcaaccagttccagggcgagtggtttgtgctgggcctggccggcaacagcttccggcctgagcaccgggccctgctgaatgccttcaccgccacctttgagctgagtgatgatggccgctttgaggtgtggaatgccatgacccggggccagcactgtgacacctggagctatgtgctgatcccagctgcccagcccggccagttcaccgtggaccacggcgtggagcccggggctgaccgggaggagaccagggtggtggacagcgactacacccagtttgccctgatgctgagcagaagacacaccagccggctggccgtgctgcgcatcagcctgctgggccgctcctggctgctgcccccaggcaccctggaccagttcatctgcctgggccgggcccagggcctgagtgatgacaacatcgtgtttcctgatgtgacaggctggagcccccaggcctctgtgtgctag

SEQ ID NO: 158054 - DNA, 597 bp, synthetic construct
  misc_feature 1..597: note = Description of Artificial Sequence: Synthetic coding sequence
  source 1..597: mol_type = other DNA
atgcccctgggcctgctgtggctgggcctggccctgctgggcgccctgcacgcccaggcccaggacagcaccagtgacctgatcccagccccacccctgagcaaggtgcccctgcagcagaacttccaggacaaccagttccagggcaagtggtacgtggtgggcctggccggaaatgccatcctgcgggaggacaaggacccccagaagatgtatgccaccatctatgagctgaaggaggacaagagctacaacgtgacctctgtgctcttcaggaagaagaagtgtgactactggatccgcacctttgtgcccggctgccagcctggagagttcaccctgggcaacatcaagagctacccaggcctgaccagctacctggtgcgggtggtgtccaccaactacaaccagcacgccatggtgttcttcaagaaggtgtcccagaaccgggagtacttcaagatcaccctgtatggccgcaccaaggagctgaccagcgagctgaaggagaacttcatccgcttcagcaagagcctgggcctgcctgagaaccacatcgtgtttcctgtgcccatcgaccagtgcattgatggatag

SEQ ID NO: 158055 - DNA, 603 bp, synthetic construct
  misc_feature 1..603: note = Description of Artificial Sequence: Synthetic coding sequence
  source 1..603: mol_type = other DNA
atgcccctgggcctgctgtggctgggcctggccctgctgggcgccctgcacgcccaggcccaggacagcaccagtgacctgatcccagccccacccctgagcaaggtgcccctgcagcagaacttccaggacaaccagttccagggcaagtggtacgtggtgggcctggccggaaatgccatcctgcgggaggacaaggacccccagaagatgtatgccaccatctatgagctgaaggaggacaagagctacaacgtgacctctgtgctcttccgggagaaggcccagaagtgtgactactggatccgcacctttgtgcccggctgccagcctggagagttcaccctgggcaacatcaagagctacccaggcctgaccagctacctggtgcgggtggtgtccaccaactacaaccagcacgccatggtgttcttcaagaaggtgtcccagaaccgggagtacttcaagatcaccctgtatggccgcaccaaggagctgaccagcgagctgaaggagaacttcatccgcttcagcaagagcctgggcctgcctgagaaccacatcgtgtttcctgtgcccatcgaccagtgcattgatggatag

SEQ ID NO: 158056 - DNA, 603 bp, synthetic construct
  misc_feature 1..603: note = Description of Artificial Sequence: Synthetic coding sequence
  source 1..603: mol_type = other DNA
atgcccctgggcctgctgtggctgggcctggccctgctgggcgccctgcacgcccaggcccaggacagcaccagtgacctgatcccagccccacccctgagcaaggtgcccctgcagcagaacttccaggacaaccagttccagggcaagtggtacgtggtgggcctggccggaaatgccatcctgcgggaggacaaggacccccagaagatgtatgccaccatctatgagctgaaggaggacaagagctacaacgtgacctctgtgctcttccggcagtggaagaagaagtgtgactactggatccgcacctttgtgcccggctgccagcctggagagttcaccctgggcaacatcaagagctacccaggcctgaccagctacctggtgcgggtggtgtccaccaactacaaccagcacgccatggtgttcttcaagaaggtgtcccagaaccgggagtacttcaagatcaccctgtatggccgcaccaaggagctgaccagcgagctgaaggagaacttcatccgcttcagcaagagcctgggcctgcctgagaaccacatcgtgtttcctgtgcccatcgaccagtgcattgatggatag

SEQ ID NO: 158057 - DNA, 597 bp, synthetic construct; identical to SEQ ID NO: 158054
  misc_feature 1..597: note = Description of Artificial Sequence: Synthetic coding sequence
  source 1..597: mol_type = other DNA

SEQ ID NO: 158058 - DNA, 597 bp, synthetic construct
  misc_feature 1..597: note = Description of Artificial Sequence: Synthetic coding sequence
  source 1..597: mol_type = other DNA
atgcccctgggcctgctgtggctgggcctggccctgctgggcgccctgcacgcccaggcccaggacagcaccagtgacctgatcccagccccacccctgagcaaggtgcccctgcagcagaacttccaggacaaccagttccagggcaagtggtacgtggtgggcctggccggaaatgccatcctgcgggaggacaaggacccccagaagatgtatgccaccatctatgagctgaaggaggacaagagctacaacgtgacctctgtgctcttcaggaagaagaagtgtgactactggatccgcacctttgtgcccggctgccagcctggagagttcaccctgggcaacatcaagagctacccaggcctgaccagctacctggtgcgggtggtgtccaccaactacaaccagcacgccatggtgttcttcaagaaggtgtcccagaaccgggagtacttcaagatcaccctgtatggccgcaccaaggagctgaccagcgagctgaaggagaacttcatccgcttcagcaagagcctgggcctgcctgagaaccacatcgtgtttcctgtgcccatcggaaatggccagagcggctag

SEQ ID NO: 158059 - DNA, 492 bp, synthetic construct
  misc_feature 1..492: note = Description of Artificial Sequence: Synthetic coding sequence
  source 1..492: mol_type = other DNA
atgggcggcctgctgctggccgccttcctggccctggtgtctgtgccccgggcccaggccgtgtggctgggccgcctggaccctgagcagctgctgggcccctggtacgtgctggccgtggccagccgggagaagggctttgccatggagaaggacatgaagaatgtggtgggcgtggtggtgaccctgaccccagagaacaacctgcggaccctgagcagccagcacggcctgggcggctgtgaccagagcgtgatggacctgatcaagagaaattctggctgggtgtttgagaaccccagcattggagtgctggagctgtgggtgctggccaccaacttccgggactatgccatcatcttcacccagctggagtttggagatgagcccttcaacacagtggagctgtacagcctgacagaaacagccagccaggaggccatgggcctcttcaccaagtggagccgcagcctgggcttcctgagccagtag

SEQ ID NO: 158060 - DNA, 459 bp, synthetic construct
  misc_feature 1..459: note = Description of Artificial Sequence: Synthetic coding sequence
  source 1..459: mol_type = other DNA
atggaggagctggaccggcagaagattggaggcttctggagggaggtgggcgtggccagtgaccagagcctggtgctgacagcccccaagagggtggagggcctcttcctgaccctgagcggcagcaacctgactgtgaaggtggcctacaacagcagcggcagctgtgaaattgagaagatcgtgggcagcgagattgacagcacaggcaagtttgccttccctggccaccgggagatccacgtgctggacacagattatgagggctacgccatcctgcgggtgtccctgatgtggaggggcaggaacttccgggtgctgaagtacttcaccaggagcctggaggacaaggaccggctgggcttctggaagttccgggagctgacagctgacaccggcctgtacctggccgcccggcccggccgctgtgccgagctgctgaaggaggagctgatctag

SEQ ID NO: 158061 - DNA, 531 bp, synthetic construct
  misc_feature 1..531: note = Description of Artificial Sequence: Synthetic coding sequence
  source 1..531: mol_type = other DNA
atggccctgctgctgctgagcctgggcctgagcctgattgctgcccaggagtttgacccccacacagtgatgcagaggaactacaacgtggcccgggtgtctggagtgtggtacagcatcttcatggccagtgatgacctgaaccgcatcaaggaaaatggagacctgcgggtgtttgtgagaaatattgagcacctgaagaatggcagcctcatctttgattttgagtacatggtgcagggagaatgtgtggccgtggtggtggtgtgtgagaagacagagaagaatggagagtacagcatcaactatgagggccagaacacagtggccgtgtctgaaacagactaccgcctcttcatcaccttccacctgcagaacttcagaaatggaacagagacccacaccctggccctgtatgagacctgtgagaagtatggcctgggcagccagaacatcatcgacctgaccaacaaggacccctgctacagcaagcactaccgcagccccccccggccccccatgcgctggtag

SEQ ID NO: 158062 - DNA, 1119 bp, synthetic construct
  misc_feature 1..1119: note = Description of Artificial Sequence: Synthetic coding sequence
  source 1..1119: mol_type = other DNA
atgagcctgcgctgtggagatgctgcccggaccctgggcccccgggtgtttggccgctacttctgcagccctgtgcggcccctgagcagcctgcctgacaagaagaaggagctgctgcagaatggaccagacctgcaggactttgtgtctggggacctggccgacaggagcacctgggatgagtacaagggcaacctgaagaggcagaagggggagcggctgcggctgcccccctggctgaagacagagatccccatgggcaagaactacaacaagctgaagaacaccctgaggaacctgaacctgcacacagtgtgtgaggaggcccgctgccccaacatcggggagtgctggggcggcggggagtatgccacagccacagccaccatcatgctgatgggagacacctgcacccggggctgccgcttctgcagcgtgaagacagccaggaaccccccacccctggatgccagcgagccctacaacacagccaaggccatcgccgagtggggcctggactatgtggtgctgacctctgtggacagagatgacatgccagatggaggagctgagcacatcgccaagacagtgtcctacctgaaggagaggaaccccaagatcctggtggagtgcctgaccccagacttccggggggacctgaaggccatcgagaaggtggccctgagcggcctggatgtgtatgcccacaacgtggagaccgtgcctgagctgcagagcaaggtgcgggacccccgggccaactttgaccagagcctgcgggtgctgaagcacgccaagaaggtgcagccagatgtgatcagcaagaccagcatcatgctgggcctgggggagaatgatgagcaggtgtatgccaccatgaaggccctgcgggaggctgatgtggactgcctgaccctgggccagtacatgcagcccacccggcggcacctgaaggtggaggagtacatcaccccagagaagttcaagtactgggagaaggtgggcaatgagctgggcttccactacacagccagcggccccctggtgcgcagcagctacaaggccggggagttcttcctgaagaacctggtggccaagaggaagaccaaggacctgtag

SEQ ID NO: 158063 - DNA, 969 bp, synthetic construct
  misc_feature 1..969: note = Description of Artificial Sequence: Synthetic coding sequence
  source 1..969: mol_type = other DNA
atgagcctgcgctgtggagatgctgcccggaccctgggcccccgggtgtttggccgctacttctgcagccctgtgcggcccctgagcagcctgcctgacaagaagaaggagctgctgcagaatggaccagacctgcaggactttgtgtctggggacctggccgacaggagcacctgggatgagtacaagggcaacctgaagaggcagaagggggagcggctgcggctgcccccctggctgaagacagagatccccatgggcaagaactacaacaagctgaagaacaccctgaggaacctgaacctgcacacagtgtgtgaggaggcccgctgccccaacatcggggagtgctggggcggcggggagtatgccacagccacagccaccatcatgctgatgggagacacctgcacccggggctgccgcttctgcagcgtgaagacagccaggaaccccccacccctggatgccagcgagccctacaacacagccaaggccatcgccgagtggggcctggactatgtggtgctgacctctgtggacagagatgacatgccagatggaggagctgagcacatcgccaagacagtgtcctacctgaaggagaggaaccccaagatcctggtggagtgcctgaccccagacttccggggggacctgaaggccatcgagaaggtggccctgagcggcctggatgtgtatgcccacaacgtggagaccgtgcctgagctgcagagcaaggtgcgggacccccgggccaactttgaccagagcctgcgggtgctgaagcacgccaagaaggtgcagccagatgtgatcagcaagaccagcatcatgctgggcctgggggagaatgatgagcaggtgtatgccaccatgaaggccctgcgggaggctgatgtggactgcctgaccctgggccagtacatgcagcccacccggcggcacctgaaggtgaacttctcctag

SEQ ID NO: 158064 - DNA, 603 bp, synthetic construct
  misc_feature 1..603: note = Description of Artificial Sequence: Synthetic coding sequence
  source 1..603: mol_type = other DNA
atggccagcagcctgacctgcaccggggtcatctgggccctgctgtccttcctgtgtgccgccaccagctgtgtgggcttcttcatgccctactggctgtggggcagccagctgggcaagcctgtgtcctttggcaccttccgccgctgcagctaccctgtgcatgatgagagccggcagatgatggtgatggtggaggagtgtggccgctatgccagcttccagggcatccccagcgctgagtggaggatctgcaccatcgtgacaggcctgggctgcggcctgctgctgctggtggccctgacagccctgatgggctgctgcgtgtctgacctgatcagcaggacagtgggccgggtggccggcggcatccagttcctgggcggcctgctgattggagctggctgtgccctgtaccccctgggctgggacagcgaggaggtgcggcagacctgtggctacaccagcggccagtttgacctgggcaaatgtgagatcggctgggcctactactgcacaggagctggggccacagctgccatgctgctgtgcacctggctggcctgcttcagcggcaagaagcagaagcactacccctactag

SEQ ID NO: 158065 - DNA, 663 bp, synthetic construct
  misc_feature 1..663: note = Description of Artificial Sequence: Synthetic coding sequence
  source 1..663: mol_type = other DNA
atgaggagcagcctgaccatggtgggcaccctgtgggccttcctgagcctggtgacagctgtgaccagcagcaccagctacttcctgccctactggctgtttggcagccagatgggcaagcctgtgtccttcagcaccttccgccgctgcaactaccctgtgcggggggagggccacagcctcatcatggtggaggagtgtggccgctatgccagcttcaatgccatccccagcctggcctggcagatgtgcaccgtggtgactggagctggctgtgccctgctgctgctggtggccctggccgctgtgctgggctgctgcatggaggagctgatcagcaggatgatgggccgctgcatgggcgccgcccagtttgtgggcggcctgctgatcagcagcggctgtgccctgtaccccctgggctggaacagccctgagatcatgcagacctgtggaaatgtgagcaaccagttccagctgggcacctgccgcctgggctgggcctactactgtgccggcggcggcgctgctgctgccatgctgatctgcacctggctgagctgctttgctggcaggaaccccaagcctgtgatcctggtggagagcatcatgaggaacaccaacagctatgccatggagctggaccactgcctgaagccctag

SEQ ID NO: 158066 - DNA, 564 bp, synthetic construct
  misc_feature 1..564: note = Description of Artificial Sequence: Synthetic coding sequence
  source 1..564: mol_type = other DNA
atgaggagcagcctgaccatggtgggcaccctgtgggccttcctgagcctggtgacagctgtgaccagcagcaccagctacttcctgccctactggctgtttggcagccagatgggcaagcctgtgtccttcagcaccttccgccgctgcaactaccctgtgcggggggagggccacagcctcatcatggtggaggagtgtggccgctatgccagcttcaatgccatccccagcctggcctggcagatgtgcaccgtggtgactggagctggctgtgccctgctgctgctggtggccctggccgctgtgctgggctgctgcatggaggagctgatcagcaggatgatgggccgctgcatgggcgccgcccagtttgtgggcggcacctgccgcctgggctgggcctactactgtgccggcggcggcgctgctgctgccatgctgatctgcacctggctgagctgctttgctggaagaaaccccaagcctgtgatcctggtggagagcatcatgaggaacaccaacagctatgccatggagctggaccactgcctgaagccctag

SEQ ID NO: 158067 - DNA, 687 bp, synthetic construct
  misc_feature 1..687: note = Description of Artificial Sequence: Synthetic coding sequence
  source 1..687: mol_type = other DNA
atgtgccacgtgattgtgacctgccgctccatgctgtggaccctgctgagcatcgtggtggcctttgctgagctgattgccttcatgtctgctgactggctgattggcaaggcccggagccggggcggcgtggagcctgctggccctgggggcggcagccctgagccctaccaccccaccctgggcatctatgcccgctgcatcagaaatcctggggtgcagcacttccagagggacaccctgtgtggcccctatgcagagagctttggagagatcgccagcggcttctggcaggccacagccatcttcctggccgtgggcatcttcatcctgtgcatggtggccctggtgtctgtgttcaccatgtgtgtgcagagcatcatgaagaagagcatcttcaacgtgtgtggcctgctgcagggcattgctggcctcttcctgatcctgggcctcatcctgtacccagctggctggggctgccagaaggccatcgactactgcggccactacgccagcgcctacaagccaggggactgcagcctgggctgggccttctacacagccatcggcggcaccgtgctgaccttcatctgtgctgtgttcagcgcccaggccgagatcgccaccagcagtgacaaggtgcaggaggagattgaggagggcaagaacctgatctgcctgctgtag

SEQ ID NO: 158068 - DNA, 687 bp, synthetic construct; identical to SEQ ID NO: 158067
  misc_feature 1..687: note = Description of Artificial Sequence: Synthetic coding sequence
  source 1..687: mol_type = other DNA

SEQ ID NO: 158069 - DNA, 669 bp, synthetic construct
  misc_feature 1..669: note = Description of Artificial Sequence: Synthetic coding sequence
  source 1..669: mol_type = other DNA
atgctgcctgcccaggaggccgccaagctgtaccacaccaactacgtgaggaacagccgggccatcggcgtgctgtgggccatcttcaccatctgctttgccatcgtgaatgtggtgtgcttcatccagccctactggattggagatggagtggacaccccccaggccggctacttcggcctcttccactactgcattggaaatggcttcagccgggagctgacctgccggggcagcttcacagacttcagcaccctgcccagcggggccttcaaggccgccagcttcttcatcggcctgtccatgatgctgatcatcgcctgcatcatctgcttcaccctcttcttcttctgcaacacagccaccgtgtacaagatctgtgcctggatgcagctgaccagcgctgcctgcctggtgctgggctgcatgatcttcccagatggctgggacagtgatgaggtgaagaggatgtgtggggagaagacagacaagtacaccctgggcgcctgcagcgtgcgctgggcctacatcctggccatcatcggcatcctggatgccctgatcctgtccttcctggcctttgtgctgggcaaccggcaggacagcctgatggccgaggagctgaaggccgagaacaaggtgctgctgagccagtacagcctggagtag

SEQ ID NO: 158070 - DNA, 711 bp, synthetic construct
  misc_feature 1..711: note = Description of Artificial Sequence: Synthetic coding sequence
  source 1..711: mol_type = other DNA
atgcctggagctgctgctgctgctgctgctgctgctgctgccatgctgcctgcccaggaggccgccaagctgtaccacaccaactacgtgaggaacagccgggccatcggcgtgctgtgggccatcttcaccatctgctttgccatcgtgaatgtggtgtgcttcatccagccctactggattggagatggagtggacaccccccaggccggctacttcggcctcttccactactgcattggaaatggcttcagccgggagctgacctgccggggcagcttcacagacttcagcaccctgcccagcggggccttcaaggccgccagcttcttcatcggcctgtccatgatgctgatcatcgcctgcatcatctgcttcaccctcttcttcttctgcaacacagccaccgtgtacaagatctgtgcctggatgcagctgaccagcggggactgcctggtgctgtttgacctgcacttcccagatggctgggacagtgatgaggtgaagaggatgtgtggggagaagacagacaagtacaccctgggcgcctgcagcgtgcgctgggcctacatcctggccatcatcggcatcctggatgccctgatcctgtccttcctggcctttgtgctgggcaaccggcaggacagcctgatggccgaggagctgaaggccgagaacaaggtgctgctgagccagtacagcctggagtag

SEQ ID NO: 158071 - DNA, 699 bp, synthetic construct
  misc_feature 1..699: note = Description of Artificial Sequence: Synthetic coding sequence
  source 1..699: mol_type = other DNA
atgcctggagctgctgctgctgctgctgctgctgctgctgccatgctgcctgcccaggaggccgccaagctgtaccacaccaactacgtgaggaacagccgggccatcggcgtgctgtgggccatcttcaccatctgctttgccatcgtgaatgtggtgtgcttcatccagccctactggattggagatggagtggacaccccccaggccggctacttcggcctcttccactactgcattggaaatggcttcagccgggagctgacctgccggggcagcttcacagacttcagcaccctgcccagcggggccttcaaggccgccagcttcttcatcggcctgtccatgatgctgatcatcgcctgcatcatctgcttcaccctcttcttcttctgcaacacagccaccgtgtacaagatctgtgcctggatgcagctgaccagcggggactgcctggtgctgtttgacctgcacttcccagatggctgggacagtgatgaggtgaagaggatgtgtggggagaagacagacaagtacaccctgggcgcctgcagcgtgcgctgggcctacatcctggccatcatcggcatcctggatgccctgatcctgtccttcctggcctttgtgctgggcaaccggcaggacagcctgatggccgaggagctgaaggccgagaacaaggatgatggaaatgcctag

SEQ ID NO: 158072 - DNA, 660 bp, synthetic construct
  misc_feature 1..660: note = Description of Artificial Sequence: Synthetic coding sequence
  source 1..660: mol_type = other DNA
atggtgaagctgctgcctgcccaggaggccgccaagatctaccacaccaactacgtgaggaacagcagagctgtgggcgtgatgtggggcaccctgaccatctgcttctctgtgctggtgatggccctcttcatccagccctactggattggagacagcgtgaacaccccccaggccggctacttcggcctcttctcctactgtgtgggcaatgtgctgagcagcgagctgatctgcaagggcggccccctggacttcagcagcatccccagccgggccttcaagacagccatgttctttgtggccctgggcatgttcctgatcatcggcagcatcatctgcttcagcctcttcttcatctgcaacacagccaccgtgtacaagatctgtgcctggatgcagctggccgccgccaccggcctgatgattggctgcctggtgtacccagatggctgggacagcagcgaggtgcggaggatgtgtggggagcagacaggcaagtacaccctgggccactgcaccatccgctgggccttcatgctggccatcctgagcattggagatgccctgatcctgtccttcctggcctttgtgctgggctaccggcaggacaagctgctgcctgatgactacaaggcagatggaacagaggaggtgtag

SEQ ID NO: 158073 - DNA, 660 bp, synthetic construct; identical to SEQ ID NO: 158072
  misc_feature 1..660: note = Description of Artificial Sequence: Synthetic coding sequence
  source 1..660: mol_type = other DNA

SEQ ID NO: 158074 - DNA, 675 bp, synthetic construct
  misc_feature 1..675: note = Description of Artificial Sequence: Synthetic coding sequence
  source 1..675: mol_type = other DNA
atgtctgtgtttgggaagctgtttggagctgggggcggcaaggccgggaaaggaggccccaccccccaggaggccatccagaggctgcgggacacagaggagatgctgagcaagaagcaggagttcctggagaagaagattgagcaggagctgacagctgccaagaagcacggcaccaagaacaagagagctgccctgcaggccctgaagaggaagaagagatatgagaagcagctggcccagattgatggcaccctgagcaccatcgagttccagcgggaggccctggagaatgccaacaccaacacagaggtgctgaagaacatgggctacgccgccaaggccatgaaggccgcccatgacaacatggacatcgacaaggtggatgagctgatgcaggacattgctgaccagcaggagctggccgaggagatcagcacagccatcagcaagcctgtgggctttggagaggagtttgatgaagatgagctgatggccgagctggaggagctggagcaggaggagctggacaagaacctgctggagatcagcggccctgagaccgtgcccctgcccaacgtgcccagcatcgccctgcccagcaagccagccaagaagaaggaggaggaggatgatgacatgaaggagctggagaactgggccggctccatgtag

SEQ ID NO: 158075 - DNA, 1434 bp, synthetic construct
  misc_feature 1..1434: note = Description of Artificial Sequence: Synthetic coding sequence
  source 1..1434: mol_type = other DNA
atgggcgccctggcccgggccctgcccagcatcctgctggccctgctgctgaccagcaccccagaggccctgggcgccaaccctggcctggtggcccgcatcacagacaagggcctgcagtatgctgcccaggagggcctgctggccctgcagagcgagctgctgcgcatcaccctgcctgacttcaccggggacctgcgcatcccccacgtgggccggggccgctatgagttccacagcctgaacatccacagctgtgagctgctgcacagcgccctgcggcctgtgcccggccagggcctgagcctgagcatcagtgacagcagcatccgggtgcagggccgctggaaggtgaggaagagcttcttcaagctgcagggcagctttgatgtgtctgtgaagggcatcagcatctctgtgaacctgctgctgggcagcgagagcagcggccggcccaccgtgacagccagcagctgcagcagtgacattgctgatgtggaggtggacatgtctggggacctgggctggctgctgaacctcttccacaaccagatcgagagcaagttccagaaggtgctggagagccgcatctgtgagatgatccagaagtctgtgtccagtgacctgcagccctacctgcagaccctgcctgtgaccacagaaattgacagctttgctgacatcgactacagcctggtggaggccccccgggccacagcccagatgctggaggtgatgttcaagggggagatcttccacaggaaccacaggagccctgtgaccctgctggccgctgtgatgagcctgcctgaggagcacaacaagatggtgtactttgccatcagtgactatgtgttcaacacagccagcctggtgtaccacgaggagggctacctgaacttcagcatcacagatgacatgatccccccagacagcaacatccggctgaccaccaagagcttccggccctttgtgccccggctggcccggctgtaccccaacatgaacctggagctgcagggctctgtgcccagcgcccccctgctgaacttcagccctggcaacctgtctgtggacccctacatggagattgatgcctttgtgctgctgcccagcagcagcaaggagcctgtgttccggctgtctgtggccaccaacgtgtctgccaccctgaccttcaacaccagcaagatcaccggcttcctgaagccaggcaaggtgaaggtggagctgaaggagagcaaggtgggcctcttcaatgctgagctgctggaggccctgctgaactactacatcctgaacaccttctaccccaagttcaatgacaagctggccgagggcttccccctgcccctgctgaagagggtgcagctgtatgacctgggcctgcagatccacaaggacttccccagccggcgggaccaccccccatag

SEQ ID NO: 158076 - DNA, 486 bp, synthetic construct
  misc_feature 1..486: note = Description of Artificial Sequence: Synthetic coding sequence
  source 1..486: mol_type = other DNA
atgtctgtgcccggcccctaccaggccgccaccggccccagcagcgcccccagcgccccacccagctatgaggagaccgtggccgtgaacagctactaccccaccccaccagcccccatgcctggccccaccaccggcctggtgactggaccagatggcaagggcatgaacccccccagctactacacccagcctgcccccatccccaacaacaaccccatcaccgtgcagacagtgtatgtgcagcaccccatcaccttcctggaccggcccatccagatgtgctgccccagctgcaacaagatgattgtgtcccagctgagctacaatgctggggccctgacctggctgagctgtggcagcctgtgcctgctgggctgcatcgccggctgctgcttcatccccttctgtgtggatgccctgcaggatgtggaccactactgccccaactgccgggccctgctgggcacctacaagaggctgtag

SEQ ID NO: 158077 - DNA, 687 bp, synthetic construct
  misc_feature 1..687: note = Description of Artificial Sequence: Synthetic coding sequence
  source 1..687: mol_type = other DNA
atgtctgtgcccggcccctaccaggccgccaccggccccagcagcgcccccagcgccccacccagctatgaggagaccgtggccgtgaacagctactaccccaccccaccagcccccatgcctggccccaccaccggcctggtgactggaccagatggcaagggcatgaacccccccagctactacacccagcctgcccccatccccaacaacaaccccatcaccgtgcagacagtgtatgtgcagcaccccatcaccttcctggaccggcccatccagatgtgctgccccagctgcaacaagatgattgtgtcccagctgagctacaatgctggggccctgacctggctgagctgtggcagcctgtgcctgctgggcgtgcacagcggcctgctgctgcaccccctgctgcggggctgcccagctggccggggccccctgctgagccagctgcagagcagccctggccacctgcaggcctttgtgggcctgagccagacctggagggagcctggagctgctggcagccccttccacctgagcagcagcttcacccctgggggcggcagcgccctggtggtgagccccctgcagggcgcccacctgcacgtgttcttctggggcgagtatgtggccaagctgaccaacctgcagaccccagaaattgctgcctggagccgggcctag

SEQ ID NO: 158078 - DNA, 459 bp, synthetic construct
  misc_feature 1..459: note = Description of Artificial Sequence: Synthetic coding sequence
  source 1..459: mol_type = other DNA
atgtctgtgcccggcccctaccaggccgccaccggccccagcagcgcccccagcgccccacccagctatgaggagaccgtggccgtgaacagctactaccccaccccaccagcccccatgcctggccccaccaccggcctggtgactggaccagatggcaagggcatgaacccccccagctactacacccagcctgcccccatccccaacaacaaccccatcaccgtgcagacagtgtatgtgcagcaccccatcaccttcctggaccggcccatccagatgtgctgccccagctgcaacaagatgattgtgtcccagctgagctacaatgctggggccctgacctggctgagctgtggcagcctgtgcctgctgggccaggagtgcagcggcaccatcgtggccctgcggagctttgacctgctgggcagctgcaacccccccagcagcgccagctag

SEQ ID NO: 158079 - DNA, 486 bp, synthetic construct; identical to SEQ ID NO: 158076
  misc_feature 1..486: note = Description of Artificial Sequence: Synthetic coding sequence
  source 1..486: mol_type = other DNA

SEQ ID NO: 158080 - DNA, 6123 bp, synthetic construct
  misc_feature 1..6123: note = Description of Artificial Sequence: Synthetic coding sequence
  source 1..6123: mol_type = other DNA
atggagcacaaggaggtggtgctgctgctgctgctcttcctgaagtctgctgcccctgagcagagccacgtggtgcaggactgctaccatggagatggccagagctaccggggcacctacagcaccaccgtgactggaagaacctgccaggcctggagctccatgaccccccaccagcacaacagaaccacagagaactacccaaatgccggcctcatcatgaactactgcaggaacccagatgctgtggccgccccctactgctacacccgggaccccggggtgcgctgggagtactgcaacctgacccagtgcagtgatgctgagggcacagctgtggcccccccaacagtgacccctgtgcccagcctggaggcccccagcgagcaggcccccacagagcagaggcctggggtgcaggagtgctaccacggcaatggccagagctaccggggcacctacagcaccaccgtgactggaagaacctgccaggcctggagctccatgaccccccacagccacagcaggaccccagagtactacccaaatgccggcctcatcatgaactactgcaggaacccagatgctgtggccgccccctactgctacacccgggaccccggggtgcgctgggagtactgcaacctgacccagtgcagtgatgctgagggcacagctgtggcccccccaacagtgacccctgtgcccagcctggaggcccccagcgagcaggcccccacagagcagaggcctggggtgcaggagtgctaccacggcaatggccagagctaccggggcacctacagcaccaccgtgactggaagaacctgccaggcctggagctccatgaccccccacagccacagcaggaccccagagtactacccaaatgccggcctcatcatgaactactgcaggaacccagatgctgtggccgccccctactgctacacccgggaccccggggtgcgctgggagtactgcaacctgacccagtgcagtgatgctgagggcacagctgtggcccccccaacagtgacccctgtgcccagcctggaggcccccagcgagcaggcccccacagagcagaggcctggggtgcaggagtgctaccacggcaatggccagagctaccggggcacctacagcaccaccgtgactggaagaacctgccaggcctggagctccatgaccccccacagccacagcaggaccccagagtactacccaaatgccggcctcatcatgaactactgcaggaacccagatgctgtggccgccccctactgctacacccgggaccccggggtgcgctgggagtactgcaacctgacccagtgcagtgatgctgagggcacagctgtggcccccccaacagtgacccctgtgcccagcctggaggcccccagcgagcaggcccccacagagcagaggcctggggtgcaggagtgctaccacggcaatggccagagctaccggggcacctacagcaccaccgtgactggaagaacctgccaggcctggagctccatgaccccccacagccacagcaggaccccagagtactacccaaatgccggcctcatcatgaactactgcaggaacccagatgctgtggccgccccctactgctacacccgggaccccggggtgcgctgggagtactgcaacctgacccagtgcagtgatgctgagggcacagctgtggcccccccaacagtgacccctgtgcccagcctggaggcccccagcgagcaggcccccacagagcagaggcctggggtgcaggagtgctaccacggcaatggccagagctaccggggcacctacagcaccaccgtgactggaagaacctgccaggcctggagctccatgaccccccacagccacagcaggaccccagagtactacccaaatgccggcctcatcatgaactactgcaggaacccagatgctgtggccgccccctactgctacacccgggaccccggggtgcgctgggagtactgcaacctgacccagtgcagtgatgctgagggcacagctgtggcccccccaacagtgacccctgtgcccagcctggaggcccccagcgagcaggcccccacagagcagaggcctggggtgcaggagtgctaccacggcaatggccagagctaccggggcacctacagcaccaccgtgactggaagaacctgccaggcctggagctccatgaccccccacagccacagcaggaccccagagtactacccaaatgccggcctcatcatgaactactgcaggaacccagatgctgtggccgccccctactgctacacccgggaccccggggtgcgctgggagtactgcaacctgacccagtgcagtgatgctgagggcacagctgtggcccccccaacagtgacccctgtgcccagcctggaggcccccagcgagcaggcccccacagagcagaggcctggggtgcaggagtgctaccacggcaatggccagagctaccggggcacctacagcaccaccgtgactggaagaacctgccaggcctggagctccatgaccccccacagccacagcaggaccccagagtactacccaaatgccggcctcatcatgaactactgcaggaacccagaccctgtggccgccccctactgctacacccgggaccccagcgtgcgctgggagtactgcaacctgacccagtgcagtgatgctgagggcacagctgtggccccacccaccatcacccccatccccagcctggaggcccccagcgagcaggcccccacagagcagaggcctggggtgcaggagtgctaccacggcaatggccagagctaccagggcacctacttcatcaccgtgactggaagaacctgccaggcctggagctccatgaccccccacagccacagcaggaccccagcctactacccaaatgccggcctcatcaagaactactgcaggaacccagaccctgtggccgccccctggtgctacaccacagaccccagcgtgcgctgggagtactgcaacctgacccgctgcagtgatgctgagtggacagcctttgtgcccccaaatgtcatcctggcccccagcctggaggccttctttgagcaggccctgacagaggagaccccaggagtgcaggactgctactaccactacggccagagctaccggggcacctacagcaccaccgtgactggaagaacctgccaggcctggagctccatgaccccccaccagcacagcaggaccccagagaactacccaaatgccggcctgaccaggaactactgcaggaacccagatgctgagatccggccctggtgctacaccatggaccccagcgtgcgctgggagtactgcaacctgacccagtgcctggtgacagagagctctgtgctggccaccctgactgtggtgcctgaccccagcacagaggccagcagcgaggaggcccccacagagcagagccctggggtgcaggactgctaccatggagatggccagagctaccggggcagcttcagcaccaccgtgactggaagaacctgccagagctggagctccatgaccccccactggcaccagaggaccacagagtactacccaaatggaggcctgaccaggaactactgcaggaacccagatgctgagatcagcccctggtgctacaccatggaccccaacgtgcgctgggagtactgcaacctgacccagtgccctgtgacagagagctctgtgctggccaccagcacagctgtgtctgagcaggcccccacagagcagagccccaccgtgcaggactgctaccatggagatggccagagctaccggggcagcttcagcaccaccgtgactggaagaacctgccagagctggagctccatgaccccccactggcaccagaggaccacagagtactacccaaatggaggcctgaccaggaactactgcaggaacccagatgctgagatccggccctggtgctacaccatggaccccagcgtgcgctgggagtactgcaacctgacccagtgccctgtgatggagagcaccctgctgaccacccccaccgtggtgcctgtgcccagcacagagctgcccagcgaggaggcccccacagagaacagcactggagtgcaggactgctacagaggagatggccagagctaccggggcaccctgagcaccaccatcactggaagaacctgccagagctggagctccatgaccccccactggcaccggcgcatccccctgtactacccaaatgccggcctgaccaggaactactgcaggaacccagatgctgagatccggccctggtgctacaccatggaccccagcgtgcgctgggagtactgcaacctgacccgctgccctgtgacagagagctctgtgctgaccacccccaccgtggcccctgtgcccagcacagaggcccccagcgagcaggcccctcctgagaagagccctgtggtgcaggactgctaccatggagatggccgcagctaccggggcatcagcagcaccaccgtgactggaagaacctgccagagctggagctccatgatcccccactggcaccagaggaccccagagaactacccaaatgccggcctgacagagaactactgcaggaacccagacagcggcaagcagccctggtgctacaccacagacccctgtgtgcgctgggagtactgcaacctgacccagtgcagcgagacagagagcggcgtgctggagacccccaccgtggtgcctgtgcccagcatggaggcccacagcgaggccgcccccacagagcagacccctgtggtgcggcagtgctaccacggcaatggccagagctaccggggcaccttcagcaccaccgtgactggaagaacctgccagagctggagctccatgaccccccaccgccaccagaggaccccagagaactacccaaatgatggcctgaccatgaactactgcaggaacccagatgctgacaccggcccctggtgcttcaccatggaccccagcatccgctgggagtactgcaacctgacccgctgcagcgacacagagggcaccgtggtggcccccccaacagtcatccaggtgcccagcctgggcccccccagcgagcaggactgcatgtttggaaatggcaagggctaccggggcaagaaggccaccaccgtgacaggcaccccctgccaggagtgggccgcccaggagccccaccgccacagcaccttcatccctggcaccaacaagtgggccggcctggagaagaactactgcagaaatccagatggagacatcaatggcccctggtgctacaccatgaaccccaggaagctgtttgactactgtgacatccccctgtgtgccagcagcagctttgactgtgggaagccccaggtggagcccaagaagtgccccggcagcatcgtgggcggctgtgtggcccacccccacagctggccctggcaggtgtccctgcggaccaggtttgggaagcacttctgtggcggcaccctcatcagccctgagtgggtgctgacagctgcccactgcctgaagaagagcagccggcccagcagctacaaggtgatcctgggcgcccaccaggaggtgaacctggagagccacgtgcaggagattgaggtgtcccggctcttcctggagcccacccaggccgacatcgccctgctgaagctgagcaggcctgctgtgatcacagacaaggtgatgcctgcctgcctgcccagcccagactacatggtgacagccaggacagagtgctacatcaccggctggggcgagacccagggcaccttcggcaccggcctgctgaaggaggcccagctgctggtgattgaaaatgaggtgtgcaaccactacaagtacatctgtgccgagcacctggcccggggcacagacagctgccagggcgacagcggcggccccctggtgtgctttgagaaggacaagtacatcctgcagggcgtgacctcctggggcctgggctgtgcccggcccaacaagccaggagtgtatgcccgggtgtccagatttgtgacctggattgagggcatgatgaggaacaactag

SEQ ID NO: 158081 - DNA, 6123 bp, synthetic construct; identical to SEQ ID NO: 158080
  misc_feature 1..6123: note = Description of Artificial Sequence: Synthetic coding sequence
  source 1..6123: mol_type = other DNA

SEQ ID NO: 158082 - DNA, 4602 bp, synthetic construct
  misc_feature 1..4602: note = Description of Artificial Sequence: Synthetic coding sequence
  source 1..4602: mol_type = other DNA
atgatgcagctgaccctgaacaccctcttccctgtggtgtccaccccagccatcacctacatcgtgacagtgttcaccggagatgtgcggggggccggcaccaagagcaagatctacctggtgatgtatggagcccggggcaacaagaacagcggcaagatcttcctggagggcggcgtgtttgaccggggccgcacagacatcttccacatcgagctggccgtgctgctgagccccctgagccgggtgtctgtgggccatggaaatgtgggcgtgaacagaggctggttctgtgagaaggtggtgatcctgtgccccttcaccggcatccagcagaccttcccctgcagcaactggctggatgagaagaaggcagatggcctgattgagcggcagctgtatgagatggtgtccctgaggaagaagaggctgaagaagttcccctggagcctgtgggtgtggaccacagacctgaagaaggccggcaccaacagccccatcttcatccagatctacggccagaagggccgcacagatgagatcctgctgaaccccaacaacaagtggttcaagccaggcatcatcgagaagttccgcatcgagctgcctgacctgggccgcttctacaagatccgggtgtggcatgacaagaggagcagcggcagcggctggcacctggagaggatgaccctgatgaacaccctgaacaaggacaagtacaacttcaactgcaaccgctggctggatgccaatgaagatgacaatgaaattgtgcgggagatgacagctgagggccccaccgtgcggcgcatcatgggcatggcccgctaccacgtgacagtgtgcacaggagagctggagggcgccggcacagatgccaacgtgtacctgtgcctgtttggagatgtgggggacaccggggagcggctgctgtacaactgcaggaacaacacagacctgtttgagaagggaaatgctgatgagttcaccattgaatctgtgaccatgagaaatgtgcggcgggtgcgcatcagacatgatggaaaaggaagtggcagcggctggtacctggacagagtgctggtgcgggaggagggccagcctgagagtgacaacgtggagttcccctgcctgcgctggctggacaaggacaaggatgatggccagctggtgcgggagctgctgcccagcgacagcagcgccaccctgaagaacttccgctaccacatcagcctgaagacaggagatgtgtctggggccagcacagacagccgggtgtacatcaagctgtatggagacaagagtgacaccatcaagcaggtgctgctggtgtctgacaacaacctgaaggactactttgagcggggccgggtggatgagttcaccctggagaccctgaacatcggcaacatcaaccggctggtgattggacatgacagcacaggcatgcacgcctcctggttcctgggctctgtgcagatccgggtgccccggcagggcaagcagtacaccttccctgccaaccgctggctggacaagaaccaggctgatggccgcctggaggtggagctgtaccccagcgaggtggtggagatccagaagctggtgcactatgaggtggagatctggacaggagatgtgggcggggccggcaccagcgcccgggtgtacatgcagatctatggagagaagggcaagacagaggtgctcttcctgagcagccgcagcaaggtgtttgagcgggccagcaaggacaccttccagctggaggccgcagatgtgggggaggtgtacaagctgcggctgggccacactggagagggcttcggccccagctggtttgtggacacagtgtggctgcggcacctggtggtgcgggaggtggacctgaccccagaggaggaggccaggaagaagaaggagaaggacaagctgcggcagctgctgaagaaggagcggctgaaggccaagctgcagaggaagaagaagaagaggaagggcagtgatgaagaagatgaaggagaggaggaggagagcagcagcagcgaggagagcagcagcgaggaggaggagatggaggaggaggaggaggaggaggagtttggacctggcatgcaggaggtgattgagcagcacaagtttgaggcccaccgctggctggcccggggcaaggaggacaatgagctggtggtggagctggtgcctgctgggaagccaggccctgagaggaacacctatgaggtgcaggtggtgactggaaatgtgcccaaggccggcacagatgccaacgtgtacctgaccatctatggagaggagtatggagacaccggggagcggcccctgaagaagagtgacaagagcaacaagtttgagcagggccagacagacaccttcaccatctatgccatcgacctgggcgccctgaccaagatccgcatcagacatgacaacacaggcaacagagctggctggttcctggacagaattgacatcacagacatgaacaatgagatcacctactacttcccctgccagcgctggctggccgtggaggaggatgatggccagctgagccgggagctgctgcctgtggatgagagctatgtgctgccccagagcgaggagggccggggcggcggggacaacaaccccctggacaacctggccctggagcagaaggacaagagcaccaccttctctgtgaccatcaagacaggagtgaagaagaatgccggcacagatgccaacgtgttcatcaccctgtttggcacccaggatgacaccggcatgaccctgctgaagagcagcaagaccaacagcgacaagtttgagcgggacagcattgagatcttcaccgtggagaccctggacctgggggacctgtggaaggtgcggctgggccatgacaacacaggcaaggcccctggctggtttgtggactgggtggaggtggatgcccccagcctgggcaagtgcatgaccttcccctgtggccgctggctggccaagaatgaagatgatggcagcatcatccgggacctcttccacgccgagctgcagacccggctgtacaccccatttgtgccctatgagatcaccctgtacaccagtgatgtgtttgctgctggaacagatgccaacatcttcatcatcatctacggctgtgatgctgtgtgcacccagcagaagtacctgtgcaccaacaagcgggagcagaagcagttctttgagaggaagagcgccagccgcttcatcgtggagctggaggatgtgggggagatcatcgagaagatccgcatcggccacaacaacacaggcatgaaccctggctggcactgcagccacgtggacatccggcggctgctgcctgacaaggatggagctgagaccctgaccttcccctgtgaccgctggctggccaccagtgaagatgacaagaagaccatccgggagctggtgccctatgacatcttcacagagaagtacatgaaggatggcagcctgcggcaggtgtacaaggaggtggaggagcccctggacatcgtgctgtacagcgtgcagatcttcaccggcaacatccctggggccggcacagatgccaaggtgtacatcaccatctatggagacctgggggacacaggagagcgctacctgggcaagtctgagaacagaaccaacaagtttgagcggggcacagctgacaccttcatcatcgaggccgctgacctgggcgtcatctacaagatcaagctgcggcatgacaacagcaagtggtgtgccgactggtacgtggagaaggtggagatctggaatgacaccaatgaagatgagttcctgttcctgtgtggccgctggctgagcctgaagaaggaggatggccgcctggagcggctcttctatgagaaggagtacacaggagacaggagcagcaactgcagcagccctgctgacttctgggagatcgccctgagcagcaagatggctgatgtggacatcagcacagtgacaggccccatggctgactatgtgcaggagggccccatcatcccctactacgtgtctgtgaccaccgggaagcacaaggatgctgccacagacagccgggccttcatcttcctgattggagaagatgatgagaggagcaagaggatctggctggactacccccggggcaagaggggcttcagccggggctctgtggaggagttctacgtggccggcctggatgtgggcatcatcaagaagattgaggtgctgtatgagatgacagtgtggacaggagatgtggtgggcggcggcacagacagcaacatcttcatgaccctgtatggcatcaatggcagcacagaggagatgcagctggacaagaagaaggccaggtttgagcgggagcagaatgacaccttcatcatggagatcctggacatcgcccccttcaccaagatgaggatcagaattgatggcctgggcagcaggcctgagtggttcctggagcgggtgaagtgcctggacccccacagcagcttccagcccccacccacccccagccctggcagcagcggcctgtccatggacctggtgaaggcccagatgagcctgtag

SEQ ID NO: 158083 - DNA, 5844 bp, synthetic construct
  misc_feature 1..5844: note = Description of Artificial Sequence: Synthetic coding sequence
  source 1..5844: mol_type = other DNA
atgatgcagctgaccctgaacaccctcttccctgtggtgtccaccccagccatcacctacatcgtgacagtgttcaccggagatgtgcggggggccggcaccaagagcaagatctacctggtgatgtatggagcccggggcaacaagaacagcggcaagatcttcctggagggcggcgtgtttgaccggggccgcacagacatcttccacatcgagctggccgtgctgctgagccccctgagccgggtgtctgtgggccatggaaatgtgggcgtgaacagaggctggttctgtgagaaggtggtgatcctgtgccccttcaccggcatccagcagaccttcccctgcagcaactggctggatgagaagaaggcagatggcctgattgagcggcagctgtatgagatggtgtccctgaggaagaagaggctgaagaagttcccctggagcctgtgggtgtggaccacagacctgaagaaggccggcaccaacagccccatcttcatccagatctacggccagaagggccgcacagatgagatcctgctgaaccccaacaacaagtggttcaagccaggcatcatcgagaagttccgcatcgagctgcctgacctgggccgcttctacaagatccgggtgtggcatgacaagaggagcagcggcagcggctggcacctggagaggatgaccctgatgaacaccctgaacaaggacaagtacaacttcaactgcaaccgctggctggatgccaatgaagatgacaatgaaattgtgcgggagatgacagctgagggccccaccgtgcggcgcatcatgggcatggcccgctaccacgtgacagtgtgcacaggagagctggagggcgccggcacagatgccaacgtgtacctgtgcctgtttggagatgtgggggacaccggggagcggctgctgtacaactgcaggaacaacacagacctgtttgagaagggaaatgctgatgagttcaccattgaatctgtgaccatgagaaatgtgcggcgggtgcgcatcagacatgatggaaaaggaagtggcagcggctggtacctggacagagtgctggtgcgggaggagggccagcctgagagtgacaacgtggagttcccctgcctgcgctggctggacaaggacaaggatgatggccagctggtgcgggagctgctgcccagcgacagcagcgccaccctgaagaacttccgctaccacatcagcctgaagacaggagatgtgtctggggccagcacagacagccgggtgtacatcaagctgtatggagacaagagtgacaccatcaagcaggtgctgctggtgtctgacaacaacctgaaggactactttgagcggggccgggtggatgagttcaccctggagaccctgaacatcggcaacatcaaccggctggtgattggacatgacagcacaggcatgcacgcctcctggttcctgggctctgtgcagatccgggtgccccggcagggcaagcagtacaccttccctgccaaccgctggctggacaagaaccaggctgatggccgcctggaggtggagctgtaccccagcgaggtggtggagatccagaagctggtgcactatgaggtggagatctggacaggagatgtgggcggggccggcaccagcgcccgggtgtacatgcagatctatggagagaagggcaagacagaggtgctcttcctgagcagccgcagcaaggtgtttgagcgggccagcaaggacaccttccagctggaggccgcagatgtgggggaggtgtacaagctgcggctgggccacactggagagggcttcggccccagctggtttgtggacacagtgtggctgcggcacctggtggtgcgggaggtggacctgaccccagaggaggaggccaggaagaagaaggagaaggacaagctgcggcagctgctgaagaaggagcggctgaaggccaagctgcagaggaagaagaagaagaggaagggcagtgatgaagaagatgaaggagaggaggaggagagcagcagcagcgaggagagcagcagcgaggaggaggagatggaggaggaggaggaggaggaggagtttggacctggcatgcaggaggtgattgagcagcacaagtttgaggcccaccgctggctggcccggggcaaggaggacaatgagctggtggtggagctggtgcctgctgggaagccaggccctgagaggaacacctatgaggtgcaggtggtgactggaaatgtgcccaaggccggcacagatgccaacgtgtacctgaccatctatggagaggagtatggagacaccggggagcggcccctgaagaagagtgacaagagcaacaagtttgagcagggccagacagacaccttcaccatctatgccatcgacctgggcgccctgaccaagatccgcatcagacatgacaacacaggcaacagagctggctggttcctggacagaattgacatcacagacatgaacaatgagatcacctactacttcccctgccagcgctggctggccgtggaggaggatgatggccagctgagccgggagctgctgcctgtggatgagagctatgtgctgccccagagcgaggagggccggggcggcggggacaacaaccccctggacaacctggccctggagcagaaggacaagagcaccaccttctctgtgaccatcaagacaggagtgaagaagaatgccggcacagatgccaacgtgttcatcaccctgtttggcacccaggatgacaccggcatgaccctgctgaagagcagcaagaccaacagcgacaagtttgagcgggacagcattgagatcttcaccgtggagaccctggacctgggggacctgtggaaggtgcggctgggccatgacaacacaggcaaggcccctggctggtttgtggactgggtggaggtggatgcccccagcctgggcaagtgcatgaccttcccctgtggccgctggctggccaagaatgaagatgatggcagcatcatccgggacctcttccacgccgagctgcagacccggctgtacaccccatttgtgccctatgagatcaccctgtacaccagtgatgtgtttgctgctggaacagatgccaacatcttcatcatcatctacggctgtgatgctgtgtgcacccagcagaagtacctgtgcaccaacaagcgggagcagaagcagttctttgagaggaagagcgccagccgcttcatcgtggagctggaggatgtgggggagatcatcgagaagatccgcatcggccacaacaacacaggcatgaaccctggctggcactgcagccacgtggacatccggcggctgctgcctgacaaggatggagctgagaccctgaccttcccctgtgaccgctggctggccaccagtgaagatgacaagaagaccatccgggagctggtgccctatgacatcttcacagagaagtacatgaaggatggcagcctgcggcaggtgtacaaggaggtggaggagcccctggacatcgtgctgtacagcgtgcagatcttcaccggcaacatccctggggccggcacagatgccaaggtgtacatcaccatctatggagacctgggggacacaggagagcgctacctgggcaagtctgagaacagaaccaacaagtttgagcggggcacagctgacaccttcatcatcgaggccgctgacctgggcgtcatctacaagatcaagctgcggcatgacaacagcaagtggtgtgccgactggtacgtggagaaggtggagatctggaatgacaccaatgaagatgagttcctgttcctgtgtggccgctggctgagcctgaagaaggaggatggccgcctggagcggctcttctatgagaaggagtacacaggagacaggagcagcaactgcagcagccctgctgacttctgggagatcgccctgagcagcaagatggctgatgtggacatcagcacagtgacaggccccatggctgactatgtgcaggagggccccatcatcccctactacgtgtctgtgaccaccgggaagcacaaggatgctgccacagacagccgggccttcatcttcctgattggagaagatgatgagaggagcaagaggatctggctggactacccccggggcaagaggggcttcagccggggctctgtggaggagttctacgtggccggcctggatgtgggcatcatcaagaagattgagctgggccatgatggagccagccctgagagctgctggctggtggaggagctgtgcctggccgtgcccacccagggcaccaagtacatgctgaactgcaactgctggctggccaaggacagaggagatggcatcaccagccgggtgtttgacctgctggatgccatggtggtgaacatcggcgtgaaggtgctgtatgagatgacagtgtggacaggagatgtggtgggcggcggcacagacagcaacatcttcatgaccctgtatggcatcaatggcagcacagaggagatgcagctggacaagaagaaggccaggtttgagcgggagcagaatgacaccttcatcatggagatcctggacatcgcccccttcaccaagatgaggatcagaattgatggcctgggcagcaggcctgagtggttcctggagcgcatcctgctgaagaacatgaacacaggagacctgaccatgttctactatggagactggctgagccagaggaagggcaagaagaccctggtgtgtgagatgtgtgctgtgattgatgaggaggagatgatggagtggaccagctacacagtggccgtgaagaccagtgacatcctgggcgccggcacagatgccaacgtgttcatcatcatctttggagaaaatggagacagcggcaccctggccctgaagcagagcgccaactggaacaagtttgagaggaacaacacagacaccttcaacttcccagacatgctgagcctgggccacctgtgcaagctgcgggtgtggcatgacaacaagggcatcttccctggctggcacctgtcctatgtggatgtgaaggacaacagcagagatgagaccttccacttccagtgtgactgctggctgagcaagtcagaaggagatggccagacagtgcgggactttgcctgtgccaacaacaagatctgtgatgagctggaggagaccacctatgagatcgtcatcgagactggaaatggaggagagacccgggagaatgtgtggctgatcctggagggcaggaagaacagaagcaaggagttcctgatggagaacagcagccggcagagggccttcaggaagggcaccacagacacctttgaatttgacagcatctacctgggggacatcgccagcctgtgtgtgggccacctggcccgggaggaccgcttcatccccaagcgggagctggcctggcacgtgaagaccatcaccatcacagagatggagtatggaaatgtgtacttcttcaactgtgactgcctgatccccctgaagaggaagaggaagtacttcaaggtgtttgaggtgaccaagaccacagagagctttgccagcaaggtgcagagcctggtgcctgtgaagtatgaggtgattgtgaccaccggctatgagcccggggccggcacagatgccaacgtgtttgtgaccatctttggagccaacggggacaccgggaagcgggagctgaagcagaagatgaggaacctgtttgagcggggcagcacagaccgcttcttcctggagaccctggagctggtggtgacccggctgggcctggccgcagaatgtggctag

SEQ ID NO: 158084 - DNA, 3435 bp, synthetic construct
  misc_feature 1..3435: note = Description of Artificial Sequence: Synthetic coding sequence
  source 1..3435: mol_type = other DNA
atgctgcggcacctgacagacaccttcaccatctatgccatcgacctgggcgccctgaccaagatccgcatcagacatgacaacacaggcaacagagctggctggttcctggacagaattgacatcacagacatgaacaatgagatcacctactacttcccctgccagcgctggctggccgtggaggaggatgatggccagctgagccgggagctgctgcctgtggatgagagctatgtgctgccccagagcgaggagggccggggcggcggggacaacaaccccctggacaacctggccctggagcagaaggacaagagcaccaccttctctgtgaccatcaagacaggagtgaagaagaatgccggcacagatgccaacgtgttcatcaccctgtttggcacccaggatgacaccggcatgaccctgctgaagagcagcaagaccaacagcgacaagtttgagcgggacagcattgagatcttcaccgtggagaccctggacctgggggacctgtggaaggtgcggctgggccatgacaacacaggcaaggcccctggctggtttgtggactgggtggaggtggatgcccccagcctgggcaagtgcatgaccttcccctgtggccgctggctggccaagaatgaagatgatggcagcatcatccgggacctcttccacgccgagctgcagacccggctgtacaccccatttgtgccctatgagatcaccctgtacaccagtgatgtgtttgctgctggaacagatgccaacatcttcatcatcatctacggctgtgatgctgtgtgcacccagcagaagtacctgtgcaccaacaagcgggagcagaagcagttctttgagaggaagagcgccagccgcttcatcgtggagctggaggatgtgggggagatcatcgagaagatcagaattggccacaacaacacaggcatgaaccctggctggcactgcagccacgtggacatccggcggctgctgcctgacaaggatggagctgagaccctgaccttcccctgtgaccgctggctggccaccagtgaagatgacaagaagaccatccgggagctggtgccctatgacatcttcacagagaagtacatgaaggatggcagcctgcggcaggtgtacaaggaggtggaggagcccctggacatcgtgctgtacagcgtgcagatcttcaccggcaacatccctggagctggaacagatgccaaggtgtacatcaccatctacggggacctgggggacaccggggagcgctacctgggcaagtcagaaaatagaaccaacaagtttgagcggggcacagctgacaccttcatcattgaagctgctgacctgggcgtcatctacaagatcaagctgcggcatgacaacagcaagtggtgtgccgactggtacgtggagaaggtggagatctggaatgacaccaatgaagatgagttcctgttcctgtgtggccgctggctgagcctgaagaaggaggatggccgcctggagcggctcttctatgagaaggagtacaccggggacaggagcagcaactgcagcagccctgctgacttctgggagatcgccctgagcagcaagatggctgatgtggacatcagcacagtgacaggccccatggctgactatgtgcaggagggccccatcatcccctactacgtgtctgtgaccaccgggaagcacaaggatgctgccacagacagccgggccttcatcttcctgattggagaagatgatgagaggagcaagaggatctggctggactacccccggggcaagaggggcttcagccggggctctgtggaggagttctacgtggccggcctggatgtgggcatcatcaagaagattgaggtgctgtatgagatgacagtgtggacaggagatgtggtgggcggcggcacagacagcaacatcttcatgaccctgtatggcatcaatggcagcacagaggagatgcagctggacaagaagaaggccaggtttgagcgggagcagaatgacaccttcatcatggagatcctggacatcgcccccttcaccaagatgaggatcagaattgatggcctgggcagcaggcctgagtggttcctggagcgcatcctgctgaagaacatgaacacaggagacctgaccatgttctactacggggactggctgagccagaggaagggcaagaagaccctggtgtgtgagatgtgtgctgtgattgatgaggaggagatgatggagtggaccagctacacagtggccgtgaagaccagtgacatcctgggcgccggcacagatgccaacgtgttcatcatcatctttggagaaaatggagacagcggcaccctggccctgaagcagagcgccaactggaacaagtttgaaagaaacaacacagacaccttcaacttcccagacatgctgagcctgggccacctgtgcaagctgcgggtgtggcatgacaacaagggcatcttccctggctggcacctgtcctatgtggatgtgaaggacaacagcagagatgagaccttccacttccagtgtgactgctggctgagcaagtcagaaggagatggccagacagtgcgggactttgcctgtgccaacaacaagatctgtgatgagctggaggagaccacctatgaaattgtgattgaaacaggaaatggaggagagaccagagaaaatgtgtggctgatcctggagggcaggaagaacagaagcaaggagttcctgatggagaacagcagccggcagagggccttcaggaagggcaccacagacacctttgaatttgacagcatctacctgggggacatcgccagcctgtgtgtgggccacctggccagagaagatcgcttcatccccaagcgggagctggcctggcacgtgaagaccatcaccatcacagagatggagtatggaaatgtgtacttcttcaactgtgactgcctgatccccctgaagaggaagaggaagtacttcaaggtgtttgaggtgaccaagaccacagagagctttgccagcaaggtgcagagcctggtgcctgtgaagtatgaagtcatcgtgaccaccggctatgagcctggagctggaacagatgccaacgtgtttgtgaccatctttggagccaatggagacaccgggaagcgggagctgaagcagaagatgaggaacctgtttgagcggggcagcacagaccgcttcttcctggagaccctggagctgggggagctgaggaaggtgcggctggagcatgacagcagcggctactgcagcggctggctggtggagaaggtggaggtgaccaacaccagcactggagtggccaccatcttcaactgtggccgctggctggacaagaagagaggagatggcctgacctggagggacctcttccccagcgtgtag

SEQ ID NO: 158085 - DNA, 921 bp, synthetic construct
  misc_feature 1..921: note = Description of Artificial Sequence: Synthetic coding sequence
  source 1..921: mol_type = other DNA
atgaggctgggcaccaactgtgagcacccccagctgcccctggccgcccccagcggctactacttcccctgccagcgctggctggccgtggaggaggatgatggccagctgagccgggagctgctgcctgtggatgagagctatgtgctgccccagagcgaggagggccggggcggcggggacaacaaccccctggacaacctggccctggagcagaaggacaagagcaccaccttctctgtgaccatcaagacaggagtgaagaagaatgccggcacagatgccaacgtgttcatcaccctgtttggcacccaggatgacaccggcatgaccctgctgaagagcagcaagaccaacagcgacaagtttgagcgggacagcattgagatcttcaccgtggagaccctggacctgggggacctgtggaaggtgcggctgggccatgacaacacaggcaaggcccctggctggtttgtggactgggtggaggtggatgcccccagcctgggcaagtgcatgaccttcccctgtggccgctggctggccaagaatgaagatgatggcagcatcatccgggacctcttccacgccgagctgcagacccggctgtacaccccatttgtgccctatgagatcaccctgtacaccagtgatgtgtttgctgctggaacagatgccaacatcttcatcatcatctacggctgtgatgctgtgtgcacccagcagaagtacctgtgcaccaacaagcgggagcagaagcagttctttgagaggaagagcgccagccgcttcatcgtggagctggaggatgtgggggagatcatcgagaagatccgcatcggccacaacaacacaggcatgaaccctggctggcactgcagccacgtggacatccggcggctgctgcctgacaaggactag

SEQ ID NO: 158086 - DNA, 6636 bp, synthetic construct
  misc_feature 1..6636: note = Description of Artificial Sequence: Synthetic coding sequence
  source 1..6636: mol_type = other DNA
atgatgccccagaagaagagaagaaggaagaaggacatcgacttcctggccctgtatgaagctgagctgctgaactatgcctctgaagatgatgaaggagagctggagcacgagtactacaaggcccgggtgtatgaggtggtgacagccactggagatgtgagaggagctggaacagatgccaacgtgttcatcaccctgtttggagaaaatggcctgagccccaagctgcagctgaccagcaagagcaagagcgcctttgagaagggaaatgtggatgtgttccgggtgaggaccaacaacgtgggcctcatctacaaggtgcgcatcgagcatgacaacacaggcctgaatgcctcctggtacctggaccacgtgattgtgacagacatgaagaggccccacctgcgctactacttcaactgcaacaactggctgagcaaggtggagggggaccggcagtggtgccgggacctgctggccagcttcaaccccatggacatgccccggggcaacaagtatgaggtgaaggtgtacacaggagatgtgattggagctggaacagatgctgatgtgttcatcaacatctttggagaatatggagacacaggagagcggcggctggagaatgagaaggacaactttgagaagggagctgaggaccgcttcatcctggatgccccagacctgggccagctgatgaagatcaacgtgggccacaacaacaagggcggcagcgctggctggttcctgagccagatcgtgattgaagatattggcaacaagaggaaatatgacttccccctgaaccgctggctggccctggatgaagatgatggcaagatccagagggacatcctggtgggcggcgctgagaccacagccatcacctacatcgtgacagtgttcaccggagatgtgcggggggccggcaccaagagcaagatctacctggtgatgtatggagcccggggcaacaagaacagcggcaagatcttcctggagggcggcgtgtttgaccggggccgcacagacatcttccacatcgagctggccgtgctgctgagccccctgagccgggtgtctgtgggccatggaaatgtgggcgtgaacagaggctggttctgtgagaaggtggtgatcctgtgccccttcaccggcatccagcagaccttcccctgcagcaactggctggatgagaagaaggcagatggcctgattgagcggcagctgtatgagatggtgtccctgaggaagaagaggctgaagaagttcccctggagcctgtgggtgtggaccacagacctgaagaaggccggcaccaacagccccatcttcatccagatctacggccagaagggccgcacagatgagatcctgctgaaccccaacaacaagtggttcaagccaggcatcatcgagaagttccgcatcgagctgcctgacctgggccgcttctacaagatccgggtgtggcatgacaagaggagcagcggcagcggctggcacctggagaggatgaccctgatgaacaccctgaacaaggacaagtacaacttcaactgcaaccgctggctggatgccaatgaagatgacaatgaaattgtgcgggagatgacagctgagggccccaccgtgcggcgcatcatgggcatggcccgctaccacgtgacagtgtgcacaggagagctggagggcgccggcacagatgccaacgtgtacctgtgcctgtttggagatgtgggggacaccggggagcggctgctgtacaactgcaggaacaacacagacctgtttgagaagggaaatgctgatgagttcaccattgaatctgtgaccatgagaaatgtgcggcgggtgcgcatcagacatgatggaaaaggaagtggcagcggctggtacctggacagagtgctggtgcgggaggagggccagcctgagagtgacaacgtggagttcccctgcctgcgctggctggacaaggacaaggatgatggccagctggtgcgggagctgctgcccagcgacagcagcgccaccctgaagaacttccgctaccacatcagcctgaagacaggagatgtgtctggggccagcacagacagccgggtgtacatcaagctgtatggagacaagagtgacaccatcaagcaggtgctgctggtgtctgacaacaacctgaaggactactttgagcggggccgggtggatgagttcaccctggagaccctgaacatcggcaacatcaaccggctggtgattggacatgacagcacaggcatgcacgcctcctggttcctgggctctgtgcagatccgggtgccccggcagggcaagcagtacaccttccctgccaaccgctggctggacaagaaccaggctgatggccgcctggaggtggagctgtaccccagcgaggtggtggagatccagaagctggtgcactatgaggtggagatctggacaggagatgtgggcggggccggcaccagcgcccgggtgtacatgcagatctatggagagaagggcaagacagaggtgctcttcctgagcagccgcagcaaggtgtttgagcgggccagcaaggacaccttccagctggaggccgcagatgtgggggaggtgtacaagctgcggctgggccacactggagagggcttcggccccagctggtttgtggacacagtgtggctgcggcacctggtggtgcgggaggtggacctgaccccagaggaggaggccaggaagaagaaggagaaggacaagctgcggcagctgctgaagaaggagcggctgaaggccaagctgcagaggaagaagaagaagaggaagggcagtgatgaagaagatgaaggagaggaggaggagagcagcagcagcgaggagagcagcagcgaggaggaggagatggaggaggaggaggaggaggaggagtttggacctggcatgcaggaggtgattgagcagcacaagtttgaggcccaccgctggctggcccggggcaaggaggacaatgagctggtggtggagctggtgcctgctgggaagccaggccctgagaggaacacctatgaggtgcaggtggtgactggaaatgtgcccaaggccggcacagatgccaacgtgtacctgaccatctatggagaggagtatggagacaccggggagcggcccctgaagaagagtgacaagagcaacaagtttgagcagggccagacagacaccttcaccatctatgccatcgacctgggcgccctgaccaagatccgcatcagacatgacaacacaggcaacagagctggctggttcctggacagaattgacatcacagacatgaacaatgagatcacctactacttcccctgccagcgctggctggccgtggaggaggatgatggccagctgagccgggagctgctgcctgtggatgagagctatgtgctgccccagagcgaggagggccggggcggcggggacaacaaccccctggacaacctggccctggagcagaaggacaagagcaccaccttctctgtgaccatcaagacaggagtgaagaagaatgccggcacagatgccaacgtgttcatcaccctgtttggcacccaggatgacaccggcatgaccctgctgaagagcagcaagaccaacagcgacaagtttgagcgggacagcattgagatcttcaccgtggagaccctggacctgggggacctgtggaaggtgcggctgggccatgacaacacaggcaaggcccctggctggtttgtggactgggtggaggtggatgcccccagcctgggcaagtgcatgaccttcccctgtggccgctggctggccaagaatgaagatgatggcagcatcatccgggacctcttccacgccgagctgcagacccggctgtacaccccatttgtgccctatgagatcaccctgtacaccagtgatgtgtttgctgctggaacagatgccaacatcttcatcatcatctacggctgtgatgctgtgtgcacccagcagaagtacctgtgcaccaacaagcgggagcagaagcagttctttgagaggaagagcgccagccgcttcatcgtggagctggaggatgtgggggagatcatcgagaagatccgcatcggccacaacaacacaggcatgaaccctggctggcactgcagccacgtggacatccggcggctgctgcctgacaaggatggagctgagaccctgaccttcccctgtgaccgctggctggccaccagtgaagatgacaagaagaccatccgggagctggtgccctatgacatcttcacagagaagtacatgaaggatggcagcctgcggcaggtgtacaaggaggtggaggagcccctggacatcgtgctgtacagcgtgcagatcttcaccggcaacatccctggggccggcacagatgccaaggtgtacatcaccatctatggagacctgggggacacaggagagcgctacctgggcaagtctgagaacagaaccaacaagtttgagcggggcacagctgacaccttcatcatcgaggccgctgacctgggcgtcatctacaagatcaagctgcggcatgacaacagcaagtggtgtgccgactggtacgtggagaaggtggagatctggaatgacaccaatgaagatgagttcctgttcctgtgtggccgctggctgagcctgaagaaggaggatggccgcctggagcggctcttctatgagaaggagtacacaggagacaggagcagcaactgcagcagccctgctgacttctgggagatcgccctgagcagcaagatggctgatgtggacatcagcacagtgacaggccccatggctgactatgtgcaggagggccccatcatcccctactacgtgtctgtgaccaccgggaagcacaaggatgctgccacagacagccgggccttcatcttcctgattggagaagatgatgagaggagcaagaggatctggctggactacccccggggcaagaggggcttcagccggggctctgtggaggagttctacgtggccggcctggatgtgggcatcatcaagaagattgaggtgctgtatgagatgacagtgtggacaggagatgtggtgggcggcggcacagacagcaacatcttcatgaccctgtatggcatcaatggcagcacagaggagatgcagctggacaagaagaaggccaggtttgagcgggagcagaatgacaccttcatcatggagatcctggacatcgcccccttcaccaagatgaggatcagaattgatggcctgggcagcaggcctgagtggttcctggagcgcatcctgctgaagaacatgaacacaggagacctgaccatgttctactatggagactggctgagccagaggaagggcaagaagaccctggtgtgtgagatgtgtgctgtgattgatgaggaggagatgatggagtggaccagctacacagtggccgtgaagaccagtgacatcctgggcgccggcacagatgccaacgtgttcatcatcatctttggagaaaatggagacagcggcaccctggccctgaagcagagcgccaactggaacaagtttgagaggaacaacacagacaccttcaacttcccagacatgctgagcctgggccacctgtgcaagctgcgggtgtggcatgacaacaagggcatcttccctggctggcacctgtcctatgtggatgtgaaggacaacagcagagatgagaccttccacttccagtgtgactgctggctgagcaagtcagaaggagatggccagacagtgcgggactttgcctgtgccaacaacaagatctgtgatgagctggaggagaccacctatgagatcgtcatcgagactggaaatggaggagagacccgggagaatgtgtggctgatcctggagggcaggaagaacagaagcaaggagttcctgatggagaacagcagccggcagagggccttcaggaagggcaccacagacacctttgaatttgacagcatctacctgggggacatcgccagcctgtgtgtgggccacctggcccgggaggaccgcttcatccccaagcgggagctggcctggcacgtgaagaccatcaccatcacagagatggagtatggaaatgtgtacttcttcaactgtgactgcctgatccccctgaagaggaagaggaagtacttcaaggtgtttgaggtgaccaagaccacagagagctttgccagcaaggtgcagagcctggtgcctgtgaagtatgaggtgattgtgaccaccggctatgagcccggggccggcacagatgccaacgtgtttgtgaccatctttggagccaacggggacaccgggaagcgggagctgaagcagaagatgaggaacctgtttgagcggggcagcacagaccgcttcttcctggagaccctggagctgggggagctgaggaaggtgcggctggagcatgacagcagcggctactgcagcggctggctggtggagaaggtggaggtgaccaacaccagcactggagtggccaccatcttcaactgtggccgctggctggacaagaagagaggagatggcctgacctggagggacctcttccccagcgtgtag

SEQ ID NO: 158087 - DNA, 3345 bp, synthetic construct
  misc_feature 1..3345: note = Description of Artificial Sequence: Synthetic coding sequence
  source 1..3345: mol_type = other DNA
atgaacaatgagatcacctactacttcccctgccagcgctggctggccgtggaggaggatgatggccagctgagccgggagctgctgcctgtggatgagagctatgtgctgccccagagcgaggagggccggggcggcggggacaacaaccccctggacaacctggccctggagcagaaggacaagagcaccaccttctctgtgaccatcaagacaggagtgaagaagaatgccggcacagatgccaacgtgttcatcaccctgtttggcacccaggatgacaccggcatgaccctgctgaagagcagcaagaccaacagcgacaagtttgagcgggacagcattgagatcttcaccgtggagaccctggacctgggggacctgtggaaggtgcggctgggccatgacaacacaggcaaggcccctggctggtttgtggactgggtggaggtggatgcccccagcctgggcaagtgcatgaccttcccctgtggccgctggctggccaagaatgaagatgatggcagcatcatccgggacctcttccacgccgagctgcagacccggctgtacaccccatttgtgccctatgagatcaccctgtacaccagtgatgtgtttgctgctggaacagatgccaacatcttcatcatcatctacggctgtgatgctgtgtgcacccagcagaagtacctgtgcaccaacaagcgggagcagaagcagttctttgagaggaagagcgccagccgcttcatcgtggagctggaggatgtgggggagatcatcgagaagatcagaattggccacaacaacacaggcatgaaccctggctggcactgcagccacgtggacatccggcggctgctgcctgacaaggatggagctgagaccctgaccttcccctgtgaccgctggctggccaccagtgaagatgacaagaagaccatccgggagctggtgccctatgacatcttcacagagaagtacatgaaggatggcagcctgcggcaggtgtacaaggaggtggaggagcccctggacatcgtgctgtacagcgtgcagatcttcaccggcaacatccctggagctggaacagatgccaaggtgtacatcaccatctacggggacctgggggacaccggggagcgctacctgggcaagtcagaaaatagaaccaacaagtttgagcggggcacagctgacaccttcatcattgaagctgctgacctgggcgtcatctacaagatcaagctgcggcatgacaacagcaagtggtgtgccgactggtacgtggagaaggtggagatctggaatgacaccaatgaagatgagttcctgttcctgtgtggccgctggctgagcctgaagaaggaggatggccgcctggagcggctcttctatgagaaggagtacaccggggacaggagcagcaactgcagcagccctgctgacttctgggagatcgccctgagcagcaagatggctgatgtggacatcagcacagtgacaggccccatggctgactatgtgcaggagggccccatcatcccctactacgtgtctgtgaccaccgggaagcacaaggatgctgccacagacagccgggccttcatcttcctgattggagaagatgatgagaggagcaagaggatctggctggactacccccggggcaagaggggcttcagccggggctctgtggaggagttctacgtggccggcctggatgtgggcatcatcaagaagattgagctgggccatgatggagccagccctgagagctgctggctggtggaggagctgtgcctggccgtgcccacccagggcaccaagtacatgctgaactgcaactgctggctggccaaggacagaggagatggcatcaccagccgggtgtttgacctgctggatgccatggtggtgaacattggagtgaaggtgctgtatgagatgacagtgtggacaggagatgtggtgggcggcggcacagacagcaacatcttcatgaccctgtatggcatcaatggcagcacagaggagatgcagctggacaagaagaaggccaggtttgagcgggagcagaatgacaccttcatcatggagatcctggacatcgcccccttcaccaagatgaggatcagaattgatggcctgggcagcaggcctgagtggttcctggagcgcatcctgctgaagaacatgaacacaggagacctgaccatgttctactacggggactggctgagccagaggaagggcaagaagaccctggtgtgtgagatgtgtgctgtgattgatgaggaggagatgatggagtggaccagctacacagtggccgtgaagaccagtgacatcctgggcgccggcacagatgccaacgtgttcatcatcatctttggagaaaatggagacagcggcaccctggccctgaagcagagcgccaactggaacaagtttgaaagaaacaacacagacaccttcaacttcccagacatgctgagcctgggccacctgtgcaagctgcgggtgtggcatgacaacaagggcatcttccctggctggcacctgtcctatgtggatgtgaaggacaacagcagagatgagaccttccacttccagtgtgactgctggctgagcaagtcagaaggagatggccagacagtgcgggactttgcctgtgccaacaacaagatctgtgatgagctggaggagaccacctatgaaattgtgattgaaacaggaaatggaggagagaccagagaaaatgtgtggctgatcctggagggcaggaagaacagaagcaaggagttcctgatggagaacagcagccggcagagggccttcaggaagggcaccacagacacctttgaatttgacagcatctacctgggggacatcgccagcctgtgtgtgggccacctggccagagaagatcgcttcatccccaagcgggagctggcctggcacgtgaagaccatcaccatcacagagatggagtatggaaatgtgtacttcttcaactgtgactgcctgatccccctgaagaggaagaggaagtacttcaaggtgtttgaggtgaccaagaccacagagagctttgccagcaaggtgcagagcctggtgcctgtgaagtatgaagtcatcgtgaccaccggctatgagcctggagctggaacagatgccaacgtgtttgtgaccatctttggagccaatggagacaccgggaagcgggagctgaagcagaagatgaggaacctgtttgagcggggcagcacagaccgcttcttcctggagaccctggagctggtggtgacccggctgggcctggccgcagaatgtggctag

SEQ ID NO: 158088 - DNA, 1539 bp, synthetic construct
  misc_feature 1..1539: note = Description of Artificial Sequence: Synthetic coding sequence
  source 1..1539: mol_type = other DNA
atgacagtgtggacaggagatgtggtgggcggcggcacagacagcaacatcttcatgaccctgtatggcatcaatggcagcacagaggagatgcagctggacaagaagaaggccaggtttgagcgggagcagaatgacaccttcatcatggagatcctggacatcgcccccttcaccaagatgaggatcagaattgatggcctgggcagcaggcctgagtggttcctggagcgcatcctgctgaagaacatgaacacaggagacctgaccatgttctactacggggactggctgagccagaggaagggcaagaagaccctggtgtgtgagatgtgtgctgtgattgatgaggaggagatgatggagtggaccagctacacagtggccgtgaagaccagtgacatcctgggcgccggcacagatgccaacgtgttcatcatcatctttggagaaaatggagacagcggcaccctggccctgaagcagagcgccaactggaacaagtttgaaagaaacaacacagacaccttcaacttcccagacatgctgagcctgggccacctgtgcaagctgcgggtgtggcatgacaacaagggcatcttccctggctggcacctgtcctatgtggatgtgaaggacaacagcagagatgagaccttccacttccagtgtgactgctggctgagcaagtcagaaggagatggccagacagtgcgggactttgcctgtgccaacaacaagatctgtgatgagctggaggagaccacctatgaaattgtgattgaaacaggaaatggaggagagaccagagaaaatgtgtggctgatcctggagggcaggaagaacagaagcaaggagttcctgatggagaacagcagccggcagagggccttcaggaagggcaccacagacacctttgaatttgacagcatctacctgggggacatcgccagcctgtgtgtgggccacctggccagagaagatcgcttcatccccaagcgggagctggcctggcacgtgaagaccatcaccatcacagagatggagtatggaaatgtgtacttcttcaactgtgactgcctgatccccctgaagaggaagaggaagtacttcaaggtgtttgaggtgaccaagaccacagagagctttgccagcaaggtgcagagcctggtgcctgtgaagtatgaagtcatcgtgaccaccggctatgagcctggagctggaacagatgccaacgtgtttgtgaccatctttggagccaatggagacaccgggaagcgggagctgaagcagaagatgaggaacctgtttgagcggggcagcacagaccgcttcttcctggagaccctggagctgggggagctgaggaaggtgcggctggagcatgacagcagcggctactgcagcggctggctggtggagaaggtggaggtgaccaacaccagcactggagtggccaccatcttcaactgtggccgctggctggacaagaagagaggagatggcctgacctggagggacctcttccccagcgtgtag

SEQ ID NO: 158089 - DNA, 1374 bp, synthetic construct
  misc_feature 1..1374: note = Description of Artificial Sequence: Synthetic coding sequence
  source 1..1374: mol_type = other DNA
atgacagtgtggacaggagatgtggtgggcggcggcacagacagcaacatcttcatgaccctgtatggcatcaatggcagcacagaggagatgcagctggacaagaagaaggccaggtttgagcgggagcagaatgacaccttcatcatggagatcctggacatcgcccccttcaccaagatgaggatcagaattgatggcctgggcagcaggcctgagtggttcctggagcgcatcctgctgaagaacatgaacacaggagacctgaccatgttctactacggggactggctgagccagaggaagggcaagaagaccctggtgtgtgagatgtgtgctgtgattgatgaggaggagatgatggagtggaccagctacacagtggccgtgaagaccagtgacatcctgggcgccggcacagatgccaacgtgttcatcatcatctttggagaaaatggagacagcggcaccctggccctgaagcagagcgccaactggaacaagtttgaaagaaacaacacagacaccttcaacttcccagacatgctgagcctgggccacctgtgcaagctgcgggtgtggcatgacaacaagggcatcttccctggctggcacctgtcctatgtggatgtgaaggacaacagcagagatgagaccttccacttccagtgtgactgctggctgagcaagtcagaaggagatggccagacagtgcgggactttgcctgtgccaacaacaagatctgtgatgagctggaggagaccacctatgaaattgtgattgaaacaggaaatggaggagagaccagagaaaatgtgtggctgatcctggagggcaggaagaacagaagcaaggagttcctgatggagaacagcagccggcagagggccttcaggaagggcaccacagacacctttgaatttgacagcatctacctgggggacatcgccagcctgtgtgtgggccacctggccagagaagatcgcttcatccccaagcgggagctggcctggcacgtgaagaccatcaccatcacagagatggagtatggaaatgtgtacttcttcaactgtgactgcctgatccccctgaagaggaagaggaagtacttcaaggtgtttgaggtgaccaagaccacagagagctttgccagcaaggtgcagagcctggtgcctgtgaagtatgaagtcatcgtgaccaccggctatgagcctggagctggaacagatgccaacgtgtttgtgaccatctttggagccaatggagacaccgggaagcgggagctgaagcagaagatgaggaacctgtttgagcggggcagcacagaccgcttcttcctggagaccctggagctgggggagctgaggaagtag

SEQ ID NO: 158090 - DNA, 1122 bp, synthetic construct
  misc_feature 1..1122: note = Description of Artificial Sequence: Synthetic coding sequence
  source 1..1122: mol_type = other DNA
atgctgatccccttctccatgaagaactgcttccagctgctgtgcaactgccaggtgcctgctgctggcttcaagaagacagtgaagaatggcctcatcctgcagagcatcagcaatgatgtgtaccagaacctggccgtggaggactggattcatgaccacatgaacctggagggcaagcccatcctcttcttctggcagaacagccccagcgtggtgattggccgccaccagaacccctggcaggagtgcaacctgaacctgatgagggaggagggcatcaagctggccaggagaagaagtggcggcggcaccgtgtaccatgacatgggcaacatcaacctgaccttcttcaccaccaagaagaagtatgacaggatggagaacctgaagctgattgtgcgggccctgaatgctgtgcagccccagctggatgtgcaggccaccaagagatttgacctgctgctggatggccagttcaagatctctggaacagccagcaagattggaagaaccacagcctaccaccactgcaccctgctgtgcagcacagatggcaccttcctgagcagcctgctgaagagcccctaccagggcatccgcagcaatgccacagccagcatccccagcctggtgaagaacctgctggagaaggaccccaccctgacctgtgaggtgctgatgaatgctgtggccacagaatatgctgcctaccaccagattgacaaccacatccacctgatcaaccccacagatgagaccctcttccctggcatcaacagcaaggccaaggagctgcagacctgggagtggatctacggcaagacccccaagttcagcatcaacaccagcttccacgtgctgtatgagcagagccacctggagatcaaggtgttcatcgacatcaagaatggaagaattgagatctgcaacatcgaggccccagaccactggctgcccctggagatccgggacaagctgaacagcagcctcatcggcagcaagttctgccccacagagaccaccatgctgaccaacatcctgctgcggacctgcccccaggaccacaagctgaacagcaagtggaacatcctgtgtgagaagatcaagggcatcatgtag

SEQ ID NO: 158091 - DNA, 1122 bp, synthetic construct; identical to SEQ ID NO: 158090
  misc_feature 1..1122: note = Description of Artificial Sequence: Synthetic coding sequence
  source 1..1122: mol_type = other DNA

SEQ ID NO: 158092 - DNA, 1122 bp, synthetic construct; identical to SEQ ID NO: 158090
  misc_feature 1..1122: note = Description of Artificial Sequence: Synthetic coding sequence
  source 1..1122: mol_type = other DNA

SEQ ID NO: 158093 - DNA, 1122 bp, synthetic construct; identical to SEQ ID NO: 158090
  misc_feature 1..1122: note = Description of Artificial Sequence: Synthetic coding sequence
  source 1..1122: mol_type = other DNA

SEQ ID NO: 158094 - DNA, 1122 bp, synthetic construct; identical to SEQ ID NO: 158090
  misc_feature 1..1122: note = Description of Artificial Sequence: Synthetic coding sequence
  source 1..1122: mol_type = other DNA

SEQ ID NO: 158095 - DNA, 321 bp, synthetic construct
  misc_feature 1..321: note = Description of Artificial Sequence: Synthetic coding sequence
  source 1..321: mol_type = other DNA
atgctgatccccttctccatgaagaactgcttccagctgctgtgcaactgccaggtgcctgctgctggcttcaagaagacagtgaagaatggcctcatcctgcagagcatcagcaatgatgtgtaccagaacctggccgtggaggactggattcatgaccacatgaacctggagggcaagcccatcctcttcttctggcagaacagccccagcgtggtgattggccgccaccagaacccctggcaggagtgcaacctgaacctgatgagggaggagggcatcaagctggccaggagaagaagtggcggcggcaccgtgtag

SEQ ID NO: 158096 - DNA, 756 bp, synthetic construct
  misc_feature 1..756: note = Description of Artificial Sequence: Synthetic coding sequence
  source 1..756: mol_type = other DNA
atgctgatccccttctccatgaagaactgcttccagctgctgtgcaactgccaggtgcctgctgctggcttcaagaagacagtgaagaatggcctcatcctgcagagcatcagcaatgatgtgtaccagaacctggccgtggaggactggattcatgaccacatgaacctggagggcaagcccatcctcttcttctggcagaacagccccagcgtggtgattggccgccaccagaacccctggcaggagtgcaacctgaacctgatgagggaggagggcatcaagctggccaggagaagaagtggcggcggcaccgtgtaccatgacatgggcaacatcaacctgaccttcttcaccaccaagaagaagtatgacaggatggagaacctgaagctgattgtgcgggccctgaatgctgtgcagccccagctggatgtgcaggccaccaagagatttgacctgctgctggatggccagttcaagatctctggaacagccagcaagattggaagaaccacagcctaccaccactgcaccctgctgtgcagcacagatggcaccttcctgagcagcctgctgaagagcccctaccagggcatccgcagcaatgccacagccagcatccccagcctggtgaagaacctgctggagaaggaccccaccctgacctgtgaggtgctgatgaatgctgtggccacagaatatgctgcctaccaccagattgacaaccacatccacctgatcaaccccacctag

SEQ ID NO: 158097 - DNA, 120 bp, synthetic construct
  misc_feature 1..120: note = Description of Artificial Sequence: Synthetic coding sequence
  source 1..120: mol_type = other DNA
atgctgatccccttctccatgaagaactgcttccagctgctgtgcaactgccaggtgcctgctgctggcttcaagaagacagtgaagaatggcctcatcctgcagagcatcagcaactag

SEQ ID NO: 158098 - DNA, 408 bp, synthetic construct
  misc_feature 1..408: note = Description of Artificial Sequence: Synthetic coding sequence
  source 1..408: mol_type = other DNA
atgctgatccccttctccatgaagaactgcttccagctgctgtgcaactgccaggtgcctgctgctggcttcaagaagacagtgaagaatggcctcatcctgcagagcatcagcaatgatgtgtaccagaacctggccgtggaggactggattcatgaccacatgaacctggagggcaagcccatcctcttcttctggcagaacagccccagcgtggtgattggccgccaccagaacccctggcaggagtgcaacctgaacctgatgagggaggagggcatcaagctggccaggagaagaagtggcggcggcaccgtgtaccatgacatgggcaacatcaacctgaccttcttcaccaccaagaagaagtatgacaggatggagaacctgaagctgattgtgaggtag

SEQ ID NO: 158099 - DNA, 5301 bp, synthetic construct
  misc_feature 1..5301: note = Description of Artificial Sequence: Synthetic coding sequence
  source 1..5301: mol_type = other DNA
atgggcggcaagaacaagcagaggaccaagggcaacctgcggcccagcaacagcggccgggctgctgagctgctggccaaggagcagggcaccgtgcccggcttcatcggcttcggcaccagccagagcgacctgggctacgtgcctgccatccagggcgctgaggagattgacagcctggtggacagcgacttcaggatggtgctgaggaagctgagcaagaaggatgtgaccaccaagctgaaggccatgcaggagtttggcaccatgtgcacagagcgggacacagagaccgtgaagggcgtgctgccctactggccccgcatcttctgcaagatcagcctggaccatgacagaagagtgcgggaggccacccagcaggcctttgagaagctgatcctgaaggtgaagaagcagctggccccctacctgaagagcctgatgggctactggctgatggcccagtgtgacacctacaccccagctgcctttgctgccaaggatgcctttgaggccgccttcccccccagcaagcagcctgaggccatcgccttctgcaaggatgagatcacctctgtgctgcaggaccacctgatcaaggagaccccagacaccctgagtgacccccagacagtgcctgaggaggagcgggaggccaagttctacagagtggtgacctgcagcctgctggccctgaagaggctgctgtgcctgctgcctgacaatgagctggacagcctggaggagaagttcaagagcctgctgagccagaacaagttctggaagtatggcaagcacagcgtgccccagatccgcagcgcctactttgagctggtgtctgccctgtgccagaggatcccccagctgatgaaggaggaggccagcaaggtgagccccagcgtgctgctgagcattgatgacagcgaccccatcgtgtgcccagccctgtgggaggccgtgctgtacaccctgaccaccatcgaggactgctggctgcacgtgaatgccaagaagtctgtgttccccaagctgagcaccgtcatccgggagggcggccggggcctggccaccgtcatctacccctacctgctgcccttcatcagcaagctgccccagagcatcaccaaccccaagctggacttcttcaagaacttcctgaccagcctggtggccggcctgagcacagagaggaccaagaccagcagcctggagagcagcgctgtgatcagcgccttctttgagtgcctgcgcttcatcatgcagcagaacctgggggaggaggagattgagcagatgctggtgaatgaccagctgatccccttcattgatgctgtgctgaaggaccccggcctgcagcacggccagctgttcaaccacctggccgagaccctgagctcctgggaggccaaggctgacacagagaaggatgagaagacagcccacaacctggagaatgtgctgatccacttctgggagcggctgtctgagatctgtgtggccaagatcagcgagcctgaggctgatgtggagagcgtgctgggcgtgagcaacctgctgcaggtgctgcagaagcccaagagcagcctgaagagcagcaagaagaagaatggcaaggtgcgctttgctgatgagatcctggagagcaacaaggaaaatgagaagtgtgtgagcagcgagggggagaagattgagggctgggagctgaccacagagcccagcctgacccacaacagcagcggcctgctgagccccctgaggaagaagcccctggaggacctggtgtgcaagctggccgacatcagcatcaactacgtgaatgaaaggaagtctgagcagcacctgcgcttcctgagcaccctgctggacagcttcagcagcagcagggtcttcaagatgctgctgggagatgagaagcagagcatcgtgcaggccaagcccctggagatcgccaagctggtgcagaagaacccagctgtgcagttcctgtaccagaagctgattggctggctgaatgaagaccagaggaaggactttggcttcctggtggacatcctgtacagcgccctgcgctgctgtgacaatgacatggagaggaagaaggtgctggatgacctgaccaaggtggacctgaagtggaacagcctgctgaagatcatcgagaaggcctgccccagcagtgacaagcacgccctggtgaccccctggctgaagggggacatcctgggggagaagctggtgaacctggccgactgcctgtgcaatgaagacctggagagccgggtgtcctctgagagccacttcagcgagcgctggaccctgctgagcctggtgctgagccagcacgtgaagaatgactacctgattggagatgtgtatgtggagcgcatcatcgtgcggctgcacgagaccctcttcaagaccaagaagctgtctgaggccgagagcagtgacagctctgtgtccttcatctgtgatgtggcctacaactacttcagcagcgccaagggctgcctgctgatgcccagcagcgaggacctgctgctgaccctcttccagctgtgtgcccagagcaaggagaagacccacctgcctgacttcctgatctgcaagctgaagaacacctggctgtctggagtgaacctgctggtgcaccagacagacagcagctacaaggagagcaccttcctgcacctgagcgccctgtggctgaagaaccaggtgcaggccagcagcctggacatcaacagcctgcaggtgctgctgtctgctgtggatgacctgctgaacaccctgctggagagtgaagattcctacctgatgggcgtgtacatcggctctgtgatgcccaatgacagcgagtgggagaagatgaggcagagcctgcccatgcagtggctgcaccggcccctgctggagggccgcctgagcctgaactatgagtgcttcaagacagacttcaaggagcaggacatcaagaccctgcccagccacctgtgcaccagcgccctgctgagcaagatggtgctgattgccctgaggaaggagaccgtgctggagaacaatgagctggagaagatcatcgccgagctgctgtacagcctgcagtggtgtgaggagctggacaacccccccatcttcctgattggcttctgtgagatcctgcagaagatgaacatcacctatgacaacctgcgggtgctgggcaacaccagcggcctgctgcagctgctcttcaacagaagccgggagcacggcaccctgtggagcctcatcatcgccaagctgatcctgagccgcagcatcagcagtgatgaggtgaagccccactacaagaggaaggagagcttcttccccctgacagagggcaacctgcacaccatccagagcctgtgccccttcctgagcaaggaggagaagaaggagttcagcgcccagtgcatcccagccctgctgggctggaccaagaaggacctgtgcagcaccaacggcggcttcggccacctggccatcttcaacagctgcctgcagaccaagagcattgatgatggagagctgctgcacggcatcctgaagatcatcatctcctggaagaaggagcacgaggacatcttcctgttcagctgcaacctgtctgaggccagccctgaggtgctgggcgtgaacatcgagatcatccgcttcctgagcctcttcctgaagtactgcagcagccccctggccgagagcgagtgggacttcatcatgtgcagcatgctggcctggctggagaccaccagcgagaaccaggccctgtacagcatccccctggtgcagctgtttgcctgtgtgtcctgtgacctggcctgtgacctgagcgccttctttgacagcaccaccctggacaccatcggcaacctgcctgtgaacctgatcagcgagtggaaggagttcttcagccagggcatccacagcctgctgctgcccatcctggtgacagtgactggagagaacaaggatgtgtctgagaccagcttccagaatgccatgctgaagcccatgtgtgagaccctgacctacatcagcaaggagcagctgctgagccacaagctgcctgcccggctggtggccgaccagaagaccaacctgcctgagtacctgcagaccctgctgaacaccctggcccccctgctgctcttccgggcccggcctgtgcagattgctgtgtaccacatgctgtacaagctgatgcctgagctgccccagtatgaccaggacaacctgaagagctatggagatgaggaggaggagcccgccctgagccccccagctgccctgatgagcctgctgagcatccaggaggacctgctggagaatgtgctgggctgcatccctgtgggccagatcgtgaccatcaagcccctgtctgaggacttctgctacgtgctgggctacctgctgacctggaagctgatcctgaccttcttcaaggccgccagcagccagctgcgggccctgtacagcatgtacctgaggaagaccaagagcctgaacaagctgctgtaccacctgttccggctgatgcctgagaaccccacctatgcagagacagctgtggaggtgcccaacaaggaccccaagaccttcttcacagaggagctgcagctgagcatccgggagaccaccatgctgccctaccacatcccccacctggcctgcagcgtgtaccacatgaccctgaaggacctgcctgccatggtgcggctgtggtggaacagcagcgagaagagggtcttcaacatcgtggaccgcttcaccagcaaatatgtgtcctctgtgctgtccttccaggagatcagctctgtgcagaccagcacccagctgttcaacggcatgacagtgaaggcccgggccaccacccgggaggtgatggccacctacaccatcgaggacatcgtcatcgagctgatcatccagctgcccagcaactaccccctgggcagcatcatcgtggagagcggcaagagggtgggcgtggccgtgcagcagtggaggaactggatgctgcagctgagcacctacctgacccaccagaatggcagcatcatggagggcctggccctgtggaagaacaacgtggacaagagatttgaaggagtggaggactgcatgatctgcttcagcgtcatccacggcttcaactacagcctgcccaagaaggcctgcaggacctgcaagaagaagttccacagcgcctgcctgtacaagtggttcaccagcagcaacaagagcacctgccccctgtgccgggagaccttcttctag

SEQ ID NO: 158100 - DNA, 1443 bp, synthetic construct
  misc_feature 1..1443: note = Description of Artificial Sequence: Synthetic coding sequence
  source 1..1443: mol_type = other DNA
atgggcggcaagaacaagcagaggaccaagggcaacctgcggcccagcaacagcggccgggctgctgagctgctggccaaggagcagggcaccgtgcccggcttcatcggcttcggcaccagccagagcgacctgggctacgtgcctgccatccagggcgctgaggagattgacagcctggtggacagcgacttcaggatggtgctgaggaagctgagcaagaaggatgtgaccaccaagctgaaggccaatgccatgcaggagtttggcaccatgtgcacagagcgggacacagagaccgtgaagggcgtgctgccctactggccccgcatcttctgcaagatcagcctggaccatgacagaagagtgcgggaggccacccagcaggcctttgagaagctgatcctgaaggtgaagaagcagctggccccctacctgaagagcctgatgggctactggctgatggcccagtgtgacacctacaccccagctgcctttgctgccaaggatgcctttgaggccgccttcccccccagcaagcagcctgaggccatcgccttctgcaaggatgagatcacctctgtgctgcaggaccacctgatcaaggagaccccagacaccctgagtgacccccagacagtgcctgaggaggagcgggaggccaagttctacagagtggtgacctgcagcctgctggccctgaagaggctgctgtgcctgctgcctgacaatgagctggacagcctggaggagaagttcaagagcctgctgagccagaacaagttctggaagtatggcaagcacagcgtgccccagatccgcagcgcctactttgagctggtgtctgccctgtgccagaggatcccccagctgatgaaggaggaggccagcaaggtgagccccagcgtgctgctgagcattgatgacagcgaccccatcgtgtgcccagccctgtgggaggccgtgctgtacaccctgaccaccatcgaggactgctggctgcacgtgaatgccaagaagtctgtgttccccaagctgagcaccgtcatccgggagggcggccggggcctggccaccgtcatctacccctacctgctgcccttcatcagcaagctgccccagagcatcaccaaccccaagctggacttcttcaagaacttcctgaccagcctggtggccggcctgagcacagagaggaccaagaccagcagcctggagagcagcgctgtgatcagcgccttctttgagtgcctgcgcttcatcatgcagcagaacctgggggaggaggagattgagcagatgctggtgaatgaccagctgatccccttcattgatgctgtgctgaaggaccccggcctgcagcacggccagctgttcaaccacctggccgagaccctgagctcctgggaggccaaggctgacacagagaaggatgagaagtag

SEQ ID NO: 158101 - DNA, 5439 bp, synthetic construct
  misc_feature 1..5439: note = Description of Artificial Sequence: Synthetic coding sequence
  source 1..5439: mol_type = other DNA
atggacagagtgggcggcggcaagggccctgggggcagctactacagagtgagcagcagcgctgcccggagcaggaagctgtgccccggccgggtgaacagaggcctgagcgcccagagcacagctgccacagccaccatgggcggcaagaacaagcagaggaccaagggcaacctgcggcccagcaacagcggccgggctgctgagctgctggccaaggagcagggcaccgtgcccggcttcatcggcttcggcaccagccagagcgacctgggctacgtgcctgccatccagggcgctgaggagattgacagcctggtggacagcgacttcaggatggtgctgaggaagctgagcaagaaggatgtgaccaccaagctgaaggccatgcaggagtttggcaccatgtgcacagagcgggacacagagaccgtgaagggcgtgctgccctactggccccgcatcttctgcaagatcagcctggaccatgacagaagagtgcgggaggccacccagcaggcctttgagaagctgatcctgaaggtgaagaagcagctggccccctacctgaagagcctgatgggctactggctgatggcccagtgtgacacctacaccccagctgcctttgctgccaaggatgcctttgaggccgccttcccccccagcaagcagcctgaggccatcgccttctgcaaggatgagatcacctctgtgctgcaggaccacctgatcaaggagaccccagacaccctgagtgacccccagacagtgcctgaggaggagcgggaggccaagttctacagagtggtgacctgcagcctgctggccctgaagaggctgctgtgcctgctgcctgacaatgagctggacagcctggaggagaagttcaagagcctgctgagccagaacaagttctggaagtatggcaagcacagcgtgccccagatccgcagcgcctactttgagctggtgtctgccctgtgccagaggatcccccagctgatgaaggaggaggccagcaaggtgagccccagcgtgctgctgagcattgatgacagcgaccccatcgtgtgcccagccctgtgggaggccgtgctgtacaccctgaccaccatcgaggactgctggctgcacgtgaatgccaagaagtctgtgttccccaagctgagcaccgtcatccgggagggcggccggggcctggccaccgtcatctacccctacctgctgcccttcatcagcaagctgccccagagcatcaccaaccccaagctggacttcttcaagaacttcctgaccagcctggtggccggcctgagcacagagaggaccaagaccagcagcctggagagcagcgctgtgatcagcgccttctttgagtgcctgcgcttcatcatgcagcagaacctgggggaggaggagattgagcagatgctggtgaatgaccagctgatccccttcattgatgctgtgctgaaggaccccggcctgcagcacggccagctgttcaaccacctggccgagaccctgagctcctgggaggccaaggctgacacagagaaggatgagaagacagcccacaacctggagaatgtgctgatccacttctgggagcggctgtctgagatctgtgtggccaagatcagcgagcctgaggctgatgtggagagcgtgctgggcgtgagcaacctgctgcaggtgctgcagaagcccaagagcagcctgaagagcagcaagaagaagaatggcaaggtgcgctttgctgatgagatcctggagagcaacaaggaaaatgagaagtgtgtgagcagcgagggggagaagattgagggctgggagctgaccacagagcccagcctgacccacaacagcagcggcctgctgagccccctgaggaagaagcccctggaggacctggtgtgcaagctggccgacatcagcatcaactacgtgaatgaaaggaagtctgagcagcacctgcgcttcctgagcaccctgctggacagcttcagcagcagcagggtcttcaagatgctgctgggagatgagaagcagagcatcgtgcaggccaagcccctggagatcgccaagctggtgcagaagaacccagctgtgcagttcctgtaccagaagctgattggctggctgaatgaagaccagaggaaggactttggcttcctggtggacatcctgtacagcgccctgcgctgctgtgacaatgacatggagaggaagaaggtgctggatgacctgaccaaggtggacctgaagtggaacagcctgctgaagatcatcgagaaggcctgccccagcagtgacaagcacgccctggtgaccccctggctgaagggggacatcctgggggagaagctggtgaacctggccgactgcctgtgcaatgaagacctggagagccgggtgtcctctgagagccacttcagcgagcgctggaccctgctgagcctggtgctgagccagcacgtgaagaatgactacctgattggagatgtgtatgtggagcgcatcatcgtgcggctgcacgagaccctcttcaagaccaagaagctgtctgaggccgagagcagtgacagctctgtgtccttcatctgtgatgtggcctacaactacttcagcagcgccaagggctgcctgctgatgcccagcagcgaggacctgctgctgaccctcttccagctgtgtgcccagagcaaggagaagacccacctgcctgacttcctgatctgcaagctgaagaacacctggctgtctggagtgaacctgctggtgcaccagacagacagcagctacaaggagagcaccttcctgcacctgagcgccctgtggctgaagaaccaggtgcaggccagcagcctggacatcaacagcctgcaggtgctgctgtctgctgtggatgacctgctgaacaccctgctggagagtgaagattcctacctgatgggcgtgtacatcggctctgtgatgcccaatgacagcgagtgggagaagatgaggcagagcctgcccatgcagtggctgcaccggcccctgctggagggccgcctgagcctgaactatgagtgcttcaagacagacttcaaggagcaggacatcaagaccctgcccagccacctgtgcaccagcgccctgctgagcaagatggtgctgattgccctgaggaaggagaccgtgctggagaacaatgagctggagaagatcatcgccgagctgctgtacagcctgcagtggtgtgaggagctggacaacccccccatcttcctgattggcttctgtgagatcctgcagaagatgaacatcacctatgacaacctgcgggtgctgggcaacaccagcggcctgctgcagctgctcttcaacagaagccgggagcacggcaccctgtggagcctcatcatcgccaagctgatcctgagccgcagcatcagcagtgatgaggtgaagccccactacaagaggaaggagagcttcttccccctgacagagggcaacctgcacaccatccagagcctgtgccccttcctgagcaaggaggagaagaaggagttcagcgcccagtgcatcccagccctgctgggctggaccaagaaggacctgtgcagcaccaacggcggcttcggccacctggccatcttcaacagctgcctgcagaccaagagcattgatgatggagagctgctgcacggcatcctgaagatcatcatctcctggaagaaggagcacgaggacatcttcctgttcagctgcaacctgtctgaggccagccctgaggtgctgggcgtgaacatcgagatcatccgcttcctgagcctcttcctgaagtactgcagcagccccctggccgagagcgagtgggacttcatcatgtgcagcatgctggcctggctggagaccaccagcgagaaccaggccctgtacagcatccccctggtgcagctgtttgcctgtgtgtcctgtgacctggcctgtgacctgagcgccttctttgacagcaccaccctggacaccatcggcaacctgcctgtgaacctgatcagcgagtggaaggagttcttcagccagggcatccacagcctgctgctgcccatcctggtgacagtgactggagagaacaaggatgtgtctgagaccagcttccagaatgccatgctgaagcccatgtgtgagaccctgacctacatcagcaaggagcagctgctgagccacaagctgcctgcccggctggtggccgaccagaagaccaacctgcctgagtacctgcagaccctgctgaacaccctggcccccctgctgctcttccgggcccggcctgtgcagattgctgtgtaccacatgctgtacaagctgatgcctgagctgccccagtatgaccaggacaacctgaagagctatggagatgaggaggaggagcccgccctgagccccccagctgccctgatgagcctgctgagcatccaggaggacctgctggagaatgtgctgggctgcatccctgtgggccagatcgtgaccatcaagcccctgtctgaggacttctgctacgtgctgggctacctgctgacctggaagctgatcctgaccttcttcaaggccgccagcagccagctgcgggccctgtacagcatgtacctgaggaagaccaagagcctgaacaagctgctgtaccacctgttccggctgatgcctgagaaccccacctatgcagagacagctgtggaggtgcccaacaaggaccccaagaccttcttcacagaggagctgcagctgagcatccgggagaccaccatgctgccctaccacatcccccacctggcctgcagcgtgtaccacatgaccctgaaggacctgcctgccatggtgcggctgtggtggaacagcagcgagaagagggtcttcaacatcgtggaccgcttcaccagcaaatatgtgtcctctgtgctgtccttccaggagatcagctctgtgcagaccagcacccagctgttcaacggcatgacagtgaaggcccgggccaccacccgggaggtgatggccacctacaccatcgaggacatcgtcatcgagctgatcatccagctgcccagcaactaccccctgggcagcatcatcgtggagagcggcaagagggtgggcgtggccgtgcagcagtggaggaactggatgctgcagctgagcacctacctgacccaccagaatggcagcatcatggagggcctggccctgtggaagaacaacgtggacaagagatttgaaggagtggaggactgcatgatctgcttcagcgtcatccacggcttcaactacagcctgcccaagaaggcctgcaggacctgcaagaagaagttccacagcgcctgcctgtacaagtggttcaccagcagcaacaagagcacctgccccctgtgccgggagaccttcttctag

SEQ ID NO: 158102 - DNA, 1404 bp, synthetic construct
  misc_feature 1..1404: note = Description of Artificial Sequence: Synthetic coding sequence
  source 1..1404: mol_type = other DNA
atgaagaaccagaatggcaccttcaaggactgggccaatgccaacgtgtcccggcagattgaagatactgtgctgtatggctactacaccctgtacagcgtcatcctcttctgtgtgttcttctggatcccctttgtgtacttctactatgaggagaaggatgatgatgacaccagcaagtgcacccagatcaagacagccctgaagtacaccctgggctttgtggtgatctgtgccctgctgctgctggtgggcgcctttgtgcccctgaatgtgcccaacaacaagaacagcacagagtgggagaaggtgaagagcctgtttgaggagctgggcagcagccacggcctggccgccctgtccttcagcatcagcagcctgaccctcatcggcatgctggccgccatcacctacacagcctacggcatgtctgccctgcccctgaacctgatcaagggcaccaggtctgctgcctatgagcggctggagaacacagaggacatcgaggaggtggagcagcacatccagaccatcaagagcaagagcaaggatggccggcccctgcctgcccgggacaagagggccctgaagcagtttgaggagcggctgcggaccctgaagaagcgggagcggcacctggagttcattgaaaattcctggtggaccaagttctgtggggccctgcggcccctgaagatcgtgtggggcatcttcttcatcctggtggccctgctcttcgtcatcagcctcttcctgagcaacctggacaaggccctgcacagcgctggcatcgacagcggcttcatcatctttggagccaacctgagcaaccccctgaacatgctgctgcccctgctgcagaccgtcttccccctggactacatcctgatcaccatcatcatcatgtacttcatcttcacctccatggccggcatcagaaatattggcatctggttcttctggatccggctgtacaagatccggcggggccgcacccggccccaggccctgctcttcctgtgcatgatcctgctgctgattgtgctgcacaccagctacatgatctacagcctggccccccagtatgtgatgtatggcagccagaactacctgattgagaccaacatcaccagtgacaaccacaagggcaacagcaccctgtctgtgcccaagagatgtgatgctgatgcccctgaggaccagtgcaccgtgaccaggacctacctgttcctgcacaagttctggttcttctctgctgcctactactttggaaactgggccttcctgggcgtcttcctgattggcctgattgtgtcctgctgcaagggcaagaagagcgtcatcgagggcgtggatgaagattctgacatcagtgatgatgagcccagcgtgtacagcgcctag

SEQ ID NO: 158103 - DNA, 1623 bp, synthetic construct
  misc_feature 1..1623: note = Description of Artificial Sequence: Synthetic coding sequence
  source 1..1623: mol_type = other DNA
atggccaccagcggggccgccagcgctgagctggtgattggctggtgcatcttcggcctgctgctgctggccatcctggccttctgctggatctacgtgaggaagtaccagagcagaagagagagcgaggtggtgtccaccatcacagccatcttcagcctggccatcgccctgatcaccagcgccctgctgcctgtggacatcttcctggtgtcctacatgaagaaccagaatggcaccttcaaggactgggccaatgccaacgtgtcccggcagatcgaggacacagtgctgtatggctactacaccctgtacagcgtcatcctcttctgtgtgttcttctggatcccctttgtgtacttctactatgaggagaaggatgatgatgacaccagcaagtgcacccagatcaagacagccctgaagtacaccctgggctttgtggtgatctgtgccctgctgctgctggtgggcgcctttgtgcccctgaatgtgcccaacaacaagaacagcacagagtgggagaaggtgaagagcctgtttgaggagctgggcagcagccacggcctggccgccctgtccttcagcatcagcagcctgaccctgattggcatgctggccgccatcacctacacagcctacggcatgtctgccctgcccctgaacctgatcaagggcaccaggtctgctgcctatgaaaggctggagaacacagaagatattgaggaggtggagcagcacatccagaccatcaagagcaagagcaaggatggccggcccctgcctgcccgggacaagagggccctgaagcagtttgaggagcggctgcggaccctgaagaagcgggagcggcacctggagttcatcgagaacagctggtggaccaagttctgtggggccctgcggcccctgaagatcgtgtggggcatcttcttcatcctggtggccctgctgtttgtgatcagcctcttcctgagcaacctggacaaggccctgcacagcgctggcattgattctggcttcatcatctttggagccaacctgagcaaccccctgaacatgctgctgcccctgctgcagacagtgttccccctggactacatcctgatcaccatcatcatcatgtacttcatcttcacctccatggccggcatccggaacatcggcatctggttcttctggatccggctgtacaagatcagaagaggccgcacccggccccaggccctgctcttcctgtgcatgatcctgctgctgattgtgctgcacaccagctacatgatctacagcctggccccccagtatgtgatgtatggcagccagaactacctgattgagaccaacatcaccagtgacaaccacaagggcaacagcaccctgtctgtgcccaagagatgtgatgctgatgcccctgaggaccagtgcaccgtgaccaggacctacctgttcctgcacaagttctggttcttctctgctgcctactacttcggcaactgggccttcctgggcgtcttcctgattggcctcatcgtgtcctgctgcaagggcaagaagtctgtgattgaaggagtggatgaggacagcgacatcagtgatgatgagcccagcgtgtacagcgcctag

SEQ ID NO: 158104 - DNA, 939 bp, synthetic construct
  misc_feature 1..939: note = Description of Artificial Sequence: Synthetic coding sequence
  source 1..939: mol_type = other DNA
atgagctaccagaagaagcagcccaccccccagccccctgtggactgtgtgaagaccagcggcggcggcggcggcggcggcggcagcggcggcggcggctgcggcttctttggaggcggcggcagcggcggcggcagcagcggcagcggctgcggctacagcggcggcggcggctacagcggcggcggctgcggcggcggcagcagcggcggcggcggcggcggcggcattggaggctgcggcggcggcagcggcggctctgtgaagtacagcggcggcggcggcagcagcggcggcggcagcggctgcttcagcagcggcggcggcggcagcggctgcttcagcagcggcggcggcggcagcagcggcggcggcagcggctgcttcagcagcggcggcggcggcagcagcggcggcggcagcggctgcttcagcagcggcggcggcggcttcagcggccaggccgtgcagtgccagagctatggaggagtgagcagcggcggcagcagcggcggcggcagcggctgcttcagcagcggcggcggcggcggctctgtgtgtggctacagcggcggcggcagcggctgcggcggcggcagcagcggcggcagcggcagcggctacgtgagcagccagcaggtgacccagaccagctgtgccccccagcccagctatggaggcggcagcagcggcggcggcggcagcggcggcagcggctgcttcagcagcggcggcggcggcggcagcagcggctgcggcggcggcagcagcggcatcggcagcggctgcatcatcagcggcggcggctctgtgtgtggcggcggcagcagcggcggcggcggcggcggcagctctgtgggcggcagcggcagcgggaaaggagtgcccatctgccaccagacccagcagaagcaggcccccacctggcccagcaagtag

SEQ ID NO: 158105 - DNA, 1002 bp, synthetic construct
  misc_feature 1..1002: note = Description of Artificial Sequence: Synthetic coding sequence
  source 1..1002: mol_type = other DNA
atgagctaccagaagaagcagcccaccccccagccccctgtggactgtgtgaagaccagcggcggcggcggcggcggcggcggcagcggcggcggcggctgcggcttctttggaggcggcggcagcggcggcggcagcagcggcagcggctgcggctacagcggcggcggcggctacagcggcggcggctgcggcggcggcagcagcggcggcggcggcggcggcggcattggaggctgcggcggcggcagcggcggctctgtgaagtacagcggcggcggcggcagcagcggcggcggcagcggctgcttcagcagcggcggcggcggcagcggctgcttcagcagcggcggcggcggcagcagcggcggcggcagcggctgcttcagcagcggcggcggcggcagcagcggcggcggcagcggctgcttcagcagcggcggcggcggcttcagcggccaggccgtgcagtgccagagctatggaggagtgagcagcggcggcagcagcggcggcggcagcggctgcttcagcagcggcggcggcggcggctctgtgtgtggctacagcggcggcggcagcggctgcggcggcggcagcagcggcggcagcggcagcggctacgtgagcagccagcaggtgacccagaccagctgtgccccccagcccagctatggaggcggcgtgagaagaagacggcagaggaggaagaggctgctgctgcagaggcggggccggcgggagctgcggctgcggcggcggctgctgcgggactggcagaggctgcaccaccagtggaggggcctgcggctgcggcgctggttcctgtggaggagaagaagaaggctgctgcggggctggctgcgggagtggcagggccgcccagacctgcccccagaccctgctgaggccggggcctacctggccgtgcagattgaccccccaggctaccacggcggggagggcgtgggcggcgtcttccagggccaccgctgggcctag

SEQ ID NO: 158106 - DNA, 927 bp, synthetic construct
  misc_feature 1..927: note = Description of Artificial Sequence: Synthetic coding sequence
  source 1..927: mol_type = other DNA
atggatgccctgaagtctgctggccgggccctgatccgcagccccagcctggccaagcagagctggggcggcggcggccgccacaggaagctgcctgagaactggacagacacccgggagaccctgctggagggcatgctgttcagcctgaagtacctgggcatgaccctggtggagcagcccaagggggaggagctgtctgctgctgccatcaagagaattgtggccacagccaaggccagcggcaagaagctgcagaaggtgaccctgaaggtgagcccccggggcatcatcctgacagacaacctgaccaaccagctgattgaaaatgtgtccatctaccgcatctcctactgcacagctgacaagatgcatgacaaggtgtttgcctacatcgcccagagccagcacaaccagagcctggagtgccacgccttcctgtgcaccaagaggaagatggcccaggccgtgaccctgactgtggcccaggccttcaaggtggcctttgagttctggcaggtgtccaaggaggagaaggagaagagggacaaggccagccaggagggcggagatgtgctgggcgcccggcaggactgcacccccagcctgaagagcctggtggccactggaaacctgctggacctggaggagacagccaaggcccccctgagcacagtgtctgccaacaccaccaacatggatgaggtgccccggccccaggccctgagcggcagctctgtggtgtgggagctggatgatggcctggatgaggccttcagccggctggcccagagcaggaccaacccccaggtgctggacaccggcctgacagcccaggacatgcactacgcccagtgcctgagccctgtggactgggacaagccagacagcagcggcacagagcaggatgacctcttctccttctag

SEQ ID NO: 158107 - DNA, 810 bp, synthetic construct; identical to SEQ ID NO: 147630
  misc_feature 1..810: note = Description of Artificial Sequence: Synthetic coding sequence
  source 1..810: mol_type = other DNA

SEQ ID NO: 158108 - DNA, 13635 bp, synthetic construct
  misc_feature 1..13635: note = Description of Artificial Sequence: Synthetic coding sequence
  source 1..13635: mol_type = other DNA
atgctgaccccacccctgctgctgctgctgcccctgctgagcgccctggtggccgccgccattgatgcccccaagacctgcagccccaagcagtttgcctgccgggaccagatcacctgcatcagcaagggctggaggtgtgatggagagcgggactgcccagatggcagtgatgaggcccctgagatctgcccccagagcaaggcccagcgctgccagcccaatgagcacaactgcctgggcacagagctgtgtgtgcccatgagccggctgtgcaatggagtgcaggactgcatggatggcagtgatgagggcccccactgccgggagctgcagggcaactgcagccggctgggctgccagcaccactgtgtgcccaccctggatggccccacctgctactgcaacagcagcttccagctgcaggctgatggcaagacctgcaaggactttgatgaatgttctgtgtatggcacctgcagccagctgtgcaccaacacagatggcagcttcatctgtggctgtgtggagggctacctgctgcagcctgacaacagaagctgcaaggccaagaatgaacctgtggaccggccccctgtgctgctgattgccaacagccagaacatcctggccacctacctgagcggggcccaggtgtccaccatcacccccaccagcacccggcagaccacagccatggacttctcctatgccaatgaaacagtgtgctgggtgcacgtgggggacagcgctgcccagacccagctgaagtgtgccaggatgcctggcctgaagggctttgtggatgagcacaccatcaacatcagcctgagcctgcaccacgtggagcagatggccatcgactggctgactggaaacttctactttgtggatgacattgatgaccgcatctttgtgtgcaacagaaatggagacacctgtgtgaccctgctggacctggagctgtacaaccccaagggcatcgccctggaccctgccatgggcaaggtgttcttcacagattatggccagatccccaaggtggagcgctgtgacatggatggccagaacagaaccaagctggtggacagcaagatcgtgttcccccacggcatcaccctggacctggtgtcccggctggtgtactgggcagatgcctacctggactacatcgaggtggtggactatgagggcaagggccggcagaccatcatccagggcatcctgattgagcacctgtatggcctgactgtgtttgagaactacctgtatgccaccaacagcgacaatgccaatgcccagcagaagaccagcgtcatccgggtgaaccgcttcaacagcacagagtaccaggtggtgaccagggtggacaagggcggggccctgcacatctaccaccagaggcggcagccccgggtgcgcagccacgcctgtgaaaatgaccagtatggcaagccaggcggctgcagcgacatctgcctgctggccaacagccacaaggcccggacctgccgctgccgcagcggcttcagcctgggcagtgatggcaagagctgcaagaagccagagcacgagctgttcctggtgtatggcaagggccggcccggcatcatccggggcatggacatgggcgccaaggtgcctgatgagcacatgatccccatcgagaacctgatgaacccccgggccctggacttccacgccgagaccggcttcatctactttgctgacaccaccagctacctgattggccggcagaagattgatggaacagagcgggagaccatcctgaaggatggcatccacaacgtggagggcgtggccgtggactggatgggagacaacctgtactggacagatgatggccccaagaagaccatctctgtggcccggctggagaaggccgcccagaccaggaagaccctgattgagggcaagatgacccacccccgggccatcgtggtggaccccctgaatggctggatgtactggacagactgggaggaggaccccaaggacagcagaagaggccgcctggagcgggcctggatggatggcagccaccgggacatctttgtgaccagcaagacagtgctgtggcccaacggcctgagcctggacatcccagctggccgcctgtactgggtggatgccttctatgacagaattgagaccatcctgctgaatggaacagacaggaagatcgtgtatgagggccctgagctgaaccacgccttcggcctgtgccaccacggcaactacctgttctggacagagtaccgcagcggctctgtgtaccgcctggagcggggcgtgggcggggccccacccaccgtgaccctgctgcggtctgagaggcctcccatctttgagatccgcatgtatgatgcccagcagcagcaggtgggcaccaacaagtgccgggtgaacaatggaggctgcagcagcctgtgcctggccaccccaggcagccggcagtgtgcctgtgccgaggaccaggtgctggatgctgatggagtgacctgcctggccaaccccagctatgtgcccccaccccagtgccagcccggggagtttgcctgtgccaacagccgctgcatccaggagcgctggaagtgtgatggagacaatgactgcctggacaacagtgatgaggccccagccctgtgccaccagcacacctgccccagcgaccgcttcaagtgtgagaacaaccgctgcatccccaaccgctggctgtgtgatggagacaatgactgtggcaacagtgaagatgagagcaatgccacctgcagcgcccggacctgcccccccaaccagttcagctgtgccagcggccgctgcatccccatctcctggacctgtgacctggatgatgactgtggggacagaagtgatgagagcgccagctgtgcctaccccacctgcttccccctgacccagttcacctgcaacaacggccgctgcatcaacatcaactggaggtgtgacaatgacaatgactgtggggacaacagtgatgaagctggctgcagccacagctgcagcagcacccagttcaagtgcaacagcggccgctgcatccctgagcactggacctgtgatggagacaatgactgtggggactacagtgatgagacccacgccaactgcaccaaccaggccacccggcccccaggcggctgccacacagatgagttccagtgccgcctggatggcctgtgcatccccctgcgctggaggtgtgatggagacacagactgcatggacagcagtgatgagaagagctgtgaaggagtgacccacgtgtgtgaccccagcgtgaagtttggctgcaaggacagcgcccgctgcatcagcaaggcctgggtgtgtgatggagacaatgactgtgaggacaacagtgatgaggagaactgtgagagcctggcctgcaggcctcccagccacccctgtgccaacaacacctctgtgtgcctgcccccagacaagctgtgtgatggaaatgatgactgtggagatggcagtgatgaaggagagctgtgtgaccagtgcagcctgaacaatggaggctgcagccacaactgcagcgtggcccctggagagggcatcgtgtgcagctgccccctgggcatggagctgggccctgacaaccacacctgccagatccagagctactgtgccaagcacctgaagtgcagccagaagtgtgaccagaacaagttctctgtgaagtgcagctgctatgagggctgggtgctggagccagatggagagagctgccgcagcctggaccccttcaagcccttcatcatcttcagcaacagacatgagatcagaagaattgacctgcacaagggggactacagcgtgctggtgcccggcctgaggaacaccatcgccctggacttccacctgagccagagcgccctgtactggacagatgtggtggaggacaagatctaccggggcaagctgctggacaatggagccctgaccagctttgaggtggtgatccagtatggcctggccaccccagagggcctggccgtggactggattgctggcaacatctactgggtggagagcaacctggaccagatcgaggtggccaagctggatggcaccctgcggaccaccctgctggccggggacatcgagcacccccgggccatcgccctggaccccagagatggcatcctcttctggacagactgggatgccagcctgcccagaattgaagctgcctccatgtctggagctggaagaagaacagtgcaccgggagaccggcagcggcggctggcccaacggcctgactgtggactacctggagaagaggatcctgtggattgatgcccggagtgatgccatctacagcgcccgctatgatggcagcggccacatggaggtgctgcggggccacgagttcctgagccacccctttgctgtgaccctgtatggaggagaggtgtactggacagactggaggaccaacaccctggccaaggccaacaagtggacaggccacaacgtgacagtggtgcagaggaccaacacccagccctttgacctgcaggtgtaccaccccagccggcagcccatggcccccaacccctgtgaggccaatggaggccagggcccctgcagccacctgtgcctgatcaactacaacagaacagtgtcctgtgcctgcccccacctgatgaagctgcacaaggacaacaccacctgctatgagttcaagaagttcctgctgtatgcccggcagatggagatccggggcgtggacctggatgccccctactacaactacatcatctccttcaccgtgcctgacatcgacaacgtgacagtgctggactatgatgcccgggagcagagggtgtactggagcgatgtgaggacccaggccatcaagagggccttcatcaatggaactggagtggagaccgtggtgtctgctgacctgcccaatgcccacggcctggccgtggactgggtgtccaggaacctcttctggaccagctatgacaccaacaagaagcagatcaacgtggcccggctggatggcagcttcaagaatgctgtggtgcagggcctggagcagccccacggcctggtggtgcaccccctgcggggcaagctgtactggacagatggagacaacatctccatggccaacatggatggcagcaacagaaccctgctcttcagcggccagaagggccctgtgggcctggccatcgacttccctgagagcaagctgtactggatcagcagcggcaaccacaccatcaaccgctgcaacctggatggcagcggcctggaggtgattgatgccatgaggagccagctgggcaaggccacagccctggccatcatgggagacaagctgtggtgggccgaccaggtgtctgagaagatgggcacctgcagcaaggcagatggcagcggctctgtggtgctgaggaacagcaccaccctggtgatgcacatgaaggtgtatgatgagagcatccagctggaccacaagggcaccaacccctgcagcgtgaacaacggggactgcagccagctgtgcctgcccaccagcgagaccaccaggagctgcatgtgcacagctggctacagcctgcggagcggccagcaggcctgtgagggcgtgggcagcttcctgctgtacagcgtgcatgagggcatccggggcatccccctggaccccaatgacaagagtgatgccctggtgcctgtgtctggcaccagcctggccgtgggcatcgacttccacgccgagaatgacaccatctactgggtggacatgggcctgagcaccatcagccgggccaagagggaccagacctggagagaagatgtggtgaccaacggcatcggccgggtggagggcattgctgtggactggattgctggcaacatctactggacagaccagggctttgatgtgattgaggtggcccggctgaatggcagcttccgctacgtggtgatcagccagggcctggacaagccccgggccatcaccgtgcaccctgagaagggctacctgttctggacagagtggggccagtaccccagaattgaaagaagccggctggatggaacagagcgggtggtgctggtgaatgtgtccatctcctggcccaacggcatctctgtggactaccaggacggcaagctgtactggtgtgatgccaggacagacaagattgaaagaattgacctggagactggagaaaatcgggaggtggtgctgagcagcaacaacatggacatgttttctgtgtctgtgtttgaggacttcatctactggagcgacaggacccacgccaacggcagcatcaagaggggcagcaaggacaatgccacagattctgtgcccctgaggacaggcatcggcgtgcagctgaaggacatcaaggtgttcaacagagaccggcagaagggcaccaacgtgtgtgctgtggccaatggaggctgccagcagctgtgcctgtaccggggccggggccagagggcctgtgcctgtgcccacggcatgctggctgaagatggagccagctgccgggagtatgccggctacctgctgtacagcgagaggaccatcctgaagagcatccacctgagtgatgagaggaacctgaatgcccctgtgcagccctttgaggaccctgagcacatgaagaatgtgattgccctggcctttgactacagagctggcaccagccctggcacccccaaccgcatcttcttcagtgacatccacttcggcaacatccagcagatcaatgatgatggcagccgccgcatcaccatcgtggagaatgtgggctctgtggagggcctggcctaccaccggggctgggacaccctgtactggaccagctacaccaccagcaccatcaccaggcacacagtggaccagaccaggcctggggcctttgagcgggagaccgtcatcaccatgtctggagatgaccacccccgggcctttgtgctggatgagtgccagaacctgatgttctggaccaactggaatgagcagcaccccagcatcatgagagctgccctgagcggggccaacgtgctgaccctcatcgagaaggacatccgcacccccaacggcctggccatcgaccacagagctgagaagctgtacttcagtgatgccaccctggacaagattgagcgctgtgaatatgatggcagccaccgctacgtgatcctgaagtctgagcctgtgcaccccttcggcctggccgtgtatggagagcacatcttctggacagactgggtgagaagagctgtgcagagggccaacaagcacgtgggcagcaacatgaagctgctgcgggtggacatcccccagcagcccatgggcatcatcgctgtggccaatgacaccaacagctgtgagctgagcccctgccgcatcaacaacggcggctgccaggacctgtgcctgctgacccaccagggccacgtgaactgcagctgccggggcggccgcatcctgcaggatgacctgacctgcagagctgtgaacagcagctgccgggcccaggatgaatttgaatgtgccaacggggagtgcatcaacttcagcctgacctgtgatggagtgccccactgcaaggacaagagtgatgagaagcccagctactgcaacagccgccgctgcaagaagaccttccggcagtgcagcaatggccgctgtgtgagcaacatgctgtggtgcaatggagcagatgactgtggagatggcagtgatgagatcccctgcaacaagacagcctgtggggtgggggagttccgctgcagagatggcacctgcatcggcaacagcagccgctgcaaccagtttgtggactgtgaagatgccagtgatgagatgaactgcagcgccacagactgcagcagctacttccggctgggcgtgaagggcgtgctcttccagccctgtgagaggaccagcctgtgctacgcccccagctgggtgtgtgatggagccaatgactgtggggactacagtgatgagcgggactgccctggggtgaagaggccccgctgccccctgaactactttgcctgccccagcggccgctgcatccccatgtcctggacctgtgacaaggaggatgactgtgaacatggagaagatgagacccactgcaacaagttctgcagcgaggcccagtttgagtgccagaaccaccgctgcatcagcaagcagtggctgtgtgatggcagtgatgactgtggagatggcagtgatgaggccgcccactgtgagggcaagacctgtggccccagcagcttcagctgccccggcacccacgtgtgtgtgcctgagcgctggctgtgtgatggagacaaggactgtgctgatggagcagatgagagcattgctgctggctgcctgtacaacagcacctgtgatgaccgggagttcatgtgccagaaccggcagtgcatccccaagcactttgtgtgtgaccatgaccgggactgtgctgatggcagtgatgagagcccagaatgtgagtaccccacctgtggccccagcgagttccgctgtgccaacggccgctgcctgagcagccggcagtgggagtgtgatggagaaaatgactgccacgaccagagtgatgaggcccccaagaacccccactgcaccagccaggagcacaagtgcaatgccagcagccagttcctgtgcagcagcggccgctgtgtggccgaggccctgctgtgcaatggccaggatgactgtggggacagcagtgatgagcggggctgccacatcaatgaatgtctgagcaggaagctgagcggctgcagccaggactgtgaggacctgaagattggcttcaagtgccgctgcaggcctggcttccggctgaaggatgatggccgcacctgtgctgatgtggatgaatgttccaccaccttcccctgcagccagcgctgcatcaacacccacggcagctacaagtgcctgtgtgtggagggctacgccccccggggcggggacccccacagctgcaaggctgtgacagatgaggagcccttcctgatctttgccaaccgctactacctgaggaagctgaacctggatggcagcaactacaccctgctgaagcagggcctgaacaatgctgtggccctggactttgactaccgggagcagatgatctactggacagatgtgaccacccagggctccatgatccggaggatgcacctgaatggcagcaatgtgcaggtgctgcacaggacaggcctgagcaacccagatggcctggccgtggactgggtgggcggcaacctgtactggtgtgacaagggccgggacaccatcgaggtgtccaagctgaatggagcctacagaacagtgctggtgagcagcggcctgcgggagccccgggccctggtggtggatgtgcagaatggctacctgtactggacagactggggagaccacagcctcatcggcagaattggcatggatggcagcagccgctctgtgattgtggacaccaagatcacctggcccaacggcctgaccctggactatgtgacagagcgcatctactgggcagatgcccgggaggactacattgaatttgccagcctggatggcagcaacagacatgtggtgctgagccaggacatcccccacatctttgccctgaccctgtttgaagattatgtgtactggacagactgggagaccaagagcatcaacagagcccacaagaccaccggcaccaacaagaccctgctgatcagcaccctgcaccggcccatggacctgcacgtgttccacgccctgcggcagccagatgtgcccaaccacccctgcaaggtgaacaacggcggctgcagcaacctgtgcctgctgagccctgggggcggccacaagtgtgcctgccccaccaacttctacctgggcagtgatggccgcacctgtgtgagcaactgcacagccagccagtttgtgtgcaagaatgacaagtgcatccccttctggtggaagtgtgacacagaagatgactgtggggaccacagtgatgagcccccagactgcccagagttcaagtgccggcccggccagttccagtgcagcacaggcatctgcaccaacccagccttcatctgtgatggagacaatgactgccaggacaacagtgatgaggccaactgtgacatccacgtgtgcctgcccagccagttcaagtgcaccaacaccaaccgctgcatccctggcatcttccgctgcaatggccaggacaactgtggagatggagaagatgagcgggactgcccagaggtgacctgtgcccccaaccagttccagtgcagcatcaccaagcgctgcatcccccgggtgtgggtgtgtgaccgggacaatgactgtgtggatggcagtgatgagcccgccaactgcacccagatgacctgtggggtggatgagttccgctgcaaggacagcggccgctgcatcccagcccgctggaagtgtgatggagaagatgactgtggagatggcagtgatgagcccaaggaggagtgtgatgagaggacctgtgagccctaccagttccgctgcaagaacaacagatgtgtgcccggccgctggcagtgtgactatgacaatgactgtggggacaacagtgatgaggagagctgcaccccccggccctgcagcgagagcgagttcagctgtgccaacggccgctgcatcgccggccgctggaagtgtgatggagaccatgactgtgctgatggcagtgatgagaaggactgcaccccccgctgtgacatggaccagttccagtgcaagagcggccactgcatccccctgcgctggaggtgtgatgctgatgctgactgcatggatggcagtgatgaggaggcctgtggcactggagtgaggacctgccccctggatgagttccagtgcaacaacaccctgtgcaagcccctggcctggaagtgtgatggagaagatgactgtggggacaacagtgatgaaaatccagaagaatgtgccaggtttgtgtgcccccccaaccggcccttccgctgcaagaatgacagagtgtgcctgtggattggccggcagtgtgatggaacagacaactgtggagatggaacagatgaggaggactgtgagcccccaacagcccacaccacccactgcaaggacaagaaggagttcctgtgcaggaaccagcgctgcctgagcagcagcctgcgctgcaacatgtttgatgactgtggagatggcagtgatgaggaggactgcagcattgaccccaagctgaccagctgtgccaccaatgccagcatctgtggagatgaggcccgctgtgtgaggacagagaaggccgcctactgtgcctgccgcagcggcttccacacagtgcccggccagcccggctgccaggacatcaatgaatgtctgcgcttcggcacctgcagccagctgtgcaacaacaccaagggcggccacctgtgcagctgtgccaggaacttcatgaagacccacaacacctgcaaggccgagggcagcgagtaccaggtgctgtacatcgcagatgacaatgagatccgcagcctcttccctggccacccccacagcgcctatgagcaggccttccagggagatgaatctgtgagaattgatgccatggatgtgcacgtgaaggccggccgggtgtactggaccaactggcacacaggcaccatctcctaccgcagcctgcccccagctgccccacccaccaccagcaacagacaccggcggcagattgaccggggcgtgacccacctgaacatcagcggcctgaagatgccccggggcatcgccatcgactgggtggccggaaatgtgtactggacagattctggaagagatgtgattgaggtggcccagatgaagggggagaacaggaagaccctcatcagcggcatgattgatgagccccacgccatcgtggtggaccccctgcggggcaccatgtactggagcgactggggcaaccaccccaagattgaaacagctgccatggatggcaccctgcgggagaccctggtgcaggacaacatccagtggcccaccggcctggccgtggactaccacaatgaaagactctactgggcagatgccaagctgtctgtgattggcagcatccggctgaatggaacagaccccatcgtggccgctgacagcaagaggggcctgagccaccccttcagcattgatgtgtttgaggactacatctatggagtgacctacatcaacaacagagtcttcaagatccacaagtttggccacagccccctggtgaacctgactggaggcctgagccacgccagtgatgtggtgctgtaccaccagcacaagcagcctgaggtgaccaacccctgtgacaggaagaagtgtgagtggctgtgcctgctgagccccagcggccctgtgtgcacctgccccaacgggaagaggctggacaatggcacctgtgtgcctgtgcccagccccaccccacctccagatgcccccaggcctggcacctgcaacctgcagtgcttcaacggcggcagctgcttcctgaatgcccggcggcagcccaagtgccgctgccagccccgctacacaggagacaagtgtgagctggaccagtgctgggagcactgcagaaatggaggcacctgtgccgccagccccagcggcatgcccacctgccgctgccccaccggcttcaccggccccaagtgcacccagcaggtgtgtgccggctactgtgccaacaacagcacctgcaccgtgaaccagggcaaccagccccagtgccgctgcctgcccggcttcctgggggaccgctgccagtaccggcagtgcagcggctactgtgaaaattttggcacctgccagatggccgcagatggcagccggcagtgccgctgcacagcctactttgagggcagccgctgtgaggtgaacaagtgcagccgctgcctggagggcgcctgtgtggtgaacaagcagagcggagatgtgacctgcaactgcacagatggccgggtggcccccagctgcctgacctgtgtgggccactgcagcaatggaggcagctgcaccatgaacagcaagatgatgcctgagtgccagtgccccccccacatgacaggcccccgctgtgaggagcacgtgttcagccagcagcagcccggccacatcgccagcatcctgatccccctgctgctgctgctgctgctggtgctggtggccggcgtggtgttctggtacaagagaagagtgcagggcgccaagggcttccagcaccagaggatgaccaatggagccatgaatgtggagatcggcaaccccacctacaagatgtatgagggcggggagccagatgatgtgggcggcctgctggatgctgactttgccctggaccctgacaagcccaccaacttcaccaaccctgtgtatgccaccctgtacatgggcggccacggcagccgccacagcctggccagcacagatgagaagcgggagctgctgggccggggcccagaagatgaaattggagaccccctggcctag

SEQ ID NO: 158109 - DNA, 2142 bp, synthetic construct
  misc_feature 1..2142: note = Description of Artificial Sequence: Synthetic coding sequence
  source 1..2142: mol_type = other DNA
atgctgctggccaccctgctgctgctgctgctgggcggggccctggcccacccagaccgcatcatcttccccaaccacgcctgtgaagatcctcctgctgtgctgctggaggtgcagggcaccctgcagaggcccctggtgcgggacagcaggaccagccctgccaactgcacctggctgatcctgggcagcaaggagcagacagtgaccatccgcttccagaagctgcacctggcctgtggcagcgagcggctgaccctgcggagccccctgcagcccctcatcagcctgtgtgaggccccacccagccccctgcagctgcccggcggcaatgtgaccatcacctacagctatgctggggcccgggcccccatgggccagggcttcctgctgagctacagccaggactggctgatgtgcctgcaggaggagttccagtgcctgaaccaccgctgtgtgtctgctgtgcagagatgtgatggagtggatgcctgtggagatggcagtgatgaggccggctgcagcagtgaccccttccctggcctgacccccaggcctgtgcccagcctgccctgcaatgtgaccctggaggacttctacggcgtcttcagcagccctggctacacccacctggcctctgtgagccacccccagagctgccactggctgctggacccccatgatggccggcggctggccgtgcgcttcaccgccctggacctgggctttggagatgctgtgcacgtgtatgatggccctggccccccagagagcagccggctgctgcggagcctgacccacttcagcaatggcaaggctgtgacagtggagaccctgagcggccaggccgtggtgtcctaccacacagtggcctggagcaatggccggggcttcaatgccacctaccacgtgcggggctactgcctgccctgggaccggccctgtggcctgggcagcggcctgggcgctggggagggcctgggggagcgctgctacagcgaggcccagagatgtgatggctcctgggactgtgctgatggaacagatgaggaggactgccccggctgccccccaggccacttcccctgtggggccgccggcaccagcggggccacagcctgctacctgcctgctgaccgctgcaactaccagaccttctgtgctgatggagcagatgagcggcgctgccgccactgccagcccggcaacttccgctgcagagatgagaagtgtgtgtatgagacctgggtgtgtgatggccagcctgactgtgctgatggcagtgatgagtgggactgcagctatgtgctgcccaggaaggtgatcacagctgctgtgattggcagcctggtgtgtggcctgctgctggtgattgccctgggctgcacctgcaagctgtatgccatccgcacccaggagtacagcatctttgcccccctgagcaggatggaggccgagatcgtgcagcagcaggcccctccttcctatggccagctgattgcccagggcgccatcccccctgtggaggacttccccacagagaaccccaatgacaacagcgtgctgggcaacctgcggagcctgctgcagatcctgcggcaggacatgacccctgggggcggccctggggcccggcggcggcagaggggccgcctgatgaggcggctggtgcggcggctgcggcgctggggcctgctgcccaggaccaacaccccagcccgggccagcgaggcccggagccaggtgaccccatctgctgcccccctggaggccctggatggcggcaccggccctgcccgggagggcggcgctgtgggcggccaggatggagagcaggccccacccctgcccatcaaggcccccctgcccagcgccagcaccagccctgcccccaccaccgtgcctgaggcccctggccccctgcccagcctgcccctggagcccagcctgctgagcggcgtggtgcaggccctgcggggccgcctgctgcccagcctgggccccccaggccccaccaggagccccccaggcccccacacagctgtgctggccctggaggatgaagatgatgtgctgctggtgcccctggccgagcccggggtgtgggtggccgaggctgaagatgagcccctgctgacctag

SEQ ID NO: 158110 - DNA, 1671 bp, synthetic construct
  misc_feature 1..1671: note = Description of Artificial Sequence: Synthetic coding sequence
  source 1..1671: mol_type = other DNA
atgctgctggccaccctgctgctgctgctgctgggcggggccctggcccacccagaccgcatcatcttccccaaccacgcctgtgaagatcctcctgctgtgctgctggaggtgcagggcaccctgcagaggcccctggtgcgggacagcaggaccagccctgccaactgcacctggctgatcctgggcagcaaggagcagacagtgaccatccgcttccagaagctgcacctggcctgtggcagcgagcggctgaccctgcggagccccctgcagcccctcatcagcctgtgtgaggccccacccagccccctgcagctgcccggcggcaatgtgaccatcacctacagctatgctggggcccgggcccccatgggccagggcttcctgctgagctacagccaggactggctgatgtgcctgcaggaggagttccagtgcctgaaccaccgctgtgtgtctgctgtgcagagatgtgatggagtggatgcctgtggagatggcagtgatgaggccggctgcagcagtgaccccttccctggcctgacccccaggcctgtgcccagcctgccctgcaatgtgaccctggaggacttctacggcgtcttcagcagccctggctacacccacctggcctctgtgagccacccccagagctgccactggctgctggacccccatgatggccggcggctggccgtgcgcttcaccgccctggacctgggctttggagatgctgtgcacgtgtatgatggccctggccccccagagagcagccggctgctgcggagcctgacccacttcagcaatggcaaggctgtgacagtggagaccctgagcggccaggccgtggtgtcctaccacacagtggcctggagcaatggccggggcttcaatgccacctaccacgtgcggggctactgcctgccctgggaccggccctgtggcctgggcagcggcctgggcgctggggagggcctgggggagcgctgctacagcgaggcccagagatgtgatggctcctgggactgtgctgatggaacagatgaggaggactgccccggctgccccccaggccacttcccctgtggggccgccggcaccagcggggccacagcctgctacctgcctgctgaccgctgcaactaccagaccttctgtgctgatggagcagatgagcggcgctgccgccactgccagcccggcaacttccgctgcagagatgagaagtgtgtgtatgagacctgggtgtgtgatggccagcctgactgtgctgatggcagtgatgagtgggactgcagctatgtgctgcccaggaaggtgatcacagctgctgtgattggcagcctggtgtgtggcctgctgctggtgattgccctgggctgcacctgcaagctgtatgccatccgcacccaggagtacagcatctttgcccccctgagcaggatggaggccgagatcgtgcagcagcaggcccctccttcctatggccagctgattgcccagggcgccatcccccctgtggaggacttccccacagagaaccccaatgacaacagcgtgctgggcaacctgcggagcctgctgcagatcctgcggcaggacatgacccctgggggcggccctggggcccggcggcggcagaggggccgcctgatgaggcggctgtag

SEQ ID NO: 158111 - DNA, 13968 bp, synthetic construct
  misc_feature 1..13968: note = Description of Artificial Sequence: Synthetic coding sequence
  source 1..13968: mol_type = other DNA
atggaccggggccctgctgctgtggcctgcaccctgctgctggccctggtggcctgcctggccccagccagcggccaggagtgtgacagcgcccacttccgctgtggcagcggccactgcatcccagctgactggaggtgtgatggcaccaaggactgcagtgatgatgctgatgagatcggctgtgctgtggtgacctgccagcagggctacttcaagtgccagagcgagggccagtgcatccccaacagctgggtgtgtgaccaggaccaggactgtgatgatggcagtgatgagcggcaggactgcagccagagcacctgcagcagccaccagatcacctgcagcaatggccagtgcatccccagcgagtaccgctgtgaccacgtgcgggactgcccagatggagcagatgaaaatgactgccagtaccccacctgtgagcagctgacctgtgacaacggggcctgctacaacaccagccagaagtgtgactggaaggtggactgccgggacagcagtgatgagatcaactgcacagagatctgcctgcacaatgagttcagctgtggaaatggagagtgcatcccccgggcctacgtgtgtgaccatgacaatgactgccaggacggcagtgatgaacatgcctgcaactaccccacctgtggcggctaccagttcacctgccccagcggccgctgcatctaccagaactgggtgtgtgatggagaagatgactgcaaggacaatggagatgaagatggctgtgagagcggcccccatgatgtgcacaagtgcagcccccgggagtggagctgcccagagagcggccgctgcatcagcatctacaaggtgtgtgatggcatcctggactgccccggccgggaggatgagaacaacaccagcacaggcaagtactgcagcatgaccctgtgcagcgccctgaactgccagtaccagtgccacgagaccccctacggcggggcctgcttctgccccccaggctacatcatcaaccacaatgacagcaggacctgtgtggagtttgatgactgccagatctggggcatctgtgaccagaagtgtgagagccggcccggccgccacctgtgccactgtgaggagggctacatcctggagcggggccagtactgcaaggccaatgacagctttggagaggccagcatcatcttcagcaatggccgggacctgctgattggagacatccacggccgctccttccgcatcctggtggagagccagaacagaggagtggccgtgggcgtggccttccactaccacctgcagagggtcttctggacagacacagtgcagaacaaggtgttttctgtggacatcaatggcctgaacatccaggaggtgctgaatgtgtctgtggagaccccagagaacctggccgtggactgggtgaacaacaagatctacctggtggagaccaaggtgaacagaattgacatggtgaacctggatggcagctacagagtgaccctcatcacagagaacctgggccacccccggggcattgctgtggaccccaccgtgggctacctgttcttcagtgactgggagagcctgtctggagagcccaagctggagcgggccttcatggatggcagcaacaggaaggacctggtgaagaccaagctgggctggccagctggggtgaccctggacatgatcagcaagagggtgtactgggtggacagcagatttgactacattgaaacagtgacctatgatggcatccagaggaagacagtggtgcacggcggcagcctcatcccccacccctttggagtgtccctgtttgagggccaggtgttcttcacagactggaccaagatggctgtgctgaaggccaacaagttcacagagaccaacccccaggtgtactaccaggccagcctgcggccctacggcgtgacagtgtaccacagcctgcggcagccctatgccaccaacccctgcaaggacaacaatggaggctgtgagcaggtgtgtgtgctgagccacaggacagacaatgatggcctgggcttccgctgcaagtgcaccttcggcttccagctggacacagatgagcggcactgcatcgctgtgcagaacttcctgatcttcagcagccaggtggccatccggggcatccccttcaccctgagcacccaggaggatgtgatggtgcctgtgtctggcaaccccagcttctttgtgggcatcgactttgatgcccaggacagcaccatcttcttcagtgacatgagcaagcacatgatcttcaagcagaagattgatggcaccggccgggagatcctggccgccaacagagtggagaatgtggagagcctggcctttgactggatcagcaagaacctgtactggacagacagccactacaagagcatctctgtgatgaggctggccgacaagaccaggagaacagtggtgcagtacctgaacaaccccaggtctgtggtggtgcacccctttgctggctacctgttcttcacagactggttccggcctgccaagatcatgagggcctggagcgatggcagccacctgctgcctgtgatcaacaccaccctgggctggcccaacggcctggccatcgactgggccgccagccggctgtactgggtggatgcctactttgacaagattgagcacagcacctttgatggcctggacagaagaaggctgggccacatcgagcagatgacccaccccttcggcctggccatctttggagagcacctgttcttcacagactggaggctgggcgccatcatccgggtgaggaaggcagatggaggagagatgaccgtcatccgcagcggcatcgcctacatcctgcacctgaagagctatgatgtgaacatccagacaggcagcaatgcctgcaaccagcccacccaccccaatggagactgcagccacttctgcttccctgtgcccaacttccagagggtgtgtggctgcccctacggcatgaggctggccagcaaccacctgacctgtgagggggaccccaccaatgaaccacccacagagcagtgtggcctcttctccttcccctgcaagaatggccgctgtgtgcccaactactacctgtgtgatggagtggatgactgccacgacaacagtgatgagcagctgtgtggcaccctgaacaacacctgcagcagcagcgccttcacctgtggccacggggagtgcatcccagcccactggaggtgtgacaagagaaatgactgtgtggatggcagtgatgagcacaactgccccacccacgccccagccagctgcctggacacccagtacacctgtgacaaccaccagtgcatcagcaagaactgggtgtgtgacacagacaatgactgtggagatggcagtgatgagaagaactgcaacagcacagagacctgccagcccagccagttcaactgccccaaccaccgctgcatcgacctgagctttgtgtgtgatggagacaaggactgtgtggatggcagtgatgaggtgggctgtgtgctgaactgcacagccagccagttcaagtgtgccagcggggacaagtgcattggagtgaccaacagatgtgatggagtgtttgactgcagcgacaacagtgatgaggccggctgccccacccggcccccaggcatgtgccacagtgatgagttccagtgccaggaggatggcatctgcatccccaacttctgggagtgtgatggccacccagactgcctgtatggcagtgatgagcacaatgcctgtgtgcccaagacctgccccagcagctacttccactgtgacaatggaaactgcatccaccgggcctggctgtgtgaccgggacaatgactgtggggacatgtctgatgagaaggactgccccacccagcccttccgctgccccagctggcagtggcagtgcctgggccacaacatctgtgtgaacctgtctgtggtgtgtgatggcatctttgactgccccaacggcacagatgagagccccctgtgcaatggaaacagctgcagcgacttcaatggaggctgcacccatgaatgtgtgcaggagccctttggagccaagtgcctgtgccccctgggcttcctgctggccaatgacagcaagacctgtgaagatattgatgaatgtgacatcctgggcagctgcagccagcactgctacaacatgaggggcagcttccgctgcagctgtgacaccggctacatgctggagagtgatggccgcacctgcaaggtgacagccagcgagagcctgctgctgctggtggccagccagaacaagatcatcgctgacagcgtgaccagccaggtgcacaacatctacagcctggtggagaatggcagctacatcgtggccgtggactttgacagcatcagcggccgcatcttctggagcgatgccacccagggcaagacctggagcgccttccagaatggaacagaccggcgggtggtgtttgacagcagcatcatcctgacagagaccatcgccatcgactgggtgggcaggaacctgtactggacagattatgccctggagaccatcgaggtgtccaagattgatggcagccacaggacagtgctgatcagcaagaacctgaccaacccccggggcctggccctggaccccaggatgaatgagcacctgctcttctggagcgactggggccaccaccccagaattgagcgggcctccatggatggctccatgaggacagtcatcgtgcaggacaagatcttctggccctgtggcctgaccatcgactaccccaaccggctgctgtacttcatggacagctacctggactacatggacttctgtgactacaacggccaccaccggcggcaggtgattgccagtgacctgatcatccgccacccctatgccctgaccctgtttgaggacagcgtgtactggacagaccgggccaccaggagagtgatgagggccaacaagtggcacggcggcaaccagagcgtggtgatgtacaacatccagtggcccctgggcatcgtggccgtgcaccccagcaagcagcccaacagcgtgaacccctgtgccttcagccgctgcagccacctgtgcctgctgagcagccagggcccccacttctacagctgtgtgtgccccagcggctggagcctgagcccagacctgctgaactgcctgagagatgaccagcccttcctgatcaccgtgcggcagcacatcatcttcggcatcagcctgaaccctgaggtgaagagcaatgatgccatggtgcccatcgccggcatccagaatggcctggatgtggagtttgatgatgctgagcagtacatctactgggtggagaaccctggagagatccaccgggtgaagacagatggcaccaacagaacagtgtttgccagcatctccatggtgggccccagcatgaacctggccctggactggatcagcaggaacctgtacagcaccaaccccaggacccagagcattgaggtgctgaccctgcatggagacatccgctacaggaagaccctgattgccaatgatggaacagccctgggcgtgggcttccccatcggcatcaccgtggaccctgcccggggcaagctgtactggagcgaccagggcacagacagcggcgtgcctgccaagatcgccagcgccaacatggatggcacctctgtgaagaccctcttcaccggcaacctggagcacctggagtgtgtgaccctggacatcgaggagcagaagctgtactgggccgtgacaggccggggcgtgattgaaagaggaaatgtggatggaacagacaggatgatcctggtgcaccagctgagccacccctggggcattgctgtgcatgacagcttcctgtactacacagatgagcagtatgaggtgattgagcgggtggacaaggccaccggggccaacaagatcgtgctgcgggacaacgtgcccaacctgcggggcctgcaggtgtaccacagaagaaatgctgctgagagcagcaatggctgcagcaacaacatgaatgcctgccagcagatctgcctgcctgtgcctgggggcctcttcagctgtgcctgtgccaccggcttcaagctgaacccagacaacagaagctgcagcccctacaacagcttcatcgtggtgtccatgctgagcgccatccggggcttcagcctggagctgagtgaccacagcgagaccatggtgcctgtggccggccagggcagaaatgccctgcacgtggatgtggatgtgagcagcggcttcatctactggtgtgacttcagcagctctgtggccagtgacaatgccatccgccgcatcaagccagatggcagcagcctgatgaacatcgtgacccacggcatcggggagaatggagtgcggggcattgctgtggactgggtggccggcaacctgtacttcaccaatgcctttgtgtctgagaccctgattgaggtgctgcgcatcaacaccacctacagaagagtgctgctgaaggtgacagtggacatgcccaggcacatcgtggtggaccccaagaaccgctacctgttctgggccgactatggccagaggcccaagattgaaagaagcttcctggactgcaccaacagaacagtgctggtgtctgagggcatcgtgaccccccggggcctggccgtggacagaagtgatggctacgtgtactgggtggatgacagcctggacatcatcgcccgcatccgcatcaacggggagaacagcgaggtgatccgctatggcagccgctaccccaccccctacggcatcaccgtgtttgaaaattccatcatctgggtggacaggaacctgaagaagatcttccaggccagcaaggagcctgagaacacagagccccccaccgtcatccgggacaacatcaactggctgagagatgtgaccatctttgacaagcaggtgcagcccaggagccctgctgaggtgaacaacaacccctgcctggagaacaacggcggctgcagccacctgtgctttgccctgcccggcctgcacacccccaagtgtgactgtgccttcggcaccctgcagagtgatggcaagaactgtgccatcagcacagagaacttcctgatctttgccctgagcaacagcctgcggagcctgcacctggaccctgagaaccacagcccccccttccagaccatcaacgtggagaggacagtgatgagcctggactatgacagcgtgtctgaccgcatctacttcacccagaacctggccagcggcgtgggccagatctcctatgccaccctgagcagcggcatccacacccccaccgtgattgccagcggcattggaacagcagatggcatcgcctttgactggatcacccggcgcatctactacagcgactacctgaaccagatgatcaacagcatggctgaagatggcagcaacagaacagtgattgcccgggtgcccaagccccgggccatcgtgctggacccctgccagggctacctgtactgggccgactgggacacccacgccaagattgaaagagccaccctgggcggcaacttccgggtgcccatcgtgaacagcagcctggtgatgcccagcggcctgaccctggactatgaggaggacctgctgtactgggtggatgccagcctgcagagaattgaaagaagcaccctgactggagtggaccgggaggtgattgtgaatgctgctgtgcacgccttcggcctgaccctgtatggccagtacatctactggacagacctgtacacccagaggatctaccgggccaacaagtatgatggcagcggccagatcgccatgaccaccaacctgctgagccagccccggggcatcaacacagtggtgaagaaccagaagcagcagtgcaacaacccctgtgagcagttcaatggaggctgcagccacatctgtgcccctggccccaatggagctgagtgccagtgcccccatgagggcaactggtacctggccaacaacaggaagcactgcatcgtggacaacggggagcgctgtggggccagcagcttcacctgcagcaatggccgctgcatcagcgaggagtggaagtgtgacaatgacaatgactgtggagatggcagtgatgagatggagagcgtgtgtgccctgcacacctgcagccccacagccttcacctgtgccaacggccgctgtgtgcagtacagctaccgctgtgactactacaatgactgtggagatggcagtgatgaagctggctgcctcttccgggactgcaatgccaccacagagttcatgtgcaacaacagacgctgcatcccccgggagttcatctgcaatggagtggacaactgccacgacaacaacaccagtgatgagaagaactgcccagacaggacctgccagagcggctacaccaagtgccacaacagcaacatctgcatcccccgggtgtacctgtgtgatggagacaatgactgtggggacaacagtgatgagaaccccacctactgcaccacccacacctgcagcagcagcgagttccagtgtgccagcggccgctgcatcccccagcactggtactgtgaccaggagacagactgctttgatgccagtgatgagcccgccagctgtggccacagcgagaggacctgcctggctgatgagttcaagtgtgatggcggccgctgcatccccagcgagtggatctgtgatggagacaatgactgtggggacatgtctgatgaggacaagaggcaccagtgccagaaccagaactgcagcgacagcgagttcctgtgtgtgaatgaccggcccccagaccggcgctgcatcccccagagctgggtgtgtgatggagatgtggactgcacagatggctatgatgagaaccagaactgcaccaggaggacctgcagtgaaaatgagttcacctgtggctacggcctgtgcatccccaagatcttccgctgtgacagacacaatgactgtggggactacagtgatgagcggggctgcctgtaccagacctgccagcagaaccagttcacctgccagaatggccgctgcatcagcaagacctttgtgtgtgatgaagataatgactgtggagatggcagtgatgagctgatgcacctgtgccacaccccagagcccacctgcccccctcatgagttcaagtgtgacaatggccgctgcatcgagatgatgaagctgtgcaaccacctggatgactgcctggacaacagtgatgagaagggctgcggcatcaatgaatgtcatgaccccagcatcagcggctgtgaccacaactgcacagacaccctgaccagcttctactgcagctgcaggcctggctacaagctgatgtctgacaagaggacctgtgtggacattgatgaatgtacagagatgccctttgtgtgcagccagaagtgtgaaaatgtgattggcagctacatctgcaagtgtgcccctggctacctgcgggagccagatggcaagacctgccggcagaacagcaacatcgagccctacctgatcttcagcaaccgctactacctgaggaacctgaccattgatggctacttctacagcctcatcctggagggcctggacaacgtggtggccctggactttgacagagtggagaagaggctgtactggattgacacccagaggcaggtgattgaaagaatgttcctgaacaagaccaacaaggagaccatcatcaaccaccggctgcctgctgctgagagcctggccgtggactgggtgtccaggaagctgtactggctggatgcccggctggatggcctgtttgtgtctgacctgaatggaggccacaggaggatgctggcccagcactgtgtggatgccaacaacaccttctgctttgacaacccccggggcctggccctgcacccccagtatggctacctgtactgggccgactggggccaccgggcctacatcggccgggtgggcatggatggcaccaacaagagcgtcatcatcagcaccaagctggagtggcccaacggcatcaccatcgactacaccaatgacctgctgtactgggcagatgcccacctgggctacatcgagtacagcgacctggagggccaccaccgccacacagtgtatgatggagccctgccccacccctttgccatcaccatctttgaggacaccatctactggacagactggaacaccaggacagtggagaagggcaacaagtatgatggcagcaaccggcagaccctggtgaacaccacccaccggccctttgacatccacgtgtaccacccctaccggcagcccatcgtgagcaacccctgtggcaccaacaatggaggctgcagccacctgtgcctgatcaagccaggcggcaagggcttcacctgtgagtgcccagatgacttccgcaccctgcagctgagcggcagcacctactgcatgcccatgtgcagcagcacccagttcctgtgtgccaacaatgagaagtgcatccccatctggtggaagtgtgatggccagaaggactgcagtgatggcagtgatgagctggccctgtgcccccagcgcttctgccgcctgggccagttccagtgcagtgatggcaactgcaccagcccccagaccctgtgcaatgcccaccagaactgcccagatggcagtgatgaggaccggctgctgtgtgagaaccaccactgtgacagcaatgagtggcagtgtgccaacaagcgctgcatccctgagagctggcagtgtgacaccttcaatgactgtgaggacaacagtgatgaggacagcagccactgtgccagcaggacctgcaggcctggccagttccgctgtgccaacggccgctgcatcccccaggcctggaagtgtgatgtggacaatgactgtggggaccacagtgatgagcccatcgaggagtgcatgagcagcgcccacctgtgtgacaacttcacagagttcagctgcaagaccaactaccgctgcatccccaagtgggccgtgtgcaatggagtggatgactgccgggacaacagtgatgagcagggctgtgaggagaggacctgccaccctgtgggggacttccgctgcaagaaccaccactgcatccccctgcgctggcagtgtgatggccagaatgactgtggggacaacagtgatgaggagaactgtgccccccgggagtgcacagagagcgagttccgctgtgtgaaccagcagtgcatccccagccgctggatctgtgaccactacaatgactgtggggacaacagtgatgagcgggactgtgagatgaggacctgccaccctgagtacttccagtgcaccagcggccactgtgtgcacagcgagctgaagtgtgatggcagcgctgactgcctggatgccagtgatgaggccgactgccccacccgcttcccagatggagcctactgccaggccaccatgtttgagtgcaagaaccacgtgtgcatccccccctactggaagtgtgatggagatgatgactgtggagatggcagtgatgaggagctgcacctgtgcctggatgtgccctgcaacagccccaaccgcttccgctgtgacaacaaccgctgcatctacagccatgaggtgtgcaatggagtggatgactgtggagatggaacagatgaaacagaggagcactgcaggaagcccacccccaagccctgcacagaatatgagtacaagtgtggaaatggccactgcatcccccatgacaacgtgtgtgatgatgctgatgactgtggggactggagcgatgagctgggctgcaacaagggcaaggagaggacctgtgccgagaacatctgtgagcagaactgcacccagctgaatgaaggaggcttcatctgcagctgcacagctggctttgagaccaacgtgtttgacaggaccagctgcctggacatcaatgaatgtgagcagtttggcacctgcccccagcactgcaggaacaccaagggcagctatgaatgtgtgtgtgctgatggcttcacctccatgtctgacaggcctgggaagagatgtgccgctgagggcagcagccccctgctgctgctgcctgacaacgtgcgcatcaggaagtacaacctgagcagcgagcgcttcagcgagtacctgcaggatgaggagtacatccaggccgtggactatgactgggaccccaaggacatcggcctgtctgtggtgtactacacagtgcggggggagggcagcagatttggagccatcaagagggcctacatccccaactttgaaagtggaagaaacaacctggtgcaggaggtggacctgaagctgaagtatgtgatgcagccagatggcattgctgtggactgggtgggccgccacatctactggagcgatgtgaagaacaagagaattgaggtggccaagctggatggccgctacaggaagtggctgatcagcacagacctggaccagcctgctgccatcgctgtgaaccccaagctgggcctgatgttctggacagactggggcaaggagcccaagattgagagcgcctggatgaatggagaggacaggaacatcctggtgtttgaggacctgggctggcccaccggcctgagcattgactacctgaacaatgaccgcatctactggagcgacttcaaggaggatgtgattgagaccatcaagtatgatggaacagaccggcgggtgattgccaaggaggccatgaacccctacagcctggacatctttgaggaccagctgtactggatcagcaaggagaagggggaggtgtggaagcagaacaagtttggccagggcaagaaggagaagaccctggtggtgaacccctggctgacccaggtgcgcatcttccaccagctgcgctacaacaagtctgtgcccaacctgtgcaagcagatctgcagccacctgtgcctgctgcggcctgggggctacagctgtgcctgcccccagggcagcagcttcatcgagggcagcaccacagaatgtgatgctgccatcgagctgcccatcaacctgcccccaccctgccgctgcatgcatggaggcaactgctactttgatgaaacagacctgcccaagtgcaagtgccccagcggctacaccgggaagtactgtgagatggccttcagcaagggcatcagccctggcaccacagctgtggccgtgctgctgaccatcctgctgattgtggtgattggagccctggccatcgccggcttcttccactacagaagaacaggcagcctgctgcctgccctgcccaagctgcccagcctgagcagcctggtgaagcccagtgaaaatggaaatggagtgaccttccgctctggagctgacctgaacatggacattggagtgtctggcttcggccctgagacagccatcgaccgctccatggccatgtctgaggactttgtgatggagatgggcaagcagcccatcatctttgagaaccccatgtacagcgcccgggacagcgctgtgaaggtggtgcagcccatccaggtgacagtgtctgaaaatgtggacaacaagaactacggcagccccatcaaccccagcgagatcgtgcctgagaccaaccccaccagccctgctgctgatggcacccaggtgaccaagtggaacctcttcaagaggaagagcaagcagaccaccaactttgagaaccccatctatgcccagatggagaatgagcagaaggagagcgtggccgccaccccaccacccagccccagcctgcctgccaagcccaagccacccagccggcgggaccccacccccacctacagcgccacagaggacaccttcaaggacacagccaacctggtgaaggaggacagcgaggtgtag

SEQ ID NO: 158112 - DNA, 3678 bp, synthetic construct
  misc_feature 1..3678: note = Description of Artificial Sequence: Synthetic coding sequence
  source 1..3678: mol_type = other DNA
atggaccggggccctgctgctgtggcctgcaccctgctgctggccctggtggcctgcctggccccagccagcggccaggagtgtgacagcgcccacttccgctgtggcagcggccactgcatcccagctgactggaggtgtgatggcaccaaggactgcagtgatgatgctgatgagatcggctgtgctgtggtgacctgccagcagggctacttcaagtgccagagcgagggccagtgcatccccaacagctgggtgtgtgaccaggaccaggactgtgatgatggcagtgatgagcggcaggactgcagccagagcacctgcagcagccaccagatcacctgcagcaatggccagtgcatccccagcgagtaccgctgtgaccacgtgcgggactgcccagatggagcagatgaaaatgactgccagtaccccacctgtgagcagctgacctgtgacaacggggcctgctacaacaccagccagaagtgtgactggaaggtggactgccgggacagcagtgatgagatcaactgcacagagatctgcctgcacaatgagttcagctgtggaaatggagagtgcatcccccgggcctacgtgtgtgaccatgacaatgactgccaggacggcagtgatgaacatgcctgcaactaccccacctgtggcggctaccagttcacctgccccagcggccgctgcatctaccagaactgggtgtgtgatggagaagatgactgcaaggacaatggagatgaagatggctgtgagagcggcccccatgatgtgcacaagtgcagcccccgggagtggagctgcccagagagcggccgctgcatcagcatctacaaggtgtgtgatggcatcctggactgccccggccgggaggatgagaacaacaccagcacaggcaagtactgcagcatgaccctgtgcagcgccctgaactgccagtaccagtgccacgagaccccctacggcggggcctgcttctgccccccaggctacatcatcaaccacaatgacagcaggacctgtgtggagtttgatgactgccagatctggggcatctgtgaccagaagtgtgagagccggcccggccgccacctgtgccactgtgaggagggctacatcctggagcggggccagtactgcaaggccaatgacagctttggagaggccagcatcatcttcagcaatggccgggacctgctgattggagacatccacggccgctccttccgcatcctggtggagagccagaacagaggagtggccgtgggcgtggccttccactaccacctgcagagggtcttctggacagacacagtgcagaacaaggtgttttctgtggacatcaatggcctgaacatccaggaggtgctgaatgtgtctgtggagaccccagagaacctggccgtggactgggtgaacaacaagatctacctggtggagaccaaggtgaacagaattgacatggtgaacctggatggcagctacagagtgaccctcatcacagagaacctgggccacccccggggcattgctgtggaccccaccgtgggcaagacagtggtgcatggaggcagcctcatcccccaccccttcggcgtgtccctgtttgagggccaggtgttcttcacagactggaccaagatggctgtgctgaaggccaacaagttcacagagaccaacccccaggtgtactaccaggccagcctgcggccctatggagtgacagtgtaccacagcctgcggcagccctatgccaccaacccctgcaaggacaacaacggcggctgtgagcaggtgtgtgtgctgagccacaggacagacaatgatggcctgggcttccgctgcaagtgcaccttcggcttccagctggacacagatgagcggcactgcatcggccgggagatcctggccgccaacagagtggagaatgtggagagcctggcctttgactggatcagcaagaacctgtactggacagacagccactacaagagcatctctgtgatgaggctggccgacaagaccaggagaacagtggtgcagtacctgaacaaccccaggtctgtggtggtgcacccctttgctggctacctgttcttcacagactggttccggcctgccaagatcatgagggcctggagcgatggcagccacctgctgcccgtcatcaacaccaccctgggctggcccaacggcctggccatcgactgggccgccagccggctgtactgggtggatgcctactttgacaagattgagcacagcacctttgatggcctggacagaagaaggctgggccacatcgagcagatgacccaccccttcggcctggccatctttggagagcacctgttcttcacagactggaggctgggcgccatcatccgggtgaggaaggcagatggaggagagatgaccgtcatccgctctggaattgcctacatcctgcacctgaagagctatgatgtgaacatccagacaggcagcaatgcctgcaaccagcccacccaccccaacggggactgcagccacttctgcttccctgtgcccaacttccagagggtgtgtggctgcccctacggcatgaggctggccagcaaccacctgacctgtgagggggaccccaccaatgagcccccaacagagcagtgtggcctcttctccttcccctgcaagaatggccgctgtgtgcccaactactacctgtgtgatggagtggatgactgccacgacaacagtgatgagcagctgtgtggcaccctgaacaacacctgcagcagcagcgccttcacctgtggccatggagagtgcatcccagcccactggaggtgtgacaagagaaatgactgtgtggatggcagtgatgagcacaactgccccacccacgccccagccagctgcctggacacccagtacacctgtgacaaccaccagtgcatcagcaagaactgggtgtgtgacacagacaatgactgtggagatggcagtgatgagaagaactgcaacagcacagagacctgccagcccagccagttcaactgccccaaccaccgctgcatcgacctgagctttgtgtgtgatggagacaaggactgtgtggatggcagtgatgaggtgggctgtgtgctgaactgcacagccagccagttcaagtgtgccagcggggacaagtgcatcggcgtgaccaacagatgtgatggagtgtttgactgcagcgacaacagtgatgaagctggctgccccaccaggcctcctggcatgtgccacagtgatgagttccagtgccaggaggatggcatctgcatccccaacttctgggagtgtgatggccacccagactgcctgtatggcagtgatgagcacaatgcctgtgtgcccaagacctgccccagcagctacttccactgtgacaatggaaactgcatccaccgggcctggctgtgtgaccgggacaatgactgtggggacatgtctgatgagaaggactgccccacccagcccttccgctgccccagctggcagtggcagtgcctgggccacaacatctgtgtgaacctgtctgtggtgtgtgatggcatctttgactgccccaatggaacagatgagagccccctgtgcagcaagttcccagaccacagcctgctggccatcaacagcttctag

SEQ ID NO: 158113 - DNA, 1941 bp, synthetic construct
  misc_feature 1..1941: note = Description of Artificial Sequence: Synthetic coding sequence
  source 1..1941: mol_type = other DNA
atgctggcccagcactgtgtggatgccaacaacaccttctgctttgacaacccccggggcctggccctgcacccccagtatggctacctgtactgggccgactggggccaccgggcctacatcggccgggtgggcatggatggcaccaacaagagcgtcatcatcagcaccaagctggagtggcccaacggcatcaccatcgactacaccaatgacctgctgtactgggcagatgcccacctgggctacatcgagtacagcgacctggagggccaccaccgccacacagtgtatgatggagccctgccccacccctttgccatcaccatctttgaggacaccatctactggacagactggaacaccaggacagtggagaagggcaacaagtatgatggcagcaaccggcagaccctggtgaacaccacccaccggccctttgacatccacgtgtaccacccctaccggcagcccatcgtgagcaacccctgtggcaccaacaacggcggctgcagccacctgtgcctgatcaagccaggcggcaagggcttcacctgtgaatgtccagatgacttccgcaccctgcagctgagcggcagcacctactgcatgcccatgtgcagcagcacccagttcctgtgtgccaacaatgagaagtgcatccccatctggtggaagtgtgatggccagaaggactgcagtgatggcagtgatgagctggccctgtgcccccagcgcttctgccgcctgggccagttccagtgcagtgatggcaactgcaccagcccccagaccctgtgcaatgcccaccagaactgcccagatggcagtgatgaagatcggctgctgtgtgagaaccaccactgtgacagcaatgagtggcagtgtgccaacaagcgctgcatccctgagagctggcagtgtgacaccttcaatgactgtgaggacaacagtgatgaggacagcagccactgtgccagcaggacctgccggcccggccagttccgctgtgccaacggccgctgcatcccccaggcctggaagtgtgatgtggacaatgactgtggggaccacagtgatgagcccatcgaggagtgcatgagcagcgcccacctgtgtgacaacttcacagagttcagctgcaagaccaactaccgctgcatccccaagtgggccgtgtgcaatggagtggatgactgccgggacaacagtgatgagcagggctgtgaggagaggacctgccaccctgtgggggacttccgctgcaagaaccaccactgcatccccctgcgctggcagtgtgatggccagaatgactgtggggacaacagtgatgaggagaactgtgcccccagagaatgtacagaaagtgagttccgctgtgtgaaccagcagtgcatccccagccgctggatctgtgaccactacaatgactgtggggacaacagtgatgagcgggactgtggcatgaggctgatgaagctgattgtgccccacgccttcctgatggtgcacacagcccggctgctgtgcagcaatgccaagaccatgtttgtgagccgccacatcggaaatgtgatggccatgatgacagtggccatggtgcagatgaagaacttcacctgtgcctggatgtttcctgtgatccaccagacagtgtctggagtgaccaccatcgccgccttcatcgtgatgagatgtgccatggtgtggatgacagtggagatggagctgatgaggcagaggagcacagtggagaaccggcccctgaacctggtgcagaacatgaacatctctgtggccatgggcatcgccttccacatgaccatgtgtgtgatgatgcccatgacagtggtgacaggccccatgaactgggtggccatcaaggagaagaaggagcacgtgctgaagatctatgccagcaagatcgtgcccaactag

SEQ ID NO: 158114 - DNA, 2313 bp, synthetic construct
  misc_feature 1..2313: note = Description of Artificial Sequence: Synthetic coding sequence
  source 1..2313: mol_type = other DNA
atggagaagagagctgctgctggcctggagggcgcccctggggcccgggcccagctggccgtggtgtgcctggtgaacatcttcctgaccggccgcctgagcagcgctgtgcctgccctggccgcctgcagcggcaagctggagcagcacacagaaagaagaggagtcatctacagccctgcctggcccctgaactacccacctggcaccaactgctcctggtacatccagggcgacagaggagacatgatcaccatctccttcaggaactttgatgtggaggagagccaccagtgcagcctggactggctgctgctgggccctgctgccccaccccggcaggaggccttccggctgtgtggcagcgccatccccccagccttcatcagcgcccgggaccacgtgtggatcttcttccacagtgatgccagcagcagcggccaggcccagggcttccggctgagctacatccggggcaagctgggccaggccagctgccaggctgatgagttccgctgtgacaatggcaagtgcctgcccggcccctggcagtgcaacacagtggatgaatgtggagatggcagtgatgagggcaactgcagcgccccagccagcgagcccccaggcagcctgtgccctgggggcaccttcccctgcagcggggcccggagcacccgctgcctgcctgtggagcggcgctgtgatggcctgcaggactgtggagatggcagtgatgaagctggctgcccagacctggcctgtggccggcggctgggcagcttctacggcagctttgccagcccagacctgtttggagctgcccggggccccagcgacctgcactgcacctggctggtggacacccaggacagccggcgggtgctgctgcagctggagctgcggctgggctatgatgattatgtgcaggtgtatgagggcctgggggagcggggggaccggctgctgcagaccctgagctaccgcagcaaccacaggcctgtgtccctggaggccgcccagggccgcctgactgtggcctaccacgcccgggcccggtctgctggccacggcttcaatgccacctaccaggtgaagggctactgcctgccctgggagcagccctgtggcagcagcagtgacagtgatggcggcagcctgggggaccagggctgcttcagcgagccccagagatgtgatggctggtggcactgtgccagcggcagagatgagcagggctgcccagcctgccccccagaccagtacccctgtgagggcggcagcggcctgtgctacaccccagctgaccgctgcaacaaccagaagagctgcccagatggagcagatgagaagaactgcttcagctgccagcccggcaccttccactgcggcaccaacctgtgcatctttgagacctggaggtgtgatggccaggaggactgccaggacggcagtgatgaacatggctgcctggccgctgtgcccaggaaggtgatcacagctgccctgattggcagcctggtgtgtggcctgctgctggtgattgccctgggctgtgccttcaagctgtacagcctgcggacccaggagtaccgggcctttgagacccagatgacccggctggaggccgagtttgtgcggcgggaggccccacccagctatggccagctgattgcccagggcctcatcccccctgtggaggacttccctgtgtacagcgccagccaggcctctgtgctgcagaacctgaggacagccatgaggcggcagatgagaagacatgccagccggcggggccccagcagaagaaggctgggccgcctgtggaacagactcttccaccggccccgggccccccggggccagatccccctgctgacagctgcccggcccagccagacagtgctgggagatggcttcctgcagcctgcccctggggccgccccagaccccccagcccccctgatggacaccggcagcaccagggctgctggggacaggcctccttctgcccctggccgggcccctgaggtgggccccagcggcccccccctgcccagcggcctgcgggaccctgagtgcaggcctgtggacaaggacaggaaggtgtgccgggagcccctggtggatggccctgccccagcagatgccccccgggagccctgcagcgcccaggacccccacccccaggtgtccacagccagcagcaccctgggcccccacagccctgagcccctgggcgtgtgcagaaatcctcctccaccctgcagccccatgctggaggccagtgatgatgaggccctgctggtgtgctag

SEQ ID NO: 158115 - DNA, 858 bp, synthetic construct
  misc_feature 1..858: note = Description of Artificial Sequence: Synthetic coding sequence
  source 1..858: mol_type = other DNA
atgggcaaccacctgcctgccttcggcccccggcccccaggaagaagagaggccctgctgagcccagactgccccctgctgcggctgcaccccaccgggaagctgggccaggccagctgccaggctgatgagttccgctgtgacaatggcaagtgcctgcccggcccctggcagtgcaacacagtggatgaatgtggagatggcagtgatgagggcaactgcagcgccccagccagcgagcccccaggcagcctgtgccctgggggcaccttcccctgcagcggggcccggagcacccgctgcctgcctgtggagcggcgctgtgatggcctgcaggactgtggagatggcagtgatgaagctggctgcccagacctggcctgtggccggcggctgggcagcttctacggcagctttgccagcccagacctgtttggagctgcccggggccccagcgacctgcactgcacctggctggtggacacccaggacagccggcgggtgctgctgcagctggagctgcggctgggctatgatgattatgtgcaggtgtatgagggcctgggggagcggggggaccggctgctgcagaccctgagctaccgcagcaaccacaggcctgtgtccctggaggccgcccagggccgcctgactgtggcctaccacgcccgggcccggtctgctggccacggcttcaatgccacctaccaggtgaagggctactgcctgccctgggagcagccctgtggcagcagcagtgacagtgatggcggcagcctgggggaccagggctgcttcagcgagccccagagatgtgatggctggtggcactgtgccagcggcagagatgagcagtag

SEQ ID NO: 158116 - DNA, 5718 bp, synthetic construct
  misc_feature 1..5718: note = Description of Artificial Sequence: Synthetic coding sequence
  source 1..5718: mol_type = other DNA
atgaggcggcagtggggcgccctgctgctgggcgccctgctgtgtgcccacggcctggccagcagcccagaatgtgcctgtggccgcagccacttcacctgtgctgtgtctgccctgggagaatgtacctgcatcccagcccagtggcagtgtgatggagacaatgactgtggggaccacagtgatgaagatggctgcatcctgcccacctgcagccccctggacttccactgtgacaacgggaagtgcatcagaagatcctgggtgtgtgatggagacaatgactgtgaagatgacagtgatgagcaggactgccccccaagagaatgtgaggaggatgagttcccctgccagaatggctactgcatccgcagcctgtggcactgtgatggagacaatgactgtggggacaacagtgatgagcagtgtgacatgaggaaatgtagtgacaaggagttccgctgcagtgatggcagctgcatcgccgagcactggtactgtgatggagacacagactgcaaggatggcagtgatgaggagaactgccccagcgctgtgcctgccccaccctgcaacctggaggagttccagtgtgcctacggccgctgcatcctggacatctaccactgtgatggagatgatgactgtggggactggagcgatgaaagtgactgcagcagccaccagccctgccgctctggagagttcatgtgtgacagcggcctgtgcatcaatgccggctggaggtgtgatggagatgctgactgtgatgaccagagtgatgaaagaaactgcaccacctccatgtgcacagctgagcagttccgctgccacagcggccgctgtgtgcggctgtcctggaggtgtgatggagaagatgactgtgccgacaacagtgatgaggagaactgtgaaaatacaggcagcccccagtgtgccctggaccagttcctgtgctggaatggccgctgcatcggccagaggaagctgtgcaatggagtgaatgactgtggggacaacagtgatgagagcccccagcagaactgccggcccaggactggagaggagaactgcaatgtgaacaacggcggctgtgcccagaagtgccagatggtgagaggagctgtgcagtgcacctgccacacaggctaccgcctgacagaagatggccacacctgccaggatgtgaatgaatgtgccgaggagggctactgcagccagggctgcaccaacagcgagggcgccttccagtgctggtgtgagaccggctatgagctgcggccagaccggcgcagctgcaaggccctgggccctgagcctgtgctgctgtttgccaacagaattgacatccggcaggtgctgccccacaggtctgagtacaccctgctgctgaacaacctggagaatgccatcgccctggacttccaccaccggcgggagctggtgttctggagcgatgtgaccctggaccgcatcctgcgggccaacctgaatggcagcaatgtggaggaggtggtgtccacaggcctggagagccctgggggcctggccgtggactgggtgcatgacaagctgtactggacagacagcggcaccagcagaattgaggtggccaacctggatggagcccacaggaaggtgctgctgtggcagaacctggagaagccccgggccatcgccctgcaccccatggagggcaccatctactggacagactggggcaacaccccaagaattgaggccagctccatggatggcagcggccgccgcatcatcgctgacacccacctgttctggcccaacggcctgaccattgattatgccggccgcaggatgtactgggtggatgccaagcaccacgtgattgaaagagccaacctggatggcagccacaggaaggccgtcatcagccagggcctgccccacccctttgccatcaccgtgtttgaggacagcctgtactggacagactggcacaccaagagcatcaacagcgccaacaagttcaccgggaagaaccaggagatcatccggaacaagctgcacttccccatggacatccacaccctgcacccccagaggcagcctgctgggaagaacagatgtggggacaacaacggcggctgcacccacctgtgcctgcccagcggccagaactacacctgtgcctgccccaccggcttcaggaagatcagcagccacgcctgtgcccagagcctggacaagttcctgctgtttgcccggaggatggacatccgccgcatcagctttgacacagaggacctgagtgatgatgtgatccccctggctgatgtgcgctctgctgtggccctggactgggacagcagagatgaccacgtgtactggacagatgtgtccacagacaccatcagccgggccaagtgggatggcaccggccaggaggtggtggtggacaccagcctggagagccctgctggcctggccatcgactgggtgaccaacaagctgtactggacagatgctggaacagaccgcatcgaggtggccaacacagatggctccatgaggacagtgctgatctgggagaacctggaccggccccgggacatcgtggtggagcccatgggcggctacatgtactggacagactggggcgccagccccaagattgaaagagctggcatggatgccagcggccggcaggtgatcatcagcagcaacctgacctggcccaacggcctggccatcgactatggcagccagaggctgtactgggcagatgctggcatgaagaccattgaatttgctggcctggatggcagcaagaggaaggtgctgattggcagccagctgccccaccccttcggcctgaccctgtatggagagcgcatctactggacagactggcagaccaagagcatccagagcgctgaccggctgaccggcctggaccgggagaccctgcaggagaacctggagaacctgatggacatccacgtgttccacagaagaagacctcctgtgtccaccccctgtgccatggagaatggaggctgcagccacctgtgcctgcggagccccaaccccagcggcttcagctgcacctgccccaccggcatcaacctgctgagtgatggcaagacctgcagccctggcatgaacagcttcctgatctttgccaggagaattgacatccgcatggtgtccctggacatcccctactttgctgatgtggtggtgcccatcaacatcaccatgaagaacaccatcgccatcggcgtggacccccaggagggcaaggtgtactggagcgacagcaccctgcaccgcatcagccgggccaacctggatggcagccagcacgaggacatcatcaccaccggcctgcagaccacagatggcctggccgtggatgccatcggcaggaaggtgtactggacagacaccggcaccaaccgcatcgaggtgggcaacctggatggctccatgaggaaggtgctggtgtggcagaacctggacagcccccgggccatcgtgctgtaccacgagatgggcttcatgtactggacagactggggagaaaatgccaagctggagaggagcggcatggatggcagtgacagagctgtgctgatcaacaacaacctgggctggcccaacggcctgactgtggacaaggccagcagccagctgctgtgggcagatgcccacacagaaagaattgaagctgctgacctgaatggagccaacagacacaccctggtgtcccctgtgcagcacccctacggcctgaccctgctggacagctacatctactggacagactggcagaccaggagcatccacagagctgacaagggcaccggcagcaatgtcatcctggtgcgcagcaacctgcccggcctgatggacatgcaggccgtggaccgggcccagcccctgggcttcaacaagtgtggcagcagaaatggaggctgcagccacctgtgcctgccccggcccagcggcttcagctgtgcctgccccaccggcatccagctgaagggagatggcaagacctgtgaccccagccctgagacctacctgctcttcagcagccggggcagcatccgccgcatcagcctggacaccagtgaccacacagatgtgcacgtgcctgtgcctgagctgaacaacgtcatcagcctggactatgacagcgtggatggcaaggtgtactacacagatgtgttcctggatgtgatccggcgggctgacctgaatggcagcaacatggagaccgtgattggccggggcctgaagaccacagatggcctggccgtggactgggtggccaggaacctgtactggacagacacaggaagaaacaccatcgaggccagccggctggatggcagctgcaggaaggtgctgatcaacaacagcctggatgagccccgggccatcgctgtgttccccaggaagggctacctgttctggacagactggggccacatcgccaagattgaaagagccaacctggatggcagcgagaggaaggtgctgatcaacacagacctgggctggcccaacggcctgaccctggactatgacacccggcgcatctactgggtggatgcccacctggacagaattgaatctgctgacctgaatggcaagctgcggcaggtgctggtgagccacgtgagccacccctttgccctgacccagcaggaccgctggatctactggacagactggcagaccaagagcatccagagggtggacaagtacagcggcaggaacaaggagaccgtgctggccaacgtggagggcctgatggacatcatcgtggtgagcccccagaggcagacaggcaccaatgcctgtggggtgaacaatggaggctgcacccacctgtgctttgcccgggccagtgactttgtgtgtgcctgcccagatgagccagacagccggccctgcagcctggtgcccggcctggtgcccccagccccccgggccaccggcatgtctgagaagagccctgtgctgcccaacaccccacccaccaccctgtacagcagcaccaccaggaccaggaccagcctggaggaggtggagggccgctgcagcgagagagatgcccggctgggcctgtgtgcccggagcaatgatgctgtgcctgctgcccctggagagggcctgcacatctcctatgccatcggcggcctgctgagcatcctgctgatcctggtggtgattgctgccctgatgctgtaccgccacaagaagagcaagttcacagatcctggcatgggcaacctgacctacagcaaccccagctaccgcaccagcacccaggaggtgaagattgaggccatccccaagccagccatgtacaaccagctgtgctacaagaaggagggcggccctgaccacaactacaccaaggagaagatcaagatcgtggagggcatctgcctgctgtctggagatgatgctgagtgggatgacctgaagcagctgcggagcagccggggcggcctgctgcgggaccacgtgtgcatgaagacagacacagtgtccatccaggccagcagcggcagcctggatgacacagaaacagagcagctgctgcaggaggagcagagcgagtgcagctctgtgcacacagctgccaccccagagcggcggggcagcctgcctgacaccggctggaagcatgagaggaagctgagcagcgagagccaggtgtag

SEQ ID NO: 158117 - DNA, 4848 bp, synthetic construct
  misc_feature 1..4848: note = Description of Artificial Sequence: Synthetic coding sequence
  source 1..4848: mol_type = other DNA
atggaggccgcccctcctggccccccctggcccctgctgctgctgctgctgctgctgctggccctgtgtggctgcccagccccagctgctgccagccccctgctgctgtttgccaacagaagagatgtgcggctggtggatgctgggggcgtgaagctggagagcaccatcgtggtgtctggcctggaggatgctgctgctgtggacttccagttcagcaaaggagctgtgtactggacagatgtgtctgaggaggccatcaagcagacctacctgaaccagacaggagctgctgtgcagaatgtggtgatcagcggcctggtgtccccagatggcctggcctgtgactgggtgggcaagaagctgtactggacagattctgagaccaaccgcatcgaggtggccaacctgaatggcaccagcaggaaggtgctcttctggcaggacctggaccagccccgggccatcgccctggaccctgcccacggctacatgtactggacagactggggcgagaccccccgcatcgagagagctggcatggatggcagcaccaggaagatcatcgtggacagcgacatctactggcccaacggcctgaccatcgacctggaggagcagaagctgtactgggcagatgccaagctgtccttcatccaccgggccaacctggatggcagcttccggcagaaggtggtggagggcagcctgacccacccctttgccctgaccctgagcggggacaccctgtactggacagactggcagaccaggagcatccacgcctgcaacaagaggactggaggcaagaggaaggagatcctgagcgccctgtacagccccatggacatccaggtgctgagccaggagcggcagcccttcttccacacccgctgtgaagaagataatggaggctgcagccacctgtgcctgctgagccccagcgagcccttctacacctgtgcctgccccactggagtgcagctgcaggacaatggccgcacctgcaaggccggggctgaggaggtgctgctgctggcccggaggacagacctgcggcgcatcagcctggacaccccagacttcacagacatcgtgctgcaggtggatgacatcagacatgccatcgccatcgactatgaccccctggagggctacgtgtactggacagatgatgaggtgcgggccatccggcgggcctacctggatggcagcggggcccagaccctggtgaacacagagatcaatgaccctgatggcattgctgtggactgggtggccaggaacctgtactggacagacacaggaacagaccgcatcgaggtgacccggctgaatggcaccagcaggaagatcctggtgtctgaggacctggatgagccccgggccatcgccctgcaccctgtgatgggcctgatgtactggacagactggggcgagaaccccaagattgaatgtgccaacctggatggccaggagcggcgggtgctggtgaatgccagcctgggctggcccaacggcctggccctggacctgcaggagggcaagctgtactggggagatgccaagacagacaagattgaagtcatcaacgtggatggcaccaagaggaggaccctgctggaggacaagctgccccacatcttcggcttcaccctgctgggggacttcatctactggacagactggcagaggaggagcattgaaagagtgcacaaggtgaaggccagcagagatgtgatcatcgaccagctgcctgacctgatgggcctgaaggctgtgaatgtggccaaggtggtgggcaccaacccctgtgccgacagaaatggaggctgcagccacctgtgcttcttcacccctcatgccacccgctgtggctgccccatcggcctggagctgctgagtgacatgaagacctgcatcgtgcctgaggccttcctggtgttcaccagcagagctgccatccaccgcatcagcctggagaccaacaacaatgatgtggccatccccctgactggagtgaaggaggccagcgccctggactttgatgtgagcaacaaccacatctactggacagatgtgtccctgaagaccatcagccgggccttcatgaatggcagctctgtggagcacgtggtggagtttggcctggactacccagagggcatggctgtggactggatgggcaagaacctgtactgggccgacaccggcaccaaccgcatcgaggtggcccggctggatggccagttccggcaggtgctggtgtggagggacctggacaaccccaggagcctggccctggaccccaccaagggctacatctactggacagagtggggcggcaagccccgcatcgtgcgggccttcatggatggcaccaactgcatgaccctggtggacaaggtgggccgggccaatgacctgaccattgattatgctgaccagaggctgtactggacagacctggacaccaacatgattgagagcagcaacatgctgggccaggagcgggtggtgattgctgatgacctgccccaccccttcggcctgacccagtacagcgactacatctactggacagactggaacctgcacagcattgaaagagctgacaagaccagcggcaggaacagaaccctcatccagggccacctggactttgtgatggacatcctggtgttccacagcagccggcaggacggcctgaatgactgcatgcacaacaacggccagtgtggccagctgtgcctggccatccctgggggccaccgctgtggctgtgccagccactacaccctggaccccagcagcaggaactgcagcccccccaccaccttcctgctcttcagccagaagagcgccatcagcaggatgatcccagatgaccagcacagcccagacctgatcctgcccctgcacggcctgagaaatgtgaaggccatcgactatgaccccctggacaagttcatctactgggtggatggccggcagaacatcaagagggccaaggatgatggcacccagccctttgtgctgaccagcctgagccagggccagaacccagaccggcagccccatgacctgagcattgacatctacagcaggaccctcttctggacctgtgaggccaccaacaccatcaacgtgcaccggctgagcggggaggccatgggcgtggtgctgcggggggaccgggacaagccccgggccatcgtggtgaatgctgagcggggctacctgtacttcaccaacatgcaggaccgggccgccaagattgagcgggccgccctggatggaacagagcgggaggtgctcttcaccaccggcctcatccggcctgtggccctggtggtggacaacaccctgggcaagctgttctgggtggatgctgacctgaagagaattgagagctgtgacctgagcggggccaaccggctgaccctggaggatgccaacatcgtgcagcccctgggcctgaccatcctgggcaagcacctgtactggattgaccggcagcagcagatgattgagcgggtggagaagaccaccggggacaagaggacccgcatccagggccgggtggcccacctgaccggcatccatgctgtggaggaggtgtccctggaggagttcagcgcccacccctgtgcccgggacaatggaggctgcagccacatctgcatcgccaagggagatggcaccccccgctgcagctgccctgtgcacctggtgctgctgcagaacctgctgacctgtggggagccccccacctgcagcccagaccagtttgcctgtgccaccggggagattgactgcatccctggggcctggaggtgtgatggcttcccagaatgtgatgaccagagtgatgaggagggctgccctgtgtgcagcgctgcccagttcccctgtgcccggggccagtgtgtggacctgcggctgcgctgtgatggagaggccgactgccaggacagaagtgatgaggccgactgtgatgccatctgcctgcccaaccagttccgctgtgccagcggccagtgtgtgctgatcaagcagcagtgtgacagcttcccagactgcattgatggcagtgatgagctgatgtgtgagatcaccaagcccccatctgatgacagccctgcccacagcagcgccatcggccctgtgattggcatcatcctgagcctgtttgtgatgggcggcgtgtactttgtgtgccagagggtggtgtgccagagatatgctggggccaacggccccttcccccatgaatatgtgtctggcaccccccacgtgcccctgaacttcatcgcccctgggggcagccagcacggccccttcaccggcatcgcctgtgggaagtccatgatgagctctgtgtccctgatgggcggccggggcggcgtgcccctgtatgacagaaatcatgtgactggagccagcagcagcagcagcagcagcaccaaggccaccctgtacccacccatcctgaaccccccacccagccctgccacagaccccagcctgtacaacatggacatgttctacagcagcaacatcccagccacagcccggccctaccggccctacatcatccggggcatggccccacccaccaccccctgcagcacagatgtgtgtgacagcgactacagcgccagccgctggaaggccagcaagtactacctggacctgaacagcgacagcgacccctacccacctccacccaccccccacagccagtacctgtctgctgaggacagctgcccccccagccctgccacagagaggagctacttccacctgtttcctcctccacccagcccctgcacagacagcagctag

SEQ ID NO: 158118 - DNA, 4842 bp, synthetic construct
  misc_feature 1..4842: note = Description of Artificial Sequence: Synthetic coding sequence
  source 1..4842: mol_type = other DNA
atgggcgctgtgctgcggagcctgctggcctgcagcttctgtgtgctgctgcgggccgcccccctgctgctgtatgccaacagaagagacctgcggctggtggatgccaccaacgggaaggaaaatgccaccatcgtggtgggcggcctggaggatgctgctgctgtggactttgtgttcagccacggcctcatctactggagcgatgtgtctgaggaggccatcaagaggacagagttcaacaagacagaatctgtgcagaatgtggtggtgtctggcctgctgagcccagatggcctggcctgtgactggctgggggagaagctgtactggacagacagcgagaccaacagaattgaggtgagcaacctggatggcagcctgaggaaggtgctcttctggcaggagctggaccagccccgggccatcgccctggaccccagcagcggcttcatgtactggacagactggggcgaggtgcccaagattgagcgggccggcatggatggcagcagccgcttcatcatcatcaacagcgagatctactggcccaacggcctgaccctggactatgaggagcagaagctgtactgggcagatgccaagctgaacttcatccacaagagcaacctggatggcaccaaccggcaggccgtggtgaagggcagcctgccccacccctttgccctgaccctgtttgaggacatcctgtactggacagactggagcacccacagcatcctggcctgcaacaagtacaccggggagggcctgcgggagatccacagcgacatcttcagccccatggacatccacgccttcagccagcagaggcagcccaatgccaccaacccctgtggcatcgacaatggaggctgcagccacctgtgcctgatgagccctgtgaagcccttctaccagtgtgcctgccccaccggggtgaagctgctggagaatggcaagacctgcaaggatggagccacagagctgctgctgctggccaggagaacagacctgcggcgcatcagcctggacaccccagacttcacagacatcgtgctgcagctggaggacatcagacatgccatcgccattgattatgaccctgtggagggctacatctactggacagatgatgaggtgcgggccatcagaagaagcttcattgatggcagcggcagccagtttgtggtgacagcccagatcgcccacccagatggcattgctgtggactgggtggccaggaacctgtactggacagacaccggcacagacagaattgaggtgacccggctgaatggcaccatgaggaagatcctgatcagcgaggacctggaggagccccgggccatcgtgctggaccccatggtgggctacatgtactggacagactggggcgagatccccaagattgagcgggccgccctggatggcagtgacagagtggtgctggtgaacaccagcctgggctggcccaacggcctggccctggactatgatgagggcaagatctactggggagatgccaagacagacaagattgaggtgatgaacacagatggcaccggccggcgggtgctggtggaggacaagatcccccacatcttcggcttcaccctgctgggggactatgtgtactggacagactggcagaggaggagcattgagcgggtgcacaagaggtctgctgagcgggaggtgatcatcgaccagctgcctgacctgatgggcctgaaggccaccaacgtgcaccgggtgattggcagcaacccctgtgccgaggagaatggaggctgcagccacctgtgcctgtaccggccccagggcctgcgctgtgcctgccccatcggctttgagctgatcagtgacatgaagacctgcatcgtgcctgaggccttcctgctcttcagccggcgggctgacatccgccgcatcagcctggagaccaacaacaacaacgtggccatccccctgactggagtgaaggaggccagcgccctggactttgatgtgacagacaaccgcatctactggacagacatcagcctgaagaccatcagccgggccttcatgaatggcagcgccctggagcacgtggtggagtttggcctggactacccagagggcatggctgtggactggctgggcaagaacctgtactgggccgacaccggcaccaacagaattgaggtgtccaagctggatggccagcaccggcaggtgctggtgtggaaggacctggacagcccccgggccctggccctggaccctgctgagggcttcatgtactggacagagtggggcggcaagcccaagattgaccgggccgccatggatggcagcgagaggaccaccctggtgcccaacgtgggccgggccaacggcctgaccatcgactatgccaagagaagactctactggacagacctggacaccaacctgattgagagcagcaacatgctgggcctgaaccgggaggtgattgctgatgacctgccccaccccttcggcctgacccagtaccaggactacatctactggacagactggagccgccgcagcattgagcgggccaacaagaccagcggccagaacagaaccatcatccagggccacctggactatgtgatggacatcctggtgttccacagcagccggcagagcggctggaatgaatgtgccagcagcaatggccactgcagccacctgtgcctggccgtgcctgtgggcggctttgtgtgtggctgcccagcccactacagcctgaatgctgacaacagaacctgcagcgcccccaccaccttcctgctcttcagccagaagagcgccatcaacaggatggtgattgatgagcagcagagcccagacatcatcctgcccatccacagcctgagaaatgtgcgggccatcgactatgaccccctggacaagcagctgtactggattgacagccggcagaacatgatcaggaaggcccaggaggatggcagccagggcttcaccgtggtggtgtcctctgtgcccagccagaacctggagatccagccctatgacctgagcattgacatctacagccgctacatctactggacctgtgaggccaccaacgtcatcaacgtgacccggctggatggccgctctgtgggcgtggtgctgaagggggagcaggaccggcccagggctgtggtggtgaaccctgagaagggctacatgtacttcaccaacctgcaggagaggagccccaagattgagcgggccgccctggatggaacagagcgggaggtgctcttcttcagcggcctgagcaagcccatcgccctggccctggacagccggctgggcaagctgttctgggccgacagcgacctgcggcgcatcgagagcagtgacctgagcggggccaacagaattgtgctggaggacagcaacatcctgcagcctgtgggcctgactgtgtttgagaactggctgtactggattgacaagcagcagcagatgattgagaagattgacatgacaggccgggagggccgcaccaaggtgcaggccagaattgcccagctgagtgacatccatgctgtgaaggagctgaacctgcaggagtaccggcagcacccctgtgcccaggacaatggaggctgcagccacatctgcctggtgaagggagatggcaccacccgctgcagctgccccatgcacctggtgctgctgcaggatgagctgagctgtggggagccccccacctgcagcccccagcagttcacctgcttcaccggggagattgactgcatccctgtggcctggaggtgtgatggcttcacagaatgtgaggaccacagtgatgagctgaactgccctgtgtgcagcgagagccagttccagtgtgccagcggccagtgcattgatggagccctgcgctgcaatggagatgccaactgccaggacaagagtgatgagaagaactgtgaggtgctgtgcctgattgaccagttccgctgtgccaacggccagtgcatcggcaagcacaagaagtgtgaccacaacgtggactgcagcgacaagagtgatgagctggactgctaccccacagaggagcccgccccccaggccaccaacacagtgggcagcgtcatcggcgtgattgtgaccatctttgtgtctggaacagtgtacttcatctgccagaggatgctgtgccccaggatgaagggagatggagagaccatgaccaatgactatgtggtgcacggccctgcctctgtgcccctgggctacgtgccccaccccagcagcctgagcggcagcctgcccggcatgagccggggcaagtccatgatcagcagcctgagcatcatgggcggcagcagcggccccccctatgaccgggcccacgtgactggagccagcagcagcagcagcagcagcaccaagggcacctacttccctgccatcctgaaccccccacccagccctgccacagagaggagccactacaccatggagtttggctacagcagcaacagccccagcacccacaggagctacagctaccggccctacagctaccgccactttgccccacccaccaccccctgcagcacagatgtgtgtgacagcgactatgcccccagcaggaggatgacctctgtggccacagccaagggctacaccagtgacctgaactatgacagcgagcctgtgcccccaccacccacccccaggagccagtacctgtctgctgaggagaactatgagagctgcccccccagcccctacacagagaggagctacagccaccacctgtacccacctccacccagcccctgcacagacagcagctag

SEQ ID NO: 158119 - DNA, 4437 bp, synthetic construct
  misc_feature 1..4437: note = Description of Artificial Sequence: Synthetic coding sequence
  source 1..4437: mol_type = other DNA
tgactggaccagccccgggccatcgccctggaccccagcagcggcttcatgtactggacagactggggcgaggtgcccaagattgaaagagctggcatggatggcagcagccgcttcatcatcatcaacagcgagatctactggcccaacggcctgaccctggactatgaggagcagaagctgtactgggcagatgccaagctgaacttcatccacaagagcaacctggatggcaccaaccggcaggccgtggtgaagggcagcctgccccacccctttgccctgaccctgtttgaggacatcctgtactggacagactggagcacccacagcatcctggcctgcaacaagtacacaggagagggcctgcgggagatccacagcgacatcttcagccccatggacatccacgccttcagccagcagaggcagcccaatgccaccaacccctgtggcatcgacaatggaggctgcagccacctgtgcctgatgagccctgtgaagcccttctaccagtgtgcctgccccactggagtgaagctgctggagaatggcaagacctgcaaggatggagccacagagctgctgctgctggcccggaggacagacctgcggcgcatcagcctggacaccccagacttcacagacatcgtgctgcagctggaggacatcagacatgccatcgccatcgactatgaccctgtggagggctacatctactggacagatgatgaggtgcgggccatccgccgctccttcattgatggcagcggcagccagtttgtggtgacagcccagatcgcccacccagatggcattgctgtggactgggtggccaggaacctgtactggacagacacaggaacagaccgcatcgaggtgacccggctgaatggcaccatgaggaagatcctgatcagcgaggacctggaggagccccgggccatcgtgctggaccccatggtgggctacatgtactggacagactggggcgagatccccaagattgaaagagctgccctggatggcagtgacagagtggtgctggtgaacaccagcctgggctggcccaacggcctggccctggactatgatgagggcaagatctactggggagatgccaagacagacaagattgaggtgatgaacacagatggcactggaagaagagtgctggtggaggacaagatcccccacatcttcggcttcaccctgctgggggactatgtgtactggacagactggcagaggaggagcattgaaagagtgcacaagaggtctgctgagcgggaggtgatcatcgaccagctgcctgacctgatgggcctgaaggccaccaacgtgcacagggtcatcggcagcaacccctgtgccgaggagaatggaggctgcagccacctgtgcctgtaccggccccagggcctgcgctgtgcctgccccatcggctttgagctgatcagtgacatgaagacctgcatcgtgcctgaggccttcctgctcttcagcagaagagctgacatccgccgcatcagcctggagaccaacaacaacaacgtggccatccccctgactggagtgaaggaggccagcgccctggactttgatgtgacagacaaccgcatctactggacagacatcagcctgaagaccatcagccgggccttcatgaatggaagtgccctggagcacgtggtggagtttggcctggactacccagagggcatggctgtggactggctgggcaagaacctgtactgggccgacaccggcaccaaccgcatcgaggtgtccaagctggatggccagcaccggcaggtgctggtgtggaaggacctggacagcccccgggccctggccctggaccctgctgagggcttcatgtactggacagagtggggcggcaagcccaagattgacagagctgccatggatggcagcgagaggaccaccctggtgcccaacgtgggccgggccaacggcctgaccattgattatgccaagaggcggctgtactggacagacctggacaccaacctgattgagagcagcaacatgctgggcctgaaccgggaggtgattgctgatgacctgccccaccccttcggcctgacccagtaccaggactacatctactggacagactggagcagaagaagcattgaaagagccaacaagaccagcggccagaacagaaccatcatccagggccacctggactatgtgatggacatcctggtgttccacagcagccggcagagcggctggaatgaatgtgccagcagcaatggccactgcagccacctgtgcctggccgtgcctgtgggcggctttgtgtgtggctgcccagcccactacagcctgaatgctgacaacagaacctgcagcgcccccaccaccttcctgctcttcagccagaagagcgccatcaacaggatggtgattgatgagcagcagagcccagacatcatcctgcccatccacagcctgagaaatgtgcgggccattgattatgaccccctggacaagcagctgtactggattgacagccggcagaacatgatcaggaaggcccaggaggatggcagccagggcttcaccgtggtggtgtcctctgtgcccagccagaacctggagatccagccctatgacctgagcattgacatctacagccgctacatctactggacctgtgaggccaccaacgtcatcaacgtgacccggctggatggccgctctgtgggcgtggtgctgaagggggagcaggaccggcccagggctgtggtggtgaaccctgagaagggctacatgtacttcaccaacctgcaggagaggagccccaagattgaaagagctgccctggatggaacagagcgggaggtgctcttcttcagcggcctgagcaagcccatcgccctggccctggacagccggctgggcaagctgttctgggccgacagcgacctgcggagaattgagagcagtgacctgagcggggccaaccgcatcgtgctggaggacagcaacatcctgcagcctgtgggcctgactgtgtttgagaactggctgtactggattgacaagcagcagcagatgattgagaagattgacatgacaggccgggagggccgcaccaaggtgcaggcccgcatcgcccagctgagtgacatccatgctgtgaaggagctgaacctgcaggagtaccggcagcacccctgtgcccaggacaatggaggctgcagccacatctgcctggtgaagggagatggcaccacccgctgcagctgccccatgcacctggtgctgctgcaggatgagctgagctgtggggagccccccacctgcagcccccagcagttcacctgcttcaccggggagattgactgcatccctgtggcctggaggtgtgatggcttcacagaatgtgaggaccacagtgatgagctgaactgccctgtgtgcagcgagagccagttccagtgtgccagcggccagtgcattgatggagccctgcgctgcaatggagatgccaactgccaggacaagagtgatgagaagaactgtgaggtgctgtgcctgattgaccagttccgctgtgccaacggccagtgcatcggcaagcacaagaagtgtgaccacaacgtggactgcagcgacaagagtgatgagctggactgctaccccacagaggagcccgccccccaggccaccaacacagtgggctctgtgattggagtcatcgtgaccatctttgtgtctggcaccgtgtacttcatctgccagaggatgctgtgccccaggatgaagggagatggagagaccatgaccaatgactatgtggtgcacggccctgcctctgtgcccctgggctacgtgccccaccccagcagcctgagcggcagcctgcccggcatgagccggggcaagtccatgatcagcagcctgagcatcatgggcggcagcagcggccccccctatgaccgggcccacgtgactggagccagcagcagcagcagcagcagcaccaagggcacctacttccctgccatcctgaaccccccacccagccctgccacagagaggagccactacaccatggagtttggctacagcagcaacagccccagcacccacaggagctacagctaccggccctacagctaccgccactttgccccacccaccaccccctgcagcacagatgtgtgtgacagcgactatgcccccagcaggaggatgacctctgtggccacagccaagggctacaccagtgacctgaactatgattctgagcctgtgcccccaccacccacccccaggagccagtacctgtctgcagaagaaaattatgagagctgcccccccagcccctacacagagaggagctacagccaccacctgtacccacctccacccagcccctgcacagacagcagctag

SEQ ID NO: 158120 - DNA, 2382 bp, synthetic construct
  misc_feature 1..2382: note = Description of Artificial Sequence: Synthetic coding sequence
  source 1..2382: mol_type = other DNA
atgggcctgcctgagcccggccccctgcggctgctggccctgctgctgctgctgctgctgctgctgctgctgcagctgcagcacctggccgctgctgctgctgaccccctgctgggcggccagggccctgccaaggactgtgagaaggaccagttccagtgcagaaatgaacgctgcatccccagcgtgtggaggtgtgatgaagatgatgactgcctggaccacagtgatgaagatgactgccccaagaagacctgtgccgacagcgacttcacctgtgacaatggccactgcatccacgagcgctggaagtgtgatggagaggaggagtgcccagatggcagtgatgagagcgaggccacctgcaccaagcaggtgtgcccagctgagaagctgagctgtggccccaccagccacaagtgtgtgcctgcctcctggaggtgtgatggagagaaggactgtgagggcggcgcagatgaagctggctgtgccacctggctgaatgaatgtctgcacaacaacggcggctgcagccacatctgcacagacctgaagattggatttgaatgtacctgcccagctggcttccagctgctggaccagaagacctgtggggacattgatgagtgcaaggaccctgatgcctgcagccagatctgtgtgaactacaagggctacttcaagtgtgagtgctacccaggctatgagatggacctgctgaccaagaactgcaaggctgctgctgggaagagccccagcctcatcttcaccaacagacatgaggtgagaagaattgacctggtgaagaggaactacagccgcctcatccccatgctgaagaatgtggtggccctggatgtggaggtggccaccaaccgcatctactggtgtgacctgagctacaggaagatctacagcgcctacatggacaaggccagtgaccccaaggagcaggaggtgctgattgatgagcagctgcacagccctgagggcctggccgtggactgggtgcacaagcacatctactggacagacagcggcaacaagaccatctctgtggccaccgtggatggcggcagaagaaggaccctcttcagcaggaacctgtctgagccccgggccatcgctgtggaccccctgcggggcttcatgtactggagcgactggggagaccaggccaagattgagaagagcggcctgaatggagtggaccggcagaccctggtgtctgacaacatcgagtggcccaacggcatcaccctggacctgctgagccagaggctgtactgggtggacagcaagctgcaccagctgagcagcattgacttcagcggcggcaacaggaagaccctcatcagcagcacagacttcctgagccaccccttcggcattgctgtgtttgaggacaaggtgttctggacagacctggagaatgaggccatcttcagcgccaaccggctgaatggcctggagatcagcatcctggccgagaacctgaacaacccccatgacatcgtcatcttccacgagctgaagcagccccgggccccagatgcctgtgagctgtctgtgcagcccaatggaggctgtgagtacctgtgcctgcctgccccccagatcagcagccacagccccaagtacacctgtgcctgcccagacaccatgtggctgggccctgacatgaagcgctgctaccgggccccccagagcaccagcaccaccaccctggccagcaccatgaccaggacagtgcctgccaccacccgggcccctggcaccaccgtgcacaggagcacctaccagaaccacagcacagagacccccagcctgacagctgctgtgcccagctctgtgtctgtgccccgggcccccagcatcagccccagcaccctgagccctgccaccagcaaccacagccagcactacgccaatgaagacagcaagatgggcagcacagtgacagctgctgtgattggcatcatcgtgcccatcgtggtgattgccctgctgtgcatgagcggctacctgatctggaggaactggaagaggaagaacaccaagtccatgaactttgacaaccctgtgtacaggaagaccacagaggaggaggatgaagatgagctgcacatcggccgcacagcccagatcggccacgtgtacccagctgccatcagcagctttgaccggcccctgtgggccgagccctgcctgggggagacccgggagcctgaggaccctgccccagccctgaaggagctgtttgtgctgcctggagagcccaggagccagctgcaccagctgcccaagaaccccctgtctgagctgcctgtggtgaagagcaagagggtggccctgagcctggaggatgatggcctgccctag

SEQ ID NO: 158121 - DNA, 2892 bp, synthetic construct
  misc_feature 1..2892: note = Description of Artificial Sequence: Synthetic coding sequence
  source 1..2892: mol_type = other DNA
atgggcctgcctgagcccggccccctgcggctgctggccctgctgctgctgctgctgctgctgctgctgctgcagctgcagcacctggccgctgctgctgctgaccccctgctgggcggccagggccctgccaaggactgtgagaaggaccagttccagtgcagaaatgaacgctgcatccccagcgtgtggaggtgtgatgaagatgatgactgcctggaccacagtgatgaagatgactgccccaagaagacctgtgccgacagcgacttcacctgtgacaatggccactgcatccacgagcgctggaagtgtgatggagaggaggagtgcccagatggcagtgatgagagcgaggccacctgcaccaagcaggtgtgcccagctgagaagctgagctgtggccccaccagccacaagtgtgtgcctgcctcctggaggtgtgatggagagaaggactgtgagggcggcgcagatgaagctggctgtgccaccctgtgtgcccctcatgagttccagtgtggcaacagaagctgcctggccgctgtgtttgtgtgtgatggagatgatgactgtggagatggcagtgatgagcggggctgtgccgaccctgcctgtggcccccgggagttccgctgtggaggagatggcggcggggcctgcatccctgagcgctgggtgtgtgaccggcagtttgactgtgaagatagaagtgatgaagctgctgagctgtgtggccggcccggccctggggccaccagcgccccagctgcctgtgccacagccagccagtttgcctgccgctctggagaatgtgtgcacctgggctggaggtgtgatggagaccgggactgcaaggacaagagtgatgaggccgactgccccctgggcacctgcagaggagatgagttccagtgtggagatggcacctgtgtgctggccatcaagcactgcaaccaggagcaggactgcccagatggcagtgatgaagctggctgcctgcagggcctgaatgaatgtctgcacaacaacggcggctgcagccacatctgcacagacctgaagattggatttgaatgtacctgcccagctggcttccagctgctggaccagaagacctgtggggacattgatgagtgcaaggaccctgatgcctgcagccagatctgtgtgaactacaagggctacttcaagtgtgagtgctacccaggctatgagatggacctgctgaccaagaactgcaaggctgctgctgggaagagccccagcctcatcttcaccaacagacatgaggtgagaagaattgacctggtgaagaggaactacagccgcctcatccccatgctgaagaatgtggtggccctggatgtggaggtggccaccaaccgcatctactggtgtgacctgagctacaggaagatctacagcgcctacatggacaaggccagtgaccccaaggagcaggaggtgctgattgatgagcagctgcacagccctgagggcctggccgtggactgggtgcacaagcacatctactggacagacagcggcaacaagaccatctctgtggccaccgtggatggcggcagaagaaggaccctcttcagcaggaacctgtctgagccccgggccatcgctgtggaccccctgcggggcttcatgtactggagcgactggggagaccaggccaagattgagaagagcggcctgaatggagtggaccggcagaccctggtgtctgacaacatcgagtggcccaacggcatcaccctggacctgctgagccagaggctgtactgggtggacagcaagctgcaccagctgagcagcattgacttcagcggcggcaacaggaagaccctcatcagcagcacagacttcctgagccaccccttcggcattgctgtgtttgaggacaaggtgttctggacagacctggagaatgaggccatcttcagcgccaaccggctgaatggcctggagatcagcatcctggccgagaacctgaacaacccccatgacatcgtcatcttccacgagctgaagcagccccgggccccagatgcctgtgagctgtctgtgcagcccaatggaggctgtgagtacctgtgcctgcctgccccccagatcagcagccacagccccaagtacacctgtgcctgcccagacaccatgtggctgggccctgacatgaagcgctgctaccgggccccccagagcaccagcaccaccaccctggccagcaccatgaccaggacagtgcctgccaccacccgggcccctggcaccaccgtgcacaggagcacctaccagaaccacagcacagagacccccagcctgacagctgctgtgcccagctctgtgtctgtgccccgggcccccagcatcagccccagcaccctgagccctgccaccagcaaccacagccagcactacgccaatgaagacagcaagatgggcagcacagtgacagctgctgtgattggcatcatcgtgcccatcgtggtgattgccctgctgtgcatgagcggctacctgatctggaggaactggaagaggaagaacaccaagtccatgaactttgacaaccctgtgtacaggaagaccacagaggaggaggatgaagatgagctgcacatcggccgcacagcccagatcggccacgtgtacccagctgccatcagcagctttgaccggcccctgtgggccgagccctgcctgggggagacccgggagcctgaggaccctgccccagccctgaaggagctgtttgtgctgcctggagagcccaggagccagctgcaccagctgcccaagaaccccctgtctgagctgcctgtggtgaagagcaagagggtggccctgagcctggaggatgatggcctgccctag

SEQ ID NO: 158122 - DNA, 2103 bp, synthetic construct
  misc_feature 1..2103: note = Description of Artificial Sequence: Synthetic coding sequence
  source 1..2103: mol_type = other DNA
atgggcctgcctgagcccggccccctgcggctgctggccctgctgctgctgctgctgctgctgctgctgctgcagctgcagcacctggccgctgctgctgctgaccccctgctgggcggccagggccctgccaaggactgtgagaaggaccagttccagtgcagaaatgaacgctgcatccccagcgtgtggaggtgtgatgaagatgatgactgcctggaccacagtgatgaagatgactgccccaagaagacctgtgccgacagcgacttcacctgtgacaatggccactgcatccacgagcgctggaagtgtgatggagaggaggagtgcccagatggcagtgatgagagcgaggccacctgcaccaagcaggtgtgcccagctgagaagctgagctgtggccccaccagccacaagtgtgtgcctgcctcctggaggtgtgatggagagaaggactgtgagggcggcgcagatgaagctggctgtgccaccagcctgggcacctgcagaggagatgagttccagtgtggagatggcacctgtgtgctggccatcaagcactgcaaccaggagcaggactgcccagatggcagtgatgaggccggctgcctgcagggcctgaatgaatgtctgcacaacaatggaggctgcagccacatctgcacagacctgaagattggatttgagtgcacctgcccagctggcttccagctgctggaccagaagacctgtggggacattgatgagtgcaaggaccctgatgcctgcagccagatctgtgtgaactacaagggctacttcaagtgtgagtgctacccaggctatgagatggacctgctgaccaagaactgcaaggctgctgctgggaagagccccagcctcatcttcaccaacagacatgaggtgagaagaattgacctggtgaagaggaactacagccgcctcatccccatgctgaagaatgtggtggccctggatgtggaggtggccaccaaccgcatctactggtgtgacctgagctacaggaagatctacagcgcctacatggacaaggccagtgaccccaaggagcaggaggtgctgattgatgagcagctgcacagccctgagggcctggccgtggactgggtgcacaagcacatctactggacagattctggcaacaagaccatctctgtggccaccgtggatggcggcagaagaaggaccctcttcagcaggaacctgtctgagccccgggccatcgctgtggaccccctgcggggcttcatgtactggagcgactggggagaccaggccaagattgagaagagcggcctgaatggagtggaccggcagaccctggtgtctgacaacatcgagtggcccaacggcatcaccctggacctgctgagccagaggctgtactgggtggacagcaagctgcaccagctgagcagcattgacttcagcggcggcaacaggaagaccctcatcagcagcacagacttcctgagccacccctttggaattgctgtgtttgaggacaaggtgttctggacagacctggagaatgaggccatcttcagcgccaaccggctgaatggcctggagatcagcatcctggccgagaacctgaacaacccccatgacatcgtcatcttccacgagctgaagcagccccgggccccagatgcctgtgagctgtctgtgcagcccaacggcggctgtgagtacctgtgcctgcctgccccccagatcagcagccacagccccaagtacacctgtgcctgcccagacaccatgtggctgggccctgacatgaagcgctgctacagagatgccaatgaagacagcaagatgggcagcacagtgacagctgctgtgattggcatcatcgtgcccatcgtggtgattgccctgctgtgcatgagcggctacctgatctggaggaactggaagaggaagaacaccaagtccatgaactttgacaaccctgtgtacaggaagaccacagaggaggaggatgaagatgagctgcacatcggccgcacagcccagatcggccacgtgtacccagcccgggtggccctgagcctggaggatgatggcctgccctag

SEQ ID NO: 158123 - DNA, 2715 bp, synthetic construct
  misc_feature 1..2715: note = Description of Artificial Sequence: Synthetic coding sequence
  source 1..2715: mol_type = other DNA
atgggcctgcctgagcccggccccctgcggctgctggccctgctgctgctgctgctgctgctgctgctgctgcagctgcagcacctggccgctgctgctgctgaccccctgctgggcggccagggccctgccaaggactgtgagaaggaccagttccagtgcagaaatgaacgctgcatccccagcgtgtggaggtgtgatgaagatgatgactgcctggaccacagtgatgaagatgactgccccaagaagacctgtgccgacagcgacttcacctgtgacaatggccactgcatccacgagcgctggaagtgtgatggagaggaggagtgcccagatggcagtgatgagagcgaggccacctgcaccaagcaggtgtgcccagctgagaagctgagctgtggccccaccagccacaagtgtgtgcctgcctcctggaggtgtgatggagagaaggactgtgagggcggcgcagatgaagctggctgtgccaccctgtgtgcccctcatgagttccagtgtggcaacagaagctgcctggccgctgtgtttgtgtgtgatggagatgatgactgtggagatggcagtgatgagcggggctgtgccgaccctgcctgtggcccccgggagttccgctgtggaggagatggcggcggggcctgcatccctgagcgctgggtgtgtgaccggcagtttgactgtgaagatagaagtgatgaagctgctgagctgtgtggccggcccggccctggggccaccagcgccccagctgcctgtgccacagccagccagtttgcctgccgctctggagaatgtgtgcacctgggctggaggtgtgatggagaccgggactgcaaggacaagagtgatgaggccgactgccccctgggcacctgcagaggagatgagttccagtgtggagatggcacctgtgtgctggccatcaagcactgcaaccaggagcaggactgcccagatggcagtgatgaagctggctgcctgcagggcctgaatgaatgtctgcacaacaacggcggctgcagccacatctgcacagacctgaagattggatttgaatgtacctgcccagctggcttccagctgctggaccagaagacctgtggggacattgatgagtgcaaggaccctgatgcctgcagccagatctgtgtgaactacaagggctacttcaagtgtgagtgctacccaggctatgagatggacctgctgaccaagaactgcaaggctgctgctgggaagagccccagcctcatcttcaccaacagacatgaggtgagaagaattgacctggtgaagaggaactacagccgcctcatccccatgctgaagaatgtggtggccctggatgtggaggtggccaccaaccgcatctactggtgtgacctgagctacaggaagatctacagcgcctacatggacaaggccagtgaccccaaggagcaggaggtgctgattgatgagcagctgcacagccctgagggcctggccgtggactgggtgcacaagcacatctactggacagacagcggcaacaagaccatctctgtggccaccgtggatggcggcagaagaaggaccctcttcagcaggaacctgtctgagccccgggccatcgctgtggaccccctgcggggcttcatgtactggagcgactggggagaccaggccaagattgagaagagcggcctgaatggagtggaccggcagaccctggtgtctgacaacatcgagtggcccaacggcatcaccctggacctgctgagccagaggctgtactgggtggacagcaagctgcaccagctgagcagcattgacttcagcggcggcaacaggaagaccctcatcagcagcacagacttcctgagccaccccttcggcattgctgtgtttgaggacaaggtgttctggacagacctggagaatgaggccatcttcagcgccaaccggctgaatggcctggagatcagcatcctggccgagaacctgaacaacccccatgacatcgtcatcttccacgagctgaagcagccccgggccccagatgcctgtgagctgtctgtgcagcccaatggaggctgtgagtacctgtgcctgcctgccccccagatcagcagccacagccccaagtacacctgtgcctgcccagacaccatgtggctgggccctgacatgaagcgctgctaccgggccccccagagcaccagcaccaccaccctggccagcaccatgaccaggacagtgcctgccaccacccgggcccctggcaccaccgtgcacaggagcacctaccagaaccacagcacagagacccccagcctgacagctgctgtgcccagctctgtgtctgtgccccgggcccccagcatcagccccagcaccctgagccctgccaccagcaaccacagccagcactacgccaatgaagacagcaagatgggcagcacagtgacagctgctgtgattggcatcatcgtgcccatcgtggtgattgccctgctgtgcatgagcggctacctgatctggaggaactggaagaggaagaacaccaagtccatgaactttgacaaccctgtgtacaggaagaccacagaggaggaggatgaagatgagctgcacatcggccgcacagcccagatcggccacgtgtacccagcccgggtggccctgagcctggaggatgatggcctgccctag

SEQ ID NO: 158124 - DNA, 1074 bp, synthetic construct
  misc_feature 1..1074: note = Description of Artificial Sequence: Synthetic coding sequence
  source 1..1074: mol_type = other DNA
atggccccccggcgggtgcgctccttcctgcggggcctgcctgccctgctgctgctgctgctcttcctgggcccctggccagctgccagccatggaggcaagtacagccgggagaagaaccagcccaagcccagccccaagcgggagagcggggaggagttcaggatggagaagctgaaccagctgtgggagaaggcccagaggctgcacctgccccctgtgcggctggccgagctgcatgctgacctgaagatccaggagagagatgagctggcctggaagaagctgaagctggatggcctggatgaagatggagagaaggaggcccggctcatccggaacctgaatgtcatcctggccaagtatggcctggatggcaagaaggatgcccggcaggtgaccagcaacagcctgagcggcacccaggaggatggcctggatgacccccggctggagaagctgtggcacaaggccaagaccagcggcaagttctctggagaggagctggacaagctgtggagggagttcctgcaccacaaggagaaggtgcatgagtacaacgtgctgctggagaccctgagcaggacagaggagatccatgaaaatgtcatcagccccagcgacctgagtgacatcaagggctctgtgctgcacagccgccacacagagctgaaggagaagctgcggagcatcaaccagggcctggaccggctgcggcgggtgagccaccagggctacagcacagaggccgagtttgaggagcccagggtcatcgacctgtgggacctggcccagagcgccaacctgacagacaaggagctggaggccttccgggaggagctgaagcactttgaggccaagattgagaagcacaaccactaccagaagcagctggagatcgcccacgagaagctgcggcatgctgagagcgtgggagatggagagcgggtgagccgcagccgggagaagcacgccctgctggagggccgcaccaaggagctgggctacacagtgaagaagcacctgcaggacctgagcggccgcatcagccgggcccggcacaatgagctgtag

SEQ ID NO: 158125 - DNA, 402 bp, synthetic construct
  misc_feature 1..402: note = Description of Artificial Sequence: Synthetic coding sequence
  source 1..402: mol_type = other DNA
atgaactacatgcctggaacagccagcctgattgaggacatcgacaagaagcacctggtgctgctgagagatggccgcaccctgattggcttcctgcggagcattgaccagtttgccaacctggtgctgcaccagacagtggagcgcatccacgtgggcaagaagtacggggacatcccccggggcatctttgtggtgagaggagaaaatgtggtgctgctgggggagattgacctggagaaggagagtgacacccccctgcagcaggtgtccattgaggagatcctggaggagcagagggtggagcagcagaccaagctggaggccgagaagctgaaggtgcaggccctgaaggaccggggcctgagcatccccagggctgacaccctggatgagtactag

SEQ ID NO: 158126 - DNA, 588 bp, synthetic construct
  misc_feature 1..588: note = Description of Artificial Sequence: Synthetic coding sequence
  source 1..588: mol_type = other DNA
atggccgcccctcctggagagtacttctctgtgggcagccaggtgtcctgcaggacctgccaggagcagaggctgcagggcgaggtggtggcctttgactaccagagcaagatgctggccctgaagtgccccagcagcagcggcaagcccaaccacgccgacatcctgctgatcaacctgcagtatgtgtctgaggtggagatcatcaatgacagaacagagaccccaccacccctggccagcctgaatgtgtccaagctggccagcaaggccaggacagagaaggaggagaagctgagccaggcctatgccatctctgctggggtgtccctggagggccagcagctgttccagaccatccacaagaccatcaaggactgcaagtggcaggagaagaacatcgtggtgatggaggaggtggtgatcaccccaccctaccaggtggagaactgcaagggcaaggagggcagcgccctgagccacgtgaggaagatcgtggagaagcacttcagagatgtggagagccagaagatcctgcagaggagccaggcccagcagccccagaaggaggccgccctgagcagctag

SEQ ID NO: 158127 - DNA, 588 bp, synthetic construct; identical to SEQ ID NO: 158126
  misc_feature 1..588: note = Description of Artificial Sequence: Synthetic coding sequence
  source 1..588: mol_type = other DNA

SEQ ID NO: 158128 - DNA, 288 bp, synthetic construct
  misc_feature 1..288: note = Description of Artificial Sequence: Synthetic coding sequence
  source 1..288: mol_type = other DNA
atgctgttctacagcttcttcaagagcctggtgggcaaggatgtggtggtggagctgaagaatgacctgagcatctgtggcaccctgcacagcgtggaccagtacctgaacatcaagctgacagacatctctgtgacagatcctgagaagtacccccacatgctgtctgtgaagaactgcttcatccggggctctgtggtgcgctacgtgcagctgcctgcagatgaggtggacacccagctgctgcaggatgctgccaggaaggaggccctgcagcagaagcagtag

SEQ ID NO: 158129 - DNA, 288 bp, synthetic construct; identical to SEQ ID NO: 158128
  misc_feature 1..288: note = Description of Artificial Sequence: Synthetic coding sequence
  source 1..288: mol_type = other DNA

SEQ ID NO: 158130 - DNA, 288 bp, synthetic construct; identical to SEQ ID NO: 158128
  misc_feature 1..288: note = Description of Artificial Sequence: Synthetic coding sequence
  source 1..288: mol_type = other DNA

SEQ ID NO: 158131 - DNA, 288 bp, synthetic construct; identical to SEQ ID NO: 158128
  misc_feature 1..288: note = Description of Artificial Sequence: Synthetic coding sequence
  source 1..288: mol_type = other DNA

SEQ ID NO: 158132 - DNA, 288 bp, synthetic construct; identical to SEQ ID NO: 158128
  misc_feature 1..288: note = Description of Artificial Sequence: Synthetic coding sequence
  source 1..288: mol_type = other DNA

SEQ ID NO: 158133 - DNA, 288 bp, synthetic construct; identical to SEQ ID NO: 158128
  misc_feature 1..288: note = Description of Artificial Sequence: Synthetic coding sequence
  source 1..288: mol_type = other DNA

SEQ ID NO: 158134 - DNA, 309 bp, synthetic construct
  misc_feature 1..309: note = Description of Artificial Sequence: Synthetic coding sequence
  source 1..309: mol_type = other DNA
atggctgatgatgtggaccagcagcagaccaccaacacagtggaggagcccctggacctgatccggctgagcctggatgagcgcatctacgtgaagatgagaaatgaccgggagctgcggggccgcctgcacgcctatgaccagcacctgaacatgatcctgggagatgtggaggagaccgtgaccaccatcgagattgatgaggagacctatgaggagatctacaagagcaccaagaggaacatccccatgctgtttgtgagaggagatggagtggtgctggtggccccacccctgcgggtgggctag

SEQ ID NO: 158135 - DNA, 420 bp, synthetic construct
  misc_feature 1..420: note = Description of Artificial Sequence: Synthetic coding sequence
  source 1..420: mol_type = other DNA
atgctgcccctgagcctgctgaagacagcccagaaccaccccatgctggtggagctgaagaatggagagacctacaacggccacctggtgtcctgtgacaactggatgaacatcaacctgcgggaggtgatctgcaccagcagagatggagacaagttctggaggatgcctgagtgctacatccggggcagcaccatcaagtacctgcgcatcccagatgagatcatcgacatggtgaaggaggaggtggtggccaagggccggggccggggcggcctgcagcagcagaagcagcagaagggccggggcatgggcggggccggccggggcgtgtttggaggccggggccggggcggcatccctggcaccggccggggccagcctgagaagaagccaggccggcaggccggcaagcagtag

SEQ ID NO: 158136 - DNA, 420 bp, synthetic construct; identical to SEQ ID NO: 158135
  misc_feature 1..420: note = Description of Artificial Sequence: Synthetic coding sequence
  source 1..420: mol_type = other DNA

SEQ ID NO: 158137 - DNA, 276 bp, synthetic construct
  misc_feature 1..276: note = Description of Artificial Sequence: Synthetic coding sequence
  source 1..276: mol_type = other DNA
atggccgccaatgccaccaccaaccccagccagctgctgcccctggagctggtggacaagtgcatcggcagccgcatccacatcgtgatgaagagtgacaaggagatcgtgggcaccctgctgggctttgatgactttgtgaacatggtgctggaggatgtgacagaatttgagatcaccccagagggccgccgcatcaccaagctggaccagatcctgctgaatggaaacaacatcaccatgctggtgcctggaggagagggccctgaggtgtag

SEQ ID NO: 158138 - DNA, 243 bp, synthetic construct
  misc_feature 1..243: note = Description of Artificial Sequence: Synthetic coding sequence
  source 1..243: mol_type = other DNA
atgagcctgaggaagcagacccccagcgacttcctgaagcagatcatcggccggcctgtggtggtgaagctgaacagcggcgtggactaccggggcgtgctggcctgcctggatggctacatgaacatcgccctggagcagacagaggagtatgtgaatggccagctgaagaacaagtatggagatgccttcatccggggcaacaacgtgctgtacatcagcacccagaagaggaggatgtag

SEQ ID NO: 158139 - DNA, 243 bp, synthetic construct; identical to SEQ ID NO: 158138
  misc_feature 1..243: note = Description of Artificial Sequence: Synthetic coding sequence
  source 1..243: mol_type = other DNA

SEQ ID NO: 158140 - DNA, 243 bp, synthetic construct; identical to SEQ ID NO: 158138
  misc_feature 1..243: note = Description of Artificial Sequence: Synthetic coding sequence
  source 1..243: mol_type = other DNA

SEQ ID NO: 158141 - DNA, 243 bp, synthetic construct; identical to SEQ ID NO: 158138
  misc_feature 1..243: note = Description of Artificial Sequence: Synthetic coding sequence
  source 1..243: mol_type = other DNA

SEQ ID NO: 158142 - DNA, 312 bp, synthetic construct
  misc_feature 1..312: note = Description of Artificial Sequence: Synthetic coding sequence
  source 1..312: mol_type = other DNA
atggctgacaaggagaagaagaagaaggagagcatcctggacctgagcaagtacatcgacaagaccatccgggtgaagttccagggcggccgggaggccagcggcatcctgaagggctttgaccccctgctgaacctggtgctggatggcaccatcgagtacatgagggaccctgatgaccagtacaagctgacagaggacacccggcagctgggcctggtggtgtgccggggcacctctgtggtgctgatctgcccccaggacggcatggaggccatccccaaccccttcatccagcagcaggatgcctag

SEQ ID NO: 158143 - DNA, 1116 bp, synthetic construct
  misc_feature 1..1116: note = Description of Artificial Sequence: Synthetic coding sequence
  source 1..1116: mol_type = other DNA
atgtctgcccaggcccagatgagggccctgctggaccagctgatgggcacagccagagatggagatgagacccggcagagggtgaagttcacagatgacagagtgtgcaagagccacctgctggactgctgcccccatgacatcctggccggcaccaggatggacctgggggagtgcaccaagatccatgacctggccctgcgggctgactatgaaattgccagcaaggagcgggacctcttctttgagctggatgccatggaccacctggagagcttcatcgccgagtgtgacagaagaacagagctggccaagaagaggctggccgagacccaggaggagatctctgctgaggtgtctgccaaggccgagaaggtgcatgagctgaatgaggagatcggcaagctgctggccaaggccgagcagctgggcgctgagggcaatgtggatgagagccagaagatcctgatggaggtggagaaggtgcgggccaagaagaaggaggccgaggaggagtacagaaacagcatgcctgccagcagcttccagcagcagaagctgcgggtgtgtgaggtgtgcagcgcctacctgggcctgcatgacaatgaccggcggctggccgaccactttggaggcaagctgcacctgggcttcatccagatccgggagaagctggaccagctgaggaagacagtggccgagaagcaggagaagaggaaccaggaccggctgcggcggcgggaggagcgggagcgggaggagcggctgagccgccgcagcggcagcaggacccgggacagaagaagaagccgcagccgggacagaagaagaagaagaagccgcagcaccagccgggagaggaggaagctgagccgcagccgcagccgggacagacaccggcggcacaggagccgcagccgcagccacagccggggccaccggcgggccagccgggacagaagtgccaagtacaagttcagccgggagcgggccagccgggaggagagctgggagagcggccgctctgagcggggccccccagactggaggctggagagcagcaatggcaagatggccagcagaagaagtgaggagaaggaggccggggagatctag

SEQ ID NO: 158144 - DNA, 978 bp, synthetic construct
  misc_feature 1..978: note = Description of Artificial Sequence: Synthetic coding sequence
  source 1..978: mol_type = other DNA
atgtctgcccaggcccagatgagggccctgctggaccagctgatgggcacagccagagatggagatgagacccggcagagggtgaagttcacagatgacagagtgtgcaagagccacctgctggactgctgcccccatgacatcctggccggcaccaggatggacctgggggagtgcaccaagatccatgacctggccctgcgggctgactatgaaattgccagcaaggagcgggacctcttctttgagctggatgccatggaccacctggagagcttcatcgccgagtgtgacagaagaacagagctggccaagaagaggctggccgagacccaggaggagatctctgctgaggtgtctgccaaggccgagaaggtgcatgagctgaatgaggagatcggcaagctgctggccaaggccgagcagctgggcgctgagggcaatgtggatgagagccagaagatcctgatggaggtggagaaggtgcgggccaagaagaaggaggccgaggaggagtacagaaacagcatgcctgccagcagcttccagcagcagaagctgcgggtgtgtgaggtgtgcagcgcctacctgggcctgcatgacaatgaccggcggctggccgaccactttggaggcaagctgcacctgggcttcatccagatccgggagaagctggaccagctgaggaagacagtggccgagaagcaggagaagaggaaccaggaccggctgcggcggcgggaggagcgggagcgggaggagcggctgagccgccgcagcggcagcaggacccgggacagaagaagaagccgcagccgggacagaagaagaagaagaagccgcagcaccagccgggagaggaggaagctgagccgcagccgcagccgggacagacaccggcggcacaggagccgcagccgcagccacagccggggccaccggcgggccagccgggacagaagtgccaagtacaagtag

SEQ ID NO: 158145 - DNA, 819 bp, synthetic construct
  misc_feature 1..819: note = Description of Artificial Sequence: Synthetic coding sequence
  source 1..819: mol_type = other DNA
atggacctgggagaatgtaccaagatccatgacctggccctgcgggctgactatgagatcgccagcaaggagcgggacctcttctttgagctggatgccatggaccacctggagagcttcatcgcagaatgtgacagaagaacagagctggccaagaagaggctggccgagacccaggaggagatctctgctgaggtgtctgccaaggccgagaaggtgcatgagctgaatgaggagatcggcaagctgctggccaaggccgagcagctgggcgctgagggcaatgtggatgagagccagaagatcctgatggaggtggagaaggtgcgggccaagaagaaggaggccgaggaggagtacagaaattccatgcctgccagcagcttccagcagcagaagctgcgggtgtgtgaggtgtgcagcgcctacctgggcctgcatgacaatgaccggcggctggccgaccactttggaggcaagctgcacctgggcttcatccagatccgggagaagctggaccagctgaggaagacagtggccgagaagcaggagaagaggaaccaggaccggctgcggcggcgggaggagcgggagcgggaggagcggctgagcagaagaagtggcagcaggacccgggacagaagaagaagccgcagccgggacagaagaagaagaagaagccgcagcaccagccgggagaggaggaagctgagccgcagccgcagccgggacagacacagaagacacaggagccgcagccgcagccacagccggggccacagaagagccagccgggacagaagtgccaagtacaagtag

SEQ ID NO: 158146 - DNA, 978 bp, synthetic construct; identical to SEQ ID NO: 158144
  misc_feature 1..978: note = Description of Artificial Sequence: Synthetic coding sequence
  source 1..978: mol_type = other DNA

SEQ ID NO: 158147 - DNA, 99 bp, synthetic construct
  misc_feature 1..99: note = Description of Artificial Sequence: Synthetic coding sequence
  source 1..99: mol_type = other DNA
atggacctgggagaatgtaccaagatccatgacctggccctgcgggctgactatgagatcgccagcaaggagcgggacctcttctttgagctggactag

SEQ ID NO: 158148 - DNA, 549 bp, synthetic construct
  misc_feature 1..549: note = Description of Artificial Sequence: Synthetic coding sequence
  source 1..549: mol_type = other DNA
atggaccacctggagagcttcatcgccgagtgtgacagaagaacagagctggccaagaagaggctggccgagacccaggaggagatctctgctgaggtgtctgccaaggccgagaaggtgcatgagctgaatgaggagatcggcaagctgctggccaaggccgagcagctgggcgctgagggcaatgtggatgagagccagaagatcctgatggaggtggagaaggtgcgggccaagaagaaggaggccgaggaggagtacagaaacagcatgcctgccagcagcttccagcagcagaagctgcgggtgtgtgaggtgtgcagcgcctacctgggcctgcatgacaatgaccggcggctggccgaccactttggaggcaagctgcacctgggcttcatccagatccgggagaagctggaccagctgaggaagacagtggccgagaagcaggagaagaggaaccaggaccggctgcggcggcgggaggagcgggagcgggaggagcggctgagccgccgcagcggcagcaggacccgggacagaagatag

SEQ ID NO: 158149 - DNA, 183 bp, synthetic construct
  misc_feature 1..183: note = Description of Artificial Sequence: Synthetic coding sequence
  source 1..183: mol_type = other DNA
tgaagaagaagaagccgcagccgggacagaagaagaagaagaagccgcagcaccagccgggagaggaggaagctgagccgcagccgcagccgggacagacacagaagacacaggagccgcagccgcagccacagccggggccacagaagagccagccgggacagaagtgccaagtacaagtag

SEQ ID NO: 158150 - DNA, 255 bp, synthetic construct
  misc_feature 1..255: note = Description of Artificial Sequence: Synthetic coding sequence
  source 1..255: mol_type = other DNA
atggaccacctggagagcttcatcgccgagtgtgacagaagaacagagctggccaagaagaggctggccgagacccaggaggagatctctgctgaggtgtctgccaaggccgagaaggtgcatgagctgaatgaggagatcggcaagctgctggccaaggccgagcagctgggcgctgagggcaatgtggatgagagccagaagatcctgatggaggtggagaaggtgcgggccaagaagaaggaggccgagtag

SEQ ID NO: 158151 - DNA, 1176 bp, synthetic construct
  misc_feature 1..1176: note = Description of Artificial Sequence: Synthetic coding sequence
  source 1..1176: mol_type = other DNA
atgcctgcctacctgaacctgcagggctctgtgaggaaggccccccacagccccagccgggacaccacccggcagaggatcaagttcagtgatgacagagtgtgcaagagccacctgctgaactgctgcccccatgatgtgctgagcggcaccaggatggacctgggagaatgtctgaaggtgcatgacctggccctgcgggctgactatgagatcgccagcaaggagcaggacttcttctttgagctggatgccatggaccacctgcagagcttcatcgctgactgtgacagaagaacagaggtggccaagaagaggctggccgagacccaggaggagatctctgctgaggtggccgccaaggccgagcgggtgcatgagctgaatgaggagatcggcaagctgctggccaaggtggagcagctgggcgctgagggcaatgtggaggagagccagaaggtgatggatgaggtggagaaggcccgggccaagaagcgggaggccgaggaggtgtacagaaattccatgcctgccagcagcttccagcagcagaagctgcgggtgtgtgaggtgtgcagcgcctacctgggcctgcatgacaatgaccggcggctggccgaccactttggaggcaagctgcacctgggcttcatcgagatccgggagaagctggaggagctgaagagggtggtggccgagaagcaggagaagaggaaccaggagcggctgaagagaagagaggagcgggagcgggaggagcgggagaagctgcggcgcagccgcagccacagcaagaaccccaagaggagccgcagccgggagcaccggcggcacaggagccgctccatgagccgggagaggaagaggaggaccaggagcaagagccgggagaagaggcaccgccacaggagccgcagcagcagccgcagccgcagccgcagccaccagaggagccgccacagcagccgggacaggagccgggagaggagcaagaggaggagcagcaaggagcgcttccgggaccaggacctggccagctgtgaccgggacaggagcagccgggacaggagcccccgggaccgggacaggaaggacaagaagaggagctatgagagcgccaacggccgctctgaggaccggcgcagcagcgaggagcgggaggccggggagatctag

SEQ ID NO: 158152 - DNA, 1179 bp, synthetic construct
  misc_feature 1..1179: note = Description of Artificial Sequence: Synthetic coding sequence
  source 1..1179: mol_type = other DNA
atgtctgcccaggcccagatgagggccatgctggaccagctgatgggcaccagcagagatggagacaccacccggcagaggatcaagttcagtgatgacagagtgtgcaagagccacctgctgaactgctgcccccatgatgtgctgagcggcaccaggatggacctgggggagtgcctgaaggtgcatgacctggccctgcgggctgactatgaaattgccagcaaggagcaggacttcttctttgagctggatgccatggaccacctgcagagcttcatcgctgactgtgacagaagaacagaggtggccaagaagaggctggccgagacccaggaggagatctctgctgaggtggccgccaaggccgagcgggtgcatgagctgaatgaggagatcggcaagctgctggccaaggtggagcagctgggcgctgagggcaatgtggaggagagccagaaggtgatggatgaggtggagaaggcccgggccaagaagcgggaggccgaggaggtgtacagaaacagcatgcctgccagcagcttccagcagcagaagctgcgggtgtgtgaggtgtgcagcgcctacctgggcctgcatgacaatgaccggcggctggccgaccactttggaggcaagctgcacctgggcttcatcgagatccgggagaagctggaggagctgaagagggtggtggccgagaagcaggagaagaggaaccaggagcggctgaagaggcgggaggagcgggagcgggaggagcgggagaagctgcggcgcagccgcagccacagcaagaaccccaagaggagccgcagccgggagcacagaagacacaggagccgctccatgagccgggagaggaagaggaggaccaggagcaagagccgggagaagaggcaccgccacaggagccgcagcagcagccgcagccgcagccgcagccaccagaggagccgccacagcagccgggacaggagccgggagaggagcaagagaagaagcagcaaggagcgcttccgggaccaggacctggccagctgtgaccgggacaggagcagccgggacaggagcccccgggaccgggacaggaaggacaagaagaggagctatgaaagtgccaacggccgctcagaagatagaagaagcagcgaggagcgggaggccggggagatctag

SEQ ID NO: 158153 - DNA, 1170 bp, synthetic construct
  misc_feature 1..1170: note = Description of Artificial Sequence: Synthetic coding sequence
  source 1..1170: mol_type = other DNA
atggtgatccacagccagctgaagaagatccagggcgccagcgagaggatgggagacaccacccggcagaggatcaagttcagtgatgacagagtgtgcaagagccacctgctgaactgctgcccccatgatgtgctgagcggcaccaggatggacctgggagaatgtctgaaggtgcatgacctggccctgcgggctgactatgagatcgccagcaaggagcaggacttcttctttgagctggatgccatggaccacctgcagagcttcatcgctgactgtgacagaagaacagaggtggccaagaagaggctggccgagacccaggaggagatctctgctgaggtggccgccaaggccgagcgggtgcatgagctgaatgaggagatcggcaagctgctggccaaggtggagcagctgggcgctgagggcaatgtggaggagagccagaaggtgatggatgaggtggagaaggcccgggccaagaagcgggaggccgaggaggtgtacagaaattccatgcctgccagcagcttccagcagcagaagctgcgggtgtgtgaggtgtgcagcgcctacctgggcctgcatgacaatgaccggcggctggccgaccactttggaggcaagctgcacctgggcttcatcgagatccgggagaagctggaggagctgaagagggtggtggccgagaagcaggagaagaggaaccaggagcggctgaagagaagagaggagcgggagcgggaggagcgggagaagctgcggcgcagccgcagccacagcaagaaccccaagaggagccgcagccgggagcaccggcggcacaggagccgctccatgagccgggagaggaagaggaggaccaggagcaagagccgggagaagaggcaccgccacaggagccgcagcagcagccgcagccgcagccgcagccaccagaggagccgccacagcagccgggacaggagccgggagaggagcaagaggaggagcagcaaggagcgcttccgggaccaggacctggccagctgtgaccgggacaggagcagccgggacaggagcccccgggaccgggacaggaaggacaagaagaggagctatgagagcgccaacggccgctctgaggaccggcgcagcagcgaggagcgggaggccggggagatctag

SEQ ID NO: 158154 - DNA, 1377 bp, synthetic construct
  misc_feature 1..1377: note = Description of Artificial Sequence: Synthetic coding sequence
  source 1..1377: mol_type = other DNA
atggccgccctgggcagccccagccacaccttccggggcctgctgcgggagctgcgctacctgtctgctgccaccggccggccctacagagacacagctgcctaccgctacctggtgaaggccttccgggcccaccgggtgaccagcgagaagctgtgccgggcccagcacgagctgcacttccaggccgccacctacctgtgcctgctgcggagcatcaggaagcacgtggccctgcaccaggagttccacggcaagggggacaccacccggcagaggatcaagttcagtgatgacagagtgtgcaagagccacctgctgaactgctgcccccatgatgtgctgagcggcaccaggatggacctgggggagtgcctgaaggtgcatgacctggccctgcgggctgactatgaaattgccagcaaggagcaggacttcttctttgagctggatgccatggaccacctgcagagcttcatcgctgactgtgacagaagaacagaggtggccaagaagaggctggccgagacccaggaggagatctctgctgaggtggccgccaaggccgagcgggtgcatgagctgaatgaggagatcggcaagctgctggccaaggtggagcagctgggcgctgagggcaatgtggaggagagccagaaggtgatggatgaggtggagaaggcccgggccaagaagcgggaggccgaggaggtgtacagaaacagcatgcctgccagcagcttccagcagcagaagctgcgggtgtgtgaggtgtgcagcgcctacctgggcctgcatgacaatgaccggcggctggccgaccactttggaggcaagctgcacctgggcttcatcgagatccgggagaagctggaggagctgaagagggtggtggccgagaagcaggagaagaggaaccaggagcggctgaagaggcgggaggagcgggagcgggaggagcgggagaagctgcggcgcagccgcagccacagcaagaaccccaagaggagccgcagccgggagcacagaagacacaggagccgctccatgagccgggagaggaagaggaggaccaggagcaagagccgggagaagaggcaccgccacaggagccgcagcagcagccgcagccgcagccgcagccaccagaggagccgccacagcagccgggacaggagccgggagaggagcaagagaagaagcagcaaggagcgcttccgggaccaggacctggccagctgtgaccgggacaggagcagccgggacaggagcccccgggaccgggacaggaaggacaagaagaggagctatgaaagtgccaacggccgctcagaagatagaagaagcagcgaggagcgggaggccggggagatctag

SEQ ID NO: 158155 - DNA, 1179 bp, synthetic construct; identical to SEQ ID NO: 158152
  misc_feature 1..1179: note = Description of Artificial Sequence: Synthetic coding sequence
  source 1..1179: mol_type = other DNA

SEQ ID NO: 158156 - DNA, 252 bp, synthetic construct
  misc_feature 1..252: note = Description of Artificial Sequence: Synthetic coding sequence
  source 1..252: mol_type = other DNA
atgtctgcccaggcccagatgagggccatgctggaccagctgatgggcaccagcagagatggctccatgtacctgtgcctgcccaccagcatctgcaagggcgtgtctgagcggccccgcatccggcaggccgagatccagctggtgaatgaaagcaacagcgtgatgacagaatatgcccgggtgaccttcagcacagtggtgctgatgatgtccttcctggagctggagtggatcctggagaatgtgtag

SEQ ID NO: 158157 - DNA, 1299 bp, synthetic construct
  misc_feature 1..1299: note = Description of Artificial Sequence: Synthetic coding sequence
  source 1..1299: mol_type = other DNA
atgatctctgctgcccagctgctggatgagctgatgggccgggacaggaacctggccccagatgagaagaggagcaatgtgcgctgggaccatgaatctgtgtgcaagtactacctgtgtggcttctgcccagctgagctgttcaccaacaccaggagtgacctgggcccctgtgagaagatccatgatgagaacctgaggaagcagtatgagaagagcagccgcttcatgaaggtgggctatgagcgggacttcctgcgctacctgcagagcctgctggccgaggtggagcggcgcatcagaagaggccacgcccggctggccctgagccagaaccagcagagcagcggggctgctggccccaccgggaagaatgaggagaagatccaggtgctgacagacaagattgatgtgctgctgcagcagatcgaggagctgggcagcgagggcaaggtggaggaggcccagggcatgatgaagctggtggagcagctgaaggaggagcgggagctgctgcggagcaccaccagcaccatcgagagctttgctgcccaggagaagcagatggaggtgtgtgaggtgtgtggggccttcctgattgtgggagatgcccagagccgggtggatgaccacctgatgggcaagcagcacatgggctacgccaagatcaaggccaccgtggaggagctgaaggagaagctgaggaagaggacagaggagccagacagagatgagcggctgaagaaggagaagcaggagcgggaggagcgggagaaggagcgggagcgggagcgggaggagcgggagaggaagagaagaagagaggaggaggagcgggagaaggagcgggcccgggaccgggagaggaggaagaggagccgcagccgcagccgccacagcagcaggaccagtgaccggcgctgcagccgcagccgggaccacaagaggagccgcagccgggagaggagaagaagccgcagccgggacagaagaagaagccgcagccatgacagaagtgagaggaagcacaggagccgcagccgggacagaagaagaagcaagagccgggacaggaagagctacaagcacaggagcaagagccgggaccgggagcaggacaggaagagcaaggagaaggagaagaggggcagtgatgacaagaagagctctgtgaagagcggcagccgggagaagcagagcgaggacaccaacacagagagcaaggagagtgacaccaagaatgaggtgaatggcaccagcgaggacatcaagtctgagggggacacccagagcaactag

SEQ ID NO: 158158 - DNA, 240 bp, synthetic construct
  misc_feature 1..240: note = Description of Artificial Sequence: Synthetic coding sequence
  source 1..240: mol_type = other DNA
atgatctctgctgcccagctgctggatgagctgatgggccgggacaggaacctggccccagatgagaagaggagcaatgtgcgctgggaccatgaatctgtgtgcaagtactacctgtgtggcttctgcccagctgagctgttcaccaacaccaggagtgacctggatgtgtttggccgcggggacaacatcagagatgtgtccaagttcctggaggatgacaagtggatggaggagtag

SEQ ID NO: 158159 - DNA, 1299 bp, synthetic construct; identical to SEQ ID NO: 158157
  misc_feature 1..1299: note = Description of Artificial Sequence: Synthetic coding sequence
  source 1..1299: mol_type = other DNA

SEQ ID NO: 158160 - DNA, 711 bp, synthetic construct
  misc_feature 1..711: note = Description of Artificial Sequence: Synthetic coding sequence
  source 1..711: mol_type = other DNA
atgatctctgctgcccagctgctggatgagctgatgggccgggacaggaacctggccccagatgagaagaggagcaatgtgcgctgggaccatgaatctgtgtgcaagtactacctgtgtggcttctgcccagctgagctgttcaccaacaccaggagtgacctgggcccctgtgagaagatccatgatgagaacctgaggaagcagtatgagaagagcagccgcttcatgaaggtgggctatgagcgggacttcctgcgctacctgcagagcctgctggccgaggtggagcggcgcatcagaagaggccacgcccggctggccctgagccagaaccagcagagcagcggggctgctggccccaccgggaagaatgaggagaagatccaggtgctgacagacaagattgatgtgctgctgcagcagatcgaggagctgggcagcgagggcaaggtggaggaggcccagggcatgatgaagctggtggagcagctgaaggaggagcgggagctgctgcggagcaccaccagcaccatcgagagctttgctgcccaggagaagcagatggaggtgtgtgaggtgtgtggggccttcctgattgtgggagatgcccagagccgggtggatgaccacctgatgggcaagcagcacatgggctacgccaagatcaaggccaccgtggaggagaagaagaagaagaagaagaagtag

SEQ ID NO: 158161 - DNA, 1071 bp, synthetic construct
  misc_feature 1..1071: note = Description of Artificial Sequence: Synthetic coding sequence
  source 1..1071: mol_type = other DNA
atgaaggtgggctatgagcgggacttcctgcgctacctgcagagcctgctggccgaggtggagcggcgcatcagaagaggccacgcccggctggccctgagccagaaccagcagagcagcggggctgctggccccaccgggaagaatgaggagaagatccaggtgctgacagacaagattgatgtgctgctgcagcagatcgaggagctgggcagcgagggcaaggtggaggaggcccagggcatgatgaagctggtggagcagctgaaggaggagcgggagctgctgcggagcaccaccagcaccatcgagagctttgctgcccaggagaagcagatggaggtgtgtgaggtgtgtggggccttcctgattgtgggagatgcccagagccgggtggatgaccacctgatgggcaagcagcacatgggctacgccaagatcaaggccaccgtggaggagctgaaggagaagctgaggaagaggacagaggagccagacagagatgagcggctgaagaaggagaagcaggagcgggaggagcgggagaaggagcgggagcgggagcgggaggagcgggagaggaagagaagaagagaggaggaggagcgggagaaggagcgggcccgggaccgggagaggaggaagaggagccgcagccgcagccgccacagcagcaggaccagtgaccggcgctgcagccgcagccgggaccacaagaggagccgcagccgggagaggagaagaagccgcagccgggacagaagaagaagccgcagccatgacagaagtgagaggaagcacaggagccgcagccgggacagaagaagaagcaagagccgggacaggaagagctacaagcacaggagcaagagccgggaccgggagcaggacaggaagagcaaggagaaggagaagaggggcagtgatgacaagaagagctctgtgaagagcggcagccgggagaagcagagcgaggacaccaacacagagagcaaggagagtgacaccaagaatgaggtgaatggcaccagcgaggacatcaagtctgagggcctgtttgtgacagtgtag

SEQ ID NO: 158162 - DNA, 1017 bp, synthetic construct
  misc_feature 1..1017: note = Description of Artificial Sequence: Synthetic coding sequence
  source 1..1017: mol_type = other DNA
atgagcctgagcgccttcaccctcttcctggccctgattggaggcaccagcggccagtactatgactatgacttccccctgagcatctacggccagagcagccccaactgtgcccctgagtgcaactgcccagagagctaccccagcgccatgtactgtgatgagctgaagctgaagtctgtgcccatggtgcccccaggcatcaagtacctgtacctgaggaacaaccagattgaccacattgatgagaaggcctttgaaaatgtgacagacctgcagtggctgatcctggaccacaacctgctggagaacagcaagatcaagggccgggtcttcagcaagctgaagcagctgaagaagctgcacatcaaccacaacaacctgacagaatctgtgggccccctgcccaagagcctggaggacctgcagctgacccacaacaagatcaccaagctgggcagctttgagggcctggtgaacctgaccttcatccacctgcagcacaaccggctgaaggaggatgctgtgtctgctgccttcaagggcctgaagagcctggagtacctggacctgtccttcaaccagatcgcccggctgcccagcggcctgcctgtgtccctgctgaccctgtacctggacaacaacaagatcagcaacatcccagatgagtacttcaagcgcttcaatgccctgcagtacctgcggctgagccacaatgagctggccgacagcggcatccctggcaacagcttcaacgtgagcagcctggtggagctggacctgagctacaacaagctgaagaacatccccaccgtgaatgaaaacctggagaactactacctggaggtgaaccagctggagaagtttgacatcaagagcttctgcaagatcctgggccccctgagctacagcaagatcaagcacctgcggctggatggcaaccgcatcagcgagaccagcctgcccccagacatgtatgaatgtctgcgggtggccaatgaggtgaccctgaactag

SEQ ID NO: 158163 - DNA, 2100 bp, synthetic construct
  misc_feature 1..2100: note = Description of Artificial Sequence: Synthetic coding sequence
  source 1..2100: mol_type = other DNA
atgaagcagcgcttcagcgccctgcagctgctgaagctgctgctgctgctgcagccccccctgccccgggccctgcgggaggccctgtgcccagagccctgcaactgtgtgcctgatggagccctgcgctgccccggccccacagctggcctgacccggctgagcctggcctacctgcctgtgaaggtgatccccagccaggccttccggggcctgaatgaagtcatcaagattgagatcagccagattgacagcctggagagaattgaggccaatgcctttgacaacctgctgaacctgtctgagatcctgatccagaacaccaagaacctgcgctacatcgagcccggggccttcatcaacctgccccggctgaagtacctgagcatctgcaacacaggcatcaggaagttcccagatgtgaccaaggtgttcagcagcgagagcaacttcatcctggagatctgtgacaacctgcacatcaccaccatccctggaaatgccttccagggcatgaacaatgaatctgtgaccctgaagctgtatggaaatggatttgaggaggtgcagagccacgccttcaacggcaccaccctgaccagcctggagctgaaggaaaatgtgcacctggagaagatgcacaatggagccttccggggggccaccggccccaagaccctggacatcagcagcaccaagctgcaggccctgcccagctatggcctggagagcatccagaggctgattgccaccagcagctacagcctgaagaagctgcccagccgggagacctttgtgaacctgctggaggccaccctgacctaccccagccactgctgtgccttcaggaacctgcccaccaaggagcagaacttcagccacagcatcagcgagaacttcagcaagcagtgtgagagcacagtgaggaaggtgaacaacaagaccctgtacagctccatgctggccgagagcgagctgagcggctgggactatgaatatggcttctgcctgcccaagaccccccgctgtgcccctgagccagatgccttcaacccctgtgaggacatcatgggctatgacttcctgcgggtgctgatctggctgatcaacatcctggccatcatgggcaacatgacagtgctgtttgtgctgctgaccagccgctacaagctgactgtgccccgcttcctgatgtgcaacctgagctttgctgacttctgcatgggcctgtacctgctgctgattgcctctgtggacagccagaccaagggccagtactacaaccacgccatcgactggcagacaggcagcggctgcagcacagctggcttcttcaccgtgtttgccagcgagctgtctgtgtacaccctgaccgtcatcaccctggagcgctggcacaccatcacctacgccatccacctggaccagaagctgcggctgcggcatgccatcctgatcatgctgggcggctggctgttcagcagcctgattgccatgctgcccctggtgggcgtgagcaactacatgaaggtgtccatctgcttccccatggatgtggagaccaccctgagccaggtgtacatcctgaccatcctgatcctgaatgtggtggccttcttcatcatctgtgcctgctacatcaagatctactttgctgtgaggaaccctgagctgatggccaccaacaaggacaccaagatcgccaagaagatggccatcctgatcttcacagacttcacctgcatggcccccatctccttctttgccatctctgctgccttcaaggtgcccctcatcaccgtgaccaacagcaaggtgctgctggtgctcttctaccccatcaacagctgtgccaaccccttcctgtatgccatcttcaccaagaccttccagagggacttcttcctgctgctgagcaagtttggctgctgcaagagaagagctgagctgtacagaaggaaggacttcagcgcctacaccagcaactgcaagaatggcttcaccggcagcaacaagcccagccagagcaccctgaagctgagcaccctgcactgccagggcacagccctgctggacaagacccgctacacagagtgctag

SEQ ID NO: 158164 - DNA, 1914 bp, synthetic construct
  misc_feature 1..1914: note = Description of Artificial Sequence: Synthetic coding sequence
  source 1..1914: mol_type = other DNA
atgaagcagcgcttcagcgccctgcagctgctgaagctgctgctgctgctgcagccccccctgccccgggccctgcgggaggccctgtgcccagagccctgcaactgtgtgcctgatggagccctgcgctgccccggccccacagctggcctgacccggctgagcctggcctacctgcctgtgaaggtgatccccagccaggccttccggggcctgaatgaagtcatcaagattgagatcagccagattgacagcctggagagaattgaggccaatgcctttgacaacctgctgaacctgtctgagatcctgatccagaacaccaagaacctgcgctacatcgagcccggggccttcatcaacctgccccggctgaagtacctgagcatctgcaacacaggcatcaggaagttcccagatgtgaccaaggtgttcagcagcgagagcaacttcatcctggagatctgtgacaacctgcacatcaccaccatccctggaaatgccttccagggcatgaacaatgaatctgtgaccctgaagctgtatggaaatggatttgaggaggtgcagagccacgccttcaacggcaccaccctgaccagcctggagctgaaggaaaatgtgcacctggagaagatgcacaatggagccttccggggggccaccggccccaagaccctgcagaacttcagccacagcatcagcgagaacttcagcaagcagtgtgagagcacagtgaggaaggtgaacaacaagaccctgtacagctccatgctggccgagagcgagctgagcggctgggactatgaatatggcttctgcctgcccaagaccccccgctgtgcccctgagccagatgccttcaacccctgtgaggacatcatgggctatgacttcctgcgggtgctgatctggctgatcaacatcctggccatcatgggcaacatgacagtgctgtttgtgctgctgaccagccgctacaagctgactgtgccccgcttcctgatgtgcaacctgagctttgctgacttctgcatgggcctgtacctgctgctgattgcctctgtggacagccagaccaagggccagtactacaaccacgccatcgactggcagacaggcagcggctgcagcacagctggcttcttcaccgtgtttgccagcgagctgtctgtgtacaccctgaccgtcatcaccctggagcgctggcacaccatcacctacgccatccacctggaccagaagctgcggctgcggcatgccatcctgatcatgctgggcggctggctgttcagcagcctgattgccatgctgcccctggtgggcgtgagcaactacatgaaggtgtccatctgcttccccatggatgtggagaccaccctgagccaggtgtacatcctgaccatcctgatcctgaatgtggtggccttcttcatcatctgtgcctgctacatcaagatctactttgctgtgaggaaccctgagctgatggccaccaacaaggacaccaagatcgccaagaagatggccatcctgatcttcacagacttcacctgcatggcccccatctccttctttgccatctctgctgccttcaaggtgcccctcatcaccgtgaccaacagcaaggtgctgctggtgctcttctaccccatcaacagctgtgccaaccccttcctgtatgccatcttcaccaagaccttccagagggacttcttcctgctgctgagcaagtttggctgctgcaagagaagagctgagctgtacagaaggaaggacttcagcgcctacaccagcaactgcaagaatggcttcaccggcagcaacaagcccagccagagcaccctgaagctgagcaccctgcactgccagggcacagccctgctggacaagacccgctacacagagtgctag

SEQ ID NO: 158165 - DNA, 978 bp, synthetic construct
  misc_feature 1..978: note = Description of Artificial Sequence: Synthetic coding sequence
  source 1..978: mol_type = other DNA
atgaagcagcgcttcagcgccctgcagctgctgaagctgctgctgctgctgcagccccccctgccccgggccctgcgggaggccctgtgcccagagccctgcaactgtgtgcctgatggagccctgcgctgccccggccccacagctggcctgacccggctgagcctggcctacctgcctgtgaaggtgatccccagccaggccttccggggcctgaatgaagtcatcaagattgagatcagccagattgacagcctggagagaattgaggccaatgcctttgacaacctgctgaacctgtctgagatcctgatccagaacaccaagaacctgcgctacatcgagcccggggccttcatcaacctgccccggctgaagtacctgagcatctgcaacacaggcatcaggaagttcccagatgtgaccaaggtgttcagcagcgagagcaacttcatcctggagatctgtgacaacctgcacatcaccaccatccctggaaatgccttccagggcatgaacaatgaatctgtgaccctgaagctgtatggaaatggatttgaggaggtgcagagccacgccttcaacggcaccaccctgaccagcctggagctgaaggaaaatgtgcacctggagaagatgcacaatggagccttccggggggccaccggccccaagaccctggacatcagcagcaccaagctgcaggccctgcccagctatggcctggagagcatccagaggctgattgccaccagcagctacagcctgaagaagctgcccagccgggagacctttgtgaacctgctggaggccaccctgacctaccccagccactgctgtgccttcaggaacctgcccaccaaggagcagaacttcagccacagcatcagcgagaacttcagcaagcagtgtgagagcacagtgaggaaggtgaacaacaagaccctgagcaagccccgcatcaatggctaccagtag

SEQ ID NO: 158166 - DNA, 990 bp, synthetic construct
  misc_feature 1..990: note = Description of Artificial Sequence: Synthetic coding sequence
  source 1..990: mol_type = other DNA
atgaagcagcgcttcagcgccctgcagctgctgaagctgctgctgctgctgcagccccccctgccccgggccctgcgggaggccctgtgcccagagccctgcaactgtgtgcctgatggagccctgcgctgccccggccccacagctggcctgacccggctgagcctggcctacctgcctgtgaaggtgatccccagccaggccttccggggcctgaatgaagtcatcaagattgagatcagccagattgacagcctggagagaattgaggccaatgcctttgacaacctgctgaacctgtctgagatcctgatccagaacaccaagaacctgcgctacatcgagcccggggccttcatcaacctgccccggctgaagtacctgagcatctgcaacacaggcatcaggaagttcccagatgtgaccaaggtgttcagcagcgagagcaacttcatcctggagatctgtgacaacctgcacatcaccaccatccctggaaatgccttccagggcatgaacaatgaatctgtgaccctgaagctgtatggaaatggatttgaggaggtgcagagccacgccttcaacggcaccaccctgaccagcctggagctgaaggaaaatgtgcacctggagaagatgcacaatggagccttccggggggccaccggccccaagaccctggacatcagcagcaccaagctgcaggccctgcccagctatggcctggagagcatccagaggctgattgccaccagcagctacagcctgaagaagctgcccagccgggagacctttgtgaacctgctggaggccaccctgacctaccccagccactgctgtgccttcaggaacctgcccaccaaggagcagaacttcagccacagcatcagcgagaacttcagcaagcagtgtgagagcacagtgaggaaggtgaacaacaagaccctgctgctgcatggagccctgtctgctgcccacagcctgtcctag

SEQ ID NO: 158167 - DNA, 2019 bp, synthetic construct
  misc_feature 1..2019: note = Description of Artificial Sequence: Synthetic coding sequence
  source 1..2019: mol_type = other DNA
atgaagcagcgcttcagcgccctgcagctgctgaagctgctgctgctgctgcagccccccctgccccgggccctgcgggaggccctgtgcccagagccctgcaactgtgtgcctgatggagccctgcgctgccccggccccacagctggcctgacccggctgagcctggcctacctgcctgtgaaggtgatccccagccaggccttccggggcctgaatgaagtcatcaagattgagatcagccagattgacagcctggagagaattgaggccaatgcctttgacaacctgctgaacctgtctgagatcctgatccagaacaccaagaacctgcgctacatcgagcccggggccttcatcaacctgccccggctgaagtacctgagcatctgcaacacaggcatcaggaagttcccagatgtgaccaaggtgttcagcagcgagagcaacttcatcctggagatctgtgacaacctgcacatcaccaccatccctggaaatgccttccagggcatgaacaatgaatctgtgaccctgaagctgtatggaaatggatttgaggaggtgcagagccacgccttcaacggcaccaccctgaccagcctggagctgaaggaaaatgtgcacctggagaagatgcacaatggagccttccggggggccaccggccccaagaccctggacatcagcagcaccaagctgcaggccctgcccagctatggcctggagagcatccagaggctgattgccaccagcagctacagcctgaagaagctgcccagccgggagacctttgtgaacctgctggaggccaccctgacctaccccagccactgctgtgccttcaggaacctgcccaccaaggactacagctccatgctggccgagagcgagctgagcggctgggactatgaatatggcttctgcctgcccaagaccccccgctgtgcccctgagccagatgccttcaacccctgtgaggacatcatgggctatgacttcctgcgggtgctgatctggctgatcaacatcctggccatcatgggcaacatgacagtgctgtttgtgctgctgaccagccgctacaagctgactgtgccccgcttcctgatgtgcaacctgagctttgctgacttctgcatgggcctgtacctgctgctgattgcctctgtggacagccagaccaagggccagtactacaaccacgccatcgactggcagacaggcagcggctgcagcacagctggcttcttcaccgtgtttgccagcgagctgtctgtgtacaccctgaccgtcatcaccctggagcgctggcacaccatcacctacgccatccacctggaccagaagctgcggctgcggcatgccatcctgatcatgctgggcggctggctgttcagcagcctcatcgccatgctgcccctggtgggcgtgagcaactacatgaaggtgtccatctgcttccccatggatgtggagaccaccctgagccaggtgtacatcctgaccatcctgatcctgaatgtggtggccttcttcatcatctgtgcctgctacatcaagatctactttgctgtgagaaatcctgagctgatggccaccaacaaggacaccaagatcgccaagaagatggccatcctgatcttcacagacttcacctgcatggcccccatctccttctttgccatctctgctgccttcaaggtgcccctcatcaccgtgaccaacagcaaggtgctgctggtgctcttctaccccatcaacagctgtgccaaccccttcctgtatgccatcttcaccaagaccttccagagggacttcttcctgctgctgagcaagtttggctgctgcaagagaagagctgagctgtacagaaggaaggacttcagcgcctacaccagcaactgcaagaatggcttcaccggcagcaacaagcccagccagagcaccctgaagctgagcaccctgcactgccagggcacagccctgctggacaagacccgctacacagaatgttag

SEQ ID NO: 158168 - DNA, 396 bp, synthetic construct
  misc_feature 1..396: note = Description of Artificial Sequence: Synthetic coding sequence
  source 1..396: mol_type = other DNA
atgacccccctgctgaccctcatcctggtggtgctgatgggcctgcccctggcccaggccctggactgccacgtgtgtgcctacaatggagacaactgcttcaaccccatgcgctgcccagccatggtggcctactgcatgaccaccaggaccagcgctgctgaggccatctggtgccaccagtgcaccggctttggaggctgcagccacggcagccgctgcctgcgggacagcacccactgtgtgaccacagccaccagggtgctgagcaacacagaggacctgcccctggtgaccaagatgtgccacatcggctgcccagacatccccagcctgggcctgggcccctacgtgtccatcgcctgctgccagaccagcctgtgcaaccacgactag

SEQ ID NO: 158169 - DNA, 351 bp, synthetic construct
  misc_feature 1..351: note = Description of Artificial Sequence: Synthetic coding sequence
  source 1..351: mol_type = other DNA
atgacccccctgctgaccctcatcctggtggtgctgatgggcctgcccctggcccaggccctggactgccacgtgtgtgcctacaatggagacaactgcttcaaccccatgcgctgcccagccatggtggcctactgcatgaccaccaggacctactacacccccaccaggatgaaggtgtccaagagctgtgtgccccgctgctttgaaacagtgtatgatggctacagcaagcacgccagcaccaccagctgctgccagtatgacctgtgcaatggcaccggcctggccaccccagccaccctggccctggcccccatcctgctggccaccctgtggggcctgctgtag

SEQ ID NO: 158170 - DNA, 351 bp, synthetic construct; identical to SEQ ID NO: 158169
  misc_feature 1..351: note = Description of Artificial Sequence: Synthetic coding sequence
  source 1..351: mol_type = other DNA

SEQ ID NO: 158171 - DNA, 351 bp, synthetic construct; identical to SEQ ID NO: 158169
  misc_feature 1..351: note = Description of Artificial Sequence: Synthetic coding sequence
  source 1..351: mol_type = other DNA

SEQ ID NO: 158172 - DNA, 249 bp, synthetic construct
  misc_feature 1..249: note = Description of Artificial Sequence: Synthetic coding sequence
  source 1..249: mol_type = other DNA
atgacccccctgctgaccctcatcctggtggtgctgatgggcctgcccctggcccaggccctggactgccacgtgtgtgcctacaatggagacaactgcttcaaccccatgcgctgcccagccatggtggcctactgcatgaccaccaggacctactacacccccaccaggatgaaggtgtccaagagctgtgtgccccgctgctttgaaacagtgtatgatggctacagcaagcacgccagcacctag

SEQ ID NO: 158173 - DNA, 255 bp, synthetic construct
  misc_feature 1..255: note = Description of Artificial Sequence: Synthetic coding sequence
  source 1..255: mol_type = other DNA
atgacccccctgctgaccctcatcctggtggtgctgatgggcctgcccctggcccaggccctggactgccacgtgtgtgcctacaatggagacaactgcttcaaccccatgcgctgcccagccatggtggcctactgcatgaccaccaggacctactacacccccaccaggatgaaggtgtccaagagctgtgtgccccgctgctttgaaacagtgtatgatggctacagcaagcacgccagcaccaccagctag

SEQ ID NO: 158174 - DNA, 1041 bp, synthetic construct
  misc_feature 1..1041: note = Description of Artificial Sequence: Synthetic coding sequence
  source 1..1041: mol_type = other DNA
atggaccctgccaggaaggccggggcccaggccatgatctggacagctggctggctgctgctgctgctgctgcggggcggggcccaggccctggagtgctacagctgtgtgcagaaggcagatgatggctgcagccccaacaagatgaagacagtgaagtgtgcccctggggtggatgtgtgcacagaggccgtgggcgctgtggagaccatccacggccagttcagcctggccgtgcggggctgcggcagcggcctgcccgggaagaatgaccggggcctggacctgcacggcctgctggccttcatccagctgcagcagtgtgcccaggaccgctgcaatgccaagctgaacctgaccagccgggccctggaccctgctggaaatgaaagtgcctacccacccaacggggtggagtgctacagctgtgtgggcctgagccgggaggcctgccagggcaccagcccccctgtggtgtcctgctacaatgccagtgaccacgtgtacaagggctgctttgatggaaatgtgaccctgacagctgccaacgtgacagtgtccctgcctgtgcggggctgtgtgcaggatgagttctgcaccagagatggagtgactggacctggcttcaccctgagcggcagctgctgccagggcagccgctgcaacagcgacctgaggaacaagacctacttcagcccccgcatcccccccctggtgcggctgcccccacctgagcccaccaccgtggccagcaccacctctgtgaccaccagcaccagcgcccctgtgcggcccaccagcaccaccaagcccatgcctgcccccaccagccagaccccccggcagggcgtggagcacgaggccagcagagatgaggagccccggctgactggaggagctgctggccaccaggacaggagcaacagcggccagtacccagccaagggcggcccccagcagccccacaacaagggctgtgtggcccccacagctggcctggccgccctgctgctggccgtggccgccggcgtgctgctgtag

SEQ ID NO: 158175 - DNA, 885 bp, synthetic construct
  misc_feature 1..885: note = Description of Artificial Sequence: Synthetic coding sequence
  source 1..885: mol_type = other DNA
atggaccctgccaggaaggccggggcccaggccatgatctggacagctggctggctgctgctgctgctgctgcggggcggggcccaggccctggagtgctacagctgtgtgcagaaggcagatgatggctgcagccccaacaagatgaagacagtgaagtgtgcccctggggtggatgtgtgcacagaggccgtgggcgctgtggagaccatccacggccagttcagcctggccgtgcggggctgcggcagcggcctgcccgggaagaatgaccggggcctggacctgcacggcctgctggccttcatccagctgcagcagtgtgcccaggaccgctgcaatgccaagctgaacctgaccagccgggccctggaccctgctgctgctgccaacgtgacagtgtccctgcctgtgcggggctgtgtgcaggatgagttctgcaccagagatggagtgactggacctggcttcaccctgagcggcagctgctgccagggcagccgctgcaacagcgacctgaggaacaagacctacttcagcccccgcatcccccccctggtgcggctgcccccacctgagcccaccaccgtggccagcaccacctctgtgaccaccagcaccagcgcccctgtgcggcccaccagcaccaccaagcccatgcctgcccccaccagccagaccccccggcagggcgtggagcacgaggccagcagagatgaggagccccggctgactggaggagctgctggccaccaggacaggagcaacagcggccagtacccagccaagggcggcccccagcagccccacaacaagggctgtgtggcccccacagctggcctggccgccctgctgctggccgtggccgccggcgtgctgctgtag

SEQ ID NO: 158176 - DNA, 516 bp, synthetic construct
  misc_feature 1..516: note = Description of Artificial Sequence: Synthetic coding sequence
  source 1..516: mol_type = other DNA
atggagcccggccctgccctggcctggctgctgctgctgagcctgctggccgactgcctgaaggccgcccagagccgggacttcaccgtgaaggacatcatctacctgcaccccagcaccaccccctacccaggcggcttcaagtgcttcacctgtgagaaggctgctgacaactatgagtgcaaccgctgggccccagacatctactgcccccgggagacccgctactgctacacccagcacaccatggaggtgacaggcaacagcatctctgtgaccaagagatgtgtgcccctggaggagtgcctgagcacaggctgccgggacagcgagcacgagggccacaaggtgtgcaccagctgctgtgagggcaacatctgcaacctgcccctgcccagaaatgaaacagatgccacctttgccaccaccagccccatcaaccagaccaacggccacccccgctgcatgtctgtgattgtgtcctgcctgtggctgtggctgggcctgatgctgtag

SEQ ID NO: 158177 - DNA, 516 bp, synthetic construct; identical to SEQ ID NO: 158176
  misc_feature 1..516: note = Description of Artificial Sequence: Synthetic coding sequence
  source 1..516: mol_type = other DNA

SEQ ID NO: 158178 - DNA, 162 bp, synthetic construct
  misc_feature 1..162: note = Description of Artificial Sequence: Synthetic coding sequence
  source 1..162: mol_type = other DNA
atggagcccggccctgccctggcctggctgctgctgctgagcctgctggccgactgcctgaaggccgcccagagccgggacttcaccgtgaaggacatcatctacctgcaccccagcaccaccccctacccaggcggcttcaagtgcttcacctgtgagtag

SEQ ID NO: 158179 - DNA, 969 bp, synthetic construct
  misc_feature 1..969: note = Description of Artificial Sequence: Synthetic coding sequence
  source 1..969: mol_type = other DNA
atggcccgctgcttcagcctggtgctgctgctgaccagcatctggaccacccggctgctggtgcagggcagcctgcgggcagaggagctgagcatccaggtgtcctgccgcatcatgggcatcaccctggtgtccaagaaggccaaccagcagctgaacttcacagaggccaaggaggcctgccgcctgctgggcctgagcctggccggcaaggaccaggtggagacagccctgaaggccagctttgagacctgcagctatggctgggtgggagatggctttgtggtgatcagccgcatcagccccaaccccaagtgtgggaagaatggagtgggcgtgctgatctggaaggtgcctgtgtcccggcagtttgctgcctactgctacaacagcagtgacacctggaccaacagctgcatccctgagatcatcaccaccaaggaccccatcttcaacacccagacagccacccagaccacagagttcatcgtgtctgacagcacctacagcgtggccagcccctacagcaccatcccagcccccaccaccaccccaccagccccagccagcaccagcatccccaggaggaagaagctgatctgtgtgacagaggtgttcatggagaccagcaccatgagcacagaaacagagccctttgtggagaacaaggccgccttcaagaatgaggccgccggctttggaggagtgcccacagccctgctggtgctggccctgctcttcttcggggctgctgctggcctgggcttctgctacgtgaagcgctacgtgaaggccttccccttcaccaacaagaaccagcagaaggagatgattgagaccaaggtggtgaaggaggagaaggccaatgacagcaaccccaatgaggagagcaagaagacagacaagaaccctgaggagagcaagagccccagcaagaccaccgtgcgctgcctggaggccgaggtgtag

SEQ ID NO: 158180 - DNA, 387 bp, synthetic construct
  misc_feature 1..387: note = Description of Artificial Sequence: Synthetic coding sequence
  source 1..387: mol_type = other DNA
atgaggacagccctgctgctgctggccgccctggccgtggccactggacctgccctgaccctgcgctgccacgtgtgcaccagcagcagcaactgcaagcacagcgtggtgtgcccagccagcagccgcttctgcaagaccaccaacacagtggagcccctgcggggcaacctggtgaagaaggactgtgccgagagctgcacccccagctacaccctgcagggccaggtgagcagcggcaccagcagcacccagtgctgccaggaggacctgtgcaatgagaagctgcacaatgctgcccccaccaggacagccctggcccacagcgccctgagcctgggcctggccctgagcctgctggccgtcatcctggcccccagcctgtag

SEQ ID NO: 158181 - DNA, 396 bp, synthetic construct
  misc_feature 1..396: note = Description of Artificial Sequence: Synthetic coding sequence
  source 1..396: mol_type = other DNA
atgaagatcttcctgcctgtgctgctggccgccctgctgggcgtggagcgggccagcagcctgatgtgcttcagctgcctgaaccagaagagcaacctgtactgcctgaagcccaccatctgcagcgaccaggacaactactgtgtgacagtgtctgccagcgctggcatcggcaacctggtgaccttcggccacagcctgagcaagacctgcagccctgcctgccccatccctgagggcgtgaatgtgggcgtggcctccatgggcatcagctgctgccagagcttcctgtgcaacttctctgctgctgatggcggcctgcgggcctctgtgaccctgctgggcgccggcctgctgctgagcctgctgcctgccctgctgcgcttcggcccctag

SEQ ID NO: 158182 - DNA, 396 bp, synthetic construct; identical to SEQ ID NO: 158181
  misc_feature 1..396: note = Description of Artificial Sequence: Synthetic coding sequence
  source 1..396: mol_type = other DNA

SEQ ID NO: 158183 - DNA, 267 bp, synthetic construct
  misc_feature 1..267: note = Description of Artificial Sequence: Synthetic coding sequence
  source 1..267: mol_type = other DNA
atgaagatcttcctgcctgtgctgctggccgccctgctgggcgtggagcgggccagcagcctgatgtgcttcagctgcctgaaccagaagagcaacctgtactgcctgaagcccaccatctgcagcgaccaggacaactactgtgtgacagtgtctgccagcgctggcatcggcaacctggtgaccttcggccacagcctgagcaagacctgcagccctgcctgccccatccctgagggcgtgaatgtgggcgtggcctccatgtag

SEQ ID NO: 158184 - DNA, 396 bp, synthetic construct; identical to SEQ ID NO: 158181
  misc_feature 1..396: note = Description of Artificial Sequence: Synthetic coding sequence
  source 1..396: mol_type = other DNA

SEQ ID NO: 158185 - DNA, 396 bp, synthetic construct; identical to SEQ ID NO: 158181
  misc_feature 1..396: note = Description of Artificial Sequence: Synthetic coding sequence
  source 1..396: mol_type = other DNA

SEQ ID NO: 158186 - DNA, 396 bp, synthetic construct; identical to SEQ ID NO: 158181
  misc_feature 1..396: note = Description of Artificial Sequence: Synthetic coding sequence
  source 1..396: mol_type = other DNA

SEQ ID NO: 158187 - DNA, 396 bp, synthetic construct; identical to SEQ ID NO: 158181
  misc_feature 1..396: note = Description of Artificial Sequence: Synthetic coding sequence
  source 1..396: mol_type = other DNA

SEQ ID NO: 158188 - DNA, 396 bp, synthetic construct; identical to SEQ ID NO: 158181
  misc_feature 1..396: note = Description of Artificial Sequence: Synthetic coding sequence
  source 1..396: mol_type = other DNA

SEQ ID NO: 158189 - DNA, 402 bp, synthetic construct
  misc_feature 1..402: note = Description of Artificial Sequence: Synthetic coding sequence
  source 1..402: mol_type = other DNA
atgaagccccagtttgtgggcatcctgctgagcagcctgctgggcgccgccctgggcaacaggatgcgctgctacaactgtggcggcagccccagcagcagctgcaaggaggccgtgaccacctgtggggagggccggccccagcccggcctggagcagatcaagctgcccggcaacccccctgtgaccctcatccaccagcacccagcctgtgtggccgcccaccactgcaaccaggtggagacagagagcgtgggagatgtgacctacccagcccaccgggactgctacctgggggacctgtgcaacagcgctgtggccagccacgtggccccagctggcatcctggccgctgctgccacagccctgacctgcctgctgcccggcctgtggagcggctag

SEQ ID NO: 158190 - DNA, 525 bp, synthetic construct
  misc_feature 1..525: note = Description of Artificial Sequence: Synthetic coding sequence
  source 1..525: mol_type = other DNA
atgaagccccagtttgtgggcatcctgctgagcagcctgctgggcgccgccctgggcaacaggatgcgctgctacaactgtggcggcagccccagcagcagctgcaaggaggccgtgaccacctgtggggagggccggccccagcccggcctggagcagatcaagctgcccggcaacagacgctgcttcctgcggggcctgaagatccccctgggcagcctgaagagccacctgctgtgcccccggcggcaggtgctgaagccaggagtgcagcaccccagcttcatcctgagcctgagccccagcgacctggacagccccaccagcagcctgcggcgcagccccagcctgcagagcagcggggacagagtgggcggcagaagagacctgagcagcccccagggcctgctgcccggccggcctgtgcagcagaggcggggcaagccctgtggcccctgccgccacttcggctgcagcagctacagaccagacctgagcctggccaggacagtggagcgcatctag

SEQ ID NO: 158191 - DNA, 402 bp, synthetic construct; identical to SEQ ID NO: 158189
  misc_feature 1..402: note = Description of Artificial Sequence: Synthetic coding sequence
  source 1..402: mol_type = other DNA

SEQ ID NO: 158192 - DNA, 1149 bp, synthetic construct
  misc_feature 1..1149: note = Description of Artificial Sequence: Synthetic coding sequence
  source 1..1149: mol_type = other DNA
atggctgtgctcttcctgctgctcttcctgtgtggcaccccccaggccgctgacaacatgcaggccatctacgtggccctgggggaggccgtggagctgccctgccccagcccccccaccctgcatggagatgagcacctgtcctggttctgcagccctgctgctggcagcttcaccaccctggtggcccaggtgcaggtgggccggcctgccccagaccccgggaagccaggccgggagagccggctgcggctgctgggcaactacagcctgtggctggagggcagcaaggaggaggatgctggccgctactggtgcaccgtgctgggccagcaccacaactaccagaactggagggtgtatgatgtgctggtgctgaagggcagccagctgagcgcccgggcagcagatggcagcccctgcaatgtgctgctgtgcagcgtggtgcccagcaggaggatggacagcgtgacctggcaggagggcaaaggacctgtgcggggccgggtgcagagcttctggggcagcgaggccgccctgctgctggtgtgccctggagagggcctgtctgagcccaggagcagaagaccccgcatcatccgctgcctgatgacccacaacaagggcgtgtccttcagcctggccgccagcattgatgccagccctgccctgtgtgcccccagcacaggctgggacatgccctggatcctgatgctgctgctgaccatgggccagggcgtggtgatcctggccctgagcatcgtgctgtggaggcagagggtgcggggggcccctggccggggcaacaggatgcgctgctacaactgtggcggcagccccagcagcagctgcaaggaggccgtgaccacctgtggggagggccggccccagcccggcctggagcagatcaagctgcccggcaacccccctgtgaccctcatccaccagcacccagcctgtgtggccgcccaccactgcaaccaggtggagacagaatctgtgggagatgtgacctacccagcccaccgggactgctacctgggggacctgtgcaacagcgctgtggccagccacgtggccccagctggcatcctggccgccgccgccacagccctgacctgcctgctgcccggcctgtggagcggctag

SEQ ID NO: 158193 - DNA, 402 bp, synthetic construct; identical to SEQ ID NO: 158189
  misc_feature 1..402: note = Description of Artificial Sequence: Synthetic coding sequence
  source 1..402: mol_type = other DNA

SEQ ID NO: 158194 - DNA, 402 bp, synthetic construct; identical to SEQ ID NO: 158189
  misc_feature 1..402: note = Description of Artificial Sequence: Synthetic coding sequence
  source 1..402: mol_type = other DNA

SEQ ID NO: 158195 - DNA, 1149 bp, synthetic construct
  misc_feature 1..1149: note = Description of Artificial Sequence: Synthetic coding sequence
  source 1..1149: mol_type = other DNA
atggctgtgctcttcctgctgctcttcctgtgtggcaccccccaggccgctgacaacatgcaggccatctacgtggccctgggggaggccgtggagctgccctgccccagcccccccaccctgcatggagatgagcacctgtcctggttctgcagccctgctgctggcagcttcaccaccctggtggcccaggtgcaggtgggccggcctgccccagaccccgggaagccaggccgggagagccggctgcggctgctgggcaactacagcctgtggctggagggcagcaaggaggaggatgctggccgctactggtgtgctgtgctgggccagcaccacaactaccagaactggagggtgtatgatgtgctggtgctgaagggcagccagctgagcgcccgggcagcagatggcagcccctgcaatgtgctgctgtgcagcgtggtgcccagcaggaggatggacagcgtgacctggcaggagggcaaaggacctgtgcggggccgggtgcagagcttctggggcagcgaggccgccctgctgctggtgtgccctggagagggcctgtctgagcccaggagcagaagaccccgcatcatccgctgcctgatgacccacaacaagggcgtgtccttcagcctggccgccagcattgatgccagccctgccctgtgtgcccccagcacaggctgggacatgccctggatcctgatgctgctgctgaccatgggccagggcgtggtgatcctggccctgagcatcgtgctgtggaggcagagggtgcggggggcccctggccggggcaacaggatgcgctgctacaactgtggcggcagccccagcagcagctgcaaggaggccgtgaccacctgtggggagggccggccccagcccggcctggagcagatcaagctgcccggcaacccccctgtgaccctcatccaccagcacccagcctgtgtggccgcccaccactgcaaccaggtggagacagaatctgtgggagatgtgacctacccagcccaccgggactgctacctgggggacctgtgcaacagcgctgtggccagccacgtggccccagctggcatcctggccgccgccgccacagccctgacctgcctgctgcccggcctgtggagcggctag

SEQ ID NO: 158196 - DNA, 402 bp, synthetic construct
  misc_feature 1..402: note = Description of Artificial Sequence: Synthetic coding sequence
  source 1..402: mol_type = other DNA
atgaagccccagtttgtgggcatcctgctgagcagcctgctgggcgccgccctgggcaacaggatgcgctgctacaactgtggcggcagccccagcagcacctgcaaggaggccgtgaccacctgtggggagggccggccccagcccggcctggagcagatcaagctgcccggcaacccccctgtgaccctcatccaccagcacccagcctgtgtggccgcccaccactgcaaccaggtggagacagagagcgtgggagatgtgacctacccagcccaccgggactgctacctgggggacctgtgcaacagcgctgtggccagccacgtggccccagctggcatcctggccgctgctgccacagccctgacctgcctgctgcccggcctgtggagcggctag

SEQ ID NO: 158197 - DNA, 402 bp, synthetic construct; identical to SEQ ID NO: 158189
  misc_feature 1..402: note = Description of Artificial Sequence: Synthetic coding sequence
  source 1..402: mol_type = other DNA

SEQ ID NO: 158198 - DNA, 402 bp, synthetic construct; identical to SEQ ID NO: 158189
  misc_feature 1..402: note = Description of Artificial Sequence: Synthetic coding sequence
  source 1..402: mol_type = other DNA

SEQ ID NO: 158199 - DNA, 525 bp, synthetic construct; identical to SEQ ID NO: 158190
  misc_feature 1..525: note = Description of Artificial Sequence: Synthetic coding sequence
  source 1..525: mol_type = other DNA

SEQ ID NO: 158200 - DNA, 486 bp, synthetic construct
  misc_feature 1..486: note = Description of Artificial Sequence: Synthetic coding sequence
  source 1..486: mol_type = other DNA
atgctggccccccagaggacccgggcccccagcccccgggccgccccccggcccaccaggtccatgctgcctgctgccatgaagggcctgggcctggccctgctggccgtgctgctgtgcagcgccccagcccacggcctgtggtgccaggactgcaccctgaccaccaacagcagccactgcacccccaagcagtgccagcccagcgacacagtgtgtgcctctgtgcgcatcacagaccccagcagcagcaggaaggaccacagcgtgaacaagatgtgtgccagcagctgtgactttgtgaagaggcacttcttcagtgactacctgatgggcttcatcaacagcggcatcctgaaggtggatgtggactgctgtgagaaggacctgtgcaatggagctgctggagctggccacagcccctgggccctggccggcggcctgctgctgagcctgggccctgccctgctgtgggccggcccctag

SEQ ID NO: 158201 - DNA, 486 bp, synthetic construct; identical to SEQ ID NO: 158200
  misc_feature 1..486: note = Description of Artificial Sequence: Synthetic coding sequence
  source 1..486: mol_type = other DNA

SEQ ID NO: 158202 - DNA, 423 bp, synthetic construct
  misc_feature 1..423: note = Description of Artificial Sequence: Synthetic coding sequence
  source 1..423: mol_type = other DNA
atgctgcctgctgccatgaagggcctgggcctggccctgctggccgtgctgctgtgcagcgccccagcccacggcctgtggtgccaggactgcaccctgaccaccaacagcagccactgcacccccaagcagtgccagcccagcgacacagtgtgtgcctctgtgcgcatcacagaccccagcagcagcaggaaggaccacagcgtgaacaagatgtgtgccagcagctgtgactttgtgaagaggcacttcttcagtgactacctgatgggcttcatcaacagcggcatcctgaaggtggatgtggactgctgtgagaaggacctgtgcaatggagctgctggggccggccacagcccctgggccctggccggcggcctgctgctgagcctgggccctgccctgctgtgggccggcccctag

SEQ ID NO: 158203 - DNA, 1971 bp, synthetic construct
  misc_feature 1..1971: note = Description of Artificial Sequence: Synthetic coding sequence
  source 1..1971: mol_type = other DNA
atggtggcccccaagagccacacagatgactgggcccctggccccttcagcagcaagccccagaggagccagctgcagatcttcagctctgtgctgcagaccagcctgctcttcctgctgatgggcctgcgggccagcggcaaggacagcgcccccaccgtggtgtctggcatcctgggcggctctgtgaccctgcccctgaacatctctgtggacacagaaattgaaaatgtcatctggattggccccaagaatgccctggcctttgcccggcccaaggaaaatgtgaccatcatggtgaagagctacctgggccgcctggacatcaccaagtggagctacagcctgtgcatcagcaacctgaccctgaatgatgctggcagctacaaggcccagatcaaccagaggaactttgaggtgaccacagaggaggagttcaccctgtttgtgtatgagcagctgcaggagccccaggtgaccatgaagtctgtgaaggtgtctgagaacttcagctgcaacatcaccctgatgtgcagcgtgaagggagctgagaagtctgtgctgtacagctggaccccccgggagccccacgccagcgagagcaatggaggcagcatcctgactgtgtccaggaccccctgtgaccctgacctgccctacatctgcacagcccagaaccctgtgtcccagaggagcagcctgcctgtgcacgtgggccagttctgcacagatcctggggccagccggggcggcaccactggagagaccgtggtgggcgtgctgggggagcctgtgaccctgcccctggccctgcctgcctgccgggacacagagaaggtggtgtggctgttcaacaccagcatcatcagcaaggagcgggaggaggccgccacagctgaccccctcatcaagagccgggacccctacaagaacagagtgtgggtgagcagccaggactgcagcctgaagatcagccagctgaagattgaagatgctggcccctaccacgcctacgtgtgcagcgaggccagctctgtgacctccatgacccacgtgaccctgctgatctaccgccgcctgaggaagcccaagatcacctggagcctgcggcacagtgaagatggcatctgccgcatcagcctgacctgcagcgtggaggatggcggcaacacagtgatgtacacctggacccccctgcagaaggaggccgtggtgtcccagggcgagagccacctgaatgtgtcctggaggagcagcgagaaccaccccaacctgacctgcacagccagcaaccctgtgagccgcagcagccaccagttcctgtctgagaacatctgcagcggccctgagaggaacaccaagctgtggattggcctcttcctgatggtgtgcctgctgtgtgtgggcatcttctcctggtgcatctggaagaggaagggccgctgcagcgtgcctgccttctgcagcagccaggccgaggccccagctgacaccccagagcccacagctggccacaccctgtacagcgtgctgagccagggctatgagaagctggacacccccctgcggcctgcccggcagcagcccacccccaccagtgacagcagcagtgacagcaacctgaccacagaagaagatgaagatagacctgaggtgcacaagcccatcagcggccgctatgaggtgtttgaccaggtgacccaggagggcgccggccatgaccctgcccctgagggccaggccgactatgaccctgtgaccccctacgtgacagaggtggagagcgtggtgggggagaacaccatgtatgcccaggtgttcaacctgcagggcaagacccctgtgtcccagaaggaggagagcagcgccaccatctactgcagcatcaggaagccccaggtggtggtgcccccaccccagcagaatgacctggagatccctgagagccccacctatgagaacttcacctag

SEQ ID NO: 158204 - DNA, 1566 bp, synthetic construct
  misc_feature 1..1566: note = Description of Artificial Sequence: Synthetic coding sequence
  source 1..1566: mol_type = other DNA
atggtggcccccaagagccacacagatgactgggcccctggccccttcagcagcaagccccagaggagccagctgcagatcttcagctctgtgctgcagaccagcctgctcttcctgctgatgggcctgcgggccagcggcaaggacagcgcccccaccgtggtgtctggcatcctgggcggctctgtgaccctgcccctgaacatctctgtggacacagaaattgaaaatgtcatctggattggccccaagaatgccctggcctttgcccggcccaaggaaaatgtgaccatcatggtgaagagctacctgggccgcctggacatcaccaagtggagctacagcctgtgcatcagcaacctgaccctgaatgatgctggcagctacaaggcccagatcaaccagaggaactttgaggtgaccacagaggaggagttcaccctgtttgtgtatgagcagctgcaggagccccaggtgaccatgaagtctgtgaaggtgtctgagaacttcagctgcaacatcaccctgatgtgcagcgtgaagggagctgagaagtctgtgctgtacagctggaccccccgggagccccacgccagcgagagcaatggaggcagcatcctgactgtgtccaggaccccctgtgaccctgacctgccctacatctgcacagcccagaaccctgtgtcccagaggagcagcctgcctgtgcacgtgggccagttctgcacagatcctggggccagccggggcggcaccactggagagaccgtggtgggcgtgctgggggagcctgtgaccctgcccctggccctgcctgcctgccgggacacagagaaggtggtgtggctgttcaacaccagcatcatcagcaaggagcgggaggaggccgccacagctgaccccctcatcaagagccgggacccctacaagaacagagtgtgggtgagcagccaggactgcagcctgaagatcagccagctgaagattgaagatgctggcccctaccacgcctacgtgtgcagcgaggccagctctgtgacctccatgacccacgtgaccctgctgatctacagacctgagaggaacaccaagctgtggattggcctcttcctgatggtgtgcctgctgtgtgtgggcatcttctcctggtgcatctggaagaggaagggccgctgcagcgtgcctgccttctgcagcagccaggccgaggccccagctgacaccccaggctatgagaagctggacacccccctgaggaagcccatcagcggccgctatgaggtgtttgaccaggtgacccaggagggcgccggccatgaccctgcccctgagggccaggccgactatgaccctgtgaccccctacgtgacagaggtggagagcgtggtgggggagaacaccatgtatgcccaggtgttcaacctgcagggcaagacccctgtgtcccagaaggaggagagcagcgccaccatctactgcagcatcaggaagccccaggtggtgcccccaccccagcagaatgacctggagatccctgagagccccacctatgagaacttcacctag

SEQ ID NO: 158205 - DNA, 813 bp, synthetic construct
  misc_feature 1..813: note = Description of Artificial Sequence: Synthetic coding sequence
  source 1..813: mol_type = other DNA
atgacccacgtgaccctgctgatctaccgccgcctgaggaagcccaagatcacctggagcctgcggcacagtgaagatggcatctgccgcatcagcctgacctgcagcgtggaggatggcggcaacacagtgatgtacacctggacccccctgcagaaggaggccgtggtgtcccagggcgagagccacctgaatgtgtcctggaggagcagcgagaaccaccccaacctgacctgcacagccagcaaccctgtgagccgcagcagccaccagttcctgtctgagaacatctgcagcggccctgagaggaacaccaagctgtggattggcctcttcctgatggtgtgcctgctgtgtgtgggcatcttctcctggtgcatctggaagaggaagggccgctgcagcgtgcctgccttctgcagcagccaggccgaggccccagctgacaccccaggctatgagaagctggacacccccctgcggcctgcccggcagcagcccacccccaccagtgacagcagcagtgacagcaacctgaccacagaagaagatgaagatagacctgaggtgcacaagcccatcagcggccgctatgaggtgtttgaccaggtgacccaggagggcgccggccatgaccctgcccctgagggccaggccgactatgaccctgtgaccccctacgtgacagaggtggagagcgtggtgggggagaacaccatgtatgcccaggtgttcaacctgcaggtggtgcccccaccccagcagaatgacctggagatccctgagagccccacctatgagaacttcacctag

SEQ ID NO: 158206 - DNA, 813 bp, synthetic construct; identical to SEQ ID NO: 158205
  misc_feature 1..813: note = Description of Artificial Sequence: Synthetic coding sequence
  source 1..813: mol_type = other DNA

SEQ ID NO: 158207 - DNA, 1968 bp, synthetic construct
  misc_feature 1..1968: note = Description of Artificial Sequence: Synthetic coding sequence
  source 1..1968: mol_type = other DNA
atggtggcccccaagagccacacagatgactgggcccctggccccttcagcagcaagccccagaggagccagctgcagatcttcagctctgtgctgcagaccagcctgctcttcctgctgatgggcctgcgggccagcggcaaggacagcgcccccaccgtggtgtctggcatcctgggcggctctgtgaccctgcccctgaacatctctgtggacacagaaattgaaaatgtcatctggattggccccaagaatgccctggcctttgcccggcccaaggaaaatgtgaccatcatggtgaagagctacctgggccgcctggacatcaccaagtggagctacagcctgtgcatcagcaacctgaccctgaatgatgctggcagctacaaggcccagatcaaccagaggaactttgaggtgaccacagaggaggagttcaccctgtttgtgtatgagcagctgcaggagccccaggtgaccatgaagtctgtgaaggtgtctgagaacttcagctgcaacatcaccctgatgtgcagcgtgaagggagctgagaagtctgtgctgtacagctggaccccccgggagccccacgccagcgagagcaatggaggcagcatcctgactgtgtccaggaccccctgtgaccctgacctgccctacatctgcacagcccagaaccctgtgtcccagaggagcagcctgcctgtgcacgtgggccagttctgcacagatcctggggccagccggggcggcaccactggagagaccgtggtgggcgtgctgggggagcctgtgaccctgcccctggccctgcctgcctgccgggacacagagaaggtggtgtggctgttcaacaccagcatcatcagcaaggagcgggaggaggccgccacagctgaccccctcatcaagagccgggacccctacaagaacagagtgtgggtgagcagccaggactgcagcctgaagatcagccagctgaagattgaagatgctggcccctaccacgcctacgtgtgcagcgaggccagctctgtgacctccatgacccacgtgaccctgctgatctaccgccgcctgaggaagcccaagatcacctggagcctgcggcacagtgaagatggcatctgccgcatcagcctgacctgcagcgtggaggatggcggcaacacagtgatgtacacctggacccccctgcagaaggaggccgtggtgtcccagggcgagagccacctgaatgtgtcctggaggagcagcgagaaccaccccaacctgacctgcacagccagcaaccctgtgagccgcagcagccaccagttcctgtctgagaacatctgcagcggccctgagaggaacaccaagctgtggattggcctcttcctgatggtgtgcctgctgtgtgtgggcatcttctcctggtgcatctggaagaggaagggccgctgcagcgtgcctgccttctgcagcagccaggccgaggccccagctgacaccccagagcccacagctggccacaccctgtacagcgtgctgagccagggctatgagaagctggacacccccctgcggcctgcccggcagcagcccacccccaccagtgacagcagcagtgacagcaacctgaccacagaagaagatgaagatagacctgaggtgcacaagcccatcagcggccgctatgaggtgtttgaccaggtgacccaggagggcgccggccatgaccctgcccctgagggccaggccgactatgaccctgtgaccccctacgtgacagaggtggagagcgtggtgggggagaacaccatgtatgcccaggtgttcaacctgcagggcaagacccctgtgtcccagaaggaggagagcagcgccaccatctactgcagcatcaggaagccccaggtggtgcccccaccccagcagaatgacctggagatccctgagagccccacctatgagaacttcacctag

SEQ ID NO: 158208 - DNA, 1116 bp, synthetic construct
  misc_feature 1..1116: note = Description of Artificial Sequence: Synthetic coding sequence
  source 1..1116: mol_type = other DNA
atggtggcccccaagagccacacagatgactgggcccctggccccttcagcagcaagccccagaggagccagctgcagatcttcagctctgtgctgcagaccagcctgctcttcctgctgatgggcctgcgggccagcggcaaggacagcgcccccaccgtggtgtctggcatcctgggcggctctgtgaccctgcccctgaacatctctgtggacacagaaattgaaaatgtcatctggattggccccaagaatgccctggcctttgcccggcccaaggaaaatgtgaccatcatggtgaagagctacctgggccgcctggacatcaccaagtggagctacagcctgtgcatcagcaacctgaccctgaatgatgctggcagctacaaggcccagatcaaccagaggaactttgaggtgaccacagaggaggagttcaccctgtttgtgtatgagcagctgcaggagccccaggtgaccatgaagtctgtgaaggtgtctgagaacttcagctgcaacatcaccctgatgtgcagcgtgaagggagctgagaagtctgtgctgtacagctggaccccccgggagccccacgccagcgagagcaatggaggcagcatcctgactgtgtccaggaccccctgtgaccctgacctgccctacatctgcacagcccagaaccctgtgtcccagaggagcagcctgcctgtgcacgtgggccagttctgcacagatcctggggccagccggggcggcaccactggagagaccgtggtgggcgtgctgggggagcctgtgaccctgcccctggccctgcctgcctgccgggacacagagaaggtggtgtggctgttcaacaccagcatcatcagcaaggagcgggaggaggccgccacagctgaccccctcatcaagagccgggacccctacaagaacagagtgtgggtgagcagccaggactgcagcctgaagatcagccagctgaagattgaagatgctggcccctaccacgcctacgtgtgcagcgaggccagctctgtgacctccatgacccacgtgaccctgctgatctaccgggagagcctgggccgggcccccatcacccgcttcctgctgtag

SEQ ID NO: 158209 - DNA, 1809 bp, synthetic construct
  misc_feature 1..1809: note = Description of Artificial Sequence: Synthetic coding sequence
  source 1..1809: mol_type = other DNA
atgggcctgcgggccagcggcaaggacagcgcccccaccgtggtgtctggcatcctgggcggctctgtgaccctgcccctgaacatctctgtggacacagaaattgaaaatgtcatctggattggccccaagaatgccctggcctttgcccggcccaaggaaaatgtgaccatcatggtgaagagctacctgggccgcctggacatcaccaagtggagctacagcctgtgcatcagcaacctgaccctgaatgatgctggcagctacaaggcccagatcaaccagaggaactttgaggtgaccacagaggaggagttcaccctgtttgtgtatgagcagctgcaggagccccaggtgaccatgaagtctgtgaaggtgtctgagaacttcagctgcaacatcaccctgatgtgcagcgtgaagggagctgagaagtctgtgctgtacagctggaccccccgggagccccacgccagcgagagcaatggaggcagcatcctgactgtgtccaggaccccctgtgaccctgacctgccctacatctgcacagcccagaaccctgtgtcccagaggagcagcctgcctgtgcacgtgggccagttctgcacagatcctggggccagccggggcggcaccactggagagaccgtggtgggcgtgctgggggagcctgtgaccctgcccctggccctgcctgcctgccgggacacagagaaggtggtgtggctgttcaacaccagcatcatcagcaaggagcgggaggaggccgccacagctgaccccctcatcaagagccgggacccctacaagaacagagtgtgggtgagcagccaggactgcagcctgaagatcagccagctgaagattgaagatgctggcccctaccacgcctacgtgtgcagcgaggccagctctgtgacctccatgacccacgtgaccctgctgatctaccgccgcctgaggaagcccaagatcacctggagcctgcggcacagtgaagatggcatctgccgcatcagcctgacctgcagcgtggaggatggcggcaacacagtgatgtacacctggacccccctgcagaaggaggccgtggtgtcccagggcgagagccacctgaatgtgtcctggaggagcagcgagaaccaccccaacctgacctgcacagccagcaaccctgtgagccgcagcagccaccagttcctgtctgagaacatctgcagcggccctgagaggaacaccaagctgtggattggcctcttcctgatggtgtgcctgctgtgtgtgggcatcttctcctggtgcatctggaagaggaagggccgctgcagcgtgcctgccttctgcagcagccaggccgaggccccagctgacaccccaggctatgagaagctggacacccccctgcggcctgcccggcagcagcccacccccaccagtgacagcagcagtgacagcaacctgaccacagaagaagatgaagatagacctgaggtgcacaagcccatcagcggccgctatgaggtgtttgaccaggtgacccaggagggcgccggccatgaccctgcccctgagggccaggccgactatgaccctgtgaccccctacgtgacagaggtggagagcgtggtgggggagaacaccatgtatgcccaggtgttcaacctgcagggcaagacccctgtgtcccagaaggaggagagcagcgccaccatctactgcagcatcaggaagccccaggtggtggtgcccccaccccagcagaatgacctggagatccctgagagccccacctatgagaacttcacctag

SEQ ID NO: 158210 - DNA, 582 bp, synthetic construct
  misc_feature 1..582: note = Description of Artificial Sequence: Synthetic coding sequence
  source 1..582: mol_type = other DNA
atggtggcccccaagagccacacagatgactgggcccctggccccttcagcagcaagccccagaggagccagctgcagatcttcagctctgtgctgcagaccagcctgctcttcctgctgatgggcctgcgggccagcggcaaggacagcgcccccaccgtggtgtctggcatcctgggcggctctgtgaccctgcccctgaacatctctgtggacacagaaattgaaaatgtcatctggattggccccaagaatgccctggcctttgcccggcccaaggaaaatgtgaccatcatggtgaagagctacctgggccgcctggacatcaccaagtggagctacagcctgtgcatcagcaacctgaccctgaatgatgctggcagctacaaggcccagatcaaccagaggaactttgaggtgaccacagaggaggagttcaccctgtttgtgtatgcccccttcatcgagaagctgtctgtgcacgtgattgaaggagaccacaggaccctgctggagggcagcggcctggagagcatcatcagcaccctggccgagccccgggtgtctgtgcgggagggctag

SEQ ID NO: 158211 - DNA, 1581 bp, synthetic construct
  misc_feature 1..1581: note = Description of Artificial Sequence: Synthetic coding sequence
  source 1..1581: mol_type = other DNA
atgggcctgcgggccagcggcaaggacagcgcccccaccgtggtgtctggcatcctgggcggctctgtgaccctgcccctgaacatctctgtggacacagaaattgaaaatgtcatctggattggccccaagaatgccctggcctttgcccggcccaaggaaaatgtgaccatcatggtgaagagctacctgggccgcctggacatcaccaagtggagctacagcctgtgcatcagcaacctgaccctgaatgatgctggcagctacaaggcccagatcaaccagaggaactttgaggtgaccacagaggaggagttcaccctgtttgtgtatgagcagctgcaggagccccaggtgaccatgaagtctgtgaaggtgtctgagaacttcagctgcaacatcaccctgatgtgcagcgtgaagggagctgagaagtctgtgctgtacagctggaccccccgggagccccacgccagcgagagcaatggaggcagcatcctgactgtgtccaggaccccctgtgaccctgacctgccctacatctgcacagcccagaaccctgtgtcccagaggagcagcctgcctgtgcacgtgggccagttctgcacagatcctggggccagccggggcggcaccactggagagaccgtggtgggcgtgctgggggagcctgtgaccctgcccctggccctgcctgcctgccgggacacagagaaggtggtgtggctgttcaacaccagcatcatcagcaaggagcgggaggaggccgccacagctgaccccctcatcaagagccgggacccctacaagaacagagtgtgggtgagcagccaggactgcagcctgaagatcagccagctgaagattgaagatgctggcccctaccacgcctacgtgtgcagcgaggccagctctgtgacctccatgacccacgtgaccctgctgatctacagacctgagaggaacaccaagctgtggattggcctcttcctgatggtgtgcctgctgtgtgtgggcatcttctcctggtgcatctggaagaggaagggccgctgcagcgtgcctgccttctgcagcagccaggccgaggccccagctgacaccccagagcccacagctggccacaccctgtacagcgtgctgagccagggctatgagaagctggacacccccctgcggcctgcccggcagcagcccacccccaccagtgacagcagcagtgacagcaacctgaccacagaagaagatgaagatagacctgaggtgcacaagcccatcagcggccgctatgaggtgtttgaccaggtgacccaggagggcgccggccatgaccctgcccctgagggccaggccgactatgaccctgtgaccccctacgtgacagaggtggagagcgtggtgggggagaacaccatgtatgcccaggtgttcaacctgcagggcaagacccctgtgtcccagaaggaggagagcagcgccaccatctactgcagcatcaggaagccccaggtggtggtgcccccaccccagcagaatgacctggagatccctgagagccccacctatgagaacttcacctag

SEQ ID NO: 158212 - DNA, 1884 bp, synthetic construct
  misc_feature 1..1884: note = Description of Artificial Sequence: Synthetic coding sequence
  source 1..1884: mol_type = other DNA
atggcccggggctctgtgtctgatgaggagatgatggagctgcgggaggcctttgccaaggtggacacagatggaaatggctacatctccttcaatgagctgaatgacctcttcaaggccgcctgcctgcccctgcccggctacagagtgcgggagatcacagagaacctgatggccaccggggacctggaccaggacggccgcatcagctttgatgagttcatcaagatcttccacggcctgaagagcacagatgtggccaagaccttcaggaaggccatcaacaagaaggagggcatctgtgccatcggcggcaccagcgagcagagctctgtgggcacccagcacagctacagcgaggaggagaagtatgcctttgtgaactggatcaacaaggccctggagaatgaccctgactgccgccacgtgatccccatgaaccccaacaccaatgacctcttcaatgctgtgggagatggcatcgtgctgtgcaagatgatcaacctgtctgtgcctgacaccattgatgagaggaccatcaacaagaagaagctgacccccttcaccatccaggagaacctgaacctggccctgaacagcgccagcgccatcggctgccacgtggtgaacattggagctgaggacctgaaggagggcaagccctacctggtgctgggcctgctgtggcaggtgatcaagattggcctgtttgctgacatcgagctgagcagaaatgaggccctgattgccctgctgcgggagggggagagcctggaggacctgatgaagctgagccctgaggagctgctgctgcgctgggccaactaccacctggagaatgccggctgcaacaagattggcaacttcagcacagacatcaaggacagcaaggcctactaccacctgctggagcaggtggcccccaagggagatgaggagggcgtgcctgctgtggtgattgacatgagcggcctgcgggagaaggatgacatccagagagctgagtgcatgctgcagcaggccgagcggctgggctgccggcagtttgtgacagccacagatgtggtgcggggcaaccccaagctgaacctggccttcatcgccaacctcttcaaccgctacccagccctgcacaagccagagaaccaggacatcgactggggcgccctggagggggagacccgggaggagaggaccttcaggaactggatgaacagcctgggcgtgaacccccgggtgaaccacctgtacagcgacctgagtgatgccctggtgatcttccagctgtatgagaagatcaaggtgcctgtggactggaacagagtgaacaagccaccctaccccaagctgggcggcaacatgaagaagctggagaactgcaactatgctgtggagctgggcaagaaccaggccaagttcagcctggtgggcatcggcggccaggacctgaatgaaggcaacagaaccctgaccctggccctgatctggcagctgatgaggcgctacaccctgaacatcctggaggagatcggcggcggccagaaggtgaatgatgacatcatcgtgaactgggtgaatgagaccctgcgggaggccaagaagagcagcagcatcagcagcttcaaggaccccaagatcagcaccagcctgcctgtgctggacctgattgatgccatccagcccggcagcatcaactatgacctgctgaagacagagaacctgaatgatgatgagaagctgaacaatgccaagtatgccatctccatggccaggaagattggagcccgggtgtatgccctgcctgaggacctggtggaggtgaaccccaagatggtgatgacagtgtttgcctgcctgatgggcaagggcatgaagagggtgtag

SEQ ID NO: 158213 - DNA, 1884 bp, synthetic construct; identical to SEQ ID NO: 158212
  misc_feature 1..1884: note = Description of Artificial Sequence: Synthetic coding sequence
  source 1..1884: mol_type = other DNA

SEQ ID NO: 158214 - DNA, 741 bp, synthetic construct
  misc_feature 1..741: note = Description of Artificial Sequence: Synthetic coding sequence
  source 1..741: mol_type = other DNA
atggcccggggctctgtgtctgatgaggagatgatggagctgcgggaggcctttgccaaggtggacacagatggaaatggctacatctccttcaatgagctgaatgacctcttcaaggccgcctgcctgcccctgcccggctacagagtgcgggagatcacagagaacctgatggccaccggggacctggaccaggacggccgcatcagctttgatgagttcatcaagatcttccacggcctgaagagcacagatgtggccaagaccttcaggaaggccatcaacaagaaggagggcatctgtgccatcggcggcaccagcgagcagagctctgtgggcacccagcacagctacagcgaggaggagaagtatgcctttgtgaactggatcaacaaggccctggagaatgaccctgactgccgccacgtgatccccatgaaccccaacaccaatgacctcttcaatgctgtgggagatggcatcgtgctgtgcaagatgatcaacctgtctgtgcctgacaccattgatgagaggaccatcaacaagaagaagctgacccccttcaccatccaggagaacctgaacctggccctgaacagcgccagcgccatcggctgccacgtggtgaacattggagctgaggacctgaaggagggcaagccctacctggtgctgggcctgctgtggcaggtgatcaagattggcctgtttgctgacatcgagctgagcagaaatgaatag

SEQ ID NO: 158215 - DNA, 591 bp, synthetic construct
  misc_feature 1..591: note = Description of Artificial Sequence: Synthetic coding sequence
  source 1..591: mol_type = other DNA
atgtgtgccgaggatggagacagcaagttctccatgagcatctccatgaacagccccttcctggagatcctgcacctggagaactgcaactatgctgtggagctgggcaagaaccaggccaagttcagcctggtgggcattggaggccaggacctgaatgaaggcaacagaaccctgaccctggccctgatctggcagctgatgaggcgctacaccctgaacatcctggaggagattggaggcggccagaaggtgaatgatgacatcatcgtgaactgggtgaatgagaccctgcgggaggccaagaagagcagcagcatcagcagcttcaaggaccccaagatcagcaccagcctgcctgtgctggacctgattgatgccatccagcccggcagcatcaactatgacctgctgaagacagagaacctgaatgatgatgagaagctgaacaatgccaagtatgccatctccatggccaggaagatcggggcccgggtgtatgccctgcctgaggacctggtggaggtgaaccccaagatggtgatgacagtgtttgcctgcctgatgggcaagggcatgaagagggtgtag

SEQ ID NO: 158216 - DNA, 201 bp, synthetic construct
  misc_feature 1..201: note = Description of Artificial Sequence: Synthetic coding sequence
  source 1..201: mol_type = other DNA
atggcccggggctctgtgtctgatgaggagatgatggagctgcgggaggcctttgccaaggtggacacagatggaaatggctacatctccttcaatgagctgaatgacctcttcaaggccgcctgcctgcccctgcccggctacagagtgcgggagatcacagagaacctgatggccaccggggacctggaccaggactag

SEQ ID NO: 158217 - DNA, 1602 bp, synthetic construct
  misc_feature 1..1602: note = Description of Artificial Sequence: Synthetic coding sequence
  source 1..1602: mol_type = other DNA
atggccctgagaaatgtgcccttccgctctgaggtgctgggctgggaccctgacagcctggccgactacttcaagaagctgaactacaaggactgtgagaaggctgtgaagaagtaccacattgatggagcccgcttcctgaacctgacagaaaatgacatccagaagttccccaagctgcgggtgcccatcctgagcaagctgagccaggagatcaacaagaatgaggagcggcgcagcatcttcaccaggaagccccaggtgccccgcttccctgaggagacagagagccatgaggaggacaatggaggctggagcagctttgaggaggatgattatgagagccccaatgatgaccaggatggagaagatgatggagactatgagagccccaatgaggaggaggaggcccctgtggaggatgatgctgactatgagcccccacccagcaatgatgaggaggccctgcagaacagcatcctgcctgccaagcccttccccaacagcaacagcatgtacatcgacaggcctccttctgggaagaccccccagcagccccctgtgcccccccagaggcccatggccgccctgcccccacctcctgctggcaggaaccacagccccctgcccccaccccagaccaaccacgaggagcccagccgcagcaggaaccacaagacagccaagctgcctgcccccagcattgacaggagcaccaagccacccctggacaggagcctggccccctttgaccgggagcccttcaccctgggcaagaagccacccttcagtgacaagcccagcatcccagctggccgcagcctgggggagcacctgcccaagatccagaagccacccctgccccccaccacagaaagacatgagaggagcagccccctgcccgggaagaagccccctgtgcccaagcacggctggggccctgaccggcgggagaatgatgaagatgatgtgcaccagaggcccctgccccagcctgccctgctgcccatgagcagcaacaccttccccagccgcagcaccaagcccagccccatgaaccccctgcccagcagccacatgcctggggccttcagcgagagcaacagcagcttcccccagagcgccagcctgcccccctacttcagccagggccccagcaacagaccacccatccgggcagagggcaggaacttccccctgcccctgcccaacaagccccggccccccagccctgctgaggaggagaacagcctgaatgaggagtggtacgtgtcctacatcaccaggcctgaggccgaggccgccctgaggaagatcaaccaggacggcaccttcctggtgcgggacagcagcaagaagaccaccaccaacccctacgtgctgatggtgctgtacaaggacaaggtgtacaacatccagatccgctaccagaaggagagccaggtgtacctgctgggcaccggcctgcggggcaaggaggacttcctgtctgtgtctgacatcatcgactacttcaggaagatgcccctgctgctgattgatggcaagaacagaggcagccgctaccagtgcaccctgacccatgctgctggctacccctag

SEQ ID NO: 158218 - DNA, 1578 bp, synthetic construct
  misc_feature 1..1578: note = Description of Artificial Sequence: Synthetic coding sequence
  source 1..1578: mol_type = other DNA
atgtgggaggcccagttcctgggcctgctcttcctgcagcccctgtgggtggcccctgtgaagcccctgcagcctggagctgaggtgcctgtggtgtgggcccaggagggcgccccagcccagctgccctgcagccccaccatccccctgcaggacctgagcctgctgcggcgggccggcgtgacctggcagcaccagccagattctggccccccagctgctgcccctggccaccccctggcccctggcccccaccctgctgcccccagctcctggggcccccggccccggcgctacacagtgctgtctgtgggccctgggggcctgcggagcggccgcctgcccctgcagccccgggtgcagctggatgagcggggccggcagagaggagacttcagcctgtggctgcggcctgcccggcgggcagatgctggggagtacagagctgctgtgcacctgcgggaccgggccctgagctgccgcctgcggctgcggctgggccaggcctccatgacagccagccccccaggcagcctgcgggccagtgactgggtgatcctgaactgcagcttcagcaggccagacaggcctgcctctgtgcactggttcaggaacagaggccagggccgggtgcctgtgcgggagagcccccaccaccacctggccgagagcttcctgttcctgccccaggtgagccccatggacagcggcccctggggctgcatcctgacctacagagatggcttcaacgtgtccatcatgtacaacctgactgtgctgggcctggagccccccacccccctgactgtgtatgctggggccggcagccgggtgggcctgccctgccgcctgcctgctggggtgggcaccaggagcttcctgacagccaagtggaccccacctgggggcggccctgacctgctggtgactggagacaatggagacttcaccctgcggctggaggatgtgtcccaggcccaggccggcacctacacctgccacatccacctgcaggagcagcagctgaatgccaccgtgaccctggccatcatcaccgtgacccccaagagctttggcagccctggcagcctgggcaagctgctgtgtgaggtgacccctgtgtctggccaggagagatttgtgtggagcagcctggacacccccagccagaggagcttcagcggcccctggctggaggcccaggaggcccagctgctgagccagccctggcagtgccagctgtaccagggcgagcggctgctgggcgctgctgtgtacttcacagagctgagcagccctggggcccagaggagcggccgggcccctggggccctgcctgctggccacctgctgctcttcctgatcctgggcgtgctgagcctgctgctgctggtgactggagccttcggcttccacctgtggaggcggcagtggaggccccggcgcttcagcgccctggagcagggcatccaccccccccaggcccagagcaagattgaggagctggagcaggagcctgagcctgagcctgagcctgagcctgagcctgagcctgagcctgagcctgagcagctgtag

SEQ ID NO: 158219 - DNA, 1020 bp, synthetic construct
  misc_feature 1..1020: note = Description of Artificial Sequence: Synthetic coding sequence
  source 1..1020: mol_type = other DNA
atggccgaggccagcagtgaccccggggctgaggagcgggaggagctgctgggccccacagcccagtggagcgtggaggatgaggaggaggccgtgcatgagcagtgccagcacgagcgggaccggcagctgcaggcccaggatgaggagggcggcggccacgtgcctgagcggcccaagcaggagatgctgctgagcctgaagcccagcgaggcccctgagctggatgaagatgagggctttggagactggagccagaggcctgagcagaggcagcagcacgagggcgcccagggcgccctggacagcggggagcccccccagtgccgcagccctgagggggagcaggaggaccggcccggcctgcacgcctatgagaaggaggacagtgatgaggtgcacctggaggagctgagcctgagcaaggagggccctggccctgaggacacagtgcaggacaacctgggcgccgccggggctgaggaggagcaggaggagcaccagaagtgccagcagcccaggacccccagccccctggtgctggagggcaccatcgagcagagcagcccccccctgagccccaccaccaagctgattgacagaacagagagcctgaacagaagcattgagaagagcaacagcgtgaagaagagccagcctgacctgcccatcagcaagattgaccagtggctggagcagtacacccaggccatcgagacagctggccgcacccccaagctggcccggcaggccagcattgagctgcccagcatggctgtggccagcaccaagagccgctgggagactggagaggtgcaggcccagagcgctgccaagacccccagctgcaaggacatcgtggccggggacatgagcaagaagagcctgtgggagcagaagggcggcagcaagaccagcagcaccatcaagagcacccccagcggcaagcgctacaagtttgtggccactggacatggcaagtatgagaaggtgctggtggagggcggccctgccccctag

SEQ ID NO: 158220 - DNA, 834 bp, synthetic construct
  misc_feature 1..834: note = Description of Artificial Sequence: Synthetic coding sequence
  source 1..834: mol_type = other DNA
atgctgctgagcctgaagcccagcgaggcccctgagctggatgaagatgagggctttggagactggagccagaggcctgagcagaggcagcagcacgagggcgcccagggcgccctggacagcggggagcccccccagtgccgcagccctgagggggagcaggaggaccggcccggcctgcacgcctatgagaaggaggacagtgatgaggtgcacctggaggagctgagcctgagcaaggagggccctggccctgaggacacagtgcaggacaacctgggcgccgccggggctgaggaggagcaggaggagcaccagaagtgccagcagcccaggacccccagccccctggtgctggagggcaccatcgagcagagcagcccccccctgagccccaccaccaagctgattgacagaacagagagcctgaacagaagcattgagaagagcaacagcgtgaagaagagccagcctgacctgcccatcagcaagattgaccagtggctggagcagtacacccaggccatcgagacagctggccgcacccccaagctggcccggcaggccagcattgagctgcccagcatggctgtggccagcaccaagagccgctgggagactggagaggtgcaggcccagagcgctgccaagacccccagctgcaaggacatcgtggccggggacatgagcaagaagagcctgtgggagcagaagggcggcagcaagaccagcagcaccatcaagagcacccccagcggcaagcgctacaagtttgtggccactggacatggcaagtatgagaaggtgctggtggagggcggccctgccccctag

SEQ ID NO: 158221 - DNA, 834 bp, synthetic construct; identical to SEQ ID NO: 158220
  misc_feature 1..834: note = Description of Artificial Sequence: Synthetic coding sequence
  source 1..834: mol_type = other DNA

SEQ ID NO: 158222 - DNA, 669 bp, synthetic construct
  misc_feature 1..669: note = Description of Artificial Sequence: Synthetic coding sequence
  source 1..669: mol_type = other DNA
atgctgctgagcctgaagcccagcgaggcccctgagctggatgaagatgagggctttggagactggagccagaggcctgagcagaggcagcagcacgagggcgcccagggcgccctggacagcggggagcccccccagtgccgcagccctgagggggagcaggaggaccggcccggcctgcacgcctatgagaaggaggacagtgatgaggtgcacctggaggagctgagcctgagcaaggagggccctggccctgaggacacagtgcaggacaacctgggcgccgccggggctgaggaggagcaggaggagcaccagaagtgccagcagcccaggacccccagccccctggtgctggagggcaccatcgagcagagcagcccccccctgagccccaccaccaagctgattgacagaacagagagcctgaacagaagcattgagaagagcaacagcgtgaagaagagccagcctgacctgcccatcagcaagattgaccagtggctggagcagtacacccaggccatcgagacagctggccgcacccccaagctggcccggcaggccagcattgagctgcccagcatggctgtggccagcaccaagagccgctgggagactggagaggtgcaggcccagagcgctgccaagacccccagctgcaagtag

SEQ ID NO: 158223 - DNA, 183 bp, synthetic construct
  misc_feature 1..183: note = Description of Artificial Sequence: Synthetic coding sequence
  source 1..183: mol_type = other DNA
atgctgctgagcctgaagcccagcgaggcccctgagctggatgaagatgagggctttggagactggagccagaggcctgagcagaggcagcagcacgagggcgcccagggcgccctggacagcggggagcccccccagtgccgcagccctgagggggagcaggaggaccggcccggcctgtag

SEQ ID NO: 158224 - DNA, 669 bp, synthetic construct; identical to SEQ ID NO: 158222
  misc_feature 1..669: note = Description of Artificial Sequence: Synthetic coding sequence
  source 1..669: mol_type = other DNA

SEQ ID NO: 158225 - DNA, 381 bp, synthetic construct
  misc_feature 1..381: note = Description of Artificial Sequence: Synthetic coding sequence
  source 1..381: mol_type = other DNA
atgctgctgagcctgaagcccagcgaggcccctgagctggatgaagatgagggctttggagactggagccagaggcctgagcagaggcagcagcacgagggcgcccagggcgccctggacagcggggagcccccccagtgccgcagccctgagggggagcaggaggaccggcccggcctgcacgcctatgagaaggaggacagtgatgaggtgcacctggaggagctgagcctgagcaaggagggccctggccctgaggacacagtgcaggacaacctgggcgccgccggggctgaggaggagcaggaggagcaccagaagtgccagcagcccaggacccccagccccctggtgctggagggcaccatcgagcagagctag

SEQ ID NO: 158226 - DNA, 195 bp, synthetic construct
  misc_feature 1..195: note = Description of Artificial Sequence: Synthetic coding sequence
  source 1..195: mol_type = other DNA
atgctgctgagcctgaagcccagcgaggcccctgagctggatgaagatgagggctttggagactggagccagaggcctgagcagaggcagcagcacgagggcgcccagggcgccctggacagcggggagcccccccagtgccgcagccctgagggggagcaggaggaccggcccggcctgcacgcctatgaatag

SEQ ID NO: 158227 - DNA, 1404 bp, synthetic construct
  misc_feature 1..1404: note = Description of Artificial Sequence: Synthetic coding sequence
  source 1..1404: mol_type = other DNA
atggcccccatctggagccccccaggccgggtgtctggctgccacctgagcagcggccctgcccctggcagcgctgtgggcccctggctgggcaccccccaccccagcctgcccctgcccctggccccccacaagcccccacctcctggcctgcccggcagcgctggccagaccagcctgcctgcccagagagaatgtgtgtttcctggagatgctgctgtgcaccaggagctgtgtggcctgggctttgaagaatgtctgggcagcatcccccaggcccaccagtgctacctgaccaacggccccaagaggaggaagtgcagccccaggagaagaggccgggccccagcctggctgtgtggcggcagccccccctgccaccagggcctgggccacgagcaccccagcagcggccccagcaccaactgcagcccccggcccacagcccagtggagcgtggaggatgaggaggaggccgtgcatgagcagtgccagcacgagcgggaccggcagctgcaggcccaggatgaggagggcggcggccacgtgcctgagcggcccaagcaggagatgctgctgagcctgaagcccagcgaggcccctgagctggatgaagatgagggctttggagactggagccagaggcctgagcagaggcagcagcacgagggcgcccagggcgccctggacagcggggagcccccccagtgccgcagccctgagggggagcaggaggaccggcccggcctgcacgcctatgagaaggaggacagtgatgaggtgcacctggaggagctgagcctgagcaaggagggccctggccctgaggacacagtgcaggacaacctgggcgccgccggggctgaggaggagcaggaggagcaccagaagtgccagcagcccaggacccccagccccctggtgctggagggcaccatcgagcagagcagcccccccctgagccccaccaccaagctgattgacagaacagagagcctgaacagaagcattgagaagagcaacagcgtgaagaagagccagcctgacctgcccatcagcaagattgaccagtggctggagcagtacacccaggccatcgagacagctggccgcacccccaagctggcccggcaggccagcattgagctgcccagcatggctgtggccagcaccaagagccgctgggagactggagaggtgcaggcccagagcgctgccaagacccccagctgcaaggacatcgtggccggggacatgagcaagaagagcctgtgggagcagaagggcggcagcaagaccagcagcaccatcaagagcacccccagcggcaagcgctacaagtttgtggccactggacatggcaagtatgagaaggtgctggtggagggcggccctgccccctag

SEQ ID NO: 158228 - DNA, 618 bp, synthetic construct
  misc_feature 1..618: note = Description of Artificial Sequence: Synthetic coding sequence
  source 1..618: mol_type = other DNA
atgaccccacctgagcggctcttcctgccccgggtgtgtggcaccaccctgcacctgctgctgctgggcctgctgctggtgctgctgcccggggcccagggcctgcccggggtgggcctgaccccatctgctgcccagacagcccggcagcaccccaagatgcacctggcccacagcaacctgaagccagctgcccacctgattggagaccccagcaagcagaacagcctgctgtggagggccaacacagaccgggccttcctgcaggacggcttcagcctgagcaacaacagcctgctggtgcccaccagcggcatctactttgtgtacagccaggtggtgttcagcggcaaggcctacagccccaaggccaccagcagccccctgtacctggcccacgaggtgcagctgttcagcagccagtaccccttccacgtgcccctgctgagcagccagaagatggtgtacccaggcctgcaggagccctggctgcacagcatgtaccatggagctgccttccagctgacccagggcgaccagctgagcacccacacagatggcatcccccacctggtgctgagccccagcacagtgttcttcggggcctttgccctgtag

SEQ ID NO: 158229 - DNA, 618 bp, synthetic construct; identical to SEQ ID NO: 158228
  misc_feature 1..618: note = Description of Artificial Sequence: Synthetic coding sequence
  source 1..618: mol_type = other DNA

SEQ ID NO: 158230 - DNA, 618 bp, synthetic construct
  misc_feature 1..618: note = Description of Artificial Sequence: Synthetic coding sequence
  source 1..618: mol_type = other DNA
atgaccccacctgagcggctcttcctgccccgggtgtgtggcaccaccctgcacctgctgctgctgggcctgctgctggtgctgctgcccggggcccagggcctgcccggggtgggcctgaccccatctgctgcccagacagcccggcagcaccccaagatgcacctggcccacagcaccctgaagccagctgcccacctgattggagaccccagcaagcagaacagcctgctgtggagggccaacacagaccgggccttcctgcaggacggcttcagcctgagcaacaacagcctgctggtgcccaccagcggcatctactttgtgtacagccaggtggtgttcagcggcaaggcctacagccccaaggccaccagcagccccctgtacctggcccacgaggtgcagctgttcagcagccagtaccccttccacgtgcccctgctgagcagccagaagatggtgtacccaggcctgcaggagccctggctgcacagcatgtaccatggagctgccttccagctgacccagggcgaccagctgagcacccacacagatggcatcccccacctggtgctgagccccagcacagtgttcttcggggcctttgccctgtag

SEQ ID NO: 158231 - DNA, 618 bp, synthetic construct; identical to SEQ ID NO: 158230
  misc_feature 1..618: note = Description of Artificial Sequence: Synthetic coding sequence
  source 1..618: mol_type = other DNA

SEQ ID NO: 158232 - DNA, 618 bp, synthetic construct; identical to SEQ ID NO: 158230
  misc_feature 1..618: note = Description of Artificial Sequence: Synthetic coding sequence
  source 1..618: mol_type = other DNA

SEQ ID NO: 158233 - DNA, 618 bp, synthetic construct
  misc_feature 1..618: note = Description of Artificial Sequence: Synthetic coding sequence
  source 1..618: mol_type = other DNA
atgaccccacctgagcggctcttcctgccccgggtgcggggcaccaccctgcacctgctgctgctgggcctgctgctggtgctgctgcccggggcccagggcctgcccggggtgggcctgaccccatctgctgcccagacagcccggcagcaccccaagatgcacctggcccacagcaccctgaagccagctgcccacctgattggagaccccagcaagcagaacagcctgctgtggagggccaacacagaccgggccttcctgcaggacggcttcagcctgagcaacaacagcctgctggtgcccaccagcggcatctactttgtgtacagccaggtggtgttcagcggcaaggcctacagccccaaggccaccagcagccccctgtacctggcccacgaggtgcagctgttcagcagccagtaccccttccacgtgcccctgctgagcagccagaagatggtgtacccaggcctgcaggagccctggctgcacagcatgtaccatggagctgccttccagctgacccagggcgaccagctgagcacccacacagatggcatcccccacctggtgctgagccccagcacagtgttcttcggggcctttgccctgtag

SEQ ID NO: 158234 - DNA, 618 bp, synthetic construct; identical to SEQ ID NO: 158230
  misc_feature 1..618: note = Description of Artificial Sequence: Synthetic coding sequence
  source 1..618: mol_type = other DNA

SEQ ID NO: 158235 - DNA, 417 bp, synthetic construct
  misc_feature 1..417: note = Description of Artificial Sequence: Synthetic coding sequence
  source 1..417: mol_type = other DNA
atgaccccacctgagcggctcttcctgccccgggtgtgtggcaccaccctgcacctgctgctgctgggcctgctgctggtgctgctgcccggggcccagggcctgcccggggtgggcctgaccccatctgctgcccagacagcccggcagcaccccaagatgcacctggcccacagcaccctgaagccagctgcccacctgattggagaccccagcaagcagaacagcctgctgtggagggccaacacagaccgggccttcctgcaggacggcttcagcctgagcaacaacagcctgctggtgcccaccagcggcatctactttgtgtacagccagggcagcagcccccccctgctgtggcccttccagcagctgaagagcagcctcatcaagagccctgagctgagcaagaagtag

SEQ ID NO: 158236 - DNA, 618 bp, synthetic construct; identical to SEQ ID NO: 158233
  misc_feature 1..618: note = Description of Artificial Sequence: Synthetic coding sequence
  source 1..618: mol_type = other DNA

SEQ ID NO: 158237 - DNA, 618 bp, synthetic construct; identical to SEQ ID NO: 158233
  misc_feature 1..618: note = Description of Artificial Sequence: Synthetic coding sequence
  source 1..618: mol_type = other DNA

SEQ ID NO: 158238 - DNA, 618 bp, synthetic construct; identical to SEQ ID NO: 158230
  misc_feature 1..618: note = Description of Artificial Sequence: Synthetic coding sequence
  source 1..618: mol_type = other DNA

SEQ ID NO: 158239 - DNA, 618 bp, synthetic construct; identical to SEQ ID NO: 158230
  misc_feature 1..618: note = Description of Artificial Sequence: Synthetic coding sequence
  source 1..618: mol_type = other DNA

SEQ ID NO: 158240 - DNA, 618 bp, synthetic construct; identical to SEQ ID NO: 158233
  misc_feature 1..618: note = Description of Artificial Sequence: Synthetic coding sequence
  source 1..618: mol_type = other DNA

SEQ ID NO: 158241 - DNA, 417 bp, synthetic construct
  misc_feature 1..417: note = Description of Artificial Sequence: Synthetic coding sequence
  source 1..417: mol_type = other DNA
atgaccccacctgagcggctcttcctgccccgggtgcggggcaccaccctgcacctgctgctgctgggcctgctgctggtgctgctgcccggggcccagggcctgcccggggtgggcctgaccccatctgctgcccagacagcccggcagcaccccaagatgcacctggcccacagcaccctgaagccagctgcccacctgattggagaccccagcaagcagaacagcctgctgtggagggccaacacagaccgggccttcctgcaggacggcttcagcctgagcaacaacagcctgctggtgcccaccagcggcatctactttgtgtacagccagggcagcagcccccccctgctgtggcccttccagcagctgaagagcagcctcatcaagagccctgagctgagcaagaagtag

SEQ ID NO: 158242 - DNA, 474 bp, synthetic construct
  misc_feature 1..474: note = Description of Artificial Sequence: Synthetic coding sequence
  source 1..474: mol_type = other DNA
atgaccccacctgagcggctcttcctgccccgggtgtgtggcaccaccctgcacctgctgctgctgggcctgctgctggtgctgctgcccggggcccagggcctgcccggggtgggcctgaccccatctgctgcccagacagcccggcagcaccccaagatgcacctggcccacagcaacctgaagccagctgcccacctgattggagaccccagcaagcagaacagcctgctgtggagggccaacacagaccgggccttcctgcaggacggcttcagcctgagcaacaacagcctgctggtgcccaccagcggcatctactttgtgtacagccagctgcctgaagatggagtgtccagagctgctggcaccctggccgccctggatgtgccccggggctgtgtgcctgcccaccctggccggcctgccatccacccccaccgctggcaccccccacccagcccccagccctag

SEQ ID NO: 158243 - DNA, 417 bp, synthetic construct; identical to SEQ ID NO: 158235
  misc_feature 1..417: note = Description of Artificial Sequence: Synthetic coding sequence
  source 1..417: mol_type = other DNA

SEQ ID NO: 158244 - DNA, 417 bp, synthetic construct; identical to SEQ ID NO: 158235
  misc_feature 1..417: note = Description of Artificial Sequence: Synthetic coding sequence
  source 1..417: mol_type = other DNA

SEQ ID NO: 158245 - DNA, 417 bp, synthetic construct; identical to SEQ ID NO: 158241
  misc_feature 1..417: note = Description of Artificial Sequence: Synthetic coding sequence
  source 1..417: mol_type = other DNA

SEQ ID NO: 158246 - DNA, 735 bp, synthetic construct
  misc_feature 1..735: note = Description of Artificial Sequence: Synthetic coding sequence
  source 1..735: mol_type = other DNA
atgggcgccctgggcctggagggccggggcggccgcctgcagggccggggcagcctgctgctggccgtggccggggccaccagcctggtgaccctgctgctggccgtgcccatcaccgtgctggccgtgctggccctggtgccccaggaccagggcggcctggtgacagaaacagctgaccccggggcccaggcccagcagggcctgggcttccagaagctgcctgaggaggagcctgagacagacctgagccctggcctgcctgctgcccacctgattggagcccccctgaagggccagggcctgggctgggagaccaccaaggagcaggccttcctgaccagcggcacccagttcagtgatgctgagggcctggccctgccccaggacggcctgtactacctgtactgcctggtgggctaccggggccgggcccctcctgggggcggggacccccagggccgctctgtgaccctgcggagcagcctgtaccgggccggcggggcctacggccctggcaccccagagctgctgctggagggcgctgagaccgtgacccctgtgctggaccctgcccggcggcagggctacggccccctgtggtacacctctgtgggctttggaggcctggtgcagctgcggcggggggagcgggtgtatgtgaacatcagccacccagacatggtggactttgcccggggcaagaccttcttcggggctgtgatggtgggctag

SEQ ID NO: 158247 - DNA, 735 bp, synthetic construct; identical to SEQ ID NO: 158246
  misc_feature 1..735: note = Description of Artificial Sequence: Synthetic coding sequence
  source 1..735: mol_type = other DNA

SEQ ID NO: 158248 - DNA, 735 bp, synthetic construct; identical to SEQ ID NO: 158246
  misc_feature 1..735: note = Description of Artificial Sequence: Synthetic coding sequence
  source 1..735: mol_type = other DNA

SEQ ID NO: 158249 - DNA, 735 bp, synthetic construct; identical to SEQ ID NO: 158246
  misc_feature 1..735: note = Description of Artificial Sequence: Synthetic coding sequence
  source 1..735: mol_type = other DNA

SEQ ID NO: 158250 - DNA, 735 bp, synthetic construct; identical to SEQ ID NO: 158246
  misc_feature 1..735: note = Description of Artificial Sequence: Synthetic coding sequence
  source 1..735: mol_type = other DNA

SEQ ID NO: 158251 - DNA, 735 bp, synthetic construct; identical to SEQ ID NO: 158246
  misc_feature 1..735: note = Description of Artificial Sequence: Synthetic coding sequence
  source 1..735: mol_type = other DNA

SEQ ID NO: 158252 - DNA, 234 bp, synthetic construct
  misc_feature 1..234: note = Description of Artificial Sequence: Synthetic coding sequence
  source 1..234: mol_type = other DNA
atgggcgccctgggcctggagggccggggcggccgcctgcagggccggggcagcctgctgctggccgtggccggggccaccagcctggtgaccctgctgctggccgtgcccatcaccgtgctggccgtgctggccctggtgccccaggaccagggcggcctgggcttccgcagctgccagaggaggagccagaagcagatcagcgcccctggcagccagctgcccaccagctag

SEQ ID NO: 158253 - DNA, 735 bp, synthetic construct; identical to SEQ ID NO: 158246
  misc_feature 1..735: note = Description of Artificial Sequence: Synthetic coding sequence
  source 1..735: mol_type = other DNA

SEQ ID NO: 158254 - DNA, 735 bp, synthetic construct; identical to SEQ ID NO: 158246
  misc_feature 1..735: note = Description of Artificial Sequence: Synthetic coding sequence
  source 1..735: mol_type = other DNA

SEQ ID NO: 158255 - DNA, 276 bp, synthetic construct
  misc_feature 1..276: note = Description of Artificial Sequence: Synthetic coding sequence
  source 1..276: mol_type = other DNA
atggccgccagcagccgggcccaggtgctgagcctgtaccgggccatgctgcgggagagcaagcgcttcagcgcctacaactaccgcacctatgctgtgcggcgcatcagagatgccttccgggagaacaagaatgtgaaggaccctgtggagatccagaccctggtgaacaaggccaagagggacctgggcgtcatccggcggcaggtgcacatcggccagctgtacagcacagacaagctgatcatcgagaacagagacatgcccaggacatag

SEQ ID NO: 158256 - DNA, 393 bp, synthetic construct
  misc_feature 1..393: note = Description of Artificial Sequence: Synthetic coding sequence
  source 1..393: mol_type = other DNA
atggccgccagcagccgggcccaggtgctgagcctgtaccgggccatgctgcgggagagcaagcgcttcagcgcctacaactaccgcacctatgctgtgcggcgcatcagagatgccttccgggagaacaagaatgtgaaggaccctgtggagatccagaccctggtgaacaaggccaagagggacctgggcgtcatccggcggcagatggacagccacagcgtggcccaggccggcgtgcactggaatgacctgagcagcctgcagcccctgcccccctggttcaagcagttcagctgcctgagcctgcccagctcctgggactacagaaggaccccaccccggctggccaacttctgcatcctgagcagagatgtgatcagcctgtactag

SEQ ID NO: 158257 - DNA, 291 bp, synthetic construct
  misc_feature 1..291: note = Description of Artificial Sequence: Synthetic coding sequence
  source 1..291: mol_type = other DNA
atggccgccagcagccgggcccaggtgctgagcctgtaccgggccatgctgcgggagagcaagcgcttcagcgcctacaactaccgcacctatgctgtgcggcgcatcagagatgccttccgggagaacaagaatgtgaaggaccctgtggagatccagaccctggtgaacaaggccaagagggacctgggcgtcatccggcggcaggtggccgagcagggcacagctgcccggaggaagagcggcaacagcagccgcagcctgggcaagccctgcacctcctggccctag

SEQ ID NO: 158258 - DNA, 2559 bp, synthetic construct
  misc_feature 1..2559: note = Description of Artificial Sequence: Synthetic coding sequence
  source 1..2559: mol_type = other DNA
atgctgagcggcaagaaggctgctgctgctgctgctgctgctgctgctgctgccactggaacagaagctggccctggaacagctgggggctctgaaaatggaagtgaggtggccgcccagcctgctggcctgagcggccctgctgaggtgggccctggagctgtgggggagaggacccccaggaagaaggagcccccccgggccagccccccaggcggcctggccgagcccccaggcagcgctggcccccaggccggccccaccgtggtgcccggcagcgccacccccatggagactggaattgctgagaccccagagggccgccgcaccagcaggaggaagagggccaaggtggagtaccgggagatggatgagagcctggccaacctgtctgaagatgagtactacagcgaggaggagagaaatgccaaggccgagaaggagaagaagctgcccccacctccaccccaggcccctcctgaggaggagaatgaaagtgagcctgaggagcccagcggcgtggagggcgccgccttccagagccggctgccccatgacaggatgaccagccaggaggccgcctgcttcccagacatcatcagcggcccccagcagacccagaaggtgttcctgttcatccggaacagaaccctgcagctgtggctggacaaccccaagatccagctgacctttgaggccaccctgcagcagctggaggccccctacaacagcgacacagtgctggtgcaccgggtgcacagctacctggagagacatggcctcatcaactttggcatctacaagaggatcaagcccctgcccaccaagaagacaggcaaggtgatcatcatcggcagcggcgtgtctggcctggccgccgcccggcagctgcagagctttggcatggatgtgaccctgctggaggcccgggacagagtgggcggccgggtggccaccttcaggaagggcaactacgtggccgacctgggcgccatggtggtgacaggcctgggcggcaaccccatggctgtggtgtccaagcaggtgaacatggagctggccaagatcaagcagaagtgccccctgtatgaggccaacggccaggccgtgcccaaggagaaggatgagatggtggagcaggagttcaaccggctgctggaggccaccagctacctgagccaccagctggacttcaacgtgctgaacaacaagcctgtgtccctgggccaggccctggaggtggtgatccagctgcaggagaagcacgtgaaggatgagcagatcgagcactggaagaagatcgtgaagacccaggaggagctgaaggagctgctgaacaagatggtgaacctgaaggagaagatcaaggagctgcaccagcagtacaaggaggccagcgaggtgaagccaccccgggacatcacagctgagttcctggtgaagagcaagcaccgggacctgacagccctgtgcaaggagtatgatgagctggccgagacccagggcaagctggaggagaagctgcaggagctggaggccaaccccccatctgatgtgtacctgagcagccgggaccggcagatcctggactggcactttgccaacctggagtttgccaatgccacccccctgagcaccctgagcctgaagcactgggaccaggatgatgactttgagttcaccggcagccacctgactgtgagaaatggctacagctgtgtgcctgtggccctggccgagggcctggacatcaagctgaacacagctgtgcggcaggtgcgctacacagccagcggctgtgaggtgattgctgtgaacaccaggagcaccagccagaccttcatctacaagtgtgatgctgtgctgtgcaccctgcccctgggcgtgctgaagcagcagcccccagctgtgcagtttgtgccccccctgcctgagtggaagaccagcgctgtgcagaggatgggcttcggcaacctgaacaaggtggtgctgtgctttgacagagtcttctgggaccccagcgtgaacctgtttggccacgtgggcagcaccacagccagcagaggagagctgttcctgttctggaacctgtacaaggcccccatcctgctggccctggtggccggggaggccgccggcatcatggagaacatcagtgatgatgtgattgtgggccgctgcctggccatcctgaagggcatcttcggcagcagcgctgtgccccagcccaaggagaccgtggtgagccgctggagggctgacccctgggcccggggcagctacagctatgtggccgccggcagcagtggaaatgactatgacctgatggcccagcccatcaccccaggccccagcatccctggggccccccagcccatccccaggctcttctttgctggggagcacaccatccggaactacccagccaccgtgcacggggccctgctgagcggcctgcgggaggccggcagaattgctgaccagttcctgggcgccatgtacaccctgccccggcaggccaccccaggagtgcctgcccagcagagccccagcatgtag

SEQ ID NO: 158259 - DNA, 2631 bp, synthetic construct
  misc_feature 1..2631: note = Description of Artificial Sequence: Synthetic coding sequence
  source 1..2631: mol_type = other DNA
atgctgagcggcaagaaggctgctgctgctgctgctgctgctgctgctgctgccactggaacagaagctggccctggaacagctgggggctctgaaaatggaagtgaggtggccgcccagcctgctggcctgagcggccctgctgaggtgggccctggagctgtgggggagaggacccccaggaagaaggagcccccccgggccagccccccaggcggcctggccgagcccccaggcagcgctggcccccaggccggccccaccgtggtgcccggcagcgccacccccatggagactggaattgctgagaccccagagggccgccgcaccagcaggaggaagagggccaaggtggagtaccgggagatggatgagagcctggccaacctgtctgaagatgagtactacagcgaggaggagagaaatgccaaggccgagaaggagaagaagctgcccccacctccaccccaggcccctcctgaggaggagaatgaaagtgagcctgaggagcccagcggccaggccggcggcctgcaggatgacagcagcggcggctatggagatggccaggccagcggcgtggagggcgccgccttccagagccggctgccccatgacaggatgaccagccaggaggccgcctgcttcccagacatcatcagcggcccccagcagacccagaaggtgttcctgttcatccggaacagaaccctgcagctgtggctggacaaccccaagatccagctgacctttgaggccaccctgcagcagctggaggccccctacaacagcgacacagtgctggtgcaccgggtgcacagctacctggagagacatggcctcatcaactttggcatctacaagaggatcaagcccctgcccaccaagaagacaggcaaggtgatcatcatcggcagcggcgtgtctggcctggccgccgcccggcagctgcagagctttggcatggatgtgaccctgctggaggcccgggacagagtgggcggccgggtggccaccttcaggaagggcaactacgtggccgacctgggcgccatggtggtgacaggcctgggcggcaaccccatggctgtggtgtccaagcaggtgaacatggagctggccaagatcaagcagaagtgccccctgtatgaggccaacggccaggccgagcgcatcatcgtgcccaaggagaaggatgagatggtggagcaggagttcaaccggctgctggaggccaccagctacctgagccaccagctggacttcaacgtgctgaacaacaagcctgtgtccctgggccaggccctggaggtggtgatccagctgcaggagaagcacgtgaaggatgagcagatcgagcactggaagaagatcgtgaagacccaggaggagctgaaggagctgctgaacaagatggtgaacctgaaggagaagatcaaggagctgcaccagcagtacaaggaggccagcgaggtgaagccaccccgggacatcacagctgagttcctggtgaagagcaagcaccgggacctgacagccctgtgcaaggagtatgatgagctggccgagacccagggcaagctggaggagaagctgcaggagctggaggccaaccccccatctgatgtgtacctgagcagccgggaccggcagatcctggactggcactttgccaacctggagtttgccaatgccacccccctgagcaccctgagcctgaagcactgggaccaggatgatgactttgagttcaccggcagccacctgactgtgagaaatggctacagctgtgtgcctgtggccctggccgagggcctggacatcaagctgaacacagctgtgcggcaggtgcgctacacagccagcggctgtgaggtgattgctgtgaacaccaggagcaccagccagaccttcatctacaagtgtgatgctgtgctgtgcaccctgcccctgggcgtgctgaagcagcagcccccagctgtgcagtttgtgccccccctgcctgagtggaagaccagcgctgtgcagaggatgggcttcggcaacctgaacaaggtggtgctgtgctttgacagagtcttctgggaccccagcgtgaacctgtttggccacgtgggcagcaccacagccagcagaggagagctgttcctgttctggaacctgtacaaggcccccatcctgctggccctggtggccggggaggccgccggcatcatggagaacatcagtgatgatgtgattgtgggccgctgcctggccatcctgaagggcatcttcggcagcagcgctgtgccccagcccaaggagaccgtggtgagccgctggagggctgacccctgggcccggggcagctacagctatgtggccgccggcagcagtggaaatgactatgacctgatggcccagcccatcaccccaggccccagcatccctggggccccccagcccatccccaggctcttctttgctggggagcacaccatccggaactacccagccaccgtgcacggggccctgctgagcggcctgcgggaggccggcagaattgctgaccagttcctgggcgccatgtacaccctgccccggcaggccaccccaggagtgcctgcccagcagagccccagcatgtag

SEQ ID NO: 158260 - DNA, 2631 bp, synthetic construct
  misc_feature 1..2631: note = Description of Artificial Sequence: Synthetic coding sequence
  source 1..2631: mol_type = other DNA
atgctgagcggcaagaaggctgctgctgctgctgctgctgctgctgctgctgccactggaacagaagctggccctggaacagctgggggctctgaaaatggaagtgaggtggccgcccagcctgctggcctgagcggccctgctgaggtgggccctggagctgtgggggagaggacccccaggaagaaggagcccccccgggccagccccccaggcggcctggccgagcccccaggcagcgctggcccccaggccggccccaccgtggtgcccggcagcgccacccccatggagactggaattgctgagaccccagagggccgccgcaccagcaggaggaagagggccaaggtggagtaccgggagatggatgagagcctggccaacctgtctgaagatgagtactacagcgaggaggagagaaatgccaaggccgagaaggagaagaagctgcccccacctccaccccaggcccctcctgaggaggagaatgaaagtgagcctgaggagcccagcggccaggccggcggcctgcaggatgacagcagcggcggctatggagatggccaggccagcggcgtggagggcgccgccttccagagccggctgccccatgacaggatgaccagccaggaggccgcctgcttcccagacatcatcagcggcccccagcagacccagaaggtgttcctgttcatccggaacagaaccctgcagctgtggctggacaaccccaagatccagctgacctttgaggccaccctgcagcagctggaggccccctacaacagcgacacagtgctggtgcaccgggtgcacagctacctggagagacatggcctcatcaactttggcatctacaagaggatcaagcccctgcccaccaagaagacaggcaaggtgatcatcatcggcagcggcgtgtctggcctggccgccgcccggcagctgcagagctttggcatggatgtgaccctgctggaggcccgggacagagtgggcggccgggtggccaccttcaggaagggcaactacgtggccgacctgggcgccatggtggtgacaggcctgggcggcaaccccatggctgtggtgtccaagcaggtgaacatggagctggccaagatcaagcagaagtgccccctgtatgaggccaacggccaggccgacacagtgaaggtgcccaaggagaaggatgagatggtggagcaggagttcaaccggctgctggaggccaccagctacctgagccaccagctggacttcaacgtgctgaacaacaagcctgtgtccctgggccaggccctggaggtggtgatccagctgcaggagaagcacgtgaaggatgagcagatcgagcactggaagaagatcgtgaagacccaggaggagctgaaggagctgctgaacaagatggtgaacctgaaggagaagatcaaggagctgcaccagcagtacaaggaggccagcgaggtgaagccaccccgggacatcacagctgagttcctggtgaagagcaagcaccgggacctgacagccctgtgcaaggagtatgatgagctggccgagacccagggcaagctggaggagaagctgcaggagctggaggccaaccccccatctgatgtgtacctgagcagccgggaccggcagatcctggactggcactttgccaacctggagtttgccaatgccacccccctgagcaccctgagcctgaagcactgggaccaggatgatgactttgagttcaccggcagccacctgactgtgagaaatggctacagctgtgtgcctgtggccctggccgagggcctggacatcaagctgaacacagctgtgcggcaggtgcgctacacagccagcggctgtgaggtgattgctgtgaacaccaggagcaccagccagaccttcatctacaagtgtgatgctgtgctgtgcaccctgcccctgggcgtgctgaagcagcagcccccagctgtgcagtttgtgccccccctgcctgagtggaagaccagcgctgtgcagaggatgggcttcggcaacctgaacaaggtggtgctgtgctttgacagagtcttctgggaccccagcgtgaacctgtttggccacgtgggcagcaccacagccagcagaggagagctgttcctgttctggaacctgtacaaggcccccatcctgctggccctggtggccggggaggccgccggcatcatggagaacatcagtgatgatgtgattgtgggccgctgcctggccatcctgaagggcatcttcggcagcagcgctgtgccccagcccaaggagaccgtggtgagccgctggagggctgacccctgggcccggggcagctacagctatgtggccgccggcagcagtggaaatgactatgacctgatggcccagcccatcaccccaggccccagcatccctggggccccccagcccatccccaggctcttctttgctggggagcacaccatccggaactacccagccaccgtgcacggggccctgctgagcggcctgcgggaggccggcagaattgctgaccagttcctgggcgccatgtacaccctgccccggcaggccaccccaggagtgcctgcccagcagagccccagcatgtag

SEQ ID NO: 158261 - DNA, 1773 bp, synthetic construct
  misc_feature 1..1773: note = Description of Artificial Sequence: Synthetic coding sequence
  source 1..1773: mol_type = other DNA
atggccaccccccggggccgcaccaagaagaaggccagctttgaccacagcccagacagcctgcccctgcggagcagcggccggcaggccaagaagaaggccacagagaccacagatgaagatgaagatggcggcagcgagaagaagtacagaaaatgtgagaaggccggctgcacagccacctgccctgtgtgctttgccagcgccagcgagcgctgtgccaagaatggctacaccagccgctggtaccacctgagctgtggggagcacttctgcaatgaatgttttgaccactactaccgcagccacaaggatggctatgacaagtacaccacctggaagaagatctggaccagcaatggcaagacagagcccagccccaaggccttcatggctgaccagcagctgccctactgggtgcagtgcaccaagccagagtgcaggaagtggaggcagctgaccaaggagatccagctgaccccccagatcgccaagacctaccgctgtggcatgaagcccaacacagccatcaagccagagaccagtgaccactgcagcctgcctgaggacctggaggccctgaccccccagaagtgcatcccccacatcatcgtgcggggcctggtgcgcatccgctgtgtgcaggaggtggagcgcatcctgtacttcatgaccaggaagggcctcatcaacacaggagtgctgtctgtgggcgctgaccagtacctgctgcccaaggactaccacaacaagagcgtcatcatcatcggggccggccctgctggcctggccgccgcccggcagctgcacaactttggcatcaaggtgacagtgctggaggccaaggacagaattggaggccgggtgtgggatgacaagagcttcaagggcgtgacagtgggccgcggggcccagatcgtgaatggctgcatcaacaaccctgtggccctgatgtgtgagcaggtgtctgcccgctcctgggaccacaatgagttctttgcccagtttgctggggaccacaccctgctgaccccaggctacagcgtcatcatcgagaagctggccgagggcctggacatccagctgaagagccctgtgcagtgcatcgactacagcggagatgaggtgcaggtgaccaccacagatggcaccggctacagcgcccagaaggtgctggtgacagtgcccctggccctgctgcagaagggggccatccagttcaacccccccctgtctgagaagaagatgaaggccatcaacagcctgggcgccggcatcatcgagaagatcgccctgcagttcccctaccgcttctgggacagcaaggtgcagggcgctgacttctttggacatgtgcccccatctgccagcaagaggggcctgtttgctgtgttctatgacatggacccccagaagaagcacagcgtgctgatgtctgtgattgctggggaggccgtggcctctgtgaggaccctggatgacaagcaggtgctgcagcagtgcatggccaccctgcgggagctgttcaaggagcaggaggtgcctgaccccaccaagtactttgtgacccgctggagcacagacccctggatccagatggcctacagctttgtgaagacaggaggcagcggggaggcctatgacatcatcgccgaggacatccagggcaccgtcttctttgctggggaggccaccaacagacacttcccccagacagtgactggagcctacctgtctggagtgcgggaggccagcaagattgctgccttctag

SEQ ID NO: 158262 - DNA, 2463 bp, synthetic construct
  misc_feature 1..2463: note = Description of Artificial Sequence: Synthetic coding sequence
  source 1..2463: mol_type = other DNA
atggccaccccccggggccgcaccaagaagaaggccagctttgaccacagcccagacagcctgcccctgcggagcagcggccggcaggccaagaagaaggccacagagaccacagatgaagatgaagatggcggcagcgagaagaagtacagaaaatgtgagaaggccggctgcacagccacctgccctgtgtgctttgccagcgccagcgagcgctgtgccaagaatggctacaccagccgctggtaccacctgagctgtggggagcacttctgcaatgaatgttttgaccactactaccgcagccacaaggatggctatgacaagtacaccacctggaagaagatctggaccagcaatggcaagacagagcccagccccaaggccttcatggctgaccagcagctgccctactgggtgcagtgcaccaagccagagtgcaggaagtggaggcagctgaccaaggagatccagctgaccccccagatcgccaagacctaccgctgtggcatgaagcccaacacagccatcaagccagagaccagtgaccactgcagcctgcctgaggacctgcgggtgctggaggtgagcaaccactggtggtacagcatgctgatcctgccccccctgctgaaggacagcgtggccgcccccctgctgagcgcctactacccagactgtgtgggcatgagccccagctgcaccagcaccaacagagctgctgccactggaaatgccagccctgggaagctggagcacagcaaggccgccctgtctgtgcacgtgcccggcatgaaccgctacttccagcccttctaccagcccaatgaatgtgggaaggccctgtgtgtgcggccagatgtgatggagctggatgagctgtatgagttccctgagtacagccgggaccccaccatgtacctggccctgaggaacctgatcctggccctgtggtacaccaactgcaaggaggccctgaccccccagaagtgcatcccccacatcatcgtgcggggcctggtgcgcatccgctgtgtgcaggaggtggagcgcatcctgtacttcatgaccaggaagggcctcatcaacacaggagtgctgtctgtgggcgctgaccagtacctgctgcccaaggactaccacaacaagagcgtcatcatcatcggggccggccctgctggcctggccgccgcccggcagctgcacaactttggcatcaaggtgacagtgctggaggccaaggacagaattggaggccgggtgtgggatgacaagagcttcaagggcgtgacagtgggccgcggggcccagatcgtgaatggctgcatcaacaaccctgtggccctgatgtgtgagcagctgggcatctccatgcacaagtttggagagcgctgtgacctgatccaggagggcggccgcatcacagaccccaccatcgacaagaggatggacttccacttcaatgccctgctggatgtggtgtctgagtggaggaaggacaagacccagctgcaggatgtgcccctgggggagaagattgaggagatctacaaggccttcatcaaggagagcggcatccagttcagcgagctggagggccaggtgctgcagttccacctgagcaacctggagtatgcctgtggcagcaacctgcaccaggtgtctgcccgctcctgggaccacaatgagttctttgcccagtttgctggggaccacaccctgctgaccccaggctacagcgtcatcatcgagaagctggccgagggcctggacatccagctgaagagccctgtgcagtgcatcgactacagcggagatgaggtgcaggtgaccaccacagatggcaccggctacagcgcccagaaggtgctggtgacagtgcccctggccctgctgcagaagggggccatccagttcaacccccccctgtctgagaagaagatgaaggccatcaacagcctgggcgccggcatcatcgagaagatcgccctgcagttcccctaccgcttctgggacagcaaggtgcagggcgctgacttctttggacatgtgcccccatctgccagcaagaggggcctgtttgctgtgttctatgacatggacccccagcacagcgtgctgatgtctgtgattgctggggaggccgtggcctctgtgaggaccctggatgacaagcaggtgctgcagcagtgcatggccaccctgcgggagctgttcaaggagcaggaggtgcctgaccccaccaagtactttgtgacccgctggagcacagacccctggatccagatggcctacagctttgtgaagacaggaggcagcggggaggcctatgacatcatcgccgaggacatccagggcaccgtcttctttgctggggaggccaccaacagacacttcccccagacagtgactggagcctacctgtctggagtgcgggaggccagcaagattgctgccttctag

SEQ ID NO: 158263 - DNA, 2472 bp, synthetic construct
  misc_feature 1..2472: note = Description of Artificial Sequence: Synthetic coding sequence
  source 1..2472: mol_type = other DNA
atggccaccccccggggccgcaccaagaagaaggccagctttgaccacagcccagacagcctgcccctgcggagcagcggccggcaggccaagaagaaggccacagagaccacagatgaagatgaagatggcggcagcgagaagaagtacagaaaatgtgagaaggccggctgcacagccacctgccctgtgtgctttgccagcgccagcgagcgctgtgccaagaatggctacaccagccgctggtaccacctgagctgtggggagcacttctgcaatgaatgttttgaccactactaccgcagccacaaggatggctatgacaagtacaccacctggaagaagatctggaccagcaatggcaagacagagcccagccccaaggccttcatggctgaccagcagctgccctactgggtgcagtgcaccaagccagagtgcaggaagtggaggcagctgaccaaggagatccagctgaccccccagatcgccaagacctaccgctgtggcatgaagcccaacacagccatcaagccagagaccagtgaccactgcagcctgcctgaggacctgcgggtgctggaggtgagcaaccactggtggtacagcatgctgatcctgccccccctgctgaaggacagcgtggccgcccccctgctgagcgcctactacccagactgtgtgggcatgagccccagctgcaccagcaccaacagagctgctgccactggaaatgccagccctgggaagctggagcacagcaaggccgccctgtctgtgcacgtgcccggcatgaaccgctacttccagcccttctaccagcccaatgaatgtgggaaggccctgtgtgtgcggccagatgtgatggagctggatgagctgtatgagttccctgagtacagccgggaccccaccatgtacctggccctgaggaacctgatcctggccctgtggtacaccaactgcaaggaggccctgaccccccagaagtgcatcccccacatcatcgtgcggggcctggtgcgcatccgctgtgtgcaggaggtggagcgcatcctgtacttcatgaccaggaagggcctcatcaacacaggagtgctgtctgtgggcgctgaccagtacctgctgcccaaggactaccacaacaagagcgtcatcatcatcggggccggccctgctggcctggccgccgcccggcagctgcacaactttggcatcaaggtgacagtgctggaggccaaggacagaattggaggccgggtgtgggatgacaagagcttcaagggcgtgacagtgggccgcggggcccagatcgtgaatggctgcatcaacaaccctgtggccctgatgtgtgagcagctgggcatctccatgcacaagtttggagagcgctgtgacctgatccaggagggcggccgcatcacagaccccaccatcgacaagaggatggacttccacttcaatgccctgctggatgtggtgtctgagtggaggaaggacaagacccagctgcaggatgtgcccctgggggagaagattgaggagatctacaaggccttcatcaaggagagcggcatccagttcagcgagctggagggccaggtgctgcagttccacctgagcaacctggagtatgcctgtggcagcaacctgcaccaggtgtctgcccgctcctgggaccacaatgagttctttgcccagtttgctggggaccacaccctgctgaccccaggctacagcgtcatcatcgagaagctggccgagggcctggacatccagctgaagagcccccaggtgcagtgcatcgactacagcggagatgaggtgcaggtgaccaccacagatggcaccggctacagcgcccagaaggtgctggtgacagtgcccctggccctgctgcagaagggggccatccagttcaacccccccctgtctgagaagaagatgaaggccatcaacagcctgggcgccggcatcatcgagaagatcgccctgcagttcccctaccgcttctgggacagcaaggtgcagggcgctgacttcttcggccacgtgccccccagcgccagcaagaggggcctgtttgctgtgttctatgacatggacccccagaagaagcacagcgtgctgatgtctgtgattgctggggaggccgtggcctctgtgaggaccctggatgacaagcaggtgctgcagcagtgcatggccaccctgcgggagctgttcaaggagcaggaggtgcctgaccccaccaagtactttgtgacccgctggagcacagacccctggatccagatggcctacagctttgtgaagacaggaggcagcggggaggcctatgacatcatcgccgaggacatccagggcaccgtcttctttgctggggaggccaccaacagacacttcccccagacagtgactggagcctacctgagcggcgtgcgggaggccagcaagattgctgccttctag

SEQ ID NO: 158264 - DNA, 1776 bp, synthetic construct
  misc_feature 1..1776: note = Description of Artificial Sequence: Synthetic coding sequence
  source 1..1776: mol_type = other DNA
atggccaccccccggggccgcaccaagaagaaggccagctttgaccacagcccagacagcctgcccctgcggagcagcggccggcaggccaagaagaaggccacagagaccacagatgaagatgaagatggcggcagcgagaagaagtacagaaaatgtgagaaggccggctgcacagccacctgccctgtgtgctttgccagcgccagcgagcgctgtgccaagaatggctacaccagccgctggtaccacctgagctgtggggagcacttctgcaatgaatgttttgaccactactaccgcagccacaaggatggctatgacaagtacaccacctggaagaagatctggaccagcaatggcaagacagagcccagccccaaggccttcatggctgaccagcagctgccctactgggtgcagtgcaccaagccagagtgcaggaagtggaggcagctgaccaaggagatccagctgaccccccagatcgccaagacctaccgctgtggcatgaagcccaacacagccatcaagccagagaccagtgaccactgcagcctgcctgaggacctggaggccctgaccccccagaagtgcatcccccacatcatcgtgcggggcctggtgcgcatccgctgtgtgcaggaggtggagcgcatcctgtacttcatgaccaggaagggcctcatcaacacaggagtgctgtctgtgggcgctgaccagtacctgctgcccaaggactaccacaacaagagcgtcatcatcatcggggccggccctgctggcctggccgccgcccggcagctgcacaactttggcatcaaggtgacagtgctggaggccaaggacagaattggaggccgggtgtgggatgacaagagcttcaagggcgtgacagtgggccgcggggcccagatcgtgaatggctgcatcaacaaccctgtggccctgatgtgtgagcaggtgtctgcccgctcctgggaccacaatgagttctttgcccagtttgctggggaccacaccctgctgaccccaggctacagcgtcatcatcgagaagctggccgagggcctggacatccagctgaagagcccccaggtgcagtgcatcgactacagcggagatgaggtgcaggtgaccaccacagatggcaccggctacagcgcccagaaggtgctggtgacagtgcccctggccctgctgcagaagggggccatccagttcaacccccccctgtctgagaagaagatgaaggccatcaacagcctgggcgccggcatcatcgagaagatcgccctgcagttcccctaccgcttctgggacagcaaggtgcagggcgctgacttcttcggccacgtgccccccagcgccagcaagaggggcctgtttgctgtgttctatgacatggacccccagaagaagcacagcgtgctgatgtctgtgattgctggggaggccgtggcctctgtgaggaccctggatgacaagcaggtgctgcagcagtgcatggccaccctgcgggagctgttcaaggagcaggaggtgcctgaccccaccaagtactttgtgacccgctggagcacagacccctggatccagatggcctacagctttgtgaagacaggaggcagcggggaggcctatgacatcatcgccgaggacatccagggcaccgtcttctttgctggggaggccaccaacagacacttcccccagacagtgactggagcctacctgagcggcgtgcgggaggccagcaagattgctgccttctag

SEQ ID NO: 158265 - DNA, 1923 bp, synthetic construct
  misc_feature 1..1923: note = Description of Artificial Sequence: Synthetic coding sequence
  source 1..1923: mol_type = other DNA
tgatgcagcctgcctgaggacctgcgggtgctggaggtgagcaaccactggtggtacagcatgctgatcctgccccccctgctgaaggacagcgtggccgcccccctgctgagcgcctactacccagactgtgtgggcatgagccccagctgcaccagcaccaacagagctgctgccactggaaatgccagccctgggaagctggagcacagcaaggccgccctgtctgtgcacgtgcccggcatgaaccgctacttccagcccttctaccagcccaatgaatgtgggaaggccctgtgtgtgcggccagatgtgatggagctggatgagctgtatgagttccctgagtacagccgggaccccaccatgtacctggccctgaggaacctgatcctggccctgtggtacaccaactgcaaggaggccctgaccccccagaagtgcatcccccacatcatcgtgcggggcctggtgcgcatccgctgtgtgcaggaggtggagcgcatcctgtacttcatgaccaggaagggcctcatcaacacaggagtgctgtctgtgggcgctgaccagtacctgctgcccaaggactaccacaacaagagcgtcatcatcattggagctggccctgctggcctggccgccgcccggcagctgcacaactttggcatcaaggtgacagtgctggaggccaaggaccgcatcggcggccgggtgtgggatgacaagagcttcaagggcgtgacagtgggccgcggggcccagatcgtgaatggctgcatcaacaaccctgtggccctgatgtgtgagcagctgggcatctccatgcacaagtttggagagcgctgtgacctgatccaggagggcggccgcatcacagaccccaccatcgacaagaggatggacttccacttcaatgccctgctggatgtggtgtctgagtggaggaaggacaagacccagctgcaggatgtgcccctgggggagaagattgaggagatctacaaggccttcatcaaggagagcggcatccagttcagcgagctggagggccaggtgctgcagttccacctgagcaacctggagtatgcctgtggcagcaacctgcaccaggtgtctgcccgctcctgggaccacaatgagttctttgcccagtttgctggggaccacaccctgctgaccccaggctacagcgtcatcatcgagaagctggccgagggcctggacatccagctgaagagcccccaggtgcagtgcatcgactacagcggagatgaggtgcaggtgaccaccacagatggcaccggctacagcgcccagaaggtgctggtgacagtgcccctggccctgctgcagaagggggccatccagttcaacccccccctgtctgagaagaagatgaaggccatcaacagcctgggcgccggcatcatcgagaagatcgccctgcagttcccctaccgcttctgggacagcaaggtgcagggcgctgacttctttggacatgtgcccccatctgccagcaagaggggcctgtttgctgtgttctatgacatggacccccagaagaagcacagcgtgctgatgtctgtgattgctggggaggccgtggcctctgtgaggaccctggatgacaagcaggtgctgcagcagtgcatggccaccctgcgggagctgttcaaggagcaggaggtgcctgaccccaccaagtactttgtgacccgctggagcacagacccctggatccagatggcctacagctttgtgaagacaggaggcagcggggaggcctatgacatcatcgccgaggacatccagggcaccgtcttctttgctggggaggccaccaacagacacttcccccagacagtgactggagcctacctgtctggagtgcgggaggccagcaagattgctgccttctag

SEQ ID NO: 158266 - DNA, 342 bp, synthetic construct
  misc_feature 1..342: note = Description of Artificial Sequence: Synthetic coding sequence
  source 1..342: mol_type = other DNA
atgtctgtgattgctggggaggccgtggcctctgtgaggaccctggatgacaagcaggtgctgcagcagtgcatggccaccctgcgggagctgttcaaggagcaggaggtgcctgaccccaccaagtactttgtgacccgctggagcacagacccctggatccagatggcctacagctttgtgaagacaggaggcagcggggaggcctatgacatcatcgccgaggacatccagggcaccgtcttctttgctggggaggccaccaacagacacttcccccagacagtgactggagcctacctgagcggcgtgcgggaggccagcaagattgctgccttctag

SEQ ID NO: 158267 - DNA, 3966 bp, synthetic construct
  misc_feature 1..3966: note = Description of Artificial Sequence: Synthetic coding sequence
  source 1..3966: mol_type = other DNA
atggtgctgaccctgggggagagctggcctgtgctggtgggccgccgcttcctgagcctgtctgctgctgatggcagtgatggcagccatgacagctgggatgtggagcgggtggccgagtggccctggctgagcggcaccatccgggctgtgagccacacagatgtgaccaagaaggacctgaaggtgtgtgtggagtttgatggagagagctggaggaagaggcgctggattgaggtgtacagcctgctgcggcgggccttcctggtggagcacaacctggtgctggccgagaggaagagccctgagatcagcgagcgcatcgtgcagtggccagccatcacctacaagcccctgctggacaaggccggcctgggcagcatcacctctgtgcgcttcctgggggaccagcagagggtcttcctgagcaaggacctgctgaagcccatccaggatgtgaacagcctgcggctgagcctgacagacaaccagatcgtgtccaaggagttccaggccctgattgtgaagcacctggatgagagccacctgctgaagggggacaagaacctggtgggcagcgaggtgaagatctacagcctggaccccagcacccagtggttcagcgccaccgtcatcaatggaaatcctgccagcaagaccctgcaggtgaactgtgaggagatcccagccctgaagatcgtggaccccagcctcatccacgtggaggtggtgcatgacaacctggtgacctgtggcaacagcgccagaattggagctgtgaagaggaagagcagcgagaacaacggcaccctggtgtccaagcaggccaagagctgcagcgaggccagccccagcatgtgccctgtgcagagcgtgcccaccaccgtcttcaaggagatcctgctgggctgcacagctgccaccccacccagcaaggacccccggcagcagagcaccccccaggccgccaacagcccccccaacctgggcgccaagatcccccagggctgccacaagcagagcctgcctgaggagatcagcagctgcctgaacaccaagtctgaggccctgcggaccaagccagatgtgtgcaaggccggcctgctgagcaagagcagccagattggaactggagacctgaagatcctgacagagcccaagggcagctgcacccagcccaagaccaacacagaccaggagaaccggctggagagcgtgccccaggccctgaccggcctgcccaaggagtgcctgcccaccaaggccagcagcaaggccgagctggagatcgccaaccccccagagctgcagaagcacctggagcacgcccccagccccagtgatgtgtccaatgcccctgaggtgaaggccggcgtgaacagcgacagccccaacaactgcagcggcaagaaggtggagcccagcgccctggcctgccgcagccagaacctgaaggagagctctgtgaaggtggacaatgaaagctgctgcagccgcagcaacaacaagatccagaatgcccccagcaggaagtctgtgctgacagatcctgccaagctgaagaagctgcagcagagcggggaggcctttgtgcaggatgacagctgtgtgaacatcgtggcccagctgcccaagtgccgggagtgccgcctggacagcctgaggaaggacaaggagcagcagaaggacagccctgtgttctgccgcttcttccacttccggcggctgcagttcaacaagcatggagtgctgcgggtggagggcttcctgacccccaacaagtatgacaatgaggccatcggcctgtggctgcccctgaccaagaatgtggtgggcatcgacctggacacagccaagtacatcctggccaacattggagaccacttctgccagatggtgatcagcgagaaggaggccatgagcaccatcgagccccaccggcaggtggcctggaagagagctgtgaagggcgtgcgggagatgtgtgatgtgtgtgacaccaccatcttcaacctgcactgggtgtgcccccgctgtggctttggagtgtgtgtggactgctacaggatgaagaggaagaactgccagcagggcgccgcctacaagaccttctcctggctgaagtgtgtgaagagccagatccacgagcctgagaacctgatgcccacccagatcatccctgggaaggccctgtatgatgtgggggacatcgtgcacagcgtgcgggccaagtggggcatcaaggccaactgcccctgcagcaaccggcagttcaagctgttcagcaagccagccagcaaggaggacctgaagcagaccagcctggccggggagaagcccaccctgggcgctgtgctgcagcagaaccccagcgtgctggagcctgctgctgtgggcggggaggccgccagcaagccagctggctccatgaagccagcctgcccagccagcaccagccccctgaactggctggccgacctgaccagcggaaatgtgaacaaggagaacaaggagaagcagcccaccatgcccatcctgaagaatgagatcaagtgcctgccccccctgccccccctgagcaagagcagcacagtgctgcacaccttcaacagcaccatcctgacccctgtgagcaacaacaacagcggcttcctgaggaacctgctgaacagcagcacaggcaagacagaaaatggcctgaagaacacccccaagatcctggatgacatctttgccagcctggtgcagaacaagaccaccagtgacctgagcaagaggccccagggcctgaccatcaagcccagcatcctgggctttgacaccccccactactggctgtgtgacaaccggctgctgtgcctgcaggaccccaacaacaagagcaactggaatgtgttccgggagtgctggaagcagggccagcctgtgatggtgtctggagtgcaccacaagctgaacagcgagctgtggaagccagagagcttcaggaaggagtttggagagcaggaggtggacctggtgaactgcaggaccaatgagatcatcaccggggccaccgtgggggacttctgggatggctttgaagatgtgcccaaccggctgaagaatgagaaggagcccatggtgctgaagctgaaggactggcccccaggagaggacttccgggacatgatgcccagcagatttgatgacctgatggccaacatccccctgcctgagtacaccaggagagatggcaagctgaacctggccagccggctgcccaactactttgtgcggccagacctgggccccaagatgtacaatgcctacggcctcatcaccccagaggacagaaaatatggcaccaccaacctgcacctggatgtgtctgatgctgccaacgtgatggtgtatgtgggcatccccaagggccagtgtgagcaggaggaggaggtgctgaagaccatccaggatggagacagtgatgagctgaccatcaagcgcttcatcgagggcaaggagaagccaggggccctgtggcacatctatgctgccaaggacacagagaagatccgggagttcctgaagaaggtgtctgaggagcagggccaggagaacccagctgaccatgaccccatccatgaccagagctggtacctggacaggagcctgaggaagaggctgcaccaggagtatggagtgcagggctgggccatcgtgcagttcctgggagatgtggtgttcatcccagctggggccccccaccaggtgcacaacctgtacagctgcatcaaggtggccgaggactttgtgtccccagagcacgtgaagcactgcttctggctgacccaggagttccgctacctgagccagacccacaccaaccacgaggacaagctgcaggtgaagaatgtcatctaccacgctgtgaaggatgctgtggccatgctgaaggccagcgagagcagctttgggaagccctag

SEQ ID NO: 158268 - DNA, 3966 bp, synthetic construct; identical to SEQ ID NO: 158267
  misc_feature 1..3966: note = Description of Artificial Sequence: Synthetic coding sequence
  source 1..3966: mol_type = other DNA

SEQ ID NO: 158269 - DNA, 3966 bp, synthetic construct; identical to SEQ ID NO: 158267
  misc_feature 1..3966: note = Description of Artificial Sequence: Synthetic coding sequence
  source 1..3966: mol_type = other DNA

SEQ ID NO: 158270 - DNA, 513 bp, synthetic construct
  misc_feature 1..513: note = Description of Artificial Sequence: Synthetic coding sequence
  source 1..513: mol_type = other DNA
atggtgctgaccctgggggagagctggcctgtgctggtgggccgccgcttcctgagcctgtctgctgctgatggcagtgatggcagccatgacagctgggatgtggagcgggtggccgagtggccctggctgagcggcaccatccgggctgtgagccacacagatgtgaccaagaaggacctgaaggtgtgtgtggagtttgatggagagagctggaggaagaggcgctggattgaggtgtacagcctgctgcggcgggccttcctggtggagcacaacctggtgctggccgagaggaagagccctgagatcagcgagcgcatcgtgcagtggccagccatcacctacaagcccctgctggacaaggccggcctgggcagcatcacctctgtgcgcttcctgggggaccagcagagggtcttcctgagcaaggacctgctgaagcccatccaggatgtgaacagcctgcggctgagcctgacagacaaccagatcgtgtccaaggagttctag

SEQ ID NO: 158271 - DNA, 2136 bp, synthetic construct
  misc_feature 1..2136: note = Description of Artificial Sequence: Synthetic coding sequence
  source 1..2136: mol_type = other DNA
atggtgctgaccctgggggagagctggcctgtgctggtgggccgccgcttcctgagcctgtctgctgctgatggcagtgatggcagccatgacagctgggatgtggagcgggtggccgagtggccctggctgagcggcaccatccgggctgtgagccacacagatgtgaccaagaaggacctgaaggtgtgtgtggagtttgatggagagagctggaggaagaggcgctggattgaggtgtacagcctgctgcggcgggccttcctggtggagcacaacctggtgctggccgagaggaagagccctgagatcagcgagcgcatcgtgcagtggccagccatcacctacaagcccctgctggacaaggccggcctgggcagcatcacctctgtgcgcttcctgggggaccagcagagggtcttcctgagcaaggacctgctgaagcccatccaggatgtgaacagcctgcggctgagcctgacagacaaccagatcgtgtccaaggagttccaggccctgattgtgaagcacctggatgagagccacctgctgaagggggacaagaacctggtgggcagcgaggtgaagatctacagcctggaccccagcacccagtggttcagcgccaccgtcatcaatggaaatcctgccagcaagaccctgcaggtgaactgtgaggagatcccagccctgaagatcgtggaccccagcctcatccacgtggaggtggtgcatgacaacctggtgacctgtggcaacagcgccagaattggagctgtgaagaggaagagcagcgagaacaacggcaccctggtgtccaagcaggccaagagctgcagcgaggccagccccagcatgtgccctgtgcagagcgtgcccaccaccgtcttcaaggagatcctgctgggctgcacagctgccaccccacccagcaaggacccccggcagcagagcaccccccaggccgccaacagcccccccaacctgggcgccaagatcccccagggctgccacaagcagagcctgcctgaggagatcagcagctgcctgaacaccaagtctgaggccctgcggaccaagccagatgtgtgcaaggccggcctgctgagcaagagcagccagattggaactggagacctgaagatcctgacagagcccaagggcagctgcacccagcccaagaccaacacagaccaggagaaccggctggagagcgtgccccaggccctgaccggcctgcccaaggagtgcctgcccaccaaggccagcagcaaggccgagctggagatcgccaaccccccagagctgcagaagcacctggagcacgcccccagccccagtgatgtgtccaatgcccctgaggtgaaggccggcgtgaacagcgacagccccaacaactgcagcggcaagaaggtggagcccagcgccctggcctgccgcagccagaacctgaaggagagctctgtgaaggtggacaatgaaagctgctgcagccgcagcaacaacaagatccagaatgcccccagcaggaagtctgtgctgacagatcctgccaagctgaagaagctgcagcagagcggggaggcctttgtgcaggatgacagctgtgtgaacatcgtggcccagctgcccaagtgccgggagtgccgcctggacagcctgaggaaggacaaggagcagcagaaggacagccctgtgttctgccgcttcttccacttccggcggctgcagttcaacaagcatggagtgctgcgggtggagggcttcctgacccccaacaagtatgacaatgaggccatcggcctgtggctgcccctgaccaagaatgtggtgggcatcgacctggacacagccaagtacatcctggccaacattggagaccacttctgccagatggtgatcagcgagaaggaggccatgagcaccatcgagccccaccggcaggtggcctggaagagagctgtgaagggcgtgcgggagatgtgtgatgtgtgtgacaccaccatcttcaacctgcactgggtgtgcccccgctgtggctttggagtgtgtgtggactgctacaggatgaagaggaagaactgccagcagggagaaaatagatttgacagccccccagcccccctgcacagctag

SEQ ID NO: 158272 - DNA, 366 bp, synthetic construct
  misc_feature 1..366: note = Description of Artificial Sequence: Synthetic coding sequence
  source 1..366: mol_type = other DNA
atggtgctgaccctgggggagagctggcctgtgctggtgggccgccgcttcctgagcctgtctgctgctgatggcagtgatggcagccatgacagctgggatgtggagcgggtggccgagtggccctggctgagcggcaccatccgggctgtgagccacacagatgtgaccaagaaggacctgaaggtgtgtgtggagtttgatggagagagctggaggaagaggcgctggattgaggtgtacagcctgctgcggcgggccttcctggtggagcacaacctggtgctggccgagaggaagagccctgagatcagcgagcgcatcgtgcagtggccagccatcacctacaagcccctgctggactag

SEQ ID NO: 158273 - DNA, 3984 bp, synthetic construct
  misc_feature 1..3984: note = Description of Artificial Sequence: Synthetic coding sequence
  source 1..3984: mol_type = other DNA
atggtgctgaccctgggggagagctggcctgtgctggtgggccgccgcttcctgagcctgtctgctgctgatggcagtgatggcagccatgacagctgggatgtggagcgggtggccgagtggccctggctgagcggcaccatccgggctgtgagccacacagatgtgaccaagaaggacctgaaggtgtgtgtggagtttgatggagagagctggaggaagaggcgctggattgaggtgtacagcctgctgcggcgggccttcctggtggagcacaacctggtgctggccgagaggaagagccctgagatcagcgagcgcatcgtgcagtggccagccatcacctacaagcccctgctggacaaggccggcctgggcagcatcacctctgtgcgcttcctgggggaccagcagagggtcttcctgagcaaggacctgctgaagcccatccaggatgtgaacagcctgcggctgagcctgacagacaaccagatcgtgtccaaggagttccaggccctgattgtgaagcacctggatgagagccacctgctgaagggggacaagaacctggtgggcagcgaggtgaagatctacagcctggaccccagcacccagtggttcagcgccaccgtcatcaatggaaatcctgccagcaagaccctgcaggtgaactgtgaggagatcccagccctgaagatcgtggaccccagcctcatccacgtggaggtggtgcatgacaacctggtgacctgtggcaacagcgccagaattggagctgtgaagaggaagagcagcgagaacaacggcaccctggtgtccaagcaggccaagagctgcagcgaggccagccccagcatgtgccctgtgcagagcgtgcccaccaccgtcttcaaggagatcctgctgggctgcacagctgccaccccacccagcaaggacccccggcagcagagcaccccccaggccgccaacagcccccccaacctgggcgccaagatcccccagggctgccacaagcagagcctgcctgaggagatcagcagctgcctgaacaccaagtctgaggccctgcggaccaagccagatgtgtgcaaggccggcctgctgagcaagagcagccagattggaactggagacctgaagatcctgacagagcccaagggcagctgcacccagcccaagaccaacacagaccaggagaaccggctggagagcgtgccccaggccctgaccggcctgcccaaggagtgcctgcccaccaaggccagcagcaaggccgagctggagatcgccaaccccccagagctgcagaagcacctggagcacgcccccagccccagtgatgtgtccaatgcccctgaggtgaaggccggcgtgaacagcgacagccccaacaactgcagcggcaagaaggtggagcccagcgccctggcctgccgcagccagaacctgaaggagagctctgtgaaggtggacaatgaaagctgctgcagccgcagcaacaacaagatccagaatgcccccagcaggaagtctgtgctgacagatcctgccaagctgaagaagctgcagcagagcggggaggcctttgtgcaggatgacagctgtgtgaacatcgtggcccagctgcccaagtgccgggagtgccgcctggacagcctgaggaaggacaaggagcagcagaaggacagccctgtgttctgccgcttcttccacttccggcggctgcagttcaacaagcatggagtgctgcgggtggagggcttcctgacccccaacaagtatgacaatgaggccatcggcctgtggctgcccctgaccaagaatgtggtgggcatcgacctggacacagccaagtacatcctggccaacattggagaccacttctgccagatggtgatcagcgagaaggaggccatgagcaccatcgagccccaccggcaggtggcctggaagagagctgtgaagggcgtgcgggagatgtgtgatgtgtgtgacaccaccatcttcaacctgcactgggtgtgcccccgctgtggctttggagtgtgtgtggactgctacaggatgaagaggaagaactgccagcagggcgccgcctacaagaccttctcctggctgaagtgtgtgaagagccagatccacgagcctgagaacctgatgcccacccagatcatccctgggaaggccctgtatgatgtgggggacatcgtgcacagcgtgcgggccaagtggggcatcaaggccaactgcccctgcagcaaccggcagttcaagctgttcagcaagccagccagcaaggaggacctgaagcagaccagcctggccggggagaagcccaccctgggcgctgtgctgcagcagaaccccagcgtgctggagcctgctgctgtgggcggggaggccgccagcaagccagctggctccatgaagccagcctgcccagccagcaccagccccctgaactggctggccgacctgaccagcggaaatgtgaacaaggagaacaaggagaagcagcccaccatgcccatcctgaagaatgagatcaagtgcctgccccccctgccccccctgagcaagagcagcacagtgctgcacaccttcaacagcaccatcctgacccctgtgagcaacaacaacagcggcttcctgaggaacctgctgaacagcagcacaggcaagacagaaaatggcctgaagaacacccccaagatcctggatgacatctttgccagcctggtgcagaacaagaccaccagtgacctgagcaagaggccccagggcctgaccatcaagcccagcatcctgggctttgacaccccccactactggctgtgtgacaaccggctgctgtgcctgcaggaccccaacaacaagagcaactggaatgtgttccgggagtgctggaagcagggccagcctgtgatggtgtctggagtgcaccacaagctgaacagcgagctgtggaagccagagagcttcaggaaggagtttggagagcaggaggtggacctggtgaactgcaggaccaatgagatcatcaccggggccaccgtgggggacttctgggatggctttgaagatgtgcccaaccggctgaagaatgagaaggagcccatggtgctgaagctgaaggactggcccccaggagaggacttccgggacatgatgcccagcagatttgatgacctgatggccaacatccccctgcctgagtacaccaggagagatggcaagctgaacctggccagccggctgcccaactactttgtgcggccagacctgggccccaagatgtacaatgcctacggcctcatcaccccagaggacagaaaatatggcaccaccaacctgcacctggatgtgtctgatgctgccaacgtgatggtgtatgtgggcatccccaagggccagtgtgagcaggaggaggaggtgctgaagaccatccaggatggagacagtgatgagctgaccatcaagcgcttcatcgagggcaaggagaagccaggggccctgtggcacatctatgctgccaaggacacagagaagatccgggagttcctgaagaaggtgtctgaggagcagggccaggagaacccagctgaccatgaccccatccatgaccagagctggtacctggacaggagcctgaggaagaggctgcaccaggagtatggagtgcagggctgggccatcgtgcagttcctgggagatgtggtgttcatcccagctggggccccccaccaggtgcacaacctgtacagctgcatcaaggtggccgaggactttgtgtccccagagcacgtgaagcactgcttctggctgacccaggagttccgctacctgagccagacccacaccaaccacgaggacaagctgcaggtgaagaatgtcatctaccacgctgtgaaggatgctgtggccatgctgaaggtgaaccctgtgctggccaacctgaacctgcctgcccactggaagtag

SEQ ID NO: 158274 - DNA, 3810 bp, synthetic construct
  misc_feature 1..3810: note = Description of Artificial Sequence: Synthetic coding sequence
  source 1..3810: mol_type = other DNA
atggtgctgaccctgggggagagctggcctgtgctggtgggccgccgcttcctgagcctgtctgctgctgatggcagtgatggcagccatgacagctgggatgtggagcgggtggccgagtggccctggctgagcggcaccatccgggctgtgagccacacagatgtgaccaagaaggacctgaagacctacaagcccctgctggacaaggccggcctgggcagcatcacctctgtgcgcttcctgggggaccagcagagggtcttcctgagcaaggacctgctgaagcccatccaggatgtgaacagcctgcggctgagcctgacagacaaccagatcgtgtccaaggagttccaggccctgattgtgaagcacctggatgagagccacctgctgaagggggacaagaacctggtgggcagcgaggtgaagatctacagcctggaccccagcacccagtggttcagcgccaccgtcatcaatggaaatcctgccagcaagaccctgcaggtgaactgtgaggagatcccagccctgaagatcgtggaccccagcctcatccacgtggaggtggtgcatgacaacctggtgacctgtggcaacagcgccagaattggagctgtgaagaggaagagcagcgagaacaacggcaccctggtgtccaagcaggccaagagctgcagcgaggccagccccagcatgtgccctgtgcagagcgtgcccaccaccgtcttcaaggagatcctgctgggctgcacagctgccaccccacccagcaaggacccccggcagcagagcaccccccaggccgccaacagcccccccaacctgggcgccaagatcccccagggctgccacaagcagagcctgcctgaggagatcagcagctgcctgaacaccaagtctgaggccctgcggaccaagccagatgtgtgcaaggccggcctgctgagcaagagcagccagattggaactggagacctgaagatcctgacagagcccaagggcagctgcacccagcccaagaccaacacagaccaggagaaccggctggagagcgtgccccaggccctgaccggcctgcccaaggagtgcctgcccaccaaggccagcagcaaggccgagctggagatcgccaaccccccagagctgcagaagcacctggagcacgcccccagccccagtgatgtgtccaatgcccctgaggtgaaggccggcgtgaacagcgacagccccaacaactgcagcggcaagaaggtggagcccagcgccctggcctgccgcagccagaacctgaaggagagctctgtgaaggtggacaatgaaagctgctgcagccgcagcaacaacaagatccagaatgcccccagcaggaagtctgtgctgacagatcctgccaagctgaagaagctgcagcagagcggggaggcctttgtgcaggatgacagctgtgtgaacatcgtggcccagctgcccaagtgccgggagtgccgcctggacagcctgaggaaggacaaggagcagcagaaggacagccctgtgttctgccgcttcttccacttccggcggctgcagttcaacaagcatggagtgctgcgggtggagggcttcctgacccccaacaagtatgacaatgaggccatcggcctgtggctgcccctgaccaagaatgtggtgggcatcgacctggacacagccaagtacatcctggccaacattggagaccacttctgccagatggtgatcagcgagaaggaggccatgagcaccatcgagccccaccggcaggtggcctggaagagagctgtgaagggcgtgcgggagatgtgtgatgtgtgtgacaccaccatcttcaacctgcactgggtgtgcccccgctgtggctttggagtgtgtgtggactgctacaggatgaagaggaagaactgccagcagggcgccgcctacaagaccttctcctggctgaagtgtgtgaagagccagatccacgagcctgagaacctgatgcccacccagatcatccctgggaaggccctgtatgatgtgggggacatcgtgcacagcgtgcgggccaagtggggcatcaaggccaactgcccctgcagcaaccggcagttcaagctgttcagcaagccagccagcaaggaggacctgaagcagaccagcctggccggggagaagcccaccctgggcgctgtgctgcagcagaaccccagcgtgctggagcctgctgctgtgggcggggaggccgccagcaagccagctggctccatgaagccagcctgcccagccagcaccagccccctgaactggctggccgacctgaccagcggaaatgtgaacaaggagaacaaggagaagcagcccaccatgcccatcctgaagaatgagatcaagtgcctgccccccctgccccccctgagcaagagcagcacagtgctgcacaccttcaacagcaccatcctgacccctgtgagcaacaacaacagcggcttcctgaggaacctgctgaacagcagcacaggcaagacagaaaatggcctgaagaacacccccaagatcctggatgacatctttgccagcctggtgcagaacaagaccaccagtgacctgagcaagaggccccagggcctgaccatcaagcccagcatcctgggctttgacaccccccactactggctgtgtgacaaccggctgctgtgcctgcaggaccccaacaacaagagcaactggaatgtgttccgggagtgctggaagcagggccagcctgtgatggtgtctggagtgcaccacaagctgaacagcgagctgtggaagccagagagcttcaggaaggagtttggagagcaggaggtggacctggtgaactgcaggaccaatgagatcatcaccggggccaccgtgggggacttctgggatggctttgaagatgtgcccaaccggctgaagaatgagaaggagcccatggtgctgaagctgaaggactggcccccaggagaggacttccgggacatgatgcccagcagatttgatgacctgatggccaacatccccctgcctgagtacaccaggagagatggcaagctgaacctggccagccggctgcccaactactttgtgcggccagacctgggccccaagatgtacaatgcctacggcctcatcaccccagaggacagaaaatatggcaccaccaacctgcacctggatgtgtctgatgctgccaacgtgatggtgtatgtgggcatccccaagggccagtgtgagcaggaggaggaggtgctgaagaccatccaggatggagacagtgatgagctgaccatcaagcgcttcatcgagggcaaggagaagccaggggccctgtggcacatctatgctgccaaggacacagagaagatccgggagttcctgaagaaggtgtctgaggagcagggccaggagaacccagctgaccatgaccccatccatgaccagagctggtacctggacaggagcctgaggaagaggctgcaccaggagtatggagtgcagggctgggccatcgtgcagttcctgggagatgtggtgttcatcccagctggggccccccaccaggtgcacaacctgtacagctgcatcaaggtggccgaggactttgtgtccccagagcacgtgaagcactgcttctggctgacccaggagttccgctacctgagccagacccacaccaaccacgaggacaagctgcaggtgaagaatgtcatctaccacgctgtgaaggatgctgtggccatgctgaaggccagcgagagcagctttgggaagccctag

SEQ ID NO: 158275 - DNA, 5286 bp, synthetic construct
  misc_feature 1..5286: note = Description of Artificial Sequence: Synthetic coding sequence
  source 1..5286: mol_type = other DNA
atggctgatgctgctgccagccctgtgggcaagaggctgctgctgctgtttgctgacacagctgccagcgccagcgccagcgccccagctgctgctgctgccagcggggaccccggccctgccctgcggacccgggcctggagggctggcaccgtgcgggccatgtctggagctgtgccccaggacctggccatctttgtggagtttgatggctgcaactggaagcagcacagctgggtgaaggtgcacgccgaggaggtgattgtgctgctgctggagggcagcctggtgtgggccccccgggaggaccctgtgctgctgcagggcatccgggtgtccatcgcccagtggccagccctgaccttcacccccctggtggacaagctgggcctgggctctgtggtgcctgtggagtacctgctggaccgggagctgcgcttcctgagtgatgccaacggcctgcacctgttccagatgggcacagacagccagaaccagatcctgctggagcacgccgccctgcgggagaccgtgaatgccctgatcagtgaccagaagctgcaggagatcttcagccggggcccctacagcgtgcagggccaccgggtgaagatctaccagcctgagggggaggagggctggctgtatggagtggtgagccaccaggacagcatcacccggctgatggaggtgtctgtgacagagagcggggagatcaagtctgtggaccccaggctcatccacgtgatgctgatggacaacagcgccccccagagcgagggcggcaccctgaaggctgtgaagagcagcaagggcaagaagaagcgggagagcattgagggcaaggatggaagaagaaggaagagcgccagtgacagcggctgtgaccctgccagcaagaagctgaagggggacagaggagaggtggacagcaatggaagtgatggaggagaggccagccggggcccctggaagggcggcaatgccagcggggagcccggcctggaccagagggccaagcagccccccagcacctttgtgccccagatcaacagaaacatccgctttgccacctacaccaaggaaaatggaagaaccctggtggtgcaggatgagcctgtgggcggggacaccccagccagcttcaccccctacagcacagccaccggccagacccccctggcccctgaggtgggcggcgctgagaacaaggaggccggcaagaccctggagcaggtgggccagggcatcgtggccagcgctgctgtggtgaccacagccagcagcacccccaacacagtgcgcatcagtgacaccggcctggccgccggcaccgtgcctgagaagcagaagggcagccgcagccaggccagcggggagaacagcagaaattccatcctggccagcagcggctttggagcccccctgcccagcagcagccagcccctgacctttggaagtggccgcagccagagcaatggagtgctggccacagagaacaagcccctgggcttctcctttggctgcagcagcgcccaggaggcccagaaggacacagacctgagcaagaacctcttcttccagtgcatgagccagaccctgcccaccagcaactacttcaccaccgtgtctgagagcctggctgatgacagcagcagccgggacagcttcaagcagagcctggagagcctgagcagcggcctgtgcaagggccgctctgtgctgggcacagacaccaagccaggcagcaaggccggcagctctgtggacaggaaggtgcctgctgagagcatgcccaccctgaccccagccttccccaggagcctgctgaatgcccggaccccagagaaccatgaaaatctcttcctgcagccccccaagctgagccgggaggagcccagcaaccccttcctggcctttgtggagaaggtggagcacagccccttcagcagctttgccagccaggccagcggcagcagcagcagcgccaccaccgtgaccagcaaggtggcccccagctggccagagagccacagcagcgctgacagcgccagcctggccaagaagaagcccctcttcatcaccacagacagcagcaagctggtgtctggagtgctgggcagcgccctgaccagcggcggccccagcctgagcgccatgggaaatggccgcagcagcagccccaccagcagcctgacccagcccatcgagatgcccaccctgagcagcagccccacagaggagcggcccaccgtgggccctggccagcaggacaaccccctgctgaagaccttcagcaatgtgtttggccgccacagcggcggcttcctgagcagccctgctgacttcagccaggagaacaaggccccctttgaagctgtgaagcgcttcagcctggatgagaggagcctggcctgccggcaggacagcgacagcagcaccaacagcgacctgagtgacctgagtgacagcgaggagcagctgcaggccaagacaggcctgaagggcatccctgagcacctgatgggcaagctgggccccaacggggagaggtctgctgagctgctgctgggcaagagcaagggcaagcaggcccccaagggccggcccaggacagcccccctgaaggtgggccagagcgtgctgaaggatgtgtccaaggtgaagaagctgaagcagagcggggagcccttcctgcaggacggcagctgcatcaacgtggccccccacctgcacaagtgccgggagtgccgcctggagcgctacaggaagttcaaggagcaggagcaggatgacagcacagtggcctgccgcttcttccacttcagaagactcatcttcaccaggaagggcgtgctgcgggtggagggcttcctgagcccccagcagagcgaccctgatgccatgaacctgtggatccccagcagcagcctggccgagggcatcgacctggagaccagcaagtacatcctggccaacgtgggggaccagttctgccagctggtgatgtctgagaaggaggccatgatgatggtggagccccaccagaaggtggcctggaagagagctgtgcggggcgtgcgggagatgtgtgatgtgtgtgagaccaccctcttcaacatccactgggtgtgcaggaaatgtggcttcggcgtgtgcctggactgctaccgcctgaggaagagccggcccaggagtgaaacagaggagatgggagatgaggaggtgttctcctggctgaagtgtgccaagggccagagccatgagcctgagaacctgatgcccacccagatcatccctggaacagccctgtacaacattggagacatggtgcatgctgcccggggcaagtggggcatcaaggccaactgcccctgcatcagccggcagaacaagtctgtgctgcggcctgctgtgaccaacggcatgagccagctgcccagcatcaaccccagcgccagcagtggaaatgagaccaccttcagcggcggcggcggccctgcccctgtgaccaccccagagccagaccacgtgcccaaggctgacagcacagacatccgctctgaggagcccctgaagacagacagcagcgccagcaacagcaacagcgagctgaaggccatccggcccccctgcccagacacagccccacccagcagcgccctgcactggctggccgacctggccacccagaaggccaaggaggagaccaaggaggccggcagcctgcggtctgtgctgaacaaggagagccacagccccttcggcctggacagcttcaacagcacagccaaggtgagccccctgacccccaagctgttcaacagcctgctgctgggccccacagccagcaacaacaagacagagggcagcagcctgcgggacctgctgcacagcggccctgggaagctgccccagacccccctggacaccggcatccccttcccccctgtgttcagcaccagcagcgctggggtgaagagcaaggccagcctgcccaacttcctggaccacatcatcgcctctgtggtggagaacaagaagaccagtgatgccagcaagagggcctgcaacctgacagacacccagaaggaggtgaaggagatggtgatgggcctgaatgtgctggacccccacaccagccacagctggctgtgtgatggccgcctgctgtgcctgcatgaccccagcaacaagaacaactggaagatcttccgggagtgctggaagcagggccagcctgtgctggtgtctggagtgcacaagaagctgaagtctgagctgtggaagccagaggccttcagccaggagtttggagaccaggatgtggacctggtgaactgcaggaactgtgccatcatcagtgatgtgaaggtgcgggacttctgggatggctttgagatcatctgcaagaggctgcggagtgaagatggccagcccatggtgctgaagctgaaggactggcccccaggagaggacttccgggacatgatgcccaccaggtttgaggacctgatggagaacctgcccctgcctgagtacaccaagagagatggccgcctgaacctggccagccggctgcccagctactttgtgcggccagacctgggccccaagatgtacaatgcctacggcctcatcacagctgaggaccggcgggtgggcaccaccaacctgcacctggatgtgtctgatgctgtgaatgtgatggtgtatgtgggcatccccatcggggagggcgcccatgatgaggaggtgctgaagaccattgatgaaggagatgctgatgaggtgaccaagcagagaattcatgatggcaaggagaagccaggggccctgtggcacatctatgctgccaaggatgctgagaagatccgggagctgctgaggaaggtgggggaggagcagggccaggagaaccccccagaccatgaccccatccatgaccagagctggtacctggaccagaccctgaggaagaggctgtatgaggagtatggagtgcagggctgggccatcgtgcagttcctgggagatgctgtgttcatcccagctggggccccccaccaggtgcacaacctgtacagctgcatcaaggtggccgaggactttgtgtccccagagcacgtgaagcactgcttccggctgacccaggagttccgccacctgagcaacacccacaccaaccacgaggacaagctgcaggtgaagaacatcatctaccacgctgtgaaggatgctgtgggcaccctgaaggcccacgagagcaagctggcccggagctag

SEQ ID NO: 158276 - DNA, 4254 bp, synthetic construct
  misc_feature 1..4254: note = Description of Artificial Sequence: Synthetic coding sequence
  source 1..4254: mol_type = other DNA
atgggcgccatggagatcaacagaaacatccgctttgccacctacaccaaggaaaatggaagaaccctggtggtgcaggatgagcctgtgggcggggacaccccagccagcttcaccccctacagcacagccaccggccagacccccctggcccctgaggtgggcggcgctgagaacaaggaggccggcaagaccctggagcaggtgggccagggcatcgtggccagcgctgctgtggtgaccacagccagcagcacccccaacacagtgcgcatcagtgacaccggcctggccgccggcaccgtgcctgagaagcagaagggcagccgcagccaggccagcggggagaacagcagaaattccatcctggccagcagcggctttggagcccccctgcccagcagcagccagcccctgacctttggaagtggccgcagccagagcaatggagtgctggccacagagaacaagcccctgggcttctcctttggctgcagcagcgcccaggaggcccagaaggacacagacctgagcaagaacctcttcttccagtgcatgagccagaccctgcccaccagcaactacttcaccaccgtgtctgagagcctggctgatgacagcagcagccgggacagcttcaagcagagcctggagagcctgagcagcggcctgtgcaagggccgctctgtgctgggcacagacaccaagccaggcagcaaggccggcagctctgtggacaggaaggtgcctgctgagagcatgcccaccctgaccccagccttccccaggagcctgctgaatgcccggaccccagagaaccatgaaaatctcttcctgcagccccccaagctgagccgggaggagcccagcaaccccttcctggcctttgtggagaaggtggagcacagccccttcagcagctttgccagccaggccagcggcagcagcagcagcgccaccaccgtgaccagcaaggtggcccccagctggccagagagccacagcagcgctgacagcgccagcctggccaagaagaagcccctcttcatcaccacagacagcagcaagctggtgtctggagtgctgggcagcgccctgaccagcggcggccccagcctgagcgccatgggaaatggccgcagcagcagccccaccagcagcctgacccagcccatcgagatgcccaccctgagcagcagccccacagaggagcggcccaccgtgggccctggccagcaggacaaccccctgctgaagaccttcagcaatgtgtttggccgccacagcggcggcttcctgagcagccctgctgacttcagccaggagaacaaggccccctttgaagctgtgaagcgcttcagcctggatgagaggagcctggcctgccggcaggacagcgacagcagcaccaacagcgacctgagtgacctgagtgacagcgaggagcagctgcaggccaagacaggcctgaagggcatccctgagcacctgatgggcaagctgggccccaacggggagaggtctgctgagctgctgctgggcaagagcaagggcaagcaggcccccaagggccggcccaggacagcccccctgaaggtgggccagagcgtgctgaaggatgtgtccaaggtgaagaagctgaagcagagcggggagcccttcctgcaggacggcagctgcatcaacgtggccccccacctgcacaagtgccgggagtgccgcctggagcgctacaggaagttcaaggagcaggagcaggatgacagcacagtggcctgccgcttcttccacttcagaagactcatcttcaccaggaagggcgtgctgcgggtggagggcttcctgagcccccagcagagcgaccctgatgccatgaacctgtggatccccagcagcagcctggccgagggcatcgacctggagaccagcaagtacatcctggccaacgtgggggaccagttctgccagctggtgatgtctgagaaggaggccatgatgatggtggagccccaccagaaggtggcctggaagagagctgtgcggggcgtgcgggagatgtgtgatgtgtgtgagaccaccctcttcaacatccactgggtgtgcaggaaatgtggcttcggcgtgtgcctggactgctaccgcctgaggaagagccggcccaggagtgaaacagaggagatgggagatgaggaggtgttctcctggctgaagtgtgccaagggccagagccatgagcctgagaacctgatgcccacccagatcatccctggaacagccctgtacaacattggagacatggtgcatgctgcccggggcaagtggggcatcaaggccaactgcccctgcatcagccggcagaacaagtctgtgctgcggcctgctgtgaccaacggcatgagccagctgcccagcatcaaccccagcgccagcagtggaaatgagaccaccttcagcggcggcggcggccctgcccctgtgaccaccccagagccagaccacgtgcccaaggctgacagcacagacatccgctctgaggagcccctgaagacagacagcagcgccagcaacagcaacagcgagctgaaggccatccggcccccctgcccagacacagccccacccagcagcgccctgcactggctggccgacctggccacccagaaggccaaggaggagaccaaggaggccggcagcctgcggtctgtgctgaacaaggagagccacagccccttcggcctggacagcttcaacagcacagccaaggtgagccccctgacccccaagctgttcaacagcctgctgctgggccccacagccagcaacaacaagacagagggcagcagcctgcgggacctgctgcacagcggccctgggaagctgccccagacccccctggacaccggcatccccttcccccctgtgttcagcaccagcagcgctggggtgaagagcaaggccagcctgcccaacttcctggaccacatcatcgcctctgtggtggagaacaagaagaccagtgatgccagcaagagggcctgcaacctgacagacacccagaaggaggtgaaggagatggtgatgggcctgaatgtgctggacccccacaccagccacagctggctgtgtgatggccgcctgctgtgcctgcatgaccccagcaacaagaacaactggaagatcttccgggagtgctggaagcagggccagcctgtgctggtgtctggagtgcacaagaagctgaagtctgagctgtggaagccagaggccttcagccaggagtttggagaccaggatgtggacctggtgaactgcaggaactgtgccatcatcagtgatgtgaaggtgcgggacttctgggatggctttgagatcatctgcaagaggctgcggagtgaagatggccagcccatggtgctgaagctgaaggactggcccccaggagaggacttccgggacatgatgcccaccaggtttgaggacctgatggagaacctgcccctgcctgagtacaccaagagagatggccgcctgaacctggccagccggctgcccagctactttgtgcggccagacctgggccccaagatgtacaatgcctacggcctcatcacagctgaggaccggcgggtgggcaccaccaacctgcacctggatgtgtctgatgctgtgaatgtgatggtgtatgtgggcatccccatcggggagggcgcccatgatgaggaggtgctgaagaccattgatgaaggagatgctgatgaggtgaccaagcagagaattcatgatggcaaggagaagccaggggccctgtggcacatctatgctgccaaggatgctgagaagatccgggagctgctgaggaaggtgggggaggagcagggccaggagaaccccccagaccatgaccccatccatgaccagagctggtacctggaccagaccctgaggaagaggctgtatgaggagtatggagtgcagggctgggccatcgtgcagttcctgggagatgctgtgttcatcccagctggggccccccaccaggtgcacaacctgtacagctgcatcaaggtggccgaggactttgtgtccccagagcacgtgaagcactgcttccggctgacccaggagttccgccacctgagcaacacccacaccaaccacgaggacaagctgcaggtgaagaacatcatctaccacgctgtgaaggatgctgtgggcaccctgaaggcccacgagagcaagctggcccggagctag

SEQ ID NO: 158277 - DNA, 2382 bp, synthetic construct
  misc_feature 1..2382: note = Description of Artificial Sequence: Synthetic coding sequence
  source 1..2382: mol_type = other DNA
atgaacctgtggatccccagcagcagcctggccgagggcatcgacctggagaccagcaagtacatcctggccaacgtgggggaccagttctgccagctggtgatgtctgagaaggaggccatgatgatggtggagccccaccagaaggtggcctggaagagagctgtgcggggcgtgcgggagatgtgtgatgtgtgtgagaccaccctcttcaacatccactgggtgtgcaggaaatgtggcttcggcgtgtgcctggactgctaccgcctgaggaagagccggcccaggagtgaaacagaggagatgggagatgaggaggtgttctcctggctgaagtgtgccaagggccagagccatgagcctgagaacctgatgcccacccagatcatccctggaacagccctgtacaacattggagacatggtgcatgctgcccggggcaagtggggcatcaaggccaactgcccctgcatcagccggcagaacaagtctgtgctgcggcctgctgtgaccaacggcatgagccagctgcccagcatcaaccccagcgccagcagtggaaatgagaccaccttcagcggcggcggcggccctgcccctgtgaccaccccagagccagaccacgtgcccaaggctgacagcacagacatccgctctgaggagcccctgaagacagacagcagcgccagcaacagcaacagcgagctgaaggccatccggcccccctgcccagacacagccccacccagcagcgccctgcactggctggccgacctggccacccagaaggccaaggaggagaccaaggaggccggcagcctgcggtctgtgctgaacaaggagagccacagccccttcggcctggacagcttcaacagcacagccaaggtgagccccctgacccccaagctgttcaacagcctgctgctgggccccacagccagcaacaacaagacagagggcagcagcctgcgggacctgctgcacagcggccctgggaagctgccccagacccccctggacaccggcatccccttcccccctgtgttcagcaccagcagcgctggggtgaagagcaaggccagcctgcccaacttcctggaccacatcatcgcctctgtggtggagaacaagaagaccagtgatgccagcaagagggcctgcaacctgacagacacccagaaggaggtgaaggagatggtgatgggcctgaatgtgctggacccccacaccagccacagctggctgtgtgatggccgcctgctgtgcctgcatgaccccagcaacaagaacaactggaagatcttccgggagtgctggaagcagggccagcctgtgctggtgtctggagtgcacaagaagctgaagtctgagctgtggaagccagaggccttcagccaggagtttggagaccaggatgtggacctggtgaactgcaggaactgtgccatcatcagtgatgtgaaggtgcgggacttctgggatggctttgagatcatctgcaagaggctgcggagtgaagatggccagcccatggtgctgaagctgaaggactggcccccaggagaggacttccgggacatgatgcccaccaggtttgaggacctgatggagaacctgcccctgcctgagtacaccaagagagatggccgcctgaacctggccagccggctgcccagctactttgtgcggccagacctgggccccaagatgtacaatgcctacggcctcatcacagctgaggaccggcgggtgggcaccaccaacctgcacctggatgtgtctgatgctgtgaatgtgatggtgtatgtgggcatccccatcggggagggcgcccatgatgaggaggtgctgaagaccattgatgaaggagatgctgatgaggtgaccaagcagagaattcatgatggcaaggagaagccaggggccctgtggcacatctatgctgccaaggatgctgagaagatccgggagctgctgaggaaggtgggggaggagcagggccaggagaaccccccagaccatgaccccatccatgaccagagctggtacctggaccagaccctgaggaagaggctgtatgaggagtatggagtgcagggctgggccatcgtgcagttcctgggagatgctgtgttcatcccagctggggccccccaccaggtgcacaacctgtacagctgcatcaaggtggccgaggactttgtgtccccagagcacgtgaagcactgcttccggctgacccaggagttccgccacctgagcaacacccacaccaaccacgaggacaagctgcaggtgaagaacatcatctaccacgctgtgaaggatgctgtgggcaccctgaaggcccacgagagcaagctggcccggagctag

SEQ ID NO: 158278 - DNA, 4656 bp, synthetic construct
  misc_feature 1..4656: note = Description of Artificial Sequence: Synthetic coding sequence
  source 1..4656: mol_type = other DNA
ggctggcgctggctgtatggagtggtgagccaccaggacagcatcacccggctgatggaggtgtctgtgacagagagcggggagatcaagtctgtggaccccaggctcatccacgtgatgctgatggacaacagcgccccccagagcgagggcggcaccctgaaggctgtgaagagcagcaagggcaagaagaagcgggagagcattgagggcaaggatggaagaagaaggaagagcgccagtgacagcggctgtgaccctgccagcaagaagctgaagggggacagaggagaggtggacagcaatggaagtgatggaggagaggccagccggggcccctggaagggcggcaatgccagcggggagcccggcctggaccagagggccaagcagccccccagcacctttgtgccccagatcaacagaaacatccgctttgccacctacaccaaggaaaatggaagaaccctggtggtgcaggatgagcctgtgggcggggacaccccagccagcttcaccccctacagcacagccaccggccagacccccctggcccctgaggtgggcggcgctgagaacaaggaggccggcaagaccctggagcaggtgggccagggcatcgtggccagcgctgctgtggtgaccacagccagcagcacccccaacacagtgcgcatcagtgacaccggcctggccgccggcaccgtgcctgagaagcagaagggcagccgcagccaggccagcggggagaacagcagaaattccatcctggccagcagcggctttggagcccccctgcccagcagcagccagcccctgacctttggaagtggccgcagccagagcaatggagtgctggccacagagaacaagcccctgggcttctcctttggctgcagcagcgcccaggaggcccagaaggacacagacctgagcaagaacctcttcttccagtgcatgagccagaccctgcccaccagcaactacttcaccaccgtgtctgagagcctggctgatgacagcagcagccgggacagcttcaagcagagcctggagagcctgagcagcggcctgtgcaagggccgctctgtgctgggcacagacaccaagccaggcagcaaggccggcagctctgtggacaggaaggtgcctgctgagagcatgcccaccctgaccccagccttccccaggagcctgctgaatgcccggaccccagagaaccatgaaaatctcttcctgcagccccccaagctgagccgggaggagcccagcaaccccttcctggcctttgtggagaaggtggagcacagccccttcagcagctttgccagccaggccagcggcagcagcagcagcgccaccaccgtgaccagcaaggtggcccccagctggccagagagccacagcagcgctgacagcgccagcctggccaagaagaagcccctcttcatcaccacagacagcagcaagctggtgtctggagtgctgggcagcgccctgaccagcggcggccccagcctgagcgccatgggaaatggccgcagcagcagccccaccagcagcctgacccagcccatcgagatgcccaccctgagcagcagccccacagaggagcggcccaccgtgggccctggccagcaggacaaccccctgctgaagaccttcagcaatgtgtttggccgccacagcggcggcttcctgagcagccctgctgacttcagccaggagaacaaggccccctttgaagctgtgaagcgcttcagcctggatgagaggagcctggcctgccggcaggacagcgacagcagcaccaacagcgacctgagtgacctgagtgacagcgaggagcagctgcaggccaagacaggcctgaagggcatccctgagcacctgatgggcaagctgggccccaacggggagaggtctgctgagctgctgctgggcaagagcaagggcaagcaggcccccaagggccggcccaggacagcccccctgaaggtgggccagagcgtgctgaaggatgtgtccaaggtgaagaagctgaagcagagcggggagcccttcctgcaggacggcagctgcatcaacgtggccccccacctgcacaagtgccgggagtgccgcctggagcgctacaggaagttcaaggagcaggagcaggatgacagcacagtggcctgccgcttcttccacttcagaagactcatcttcaccaggaagggcgtgctgcgggtggagggcttcctgagcccccagcagagcgaccctgatgccatgaacctgtggatccccagcagcagcctggccgagggcatcgacctggagaccagcaagtacatcctggccaacgtgggggaccagttctgccagctggtgatgtctgagaaggaggccatgatgatggtggagccccaccagaaggtggcctggaagagagctgtgcggggcgtgcgggagatgtgtgatgtgtgtgagaccaccctcttcaacatccactgggtgtgcaggaaatgtggcttcggcgtgtgcctggactgctaccgcctgaggaagagccggcccaggagtgaaacagaggagatgggagatgaggaggtgttctcctggctgaagtgtgccaagggccagagccatgagcctgagaacctgatgcccacccagatcatccctggaacagccctgtacaacattggagacatggtgcatgctgcccggggcaagtggggcatcaaggccaactgcccctgcatcagccggcagaacaagtctgtgctgcggcctgctgtgaccaacggcatgagccagctgcccagcatcaaccccagcgccagcagtggaaatgagaccaccttcagcggcggcggcggccctgcccctgtgaccaccccagagccagaccacgtgcccaaggctgacagcacagacatccgctctgaggagcccctgaagacagacagcagcgccagcaacagcaacagcgagctgaaggccatccggcccccctgcccagacacagccccacccagcagcgccctgcactggctggccgacctggccacccagaaggccaaggaggagaccaaggaggccggcagcctgcggtctgtgctgaacaaggagagccacagccccttcggcctggacagcttcaacagcacagccaaggtgagccccctgacccccaagctgttcaacagcctgctgctgggccccacagccagcaacaacaagacagagggcagcagcctgcgggacctgctgcacagcggccctgggaagctgccccagacccccctggacaccggcatccccttcccccctgtgttcagcaccagcagcgctggggtgaagagcaaggccagcctgcccaacttcctggaccacatcatcgcctctgtggtggagaacaagaagaccagtgatgccagcaagagggcctgcaacctgacagacacccagaaggaggtgaaggagatggtgatgggcctgaatgtgctggacccccacaccagccacagctggctgtgtgatggccgcctgctgtgcctgcatgaccccagcaacaagaacaactggaagatcttccgggagtgctggaagcagggccagcctgtgctggtgtctggagtgcacaagaagctgaagtctgagctgtggaagccagaggccttcagccaggagtttggagaccaggatgtggacctggtgaactgcaggaactgtgccatcatcagtgatgtgaaggtgcgggacttctgggatggctttgagatcatctgcaagaggctgcggagtgaagatggccagcccatggtgctgaagctgaaggactggcccccaggagaggacttccgggacatgatgcccaccaggtttgaggacctgatggagaacctgcccctgcctgagtacaccaagagagatggccgcctgaacctggccagccggctgcccagctactttgtgcggccagacctgggccccaagatgtacaatgcctacggcctcatcacagctgaggaccggcgggtgggcaccaccaacctgcacctggatgtgtctgatgctgtgaatgtgatggtgtatgtgggcatccccatcggggagggcgcccatgatgaggaggtgctgaagaccattgatgaaggagatgctgatgaggtgaccaagcagagaattcatgatggcaaggagaagccaggggccctgtggcacatctatgctgccaaggatgctgagaagatccgggagctgctgaggaaggtgggggaggagcagggccaggagaaccccccagaccatgaccccatccatgaccagagctggtacctggaccagaccctgaggaagaggctgtatgaggagtatggagtgcagggctgggccatcgtgcagttcctgggagatgctgtgttcatcccagctggggccccccaccaggtgcacaacctgtacagctgcatcaaggtggccgaggactttgtgtccccagagcacgtgaagcactgcttccggctgacccaggagttccgccacctgagcaacacccacaccaaccacgaggacaagctgcaggtgaagaacatcatctaccacgctgtgaaggatgctgtgggcaccctgaaggcccacgagagcaagctggcccggagctag

SEQ ID NO: 158279 - DNA, 2148 bp, synthetic construct
  misc_feature 1..2148: note = Description of Artificial Sequence: Synthetic coding sequence
  source 1..2148: mol_type = other DNA
atggccggcgtgggccctgggggctacgccgctgagtttgtgcccccacctgagtgccctgtgtttgagcccagctgggaggagttcacagaccccctgtccttcatcggccgcatccggcccctggccgagaagacaggcatctgcaagatccggccccccaaggagtatgccctgagcggctggaacctgaacaacatgcctgtgctggagcagagcgtgctggcccacatcaacgtggacatcagcggcatgaaggtgccctggctgtatgtgggcatgtgcttcagcagcttctgctggcacatcgaggaccactggagctacagcatcaactacctgcactggggcgagcccaagacctggtatggagtgcccagccatgctgctgagcagctggaggaggtgatgagggagctggcccctgagctgtttgagagccagcctgacctgctgcaccagctggtgaccatcatgaaccccaacgtgctgatggagcacggcgtgcctgtgtaccgcaccaaccagtgtgccggggagtttgtggtgaccttcccccgggcctaccacagcggcttcaaccagggctacaactttgctgaggccgtgaacttctgcacagctgactggctgcccatcggccggcagtgtgtgaaccactaccgccgcctgcggcggcactgtgtgttcagccatgaggagctgatcttcaagatggctgctgaccctgagtgcctggatgtgggcctggccgccatggtgtgcaaggagctgaccctgatgacagaggaggagacccggctgcgggagagcgtggtgcagatgggcgtgctgatgtctgaggaggaggtgtttgagctggtgcctgatgatgagcggcagtgcagcgcctgcaggaccacctgcttcctgagcgccctgacctgcagctgcaaccctgagcggctggtgtgcctgtaccaccccacagacctgtgcccctgccccatgcagaagaagtgcctgcgctaccgctaccccctggaggacctgcccagcctgctgtatggagtgaaggtgcgggcccagagctatgacacctgggtgtcccgggtgacagaggccctgagcgccaacttcaaccacaagaaggacctgattgagctgcgggtgatgctggaggatgctgaggacaggaagtacccagaaaatgacctcttcaggaagctgagagatgctgtgaaggaggccgagacctgtgcctctgtggcccagctgctgctgagcaagaagcagaagcaccggcagagcccagattctggccgcaccaggaccaagctgactgtggaggagctgaaggcctttgtgcagcagctgttcagcctgccctgtgtgatcagccaggcccggcaggtgaagaacctgctggatgatgtggaggagttccacgagcgggcccaggaggccatgatggatgagaccccagacagcagcaagctgcagatgctgattgacatgggcagcagcctgtatgtggagctgcctgagctgccccggctgaagcaggagctgcagcaggcccgctggctggatgaggtgcggctgaccctgagtgacccccagcaggtgaccctggatgtgatgaagaagctgattgattctggagtgggcctggccccccaccacgctgtggagaaggccatggccgagctgcaggagctgctgactgtgtctgagcgctgggaggagaaggccaaggtgtgcctgcaggcccggcccaggcacagcgtggccagcctggagagcatcgtgaatgaggccaagaacatcccagccttcctgcccaacgtgctgagcctgaaggaggccctgcagaaggcccgggagtggacagccaaggtggaggccatccagagcggcagcaactatgcctacctggagcagctggagagcctgagcgccaagggccggcccatccctgtgcggctggaggccctgccccaggtggagagccaggtggccgccgcccgggcctggagggagaggacaggccgcaccttcctgaagaagaacagcagccacaccctgctgcaggtgctgagccccaggacagacattggagtgtatggcagcggcaagaacagaaggaagaaggtgaaggagctgtag

SEQ ID NO: 158280 - DNA, 4911 bp, synthetic construct
  misc_feature 1..4911: note = Description of Artificial Sequence: Synthetic coding sequence
  source 1..4911: mol_type = other DNA
atggccggcgtgggccctgggggctacgccgctgagtttgtgcccccacctgagtgccctgtgtttgagcccagctgggaggagttcacagaccccctgtccttcatcggccgcatccggcccctggccgagaagacaggcatctgcaagatccggccccccaaggactggcagcccccatttgcctgtgaggtgaagagcttccgcttcaccccccgggtgcagaggctgaatgagctggaggccatgaccagggtgcggctggacttcctggaccagctggccaagttctgggagctgcagggcagcaccctgaagatccctgtggtggagaggaagatcctggacctgtatgccctgagcaagatcgtggccagcaaaggaggctttgagatggtgaccaaggagaagaagtggagcaaggtgggcagccggctgggctacctgcccgggaagggcaccggcagcctgctgaagagccactatgaaagaatcctgtacccctatgagctgttccagagcggcgtgtccctgatgggcgtgcagatgcccaacctggacctgaaggagaaggtggagcctgaggtgctgagcacagacacccagaccagccctgagcccggcaccaggatgaacatcctgcccaagaggaccaggagagtgaagacccagagcgagagcggagatgtgtccaggaacacagagctgaagaagctgcagatctttggagctggccccaaggtggtgggcctggccatgggcaccaaggacaaggaggatgaggtgaccaggaggaggaaggtgaccaacagaagtgatgccttcaacatgcagatgaggcagaggaagggcaccctgtctgtgaactttgtggacctgtatgtgtgcatgttctgtggccggggcaacaatgaagacaagctgctgctgtgtgatggctgtgatgacagctaccacaccttctgcctgatcccccccctgcctgatgtgcccaagggggactggcgctgccccaagtgtgtggccgaggagtgcagcaagccccgggaggccttcggctttgagcaggccgtgcgggagtacaccctgcagagctttggagagatggctgacaacttcaagagtgactacttcaacatgcctgtgcacatggtgcccacagagctggtggagaaggagttctggaggctggtgagcagcattgaagaagatgtgattgtggagtatggagctgacatcagcagcaaggactttggcagcggcttccctgtgaaggatggccgcaggaagatcctgcctgaggaggaggagtatgccctgagcggctggaacctgaacaacatgcctgtgctggagcagagcgtgctggcccacatcaacgtggacatcagcggcatgaaggtgccctggctgtatgtgggcatgtgcttcagcagcttctgctggcacatcgaggaccactggagctacagcatcaactacctgcactggggcgagcccaagacctggtacggcgtgcccagccacgccgctgagcagctggaggaggtgatgagggagctggcccctgagctgtttgagagccagcctgacctgctgcaccagctggtgaccatcatgaaccccaacgtgctgatggagcacggcgtgcctgtgtaccgcaccaaccagtgtgccggggagtttgtggtgaccttcccccgggcctaccacagcggcttcaaccagggctacaactttgctgaggccgtgaacttctgcacagctgactggctgcccatcggccggcagtgtgtgaaccactacagaaggctgcggcggcactgtgtgttcagccatgaggagctgatcttcaagatggctgctgaccctgaatgtctggatgtgggcctggccgccatggtgtgcaaggagctgaccctgatgacagaggaggagacccggctgcgggagagcgtggtgcagatgggcgtgctgatgtctgaggaggaggtgtttgagctggtgcctgatgatgagcggcagtgcagcgcctgcaggaccacctgcttcctgagcgccctgacctgcagctgcaaccctgagcggctggtgtgcctgtaccaccccacagacctgtgcccctgccccatgcagaagaagtgcctgcgctaccgctaccccctggaggacctgcccagcctgctgtatggagtgaaggtgcgggcccagagctatgacacctgggtgtcccgggtgacagaggccctgagcgccaacttcaaccacaagaaggacctgattgagctgcgggtgatgctggaggatgctgaggacaggaagtacccagaaaatgacctcttcaggaagctgagagatgctgtgaaggaggccgagacctgtgcctctgtggcccagctgctgctgagcaagaagcagaagcaccggcagagcccagacagcggccgcaccaggaccaagctgactgtggaggagctgaaggcctttgtgcagcagctgttcagcctgccctgcgtcatcagccaggcccggcaggtgaagaacctgctggatgatgtggaggagttccacgagcgggcccaggaggccatgatggatgagaccccagacagcagcaagctgcagatgctgattgacatgggcagcagcctgtatgtggagctgcctgagctgccccggctgaagcaggagctgcagcaggcccgctggctggatgaggtgcggctgaccctgagtgacccccagcaggtgaccctggatgtgatgaagaagctgattgacagcggcgtgggcctggccccccaccacgctgtggagaaggccatggccgagctgcaggagctgctgactgtgtctgagcgctgggaggagaaggccaaggtgtgcctgcaggcccggcccaggcacagcgtggccagcctggagagcatcgtgaatgaggccaagaacatcccagccttcctgcccaacgtgctgagcctgaaggaggccctgcagaaggcccgggagtggacagccaaggtggaggccatccagagcggcagcaactatgcctacctggagcagctggagagcctgagcgccaagggccggcccatccctgtgcggctggaggccctgccccaggtggagagccaggtggccgccgcccgggcctggagggagaggactggaagaaccttcctgaagaagaacagcagccacaccctgctgcaggtgctgagccccaggacagacatcggcgtgtatggcagcggcaagaacagaaggaagaaggtgaaggagctgattgagaaggagaaggagaaggacctggacctggagcccctgagtgacctggaggagggcctggaggagacccgggacacagccatggtggtggccgtgttcaaggagcgggagcagaaggagattgaggccatgcacagcctgcgggccgccaacctggccaagatgaccatggtggaccgcatcgaggaggtgaagttctgcatctgcaggaagacagccagcggcttcatgctgcagtgtgagctgtgcaaggactggttccacaacagctgtgtgcccctgcccaagagcagcagccagaagaagggcagctcctggcaggccaaggaggtgaagttcctgtgccccctgtgcatgaggagcagaagaccccggctggagaccatcctgagcctgctggtgtccctgcagaagctgcctgtgcggctgcctgagggggaggccctgcagtgcctgacagagcgggccatgtcctggcaggaccgggcccggcaggccctggccacagatgagctgagcagcgccctggccaagctgtctgtgctgagccagaggatggtggagcaggccgcccgggagaagacagagaagatcatctctgctgagctgcagaaggccgccgccaacccagacctgcagggccacctgcccagcttccagcagagcgccttcaacagagtggtgtcctctgtgagcagcagcccccggcagaccatggactatgatgatgaggagacagacagtgatgaggacatccgggagacctacggctatgacatgaaggacacagcctctgtgaagagcagcagcagcctggagcccaacctcttctgtgatgaggagatccccatcaagtctgaggaggtggtgacccacatgtggacagcccccagcttctgtgccgagcacgcctacagcagcgccagcaagagctgcagccagggcagcagcacccccaggaagcagcccaggaagagccccctggtgcccaggagcctggagccccctgtgctggagctgagccctggggccaaggcccagctggaggagctgatgatggtgggggacctgctggaggtgtccctggatgagacccagcacatctggaggatcctgcaggccacccaccccccatctgaagatcgcttcctgcacatcatggaggatgacagcatggaggagaagcccctgaaggtgaagggcaaggacagcagcgagaagaagaggaagaggaagctggagaaggtggagcagctgtttggagagggcaagcagaagagcaaggagctgaagaagatggacaagcccaggaagaagaagctgaagctgggcgctgacaagagcaaggagctgaacaagctggccaagaagctggccaaggaggaggagaggaagaagaagaaggagaaggctgctgctgccaaggtggagctggtgaaggagagcacagagaagaagcgggagaagaaggtgctggacatccccagcaaatatgactggagcggggctgaggagagtgatgatgaaaatgctgtgtgtgccgcccagaactgccagaggccctgcaaggacaagggcgtggtgtttgtgacagaggaggagaagaacaagaagtactag

SEQ ID NO: 158281 - DNA, 3150 bp, synthetic construct
  misc_feature 1..3150: note = Description of Artificial Sequence: Synthetic coding sequence
  source 1..3150: mol_type = other DNA
atggccggcgtgggccctgggggctacgccgctgagtttgtgcccccacctgagtgccctgtgtttgagcccagctgggaggagttcacagaccccctgtccttcatcggccgcatccggcccctggccgagaagacaggcatctgcaagatccggccccccaaggactggcagcccccatttgcctgtgaggtgaagagcttccgcttcaccccccgggtgcagaggctgaatgagctggagatcgtggccagcaagggcggctttgagatggtgaccaaggagaagaagtggagcaaggtgggcagccggctgggctacctgcctggaaaaggaacaggcagcctgctgaagagccactatgagcgcatcctgtacccctatgagctgttccagagcggcgtgtccctgatgggcgtgcagatgcccaacctggacctgaaggagaaggtggagcctgaggtgctgagcacagacacccagaccagccctgagcccggcaccaggatgaacatcctgcccaagaggacccggcgggtgaagacccagagcgagagcggagatgtgtccaggaacacagagctgaagaagctgcagatctttggagctggccccaaggtggtgggcctggccatgggcaccaaggacaaggaggatgaggtgaccaggaggaggaaggtgaccaacagaagtgatgccttcaacatgcagatgaggcagaggaagggcaccctgtctgtgaactttgtggacctgtatgtgtgcatgttctgtggccggggcaacaatgaagacaagctgctgctgtgtgatggctgtgatgacagctaccacaccttctgcctgatcccccccctgcctgatgtgcccaagggggactggcgctgccccaagtgtgtggccgaggagtgcagcaagccccgggaggcctttggatttgagcaggccgtgcgggagtacaccctgcagagctttggagagatggctgacaacttcaagagtgactacttcaacatgcctgtgcacatggtgcccacagagctggtggagaaggagttctggaggctggtgagcagcattgaggaggatgtgattgtggagtatggagctgacatcagcagcaaggactttggaagtggcttccctgtgaaggatggaagaaggaagatcctgcctgaggaggaggagtatgccctgagcggctggaacctgaacaacatgcctgtgctggagcagagcgtgctggcccacatcaacgtggacatcagcggcatgaaggtgccctggctgtatgtgggcatgtgcttcagcagcttctgctggcacatcgaggaccactggagctacagcatcaactacctgcactggggcgagcccaagacctggtatggagtgcccagccatgctgctgagcagctggaggaggtgatgagggagctggcccctgagctgtttgagagccagcctgacctgctgcaccagctggtgaccatcatgaaccccaacgtgctgatggagcacggcgtgcctgtgtaccgcaccaaccagtgtgccggggagtttgtggtgaccttcccccgggcctaccacagcggcttcaaccagggctacaactttgctgaggccgtgaacttctgcacagctgactggctgcccatcggccggcagtgtgtgaaccactaccgccgcctgcggcggcactgtgtgttcagccatgaggagctgatcttcaagatggctgctgaccctgagtgcctggatgtgggcctggccgccatggtgtgcaaggagctgaccctgatgacagaggaggagacccggctgcgggagagcgtggtgcagatgggcgtgctgatgtctgaggaggaggtgtttgagctggtgcctgatgatgagcggcagtgcagcgcctgcaggaccacctgcttcctgagcgccctgacctgcagctgcaaccctgagcggctggtgtgcctgtaccaccccacagacctgtgcccctgccccatgcagaagaagtgcctgcgctaccgctaccccctggaggacctgcccagcctgctgtatggagtgaaggtgcgggcccagagctatgacacctgggtgtcccgggtgacagaggccctgagcgccaacttcaaccacaagaaggacctgattgagctgcgggtgatgctggaggatgctgaggacaggaagtacccagaaaatgacctcttcaggaagctgagagatgctgtgaaggaggccgagacctgtgcctctgtggcccagctgctgctgagcaagaagcagaagcaccggcagagcccagattctggccgcaccaggaccaagctgactgtggaggagctgaaggcctttgtgcagcagctgttcagcctgccctgtgtgatcagccaggcccggcaggtgaagaacctgctggatgatgtggaggagttccacgagcgggcccaggaggccatgatggatgagaccccagacagcagcaagctgcagatgctgattgacatgggcagcagcctgtatgtggagctgcctgagctgccccggctgaagcaggagctgcagcaggcccgctggctggatgaggtgcggctgaccctgagtgacccccagcaggtgaccctggatgtgatgaagaagctgattgattctggagtgggcctggccccccaccacgctgtggagaaggccatggccgagctgcaggagctgctgactgtgtctgagcgctgggaggagaaggccaaggtgtgcctgcaggcccggcccaggcacagcgtggccagcctggagagcatcgtgaatgaggccaagaacatcccagccttcctgcccaacgtgctgagcctgaaggaggccctgcagaaggcccgggagtggacagccaaggtggaggccatccagagcggcagcaactatgcctacctggagcagctggagagcctgagcgccaagggccggcccatccctgtgcggctggaggccctgccccaggtggagagccaggtggccgccgcccgggcctggagggagaggacaggccgcaccttcctgaagaagaacagcagccacaccctgctgcaggtgctgagccccaggacagacattggagtgtatggcagcggcaagaacagaagatag

SEQ ID NO: 158282 - DNA, 5073 bp, synthetic construct
  misc_feature 1..5073: note = Description of Artificial Sequence: Synthetic coding sequence
  source 1..5073: mol_type = other DNA
atggccggcgtgggccctgggggctacgccgctgagtttgtgcccccacctgagtgccctgtgtttgagcccagctgggaggagttcacagaccccctgtccttcatcggccgcatccggcccctggccgagaagacaggcatctgcaagatccggccccccaaggactggcagcccccatttgcctgtgaggtgaagagcttccgcttcaccccccgggtgcagaggctgaatgagctggaggccatgaccagggtgcggctggacttcctggaccagctggccaagttctgggagctgcagggcagcaccctgaagatccctgtggtggagaggaagatcctggacctgtatgccctgagcaagatcgtggccagcaaaggaggctttgagatggtgaccaaggagaagaagtggagcaaggtgggcagccggctgggctacctgcccgggaagggcaccggcagcctgctgaagagccactatgaaagaatcctgtacccctatgagctgttccagagcggcgtgtccctgatgggcgtgcagatgcccaacctggacctgaaggagaaggtggagcctgaggtgctgagcacagacacccagaccagccctgagcccggcaccaggatgaacatcctgcccaagaggaccaggagagtgaagacccagagcgagagcggagatgtgtccaggaacacagagctgaagaagctgcagatctttggagctggccccaaggtggtgggcctggccatgggcaccaaggacaaggaggatgaggtgaccaggaggaggaaggtgaccaacagaagtgatgccttcaacatgcagatgaggcagaggaagggcaccctgtctgtgaactttgtggacctgtatgtgtgcatgttctgtggccggggcaacaatgaagacaagctgctgctgtgtgatggctgtgatgacagctaccacaccttctgcctgatcccccccctgcctgatgtgcccaagggggactggcgctgccccaagtgtgtggccgaggagtgcagcaagccccgggaggccttcggctttgagcaggccgtgcgggagtacaccctgcagagctttggagagatggctgacaacttcaagagtgactacttcaacatgcctgtgcacatggtgcccacagagctggtggagaaggagttctggaggctggtgagcagcattgaagaagatgtgattgtggagtatggagctgacatcagcagcaaggactttggcagcggcttccctgtgaaggatggccgcaggaagatcctgcctgaggaggaggagtatgccctgagcggctggaacctgaacaacatgcctgtgctggagcagagcgtgctggcccacatcaacgtggacatcagcggcatgaaggtgccctggctgtatgtgggcatgtgcttcagcagcttctgctggcacatcgaggaccactggagctacagcatcaactacctgcactggggcgagcccaagacctggtacggcgtgcccagccacgccgctgagcagctggaggaggtgatgagggagctggcccctgagctgtttgagagccagcctgacctgctgcaccagctggtgaccatcatgaaccccaacgtgctgatggagcacggcgtgcctgtgtaccgcaccaaccagtgtgccggggagtttgtggtgaccttcccccgggcctaccacagcggcttcaaccagggctacaactttgctgaggccgtgaacttctgcacagctgactggctgcccatcggccggcagtgtgtgaaccactacagaaggctgcggcggcactgtgtgttcagccatgaggagctgatcttcaagatggctgctgaccctgaatgtctggatgtgggcctggccgccatggtgtgcaaggagctgaccctgatgacagaggaggagacccggctgcgggagagcgtggtgcagatgggcgtgctgatgtctgaggaggaggtgtttgagctggtgcctgatgatgagcggcagtgcagcgcctgcaggaccacctgcttcctgagcgccctgacctgcagctgcaaccctgagcggctggtgtgcctgtaccaccccacagacctgtgcccctgccccatgcagaagaagtgcctgcgctaccgctaccccctggaggacctgcccagcctgctgtatggagtgaaggtgcgggcccagagctatgacacctgggtgtcccgggtgacagaggccctgagcgccaacttcaaccacaagaaggacctgattgagctgcgggtgatgctggaggatgctgaggacaggaagtacccagaaaatgacctcttcaggaagctgagagatgctgtgaaggaggccgagacctgtgcctctgtggcccagctgctgctgagcaagaagcagaagcaccggcagagcccagacagcggccgcaccaggaccaagctgactgtggaggagctgaaggcctttgtgcagcagctgttcagcctgccctgcgtcatcagccaggcccggcaggtgaagaacctgctggatgatgtggaggagttccacgagcgggcccaggaggccatgatggatgagaccccagacagcagcaagctgcagatgctgattgacatgggcagcagcctgtatgtggagctgcctgagctgccccggctgaagcaggagctgcagcaggcccgctggctggatgaggtgcggctgaccctgagtgacccccagcaggtgaccctggatgtgatgaagaagctgattgacagcggcgtgggcctggccccccaccacgctgtggagaaggccatggccgagctgcaggagctgctgactgtgtctgagcgctgggaggagaaggccaaggtgtgcctgcaggcccggcccaggcacagcgtggccagcctggagagcatcgtgaatgaggccaagaacatcccagccttcctgcccaacgtgctgagcctgaaggaggccctgcagaaggcccgggagtggacagccaaggtggaggccatccagagcggcagcaactatgcctacctggagcagctggagagcctgagcgccaagggccggcccatccctgtgcggctggaggccctgccccaggtggagagccaggtggccgccgcccgggcctggagggagaggactggaagaaccttcctgaagaagaacagcagccacaccctgctgcaggtgctgagccccaggacagacatcggcgtgtatggcagcggcaagaacagaaggaagaaggtgaaggagctgattgagaaggagaaggagaaggacctggacctggagcccctgagtgacctggaggagggcctggaggagacccgggacacagccatggtggtggccgtgttcaaggagcgggagcagaaggagattgaggccatgcacagcctgcgggccgccaacctggccaagatgaccatggtggaccgcatcgaggaggtgaagttctgcatctgcaggaagacagccagcggcttcatgctgcagtgtgagctgtgcaaggactggttccacaacagctgtgtgcccctgcccaagagcagcagccagaagaagggcagctcctggcaggccaaggaggtgaagttcctgtgccccctgtgcatgaggagcagaagaccccggctggagaccatcctgagcctgctggtgtccctgcagaagctgcctgtgcggctgcctgagggggaggccctgcagtgcctgacagagcgggccatgtcctggcaggaccgggcccggcaggccctggccacagatgagctgagcagcgccctggccaagctgtctgtgctgagccagaggatggtggagcaggccgcccgggagaagacagagaagatcatctctgctgagctgcagaaggccgccgccaacccagacctgcagggccacctgcccagcttccagcagagcgccttcaacagagtggtgtcctctgtgagcagcagcccccggcagaccatggactatgatgatgaggagacagacagtgatgaggacatccgggagacctacggctatgacatgaaggacacagcctctgtgaagagcagcagcagcctggagcccaacctcttctgtgatgaggagatccccatcaagtctgaggaggtggtgacccacatgtggacagcccccagcttctgtgccgagcacgcctacagcagcgccagcaagagctgcagccagggcagcagcacccccaggaagcagcccaggaagagccccctggtgcccaggagcctggagccccctgtgctggagctgagccctggggccaaggcccagctggaggagctgatgatggtgggggacctgctggaggtgtccctggatgagacccagcacatctggaggatcctgcaggccacccaccccccatctgaagatcgcttcctgcacatcatggaggatgacagcatggaggagaagcccctgaaggtgaagggcaaggacagcagcgagaagaagaggaagaggaagctggagaaggtggagcagctgtttggagagggcaagcagaagagcaaggagctgaagaagatggacaagcccaggaagaagaagctgaagctgggcgctgacaagagcaaggagctgaacaagctggccaagaagctggccaaggaggaggagaggaagaagaagaaggagaaggctgctgctgccaaggtggagctggtgaaggagagcacagagaagaagcgggagaagaaggtgctggacatccccagcaaatatgactggagcggggctgaggagagtgatgatgaaaatgctgtgtgtgccgcccagaactgccagaggccctgcaaggacaaggtggactgggtgcagtgtgatggcggctgtgatgagtggttccaccaggtgtgtgtgggcgtgtccccagagatggctgaaaatgaagactacatctgcatcaactgtgccaagaagcagggccctgtgtccccaggccctgcccccccacccagcttcatcatgagctacaagctgcccatggaggacctgaaggagaccagctag

SEQ ID NO: 158283 - DNA, 3828 bp, synthetic construct
  misc_feature 1..3828: note = Description of Artificial Sequence: Synthetic coding sequence
  source 1..3828: mol_type = other DNA
atgggctttgcccctgggaaggctgtgggcagccacatccggggccactatgagcgcatcctgaacccctacaacctcttcctgagcggggacagcctgcgctgcctgcagaagcccaacctgaccacagacaccaaggacaaggagtacaagccccatgacatcccccagaggcagagcgtgcagcccagcgagacctgccccccagcccggcgggccaagaggatgagagctgaggccatgaacatcaagattgagcctgaggagaccacagaggcccggacccacaacctgcggcggaggatgggctgccccacccccaagtgtgaaaatgagaaggagatgaagagcagcatcaagcaggagcccatcgagaggaaggactacatcgtggagaatgagaaggagaagcccaagagccgcagcaagaaggccaccaatgctgtggacctgtatgtgtgcctgctgtgtggcagcggaaatgatgaagatcggctgctgctgtgtgatggctgtgatgacagctaccacaccttctgcctgatcccccccctgcatgatgtgcccaagggggactggcgctgccccaagtgcctggcccaggagtgcagcaagccccaggaggccttcggctttgagcaggccgcccgggactacaccctgcggaccttcggggagatggctgatgccttcaagagtgactacttcaacatgcctgtgcacatggtgcccacagagctggtggagaaggagttctggaggctggtgtccaccattgaagaagatgtgacagtggagtatggagctgacatcgccagcaaggagtttggcagcggcttccctgtgagagatggcaagatcaagctgagccctgaggaggaggagtacctggacagcggctggaacctgaacaacatgcctgtgatggagcagagcgtgctggcccacatcacagctgacatctgtggcatgaagctgccctggctgtatgtgggcatgtgcttcagcagcttctgctggcacatcgaggaccactggagctacagcatcaactacctgcactggggcgagcccaagacctggtacggcgtgcccggctacgccgctgagcagctggagaatgtgatgaagaagctggcccctgagctgtttgtgtcccagcctgacctgctgcaccagctggtgaccatcatgaaccccaacaccctgatgacccatgaggtgcctgtgtaccgcaccaaccagtgtgccggggagtttgtgatcaccttcccccgggcctaccacagcggcttcaaccagggcttcaactttgctgaggccgtgaacttctgcaccgtggactggctgcccctgggccggcagtgtgtggagcactaccgcctgctgcaccgctactgtgtgttcagccatgatgagatgatctgcaagatggccagcaaggcagatgtgctggatgtggtggtggccagcacagtgcagaaggacatggccatcatgattgaagatgagaaggccctgcgggagaccgtgaggaagctgggcgtgattgattctgagaggatggactttgagctgctgcctgatgatgagcggcagtgtgtgaagtgcaagaccacctgcttcatgtctgccatcagctgcagctgcaagccaggcctgctggtgtgcctgcaccacgtgaaggagctgtgcagctgccccccctacaagtacaagctgcgctaccgctacaccctggatgacctgtaccccatgatgaatgccctgaagctgcgggcagagagctacaatgagtgggccctgaatgtgaatgaggccctggaggccaagatcaacaagaagaagagcctggtgtccttcaaggccctgattgaggagagcgagatgaagaagttcccagacaatgacctgctgcggcacctgcggctggtgacccaggatgctgagaagtgtgcctctgtggcccagcagctgctgaatggcaagaggcagacccgctaccgcagcggcggcggcaagagccagaaccagctgactgtgaatgagctgcggcagtttgtgacccagctgtatgccctgccctgtgtgctgagccagacccccctgctgaaggacctgctgaacagagtggaggacttccagcagcacagccagaagctgctgtctgaggagacccccagcgctgctgagctgcaggacctgctggatgtgtcctttgaatttgatgtggagctgccccagctggccgagatgaggatccggctggagcaggcccgctggctggaggaggtgcagcaggcctgcctggaccccagcagcctgaccctggatgacatgaggcggctgattgacctgggcgtgggcctggccccctacagcgctgtggagaaggccatggcccggctgcaggagctgctgactgtgtctgagcactgggatgacaaggccaagagcctgctgaaggcccggcccaggcacagcctgaacagcctggccacagctgtgaaggagattgaggagatcccagcctacctgcccaacggggccgccctgaaggacagcgtgcagagggcccgggactggctgcaggatgtggagggcctgcaggccggcggccgggtgcctgtgctggacaccctcatcgagctggtgacccggggccgcagcatccctgtgcacctgaacagcctgccccggctggagaccctggtggccgaggtgcaggcctggaaggaatgtgctgtgaacaccttcctgacagagaacagcccctacagcctgctggaggtgctgtgcccccgctgtgacatcggcctgctgggcctgaagaggaagcagaggaagctgaaggagcccctgcccaacgggaagaagaagagcaccaagctggagagcctgagtgacctggagcgggccctgacagagagcaaggagacagccagcgccatggccaccctgggggaggcccggctgcgggagatggaggccctgcagagcctgcggctggccaatgaaggcaagctgctgagccccctgcaggatgtggacatcaagatctgcctgtgccagaaggccccagctgcccccatgatccagtgtgagctgtgcagagatgccttccacaccagctgtgtggccgtgcccagcatcagccagggcctgcgcatctggctgtgcccccactgccgccgctctgagaagccacccctggagaagatcctgcccctgctggccagcctgcagaggatccgggtgcggctgcctgaaggagatgccctgcgctacatgattgaaagaacagtgaactggcagcaccgggcccagcagctgctgagcagcggcaacctgaagtttgtgcaggacagagtgggcagcggcctgctgtacagccgctggcaggccagcgctggccaggtgtctgacaccaacaaggtgtcccagcccccaggcaccaccagcttcagcctgcctgatgactgggacaacagaaccagctacctgcacagccccttcagcacaggccgcagctgcatccccctgcacggcgtgtccccagaggtgaatgagctgctgatggaggcccagctgctgcaggtgtccctgcctgagatccaggagctgtaccagaccctgctggccaagcccagccctgcccagcagacagacaggagcagccctgtgcggcccagcagcgagaagaatgactgctgccggggcaagagagatggcatcaacagcctggagaggaagctgaagaggcggctggagcgggagggcctgagcagcgagcgctgggagcgggtgaagaagatgaggaccccctag

SEQ ID NO: 158284 - DNA, 4743 bp, synthetic construct
  misc_feature 1..4743: note = Description of Artificial Sequence: Synthetic coding sequence
  source 1..4743: mol_type = other DNA
atggaggccgccaccaccctgcaccctggccccaggcctgccctgcccctgggcggccctggccccctgggggagttcctgcccccaccagaatgtcctgtgtttgagcccagctgggaggagtttgctgacccctttgccttcatccacaagatccggcccatcgccgagcagacaggcatctgcaaggtgcggcccccaccagactggcagcccccatttgcctgtgatgtggacaagctgcacttcaccccccgcatccagaggctgaatgagctggaggcccagaccagggtgaagctgaacttcctggaccagatcgccaagtactgggagctgcagggcagcaccctgaagatcccccacgtggagaggaagatcctggacctcttccagctgaacaagctggtggccgaggagggcggctttgctgtggtgtgcaaggacaggaagtggaccaagatcgccaccaagatgggctttgcccctgggaaggctgtgggcagccacatccggggccactatgagcgcatcctgaacccctacaacctcttcctgagcggggacagcctgcgctgcctgcagaagcccaacctgaccacagacaccaaggacaaggagtacaagccccatgacatcccccagaggcagagcgtgcagcccagcgagacctgccccccagcccggcgggccaagaggatgagagctgagcggcagagcctggccgtgctgccccggctggagtgcagcggggccatcctggcccactgcaacctgcggctgctggacagcagcaacagcagcgccagcgccagccaggccatgaacatcaagattgagcctgaggagaccacagaggcccggacccacaacctgcggcggaggatgggctgccccacccccaagtgtgaaaatgagaaggagatgaagagcagcatcaagcaggagcccatcgagaggaaggactacatcgtggagaatgagaaggagaagcccaagagccgcagcaagaaggccaccaatgctgtggacctgtatgtgtgcctgctgtgtggcagcggaaatgatgaagatcggctgctgctgtgtgatggctgtgatgacagctaccacaccttctgcctgatcccccccctgcatgatgtgcccaagggggactggcgctgccccaagtgcctggcccaggagtgcagcaagccccaggaggccttcggctttgagcaggccgcccgggactacaccctgcggaccttcggggagatggctgatgccttcaagagtgactacttcaacatgcctgtgcacatggtgcccacagagctggtggagaaggagttctggaggctggtgtccaccattgaagaagatgtgacagtggagtatggagctgacatcgccagcaaggagtttggcagcggcttccctgtgagagatggcaagatcaagctgagccctgaggaggaggagtacctggacagcggctggaacctgaacaacatgcctgtgatggagcagagcgtgctggcccacatcacagctgacatctgtggcatgaagctgccctggctgtatgtgggcatgtgcttcagcagcttctgctggcacatcgaggaccactggagctacagcatcaactacctgcactggggcgagcccaagacctggtacggcgtgcccggctacgccgctgagcagctggagaatgtgatgaagaagctggcccctgagctgtttgtgtcccagcctgacctgctgcaccagctggtgaccatcatgaaccccaacaccctgatgacccatgaggtgcctgtgtaccgcaccaaccagtgtgccggggagtttgtgatcaccttcccccgggcctaccacagcggcttcaaccagggcttcaactttgctgaggccgtgaacttctgcaccgtggactggctgcccctgggccggcagtgtgtggagcactaccgcctgctgcaccgctactgtgtgttcagccatgatgagatgatctgcaagatggccagcaaggcagatgtgctggatgtggtggtggccagcacagtgcagaaggacatggccatcatgattgaagatgagaaggccctgcgggagaccgtgaggaagctgggcgtgattgattctgagaggatggactttgagctgctgcctgatgatgagcggcagtgtgtgaagtgcaagaccacctgcttcatgtctgccatcagctgcagctgcaagccaggcctgctggtgtgcctgcaccacgtgaaggagctgtgcagctgccccccctacaagtacaagctgcgctaccgctacaccctggatgacctgtaccccatgatgaatgccctgaagctgcgggcagagagctacaatgagtgggccctgaatgtgaatgaggccctggaggccaagatcaacaagaagaagagcctggtgtccttcaaggccctgattgaggagagcgagatgaagaagttcccagacaatgacctgctgcggcacctgcggctggtgacccaggatgctgagaagtgtgcctctgtggcccagcagctgctgaatggcaagaggcagacccgctaccgcagcggcggcggcaagagccagaaccagctgactgtgaatgagctgcggcagtttgtgacccagctgtatgccctgccctgtgtgctgagccagacccccctgctgaaggacctgctgaacagagtggaggacttccagcagcacagccagaagctgctgtctgaggagacccccagcgctgctgagctgcaggacctgctggatgtgtcctttgaatttgatgtggagctgccccagctggccgagatgaggatccggctggagcaggcccgctggctggaggaggtgcagcaggcctgcctggaccccagcagcctgaccctggatgacatgaggcggctgattgacctgggcgtgggcctggccccctacagcgctgtggagaaggccatggcccggctgcaggagctgctgactgtgtctgagcactgggatgacaaggccaagagcctgctgaaggcccggcccaggcacagcctgaacagcctggccacagctgtgaaggagattgaggagatcccagcctacctgcccaacggggccgccctgaaggacagcgtgcagagggcccgggactggctgcaggatgtggagggcctgcaggccggcggccgggtgcctgtgctggacaccctcatcgagctggtgacccggggccgcagcatccctgtgcacctgaacagcctgccccggctggagaccctggtggccgaggtgcaggcctggaaggaatgtgctgtgaacaccttcctgacagagaacagcccctacagcctgctggaggtgctgtgcccccgctgtgacatcggcctgctgggcctgaagaggaagcagaggaagctgaaggagcccctgcccaacgggaagaagaagagcaccaagctggagagcctgagtgacctggagcgggccctgacagagagcaaggagacagccagcgccatggccaccctgggggaggcccggctgcgggagatggaggccctgcagagcctgcggctggccaatgaaggcaagctgctgagccccctgcaggatgtggacatcaagatctgcctgtgccagaaggccccagctgcccccatgatccagtgtgagctgtgcagagatgccttccacaccagctgtgtggccgtgcccagcatcagccagggcctgcgcatctggctgtgcccccactgccgccgctctgagaagccacccctggagaagatcctgcccctgctggccagcctgcagaggatccgggtgcggctgcctgaaggagatgccctgcgctacatgattgaaagaacagtgaactggcagcaccgggcccagcagctgctgagcagcggcaacctgaagtttgtgcaggacagagtgggcagcggcctgctgtacagccgctggcaggccagcgctggccaggtgtctgacaccaacaaggtgtcccagcccccaggcaccaccagcttcagcctgcctgatgactgggacaacagaaccagctacctgcacagccccttcagcacaggccgcagctgcatccccctgcacggcgtgtccccagaggtgaatgagctgctgatggaggcccagctgctgcaggtgtccctgcctgagatccaggagctgtaccagaccctgctggccaagcccagccctgcccagcagacagacaggagcagccctgtgcggcccagcagcgagaagaatgactgctgccggggcaagagagatggcatcaacagcctggagaggaagctgaagaggcggctggagcgggagggcctgagcagcgagcgctgggagcgggtgaagaagatgaggacccccaagaagaagaagatcaagctgagccaccccaaggacatgaacaacttcaagctggagcgggagaggagctatgagctggtgcgctctgctgagacccacagcctgcccagcgacaccagctacagcgagcaggaggacagtgaagatgaagatgccatctgcccagctgtgtcctgcctgcagccagaaggagatgaggtggactgggtgcagtgtgatggcagctgcaaccagtggttccaccaggtgtgtgtgggcgtgtccccagagatggccgagaaggaggactacatctgtgtgcgctgcaccgtgaaggatgcccccagcaggaagtag

SEQ ID NO: 158285 - DNA, 4635 bp, synthetic construct
  misc_feature 1..4635: note = Description of Artificial Sequence: Synthetic coding sequence
  source 1..4635: mol_type = other DNA
atggaggccgccaccaccctgcaccctggccccaggcctgccctgcccctgggcggccctggccccctgggggagttcctgcccccaccagaatgtcctgtgtttgagcccagctgggaggagtttgctgacccctttgccttcatccacaagatccggcccatcgccgagcagacaggcatctgcaaggtgcggcccccaccagactggcagcccccatttgcctgtgatgtggacaagctgcacttcaccccccgcatccagaggctgaatgagctggaggcccagaccagggtgaagctgaacttcctggaccagatcgccaagtactgggagctgcagggcagcaccctgaagatcccccacgtggagaggaagatcctggacctcttccagctgaacaagctggtggccgaggagggcggctttgctgtggtgtgcaaggacaggaagtggaccaagatcgccaccaagatgggctttgcccctgggaaggctgtgggcagccacatccggggccactatgagcgcatcctgaacccctacaacctcttcctgagcggggacagcctgcgctgcctgcagaagcccaacctgaccacagacaccaaggacaaggagtacaagccccatgacatcccccagaggcagagcgtgcagcccagcgagacctgccccccagcccggcgggccaagaggatgagagctgaggccatgaacatcaagattgagcctgaggagaccacagaggcccggacccacaacctgcggcggaggatgggctgccccacccccaagtgtgaaaatgagaaggagatgaagagcagcatcaagcaggagcccatcgagaggaaggactacatcgtggagaatgagaaggagaagcccaagagccgcagcaagaaggccaccaatgctgtggacctgtatgtgtgcctgctgtgtggcagcggaaatgatgaagatcggctgctgctgtgtgatggctgtgatgacagctaccacaccttctgcctgatcccccccctgcatgatgtgcccaagggggactggcgctgccccaagtgcctggcccaggagtgcagcaagccccaggaggccttcggctttgagcaggccgcccgggactacaccctgcggaccttcggggagatggctgatgccttcaagagtgactacttcaacatgcctgtgcacatggtgcccacagagctggtggagaaggagttctggaggctggtgtccaccattgaagaagatgtgacagtggagtatggagctgacatcgccagcaaggagtttggcagcggcttccctgtgagagatggcaagatcaagctgagccctgaggaggaggagtacctggacagcggctggaacctgaacaacatgcctgtgatggagcagagcgtgctggcccacatcacagctgacatctgtggcatgaagctgccctggctgtatgtgggcatgtgcttcagcagcttctgctggcacatcgaggaccactggagctacagcatcaactacctgcactggggcgagcccaagacctggtacggcgtgcccggctacgccgctgagcagctggagaatgtgatgaagaagctggcccctgagctgtttgtgtcccagcctgacctgctgcaccagctggtgaccatcatgaaccccaacaccctgatgacccatgaggtgcctgtgtaccgcaccaaccagtgtgccggggagtttgtgatcaccttcccccgggcctaccacagcggcttcaaccagggcttcaactttgctgaggccgtgaacttctgcaccgtggactggctgcccctgggccggcagtgtgtggagcactaccgcctgctgcaccgctactgtgtgttcagccatgatgagatgatctgcaagatggccagcaaggcagatgtgctggatgtggtggtggccagcacagtgcagaaggacatggccatcatgattgaagatgagaaggccctgcgggagaccgtgaggaagctgggcgtgattgattctgagaggatggactttgagctgctgcctgatgatgagcggcagtgtgtgaagtgcaagaccacctgcttcatgtctgccatcagctgcagctgcaagccaggcctgctggtgtgcctgcaccacgtgaaggagctgtgcagctgccccccctacaagtacaagctgcgctaccgctacaccctggatgacctgtaccccatgatgaatgccctgaagctgcgggcagagagctacaatgagtgggccctgaatgtgaatgaggccctggaggccaagatcaacaagaagaagagcctggtgtccttcaaggccctgattgaggagagcgagatgaagaagttcccagacaatgacctgctgcggcacctgcggctggtgacccaggatgctgagaagtgtgcctctgtggcccagcagctgctgaatggcaagaggcagacccgctaccgcagcggcggcggcaagagccagaaccagctgactgtgaatgagctgcggcagtttgtgacccagctgtatgccctgccctgtgtgctgagccagacccccctgctgaaggacctgctgaacagagtggaggacttccagcagcacagccagaagctgctgtctgaggagacccccagcgctgctgagctgcaggacctgctggatgtgtcctttgaatttgatgtggagctgccccagctggccgagatgaggatccggctggagcaggcccgctggctggaggaggtgcagcaggcctgcctggaccccagcagcctgaccctggatgacatgaggcggctgattgacctgggcgtgggcctggccccctacagcgctgtggagaaggccatggcccggctgcaggagctgctgactgtgtctgagcactgggatgacaaggccaagagcctgctgaaggcccggcccaggcacagcctgaacagcctggccacagctgtgaaggagattgaggagatcccagcctacctgcccaacggggccgccctgaaggacagcgtgcagagggcccgggactggctgcaggatgtggagggcctgcaggccggcggccgggtgcctgtgctggacaccctcatcgagctggtgacccggggccgcagcatccctgtgcacctgaacagcctgccccggctggagaccctggtggccgaggtgcaggcctggaaggaatgtgctgtgaacaccttcctgacagagaacagcccctacagcctgctggaggtgctgtgcccccgctgtgacatcggcctgctgggcctgaagaggaagcagaggaagctgaaggagcccctgcccaacgggaagaagaagagcaccaagctggagagcctgagtgacctggagcgggccctgacagagagcaaggagacagccagcgccatggccaccctgggggaggcccggctgcgggagatggaggccctgcagagcctgcggctggccaatgaaggcaagctgctgagccccctgcaggatgtggacatcaagatctgcctgtgccagaaggccccagctgcccccatgatccagtgtgagctgtgcagagatgccttccacaccagctgtgtggccgtgcccagcatcagccagggcctgcgcatctggctgtgcccccactgccgccgctctgagaagccacccctggagaagatcctgcccctgctggccagcctgcagaggatccgggtgcggctgcctgaaggagatgccctgcgctacatgattgaaagaacagtgaactggcagcaccgggcccagcagctgctgagcagcggcaacctgaagtttgtgcaggacagagtgggcagcggcctgctgtacagccgctggcaggccagcgctggccaggtgtctgacaccaacaaggtgtcccagcccccaggcaccaccagcttcagcctgcctgatgactgggacaacagaaccagctacctgcacagccccttcagcacaggccgcagctgcatccccctgcacggcgtgtccccagaggtgaatgagctgctgatggaggcccagctgctgcaggtgtccctgcctgagatccaggagctgtaccagaccctgctggccaagcccagccctgcccagcagacagacaggagcagccctgtgcggcccagcagcgagaagaatgactgctgccggggcaagagagatggcatcaacagcctggagaggaagctgaagaggcggctggagcgggagggcctgagcagcgagcgctgggagcgggtgaagaagatgaggacccccaagaagaagaagatcaagctgagccaccccaaggacatgaacaacttcaagctggagcgggagaggagctatgagctggtgcgctctgctgagacccacagcctgcccagcgacaccagctacagcgagcaggaggacagtgaagatgaagatgccatctgcccagctgtgtcctgcctgcagccagaaggagatgaggtggactgggtgcagtgtgatggcagctgcaaccagtggttccaccaggtgtgtgtgggcgtgtccccagagatggccgagaaggaggactacatctgtgtgcgctgcaccgtgaaggatgcccccagcaggaagtag

SEQ ID NO: 158286 - DNA, 4161 bp, synthetic construct
  misc_feature 1..4161: note = Description of Artificial Sequence: Synthetic coding sequence
  source 1..4161: mol_type = other DNA
atgggctttgcccctgggaaggctgtgggcagccacatccggggccactatgagcgcatcctgaacccctacaacctcttcctgagcggggacagcctgcgctgcctgcagaagcccaacctgaccacagacaccaaggacaaggagtacaagccccatgacatcccccagaggcagagcgtgcagcccagcgagacctgccccccagcccggcgggccaagaggatgagagctgaggccatgaacatcaagattgagcctgaggagaccacagaggcccggacccacaacctgcggcggaggatgggctgccccacccccaagtgtgaaaatgagaaggagatgaagagcagcatcaagcaggagcccatcgagaggaaggactacatcgtggagaatgagaaggagaagcccaagagccgcagcaagaaggccaccaatgctgtggacctgtatgtgtgcctgctgtgtggcagcggaaatgatgaagatcggctgctgctgtgtgatggctgtgatgacagctaccacaccttctgcctgatcccccccctgcatgatgtgcccaagggggactggcgctgccccaagtgcctggcccaggagtgcagcaagccccaggaggccttcggctttgagcaggccgcccgggactacaccctgcggaccttcggggagatggctgatgccttcaagagtgactacttcaacatgcctgtgcacatggtgcccacagagctggtggagaaggagttctggaggctggtgtccaccattgaagaagatgtgacagtggagtatggagctgacatcgccagcaaggagtttggcagcggcttccctgtgagagatggcaagatcaagctgagccctgaggaggaggagtacctggacagcggctggaacctgaacaacatgcctgtgatggagcagagcgtgctggcccacatcacagctgacatctgtggcatgaagctgccctggctgtatgtgggcatgtgcttcagcagcttctgctggcacatcgaggaccactggagctacagcatcaactacctgcactggggcgagcccaagacctggtacggcgtgcccggctacgccgctgagcagctggagaatgtgatgaagaagctggcccctgagctgtttgtgtcccagcctgacctgctgcaccagctggtgaccatcatgaaccccaacaccctgatgacccatgaggtgcctgtgtaccgcaccaaccagtgtgccggggagtttgtgatcaccttcccccgggcctaccacagcggcttcaaccagggcttcaactttgctgaggccgtgaacttctgcaccgtggactggctgcccctgggccggcagtgtgtggagcactaccgcctgctgcaccgctactgtgtgttcagccatgatgagatgatctgcaagatggccagcaaggcagatgtgctggatgtggtggtggccagcacagtgcagaaggacatggccatcatgattgaagatgagaaggccctgcgggagaccgtgaggaagctgggcgtgattgattctgagaggatggactttgagctgctgcctgatgatgagcggcagtgtgtgaagtgcaagaccacctgcttcatgtctgccatcagctgcagctgcaagccaggcctgctggtgtgcctgcaccacgtgaaggagctgtgcagctgccccccctacaagtacaagctgcgctaccgctacaccctggatgacctgtaccccatgatgaatgccctgaagctgcgggcagagagctacaatgagtgggccctgaatgtgaatgaggccctggaggccaagatcaacaagaagaagagcctggtgtccttcaaggccctgattgaggagagcgagatgaagaagttcccagacaatgacctgctgcggcacctgcggctggtgacccaggatgctgagaagtgtgcctctgtggcccagcagctgctgaatggcaagaggcagacccgctaccgcagcggcggcggcaagagccagaaccagctgactgtgaatgagctgcggcagtttgtgacccagctgtatgccctgccctgtgtgctgagccagacccccctgctgaaggacctgctgaacagagtggaggacttccagcagcacagccagaagctgctgtctgaggagacccccagcgctgctgagctgcaggacctgctggatgtgtcctttgaatttgatgtggagctgccccagctggccgagatgaggatccggctggagcaggcccgctggctggaggaggtgcagcaggcctgcctggaccccagcagcctgaccctggatgacatgaggcggctgattgacctgggcgtgggcctggccccctacagcgctgtggagaaggccatggcccggctgcaggagctgctgactgtgtctgagcactgggatgacaaggccaagagcctgctgaaggcccggcccaggcacagcctgaacagcctggccacagctgtgaaggagattgaggagatcccagcctacctgcccaacggggccgccctgaaggacagcgtgcagagggcccgggactggctgcaggatgtggagggcctgcaggccggcggccgggtgcctgtgctggacaccctcatcgagctggtgacccggggccgcagcatccctgtgcacctgaacagcctgccccggctggagaccctggtggccgaggtgcaggcctggaaggaatgtgctgtgaacaccttcctgacagagaacagcccctacagcctgctggaggtgctgtgcccccgctgtgacatcggcctgctgggcctgaagaggaagcagaggaagctgaaggagcccctgcccaacgggaagaagaagagcaccaagctggagagcctgagtgacctggagcgggccctgacagagagcaaggagacagccagcgccatggccaccctgggggaggcccggctgcgggagatggaggccctgcagagcctgcggctggccaatgaaggcaagctgctgagccccctgcaggatgtggacatcaagatctgcctgtgccagaaggccccagctgcccccatgatccagtgtgagctgtgcagagatgccttccacaccagctgtgtggccgtgcccagcatcagccagggcctgcgcatctggctgtgcccccactgccgccgctctgagaagccacccctggagaagatcctgcccctgctggccagcctgcagaggatccgggtgcggctgcctgaaggagatgccctgcgctacatgattgaaagaacagtgaactggcagcaccgggcccagcagctgctgagcagcggcaacctgaagtttgtgcaggacagagtgggcagcggcctgctgtacagccgctggcaggccagcgctggccaggtgtctgacaccaacaaggtgtcccagcccccaggcaccaccagcttcagcctgcctgatgactgggacaacagaaccagctacctgcacagccccttcagcacaggccgcagctgcatccccctgcacggcgtgtccccagaggtgaatgagctgctgatggaggcccagctgctgcaggtgtccctgcctgagatccaggagctgtaccagaccctgctggccaagcccagccctgcccagcagacagacaggagcagccctgtgcggcccagcagcgagaagaatgactgctgccggggcaagagagatggcatcaacagcctggagaggaagctgaagaggcggctggagcgggagggcctgagcagcgagcgctgggagcgggtgaagaagatgaggacccccaagaagaagaagatcaagctgagccaccccaaggacatgaacaacttcaagctggagcgggagaggagctatgagctggtgcgctctgctgagacccacagcctgcccagcgacaccagctacagcgagcaggaggacagtgaagatgaagatgccatctgcccagctgtgtcctgcctgcagccagaaggagatgaggtggactgggtgcagtgtgatggcagctgcaaccagtggttccaccaggtgtgtgtgggcgtgtccccagagatggccgagaaggaggactacatctgtgtgcgctgcaccgtgaaggatgcccccagcaggaagtag

SEQ ID NO: 158287 - DNA, 933 bp, synthetic construct
  misc_feature 1..933: note = Description of Artificial Sequence: Synthetic coding sequence
  source 1..933: mol_type = other DNA
atgatctgcaagatggccagcaaggcagatgtgctggatgtggtggtggccagcacagtgcagaaggacatggccatcatgattgaagatgagaaggccctgcgggagaccgtgaggaagctgggcgtcatcgacagcgagaggatggactttgagctgctgcctgatgatgagcggcagtgtgtgaagtgcaagaccacctgcttcatgtctgccatcagctgcagctgcaagccaggcctgctggtgtgcctgcaccacgtgaaggagctgtgcagctgccccccctacaagtacaagctgcgctaccgctacaccctggatgacctgtaccccatgatgaatgccctgaagctgcgggcagagagctacaatgagtgggccctgaatgtgaatgaggccctggaggccaagatcaacaagaagaagagcctggtgtccttcaaggccctgattgaggagagcgagatgaagaagttcccagacaatgacctgctgcggcacctgcggctggtgacccaggatgctgagaagtgtgcctctgtggcccagcagctgctgaatggcaagaggcagacccgctacagaagtggcggcggcaagagccagaaccagctgactgtgaatgagctgcggcagtttgtgacccagctgtatgccctgccctgtgtgctgagccagacccccctgctgaaggacctgctgaacagagtggaggacttccagcagcacagccagaagctgctgtctgaggagaccccatctgctgctgagctgcaggacctgctggatgtgtcctttgaatttgatgtggagctgccccagctggccgagatgaggatccggctggagcaggcccgctggctggaggaggtgcagcaggcctgcctggaccccagcagcctgaccctggatgacatgagggtgtcctag

SEQ ID NO: 158288 - DNA, 4674 bp, synthetic construct
  misc_feature 1..4674: note = Description of Artificial Sequence: Synthetic coding sequence
  source 1..4674: mol_type = other DNA
atggagcccggcagtgatgacttcctgcccccaccagaatgtcctgtgtttgagcccagctgggccgagttccgggaccccctgggctacatcgccaagatccggcccatcgccgagaagagcggcatctgcaagatccggcccccagctgactggcagcccccatttgctgtggaggtggacaacttccgcttcaccccccgcatccagaggctgaatgagctggaggcccagaccagggtgaagctgaactacctggaccagatcgccaagttctgggagatccagggcagcagcctgaagatccccaacgtggagcggcgcatcctggacctgtacagcctgagcaagatcgtggtggaggagggcggctatgaggccatctgcaaggaccggcgctgggcccgggtggcccagaggctgaactacccacctgggaagaacatcggcagcctgctgcggagccactatgagcgcatcgtgtacccctatgagatgtaccagagcggggccaacctggtgcagtgcaacacccggccctttgacaatgaggagaaggacaaggagtacaagccccacagcatccccctgcggcagagcgtgcagcccagcaagttcaacagctatggaagaagagccaagaggctgcagcctgaccctgagcccacagaagaagatattgagaagaaccctgagctgaagaagctgcagatctatggagctggccccaagatgatgggcctgggcctgatggccaaggacaagaccctgaggaagaaggacaaggagggccctgagtgcccccccaccgtggtggtgaaggaggagctgggcggagatgtgaaggtggagagcaccagccccaagaccttcctggagagcaaggaggagctgagccacagccctgagccctgcaccaagatgaccatgaggctgcggaggaaccacagcaatgcccagttcatcgagagctatgtgtgcaggatgtgcagcagaggagatgaagatgacaagctgctgctgtgtgatggctgtgatgacaactaccacatcttctgcctgctgccccccctgcctgagatccccaagggcgtgtggcgctgccccaagtgtgtgatggccgagtgcaagaggcctcctgaggcctttggatttgagcaggccacccgggagtacaccctgcagagctttggagagatggctgacagcttcaaggctgactacttcaacatgcctgtgcacatggtgcccacagagctggtggagaaggagttctggaggctggtgaacagcattgaggaggatgtgacagtggagtatggagctgacatccacagcaaggagtttggaagtggcttccctgtgtctgacagcaagaggcacctgaccccagaggaggaggagtatgccaccagcggctggaacctgaatgtgatgcctgtgctggagcagagcgtgctgtgccacatcaatgctgacatcagcggcatgaaggtgccctggctgtatgtgggcatggtgttttctgccttctgctggcacatcgaggaccactggagctacagcatcaactacctgcactggggcgagcccaagacctggtatggagtgcccagcctggccgctgagcacctggaggaggtgatgaagaagctgaccccagagctgtttgacagccagcctgacctgctgcaccagctggtgaccctgatgaaccccaacaccctgatgagccatggagtgcctgtggtgaggaccaaccagtgtgccggggagtttgtgatcaccttcccccgggcctaccacagcggcttcaaccagggctacaactttgctgaggccgtgaacttctgcacagctgactggctgcctgctggccggcagtgcatcgagcactaccgccgcctgcggcgctactgtgtgttcagccatgaggagctgatctgcaagatggccgcctgcccagagaagctggacctgaacctggccgctgctgtgcacaaggagatgttcatcatggtgcaggaggagcggcggctgaggaaggccctgctggagaagggcatcacagaggccgagcgggaggcctttgagctgctgcctgatgatgagcggcagtgcatcaagtgcaagaccacctgcttcctgagcgccctggcctgctatgactgcccagatggcctggtgtgcctgagccacatcaatgacctgtgcaagtgcagcagcagccggcagtacctgcgctaccgctacaccctggatgagctgcctgccatgctgcacaagctgaaggtgcgggcagagagctttgacacctgggccaacaaggtgcgggtggccctggaggtggaggatggcaggaagaggagcctggaggagctgcgggccctggagagcgaggcccgggagcggcgcttccccaacagcgagctgctgcagcagctgaagaactgcctgtctgaggccgaggcctgtgtgtcccgggccctgggcctggtgtctggccaggaggccggcccccaccgggtggccggcctgcagatgaccctgacagagctgcgggccttcctggaccagatgaacaacctgccctgtgccatgcaccagattggagatgtgaagggcgtgctggagcaggtggaggcctaccaggccgaggcccgggaggccctggccagcctgcccagcagccctggcctgctgcagagcctgctggagcggggccggcagctgggcgtggaggtgcctgaggcccagcagctgcagaggcaggtggagcaggcccgctggctggatgaggtgaagaggaccctggcccccagcgcccggcggggcaccctggccgtgatgaggggcctgctggtggccggggcctctgtggcccccagccctgctgtggacaaggcccaggccgagctgcaggagctgctgaccatcgccgagcgctgggaggagaaggcccacctgtgcctggaggcccggcagaagcaccccccagccaccctggaggccatcatccgggaggccgagaacatccctgtgcacctgcccaacatccaggccctgaaggaggccctggccaaggcccgggcctggattgctgatgtggatgagatccagaatggagaccactacccctgcctggatgacctggagggcctggtggccgtgggccgggacctgcctgtgggcctggaggagctgcggcagctggagctgcaggtgctgacagcccacagctggagggagaaggccagcaagaccttcctgaagaagaacagctgctacaccctgctggaggtgctgtgcccctgtgctgatgctggcagtgacagcaccaagaggagccgctggatggagaaggagctgggcctgtacaagagtgacacagagctgctgggcctgagcgcccaggacctgcgggaccccggctctgtgattgtggccttcaaggagggggagcagaaggagaaggagggcatcctgcagctgcggaggaccaacagcgccaagcccagccccctggccagcagcagcacagccagcagcaccaccagcatctgtgtgtgtggccaggtgctggccggggccggggccctgcagtgtgacctgtgccaggactggttccacggccgctgtgtgtctgtgccccggctgctgagcagcccccggcccaaccccaccagcagccccctgctggcctggtgggagtgggacaccaagttcctgtgccccctgtgcatgaggagcagaagaccccggctggagaccatcctggccctgctggtggccctgcagaggctgcctgtgcggctgcctgagggggaggccctgcagtgcctgacagagcgggccatctcctggcagggccgggcccggcaggccctggcctctgaagatgtgacagccctgctgggccgcctggccgagctgcggcagaggctgcaggccgagcccaggcctgaggagccccccaactacccagctgccccagccagtgaccccctgcgggagggcagcggcaaggacatgcccaaggtgcagggcctgctggagaatggagacagcgtgaccagccctgagaaggtggcccctgaggagggcagtgacctggagctgctgagcagcctgctgccccagctgaccggccctgtgctggagctgcctgaggccacccgggcccccctggaggagctgatgatggagggggacctgctggaggtgaccctggatgagaaccacagcatctggcagctgctgcaggccggccagcccccagacctggagcgcatccgcaccctgctggagctggagaaggccgagagacatggcagccgggcccggggccgggccctggagaggagaagaagaaggaaggtggacagaggaggagaaggagatgatcctgcccgggaggagctggagcccaagagggtgcgcagcagcggccctgaggccgaggaggtgcaggaggaggaggagctggaggaggagactggaggagagggccccccagcccccatccccaccaccggcagccccagcacccaggagaaccagaatggcctggagcctgctgagggcaccaccagcggccccagcgcccccttcagcaccctgaccccccggctgcacctgccctgcccccagcagcccccccagcagcagctgtag

SEQ ID NO: 158289 - DNA, 4551 bp, synthetic construct
  misc_feature 1..4551: note = Description of Artificial Sequence: Synthetic coding sequence
  source 1..4551: mol_type = other DNA
atggagcccggcagtgatgacttcctgcccccaccagaatgtcctgtgtttgagcccagctgggccgagttccgggaccccctgggctacatcgccaagatccggcccatcgccgagaagagcggcatctgcaagatccggcccccagctgactggcagcccccatttgctgtggaggtggacaacttccgcttcaccccccgcatccagaggctgaatgagctggagatcgtggtggaggagggcggctatgaggccatctgcaaggaccggcgctgggcccgggtggcccagaggctgaactacccacctgggaagaacatcggcagcctgctgcggagccactatgaaagaattgtgtacccctatgagatgtaccagagcggggccaacctggtgcagtgcaacacccggccctttgacaatgaggagaaggacaaggagtacaagccccacagcatccccctgcggcagagcgtgcagcccagcaagttcaacagctatggccggcgggccaagaggctgcagcctgaccctgagcccacagaggaggacatcgagaagaaccctgagctgaagaagctgcagatctacggggccggccccaagatgatgggcctgggcctgatggccaaggacaagaccctgaggaagaaggacaaggagggcccagaatgtcctcccaccgtggtggtgaaggaggagctgggcggagatgtgaaggtggagagcaccagccccaagaccttcctggagagcaaggaggagctgagccacagccctgagccctgcaccaagatgaccatgaggctgcggaggaaccacagcaatgcccagttcatcgagagctatgtgtgcaggatgtgcagcagaggagatgaagatgacaagctgctgctgtgtgatggctgtgatgacaactaccacatcttctgcctgctgccccccctgcctgagatccccaagggcgtgtggcgctgccccaagtgtgtgatggccgagtgcaagaggcctcctgaggccttcggctttgagcaggccacccgggagtacaccctgcagagctttggagagatggctgacagcttcaaggctgactacttcaacatgcctgtgcacatggtgcccacagagctggtggagaaggagttctggaggctggtgaacagcattgaagaagatgtgacagtggagtatggagctgacatccacagcaaggagtttggcagcggcttccctgtgtctgacagcaagaggcacctgaccccagaggaggaggagtatgccaccagcggctggaacctgaatgtgatgcctgtgctggagcagagcgtgctgtgccacatcaatgctgacatcagcggcatgaaggtgccctggctgtatgtgggcatggtgttcagcgccttctgctggcacatcgaggaccactggagctacagcatcaactacctgcactggggcgagcccaagacctggtacggcgtgcccagcctggccgctgagcacctggaggaggtgatgaagaagctgaccccagagctgtttgacagccagcctgacctgctgcaccagctggtgaccctgatgaaccccaacaccctgatgagccacggcgtgcctgtggtgaggaccaaccagtgtgccggggagtttgtgatcaccttcccccgggcctaccacagcggcttcaaccagggctacaactttgctgaggccgtgaacttctgcacagctgactggctgcctgctggccggcagtgcatcgagcactacagaaggctgcggcgctactgtgtgttcagccatgaggagctgatctgcaagatggccgcctgcccagagaagctggacctgaacctggccgctgctgtgcacaaggagatgttcatcatggtgcaggaggagcggcggctgaggaaggccctgctggagaagggcatcacagaagctgagcgggaggcctttgagctgctgcctgatgatgagcggcagtgcatcaagtgcaagaccacctgcttcctgagcgccctggcctgctatgactgcccagatggcctggtgtgcctgagccacatcaatgacctgtgcaagtgcagcagcagccggcagtacctgcgctaccgctacaccctggatgagctgcctgccatgctgcacaagctgaaggtgcgggcagagagctttgacacctgggccaacaaggtgcgggtggccctggaggtggaggatggcaggaagaggagcctggaggagctgcgggccctggagagcgaggcccgggagcggcgcttccccaacagcgagctgctgcagcagctgaagaactgcctgtctgaggccgaggcctgtgtgtcccgggccctgggcctggtgtctggccaggaggccggcccccaccgggtggccggcctgcagatgaccctgacagagctgcgggccttcctggaccagatgaacaacctgccctgtgccatgcaccagattggagatgtgaagggcgtgctggagcaggtggaggcctaccaggccgaggcccgggaggccctggccagcctgcccagcagccctggcctgctgcagagcctgctggagcggggccggcagctgggcgtggaggtgcctgaggcccagcagctgcagaggcaggtggagcaggcccgctggctggatgaggtgaagaggaccctggcccccagcgcccggcggggcaccctggccgtgatgaggggcctgctggtggccggggcctctgtggcccccagccctgctgtggacaaggcccaggccgagctgcaggagctgctgaccatcgccgagcgctgggaggagaaggcccacctgtgcctggaggcccggcagaagcaccccccagccaccctggaggccatcatccgggaggccgagaacatccctgtgcacctgcccaacatccaggccctgaaggaggccctggccaaggcccgggcctggattgctgatgtggatgagatccagaatggagaccactacccctgcctggatgacctggagggcctggtggccgtgggccgggacctgcctgtgggcctggaggagctgcggcagctggagctgcaggtgctgacagcccacagctggagggagaaggccagcaagaccttcctgaagaagaacagctgctacaccctgctggaggtgctgtgcccctgtgctgatgctggcagtgacagcaccaagaggagccgctggatggagaaggagctgggcctgtacaagagtgacacagagctgctgggcctgagcgcccaggacctgcgggaccccggcagcgtcatcgtggccttcaaggagggggagcagaaggagaaggagggcatcctgcagctgcggaggaccaacagcgccaagcccagccccctggccagcagcagcacagccagcagcaccaccagcatctgtgtgtgtggccaggtgctggccggggccggggccctgcagtgtgacctgtgccaggactggttccacggccgctgtgtgtctgtgccccggctgctgagcagcccccggcccaaccccaccagcagccccctgctggcctggtgggagtgggacaccaagttcctgtgccccctgtgcatgaggagccggcggccccggctggagaccatcctggccctgctggtggccctgcagaggctgcctgtgcggctgcctgagggggaggccctgcagtgcctgacagagcgggccatctcctggcagggccgggcccggcaggccctggcctctgaagatgtgacagccctgctgggccgcctggccgagctgcggcagaggctgcaggccgagcccaggcctgaggagccccccaactacccagctgccccagccagtgaccccctgcgggagggcagcggcaaggacatgcccaaggtgcagggcctgctggagaatggagacagcgtgaccagccctgagaaggtggcccctgaggagggcagtgacctggagctgctgagcagcctgctgccccagctgactggacctgtgctggagctgcctgaggccacccgggcccccctggaggagctgatgatggagggggacctgctggaggtgaccctggatgagaaccacagcatctggcagctgctgcaggccggccagcccccagacctggagcgcatccgcaccctgctggagctggagaaggccgagcggcacggcagccgggcccggggccgggccctggagaggagaagaagaaggaaggtggaccggggcggggagggagatgatcctgcccgggaggagctggagcccaagagggtgcgcagcagcggccctgaggccgaggaggtgcaggaggaggaggagctggaggaggagaccggcggggagggccccccagcccccatccccaccaccggcagccccagcacccaggagaaccagaatggcctggagcctgctgagggcaccaccagcggccccagcgcccccttcagcaccctgaccccccggctgcacctgccctgcccccagcagcccccccagcagcagctgtag

SEQ ID NO: 158290 - DNA, 4683 bp, synthetic construct
  misc_feature 1..4683: note = Description of Artificial Sequence: Synthetic coding sequence
  source 1..4683: mol_type = other DNA
atggagcccggcagtgatgacttcctgcccccaccagaatgtcctgtgtttgagcccagctgggccgagttccgggaccccctgggctacatcgccaagatccggcccatcgccgagaagagcggcatctgcaagatccggcccccagctgactggcagcccccatttgctgtggaggtggacaacttccgcttcaccccccgcatccagaggctgaatgagctggaggcccagaccagggtgaagctgaactacctggaccagatcgccaagttctgggagatccagggcagcagcctgaagatccccaacgtggagcggcgcatcctggacctgtacagcctgagcaagatcgtggtggaggagggcggctatgaggccatctgcaaggaccggcgctgggcccgggtggcccagaggctgaactacccacctgggaagaacatcggcagcctgctgcggagccactatgagcgcatcgtgtacccctatgagatgtaccagagcggggccaacctggtgcagtgcaacacccggccctttgacaatgaggagaaggacaaggagtacaagccccacagcatccccctgcggcagagcgtgcagcccagcaagttcaacagctatggaagaagagccaagaggctgcagcctgaccctgagcccacagaagaagatattgagaagaaccctgagctgaagaagctgcagatctatggagctggccccaagatgatgggcctgggcctgatggccaaggacaagaccctgaggaagaaggacaaggagggccctgagtgcccccccaccgtggtggtgaaggaggagctgggcggagatgtgaaggtggagagcaccagccccaagaccttcctggagagcaaggaggagctgagccacagccctgagccctgcaccaagatgaccatgaggctgcggaggaaccacagcaatgcccagttcatcgagagctatgtgtgcaggatgtgcagcagaggagatgaagatgacaagctgctgctgtgtgatggctgtgatgacaactaccacatcttctgcctgctgccccccctgcctgagatccccaagggcgtgtggcgctgccccaagtgtgtgatggccgagtgcaagaggcctcctgaggcctttggatttgagcaggccacccgggagtacaccctgcagagctttggagagatggctgacagcttcaaggctgactacttcaacatgcctgtgcacatggtgcccacagagctggtggagaaggagttctggaggctggtgaacagcattgaggaggatgtgacagtggagtatggagctgacatccacagcaaggagtttggaagtggcttccctgtgtctgacagcaagaggcacctgaccccagaggaggaggagtatgccaccagcggctggaacctgaatgtgatgcctgtgctggagcagagcgtgctgtgccacatcaatgctgacatcagcggcatgaaggtgccctggctgtatgtgggcatggtgttttctgccttctgctggcacatcgaggaccactggagctacagcatcaactacctgcactggggcgagcccaagacctggtatggagtgcccagcctggccgctgagcacctggaggaggtgatgaagaagctgaccccagagctgtttgacagccagcctgacctgctgcaccagctggtgaccctgatgaaccccaacaccctgatgagccatggagtgcctgtggtgaggaccaaccagtgtgccggggagtttgtgatcaccttcccccgggcctaccacagcggcttcaaccagggctacaactttgctgaggccgtgaacttctgcacagctgactggctgcctgctggccggcagtgcatcgagcactaccgccgcctgcggcgctactgtgtgttcagccatgaggagctgatctgcaagatggccgcctgcccagagaagctggacctgaacctggccgctgctgtgcacaaggagatgttcatcatggtgcaggaggagcggcggctgaggaaggccctgctggagaagggcatcacagaggccgagcgggaggcctttgagctgctgcctgatgatgagcggcagtgcatcaagtgcaagaccacctgcttcctgagcgccctggcctgctatgactgcccagatggcctggtgtgcctgagccacatcaatgacctgtgcaagtgcagcagcagccggcagtacctgcgctaccgctacaccctggatgagctgcctgccatgctgcacaagctgaaggtgcgggcagagagctttgacacctgggccaacaaggtgcgggtggccctggaggtggaggatggcaggaagaggagcctggaggagctgcgggccctggagagcgaggcccgggagcggcgcttccccaacagcgagctgctgcagcagctgaagaactgcctgtctgaggccgaggcctgtgtgtcccgggccctgggcctggtgtctggccaggaggccggcccccaccgggtggccggcctgcagatgaccctgacagagctgcgggccttcctggaccagatgaacaacctgccctgtgccatgcaccagattggagatgtgaagggcgtgctggagcaggtggaggcctaccaggccgaggcccgggaggccctggccagcctgcccagcagccctggcctgctgcagagcctgctggagcggggccggcagctgggcgtggaggtgcctgaggcccagcagctgcagaggcaggtggagcaggcccgctggctggatgaggtgaagaggaccctggcccccagcgcccggcggggcaccctggccgtgatgaggggcctgctggtggccggggcctctgtggcccccagccctgctgtggacaaggcccaggccgagctgcaggagctgctgaccatcgccgagcgctgggaggagaaggcccacctgtgcctggaggcccggcagaagcaccccccagccaccctggaggccatcatccgggaggccgagaacatccctgtgcacctgcccaacatccaggccctgaaggaggccctggccaaggcccgggcctggattgctgatgtggatgagatccagaatggagaccactacccctgcctggatgacctggagggcctggtggccgtgggccgggacctgcctgtgggcctggaggagctgcggcagctggagctgcaggtgctgacagcccacagctggagggagaaggccagcaagaccttcctgaagaagaacagctgctacaccctgctggaggtgctgtgcccctgtgctgatgctggcagtgacagcaccaagaggagccgctggatggagaaggagctgggcctgtacaagagtgacacagagctgctgggcctgagcgcccaggacctgcgggaccccggctctgtgattgtggccttcaaggagggggagcagaaggagaaggagggcatcctgcagctgcggaggaccaacagcgccaagcccagccccctggccagcagcagcacagccagcagcaccaccagcatctgtgtgtgtggccaggtgctggccggggccggggccctgcagtgtgacctgtgccaggactggttccacggccgctgtgtgtctgtgccccggctgctgagcagcccccggcccaaccccaccagcagccccctgctggcctggtgggagtgggacaccaagttcctgtgccccctgtgcatgaggagcagaagaccccggctggagaccatcctggccctgctggtggccctgcagaggctgcctgtgcggctgcctgagggggaggccctgcagtgcctgacagagcgggccatctcctggcagggccgggcccggcaggccctggcctctgaagatgtgacagccctgctgggccgcctggccgagctgcggcagaggctgcaggccgagcccaggcctgaggagccccccaactacccagctgccccagccagtgaccccctgcgggagggcagcggcaaggacatgcccaaggtgcagggcctgctggagaatggagacagcgtgaccagccctgagaaggtggcccctgaggagggcagcggcaagagggacctggagctgctgagcagcctgctgccccagctgactggacctgtgctggagctgcctgaggccacccgggcccccctggaggagctgatgatggagggggacctgctggaggtgaccctggatgagaaccacagcatctggcagctgctgcaggccggccagcccccagacctggagcgcatccgcaccctgctggagctggagaaggccgagcggcacggcagccgggcccggggccgggccctggagaggagaagaagaaggaaggtggaccggggcggggagggagatgatcctgcccgggaggagctggagcccaagagggtgcgcagcagcggccctgaggccgaggaggtgcaggaggaggaggagctggaggaggagaccggcggggagggccccccagcccccatccccaccaccggcagccccagcacccaggagaaccagaatggcctggagcctgctgagggcaccaccagcggccccagcgcccccttcagcaccctgaccccccggctgcacctgccctgcccccagcagcccccccagcagcagctgtag

SEQ ID NO: 158291 - DNA, 4680 bp, synthetic construct
  misc_feature 1..4680: note = Description of Artificial Sequence: Synthetic coding sequence
  source 1..4680: mol_type = other DNA
atggagcccggcagtgatgacttcctgcccccaccagaatgtcctgtgtttgagcccagctgggccgagttccgggaccccctgggctacatcgccaagatccggcccatcgccgagaagagcggcatctgcaagatccggcccccagctgactggcagcccccatttgctgtggaggtggacaacttccgcttcaccccccgcatccagaggctgaatgagctggaggcccagaccagggtgaagctgaactacctggaccagatcgccaagttctgggagatccagggcagcagcctgaagatccccaacgtggagcggcgcatcctggacctgtacagcctgagcaagatcgtggtggaggagggcggctatgaggccatctgcaaggaccggcgctgggcccgggtggcccagaggctgaactacccacctgggaagaacatcggcagcctgctgcggagccactatgagcgcatcgtgtacccctatgagatgtaccagagcggggccaacctggtgtgcaacacccggccctttgacaatgaggagaaggacaaggagtacaagccccacagcatccccctgcggcagagcgtgcagcccagcaagttcaacagctatggccggcgggccaagaggctgcagcctgaccctgagcccacagaggaggacatcgagaagaaccctgagctgaagaagctgcagatctacggggccggccccaagatgatgggcctgggcctgatggccaaggacaagaccctgaggaagaaggacaaggagggcccagaatgtcctcccaccgtggtggtgaaggaggagctgggcggagatgtgaaggtggagagcaccagccccaagaccttcctggagagcaaggaggagctgagccacagccctgagccctgcaccaagatgaccatgaggctgcggaggaaccacagcaatgcccagttcatcgagagctatgtgtgcaggatgtgcagcagaggagatgaagatgacaagctgctgctgtgtgatggctgtgatgacaactaccacatcttctgcctgctgccccccctgcctgagatccccaagggcgtgtggcgctgccccaagtgtgtgatggccgagtgcaagaggcctcctgaggccttcggctttgagcaggccacccgggagtacaccctgcagagctttggagagatggctgacagcttcaaggctgactacttcaacatgcctgtgcacatggtgcccacagagctggtggagaaggagttctggaggctggtgaacagcattgaagaagatgtgacagtggagtatggagctgacatccacagcaaggagtttggcagcggcttccctgtgtctgacagcaagaggcacctgaccccagaggaggaggagtatgccaccagcggctggaacctgaatgtgatgcctgtgctggagcagagcgtgctgtgccacatcaatgctgacatcagcggcatgaaggtgccctggctgtatgtgggcatggtgttcagcgccttctgctggcacatcgaggaccactggagctacagcatcaactacctgcactggggcgagcccaagacctggtacggcgtgcccagcctggccgctgagcacctggaggaggtgatgaagaagctgaccccagagctgtttgacagccagcctgacctgctgcaccagctggtgaccctgatgaaccccaacaccctgatgagccacggcgtgcctgtggtgaggaccaaccagtgtgccggggagtttgtgatcaccttcccccgggcctaccacagcggcttcaaccagggctacaactttgctgaggccgtgaacttctgcacagctgactggctgcctgctggccggcagtgcatcgagcactacagaaggctgcggcgctactgtgtgttcagccatgaggagctgatctgcaagatggccgcctgcccagagaagctggacctgaacctggccgctgctgtgcacaaggagatgttcatcatggtgcaggaggagcggcggctgaggaaggccctgctggagaagggcatcacagaagctgagcgggaggcctttgagctgctgcctgatgatgagcggcagtgcatcaagtgcaagaccacctgcttcctgagcgccctggcctgctatgactgcccagatggcctggtgtgcctgagccacatcaatgacctgtgcaagtgcagcagcagccggcagtacctgcgctaccgctacaccctggatgagctgcctgccatgctgcacaagctgaaggtgcgggcagagagctttgacacctgggccaacaaggtgcgggtggccctggaggtggaggatggcaggaagaggagcctggaggagctgcgggccctggagagcgaggcccgggagcggcgcttccccaacagcgagctgctgcagcagctgaagaactgcctgtctgaggccgaggcctgtgtgtcccgggccctgggcctggtgtctggccaggaggccggcccccaccgggtggccggcctgcagatgaccctgacagagctgcgggccttcctggaccagatgaacaacctgccctgtgccatgcaccagattggagatgtgaagggcgtgctggagcaggtggaggcctaccaggccgaggcccgggaggccctggccagcctgcccagcagccctggcctgctgcagagcctgctggagcggggccggcagctgggcgtggaggtgcctgaggcccagcagctgcagaggcaggtggagcaggcccgctggctggatgaggtgaagaggaccctggcccccagcgcccggcggggcaccctggccgtgatgaggggcctgctggtggccggggcctctgtggcccccagccctgctgtggacaaggcccaggccgagctgcaggagctgctgaccatcgccgagcgctgggaggagaaggcccacctgtgcctggaggcccggcagaagcaccccccagccaccctggaggccatcatccgggaggccgagaacatccctgtgcacctgcccaacatccaggccctgaaggaggccctggccaaggcccgggcctggattgctgatgtggatgagatccagaatggagaccactacccctgcctggatgacctggagggcctggtggccgtgggccgggacctgcctgtgggcctggaggagctgcggcagctggagctgcaggtgctgacagcccacagctggagggagaaggccagcaagaccttcctgaagaagaacagctgctacaccctgctggaggtgctgtgcccctgtgctgatgctggcagtgacagcaccaagaggagccgctggatggagaaggagctgggcctgtacaagagtgacacagagctgctgggcctgagcgcccaggacctgcgggaccccggcagcgtcatcgtggccttcaaggagggggagcagaaggagaaggagggcatcctgcagctgcggaggaccaacagcgccaagcccagccccctggccagcagcagcacagccagcagcaccaccagcatctgtgtgtgtggccaggtgctggccggggccggggccctgcagtgtgacctgtgccaggactggttccacggccgctgtgtgtctgtgccccggctgctgagcagcccccggcccaaccccaccagcagccccctgctggcctggtgggagtgggacaccaagttcctgtgccccctgtgcatgaggagccggcggccccggctggagaccatcctggccctgctggtggccctgcagaggctgcctgtgcggctgcctgagggggaggccctgcagtgcctgacagagcgggccatctcctggcagggccgggcccggcaggccctggcctctgaagatgtgacagccctgctgggccgcctggccgagctgcggcagaggctgcaggccgagcccaggcctgaggagccccccaactacccagctgccccagccagtgaccccctgcgggagggcagcggcaaggacatgcccaaggtgcagggcctgctggagaatggagacagcgtgaccagccctgagaaggtggcccctgaggagggcagcggcaagagggacctggagctgctgagcagcctgctgccccagctgaccggccctgtgctggagctgcctgaggccacccgggcccccctggaggagctgatgatggagggggacctgctggaggtgaccctggatgagaaccacagcatctggcagctgctgcaggccggccagcccccagacctggagcgcatccgcaccctgctggagctggagaaggccgagagacatggcagccgggcccggggccgggccctggagaggagaagaagaaggaaggtggacagaggaggagaaggagatgatcctgcccgggaggagctggagcccaagagggtgcgcagcagcggccctgaggccgaggaggtgcaggaggaggaggagctggaggaggagactggaggagagggccccccagcccccatccccaccaccggcagccccagcacccaggagaaccagaatggcctggagcctgctgagggcaccaccagcggccccagcgcccccttcagcaccctgaccccccggctgcacctgccctgcccccagcagcccccccagcagcagctgtag

SEQ ID NO: 158292 - DNA, 4140 bp, synthetic construct
  misc_feature 1..4140: note = Description of Artificial Sequence: Synthetic coding sequence
  source 1..4140: mol_type = other DNA
atggagcccggcagtgatgacttcctgcccccaccagaatgtcctgtgtttgagcccagctgggccgagttccgggaccccctgggctacatcgccaagatccggcccatcgccgagaagagcggcatctgcaagatccggcccccagccatcgtggtggaggagggcggctatgaggccatctgcaaggaccggcgctgggcccgggtggcccagaggctgaactacccacctgggaagaacatcggcagcctgctgcggagccactatgaaagaattgtgtacccctatgagatgtaccagagcggggccaacctggtgcagtgcaacacccggccctttgacaatgaggagaaggacaaggagtacaagccccacagcatccccctgcggcagagcgtgcagcccagcaagttcaacagctatggccggcgggccaagaggctgcagcctgaccctgagcccacagaggaggacatcgagaagaaccctgagctgaagaagctgcagatctacggggccggccccaagatgatgggcctgggcctgatggccaaggacaagaccctgaggaagaaggacaaggagggcccagaatgtcctcccaccgtggtggtgaaggaggagctgggcggagatgtgaaggtggagagcaccagccccaagaccttcctggagagcaaggaggagctgagccacagccctgagccctgcaccaagatgaccatgaggctgcggaggaaccacagcaatgcccagttcatcgagagctatgtgtgcaggatgtgcagcagaggagatgaagatgacaagctgctgctgtgtgatggctgtgatgacaactaccacatcttctgcctgctgccccccctgcctgagatccccaagggcgtgtggcgctgccccaagtgtgtgatggccgagtgcaagaggcctcctgaggccttcggctttgagcaggccacccgggagtacaccctgcagagctttggagagatggctgacagcttcaaggctgactacttcaacatgcctgtgcacatggtgcccacagagctggtggagaaggagttctggaggctggtgaacagcattgaagaagatgtgacagtggagtatggagctgacatccacagcaaggagtttggcagcggcttccctgtgtctgacagcaagaggcacctgaccccagaggaggaggagtatgccaccagcggctggaacctgaatgtgatgcctgtgctggagcagagcgtgctgtgccacatcaatgctgacatcagcggcatgaaggtgccctggctgtatgtgggcatggtgttcagcgccttctgctggcacatcgaggaccactggagctacagcatcaactacctgcactggggcgagcccaagacctggtacggcgtgcccagcctggccgctgagcacctggaggaggtgatgaagaagctgaccccagagctgtttgacagccagcctgacctgctgcaccagctggtgaccctgatgaaccccaacaccctgatgagccacggcgtgcctgtggtgaggaccaaccagtgtgccggggagtttgtgatcaccttcccccgggcctaccacagcggcttcaaccagggctacaactttgctgaggccgtgaacttctgcacagctgactggctgcctgctggccggcagtgcatcgagcactacagaaggctgcggcgctactgtgtgttcagccatgaggagctgatctgcaagatggccgcctgcccagagaagctggacctgaacctggccgctgctgtgcacaaggagatgttcatcatggtgcaggaggagcggcggctgaggaaggccctgctggagaagggcatcacagaagctgagcgggaggcctttgagctgctgcctgatgatgagcggcagtgcatcaagtgcaagaccacctgcttcctgagcgccctggcctgctatgactgcccagatggcctggtgtgcctgagccacatcaatgacctgtgcaagtgcagcagcagccggcagtacctgcgctaccgctacaccctggatgagctgcctgccatgctgcacaagctgaaggtgcgggcagagagctttgacacctgggccaacaaggtgcgggtggccctggaggtggaggatggcaggaagaggagcctggaggagctgcgggccctggagagcgaggcccgggagcggcgcttccccaacagcgagctgctgcagcagctgaagaactgcctgtctgaggccgaggcctgtgtgtcccgggccctgggcctggtgtctggccaggaggccggcccccaccgggtggccggcctgcagatgaccctgacagagctgcgggccttcctggaccagatgaacaacctgccctgtgccatgcaccagattggagatgtgaagggcgtgctggagcaggtggaggcctaccaggccgaggcccgggaggccctggccagcctgcccagcagccctggcctgctgcagagcctgctggagcggggccggcagctgggcgtggaggtgcctgaggcccagcagctgcagaggcaggtggagcaggcccgctggctggatgaggtgaagaggaccctggcccccagcgcccggcggggcaccctggccgtgatgaggggcctgctggtggccggggcctctgtggcccccagccctgctgtggacaaggcccaggccgagctgcaggagctgctgaccatcgccgagcgctgggaggagaaggcccacctgtgcctggaggcccggcagaagcaccccccagccaccctggaggccatcatccgggaggccgagaacatccctgtgcacctgcccaacatccaggccctgaaggaggccctggccaaggcccgggcctggattgctgatgtggatgagatccagaatggagaccactacccctgcctggatgacctggagggcctggtggccgtgggccgggacctgcctgtgggcctggaggagctgcggcagctggagctgcaggtgctgacagcccacagctggagggagaaggccagcaagaccttcctgaagaagaacagctgctacaccctgctggaggtgctgtgcccctgtgctgatgctggcagtgacagcaccaagaggagccgctggatggagaaggagctgggcctgtacaagagtgacacagagctgctgggcctgagcgcccaggacctgcgggaccccggcagcgtcatcgtggccttcaaggagggggagcagaaggagaaggagggcatcctgcagctgcggaggaccaacagcgccaagcccagccccctggccagcagcagcacagccagcagcaccaccagcatctgtgtgtgtggccaggtgctggccggggccggggccctgcagtgtgacctgtgccaggactggttccacggccgctgtgtgtctgtgccccggctgctgagcagcccccggcccaaccccaccagcagccccctgctggcctggtgggagtgggacaccaagttcctgtgccccctgtgcatgaggagccggcggccccggctggagaccatcctggccctgctggtggccctgcagaggctgcctgtgcggctgcctgagggggaggccctgcagtgcctgacagagcgggccatctcctggcagggccgggcccggcaggccctggcctctgaagatgtgacagccctgctgggccgcctggccgagctgcggcagaggctgcaggccgagcccaggcctgaggagccccccaactacccagctgccccagccagtgaccccctgcgggagggcagcggcaaggacatgcccaaggtgcagggcctgctggagaatggagacagcgtgaccagccctgagaaggtggcccctgaggagggcagtgacctggagctgctgagcagcctgctgccccagctgactggacctgtgctggagctgcctgaggccacccgggcccccctggaggagctgatgatggagggggacctgctggaggtgaccctggatgagaaccacagcatccctgagagcctggacttctgcatcctgaccccccgctactgcagcgacctgagctcctggggccctgcccctggggtcttccccccctggtag

SEQ ID NO: 158293 - DNA, 4620 bp, synthetic construct
  misc_feature 1..4620: note = Description of Artificial Sequence: Synthetic coding sequence
  source 1..4620: mol_type = other DNA
atggagcccggctgtgatgagttcctgcccccaccagaatgtcctgtgtttgagcccagctgggccgagttccaggaccccctgggctacatcgccaagatccggcccatcgccgagaagagcggcatctgcaagatccggcccccagctgactggcagcccccatttgctgtggaggtggacaacttccgcttcaccccccgggtgcagaggctgaatgagctggaggcccagaccagggtgaagctgaactacctggaccagatcgccaagttctgggagatccagggcagcagcctgaagatccccaacgtggagaggaagatcctggacctgtacagcctgagcaagatcgtcatcgaggagggcggctatgaggccatctgcaaggaccggcgctgggcccgggtggcccagaggctgcactacccacctgggaagaacatcggcagcctgctgcggagccactatgagcgcatcatctacccctatgagatgttccagagcggggccaaccacgtgcagtgcaacacccacccctttgacaatgaggtgaaggacaaggagtacaagccccacagcatccccctgcggcagagcgtgcagcccagcaagttcagcagctacagcagaagagccaagaggctgcagcctgaccctgagcccacagaagaagatattgagaagcaccctgagctgaagaagctgcagatctacggccctggccccaagatgatgggcctgggcctgatggccaaggacaaggacaagacagtgcacaagaaggtgacctgcccccccaccgtgacagtgaaggatgagcagagcggcggcggcaatgtgagcagcaccctgctgaagcagcacctgagcctggagccctgcaccaagaccaccatgcagctgaggaagaaccacagcagcgcccagttcatcgacagctacatctgccaggtgtgcagcagaggagatgaagatgacaagctgctcttctgtgatggctgtgatgacaactaccacatcttctgcctgctgccccccctgcctgagatcccccggggcatctggcgctgccccaagtgcatcctggccgagtgcaagcagcccccagaggcctttggatttgagcaggccacccaggagtacagcctgcagagctttggagagatggctgacagcttcaagagtgactacttcaacatgcctgtgcacatggtgcccacagagctggtggagaaggagttctggaggctggtgagcagcattgaggaggatgtgacagtggagtatggagctgacatccacagcaaggagtttggaagtggcttccctgtgagcaacagcaagcagaacctgagccctgaggagaaggagtatgccaccagcggctggaacctgaatgtgatgcctgtgctggaccagagcgtgctgtgccacatcaatgctgacatcagcggcatgaaggtgccctggctgtatgtgggcatggtgttttctgccttctgctggcacatcgaggaccactggagctacagcatcaactacctgcactggggcgagcccaagacctggtatggagtgcccagcctggccgctgagcacctggaggaggtgatgaagatgctgaccccagagctgtttgacagccagcctgacctgctgcaccagctggtgaccctgatgaaccccaacaccctgatgagccatggagtgcctgtggtgaggaccaaccagtgtgccggggagtttgtgatcaccttcccccgggcctaccacagcggcttcaaccagggctacaactttgctgaggccgtgaacttctgcacagctgactggctgcctgctggccggcagtgcatcgagcactaccgccgcctgcggcgctactgtgtgttcagccatgaggagctgatctgcaagatggccgccttccctgagaccctggacctgaacctggccgtggccgtgcacaaggagatgttcatcatggtgcaggaggagcggcggctgaggaaggccctgctggagaagggcgtgacagaggccgagcgggaggcctttgagctgctgcctgatgatgagcggcagtgcatcaagtgcaagaccacctgcttcctgagcgccctggcctgctatgactgcccagatggcctggtgtgcctgagccacatcaatgacctgtgcaagtgcagcagcagccggcagtacctgcgctaccgctacaccctggatgagctgcccaccatgctgcacaagctgaagatccgggcagagagctttgacacctgggccaacaaggtgcgggtggccctggaggtggaggatggcaggaagaggagctttgaggagctgcgggccctggagagcgaggcccgggagcggcgcttccccaacagcgagctgctgcagaggctgaagaactgcctgtctgaggtggaggcctgcatcgcccaggtgctgggcctggtgtctggccaggtggccaggatggacaccccccagctgaccctgacagagctgcgggtgctgctggagcagatgggcagcctgccctgtgccatgcaccagattggagatgtgaaggatgtgctggagcaggtggaggcctaccaggccgaggcccgggaggccctggccaccctgcccagcagccctggcctgctgcggagcctgctggagcggggccagcagctgggcgtggaggtgcctgaggcccaccagctgcagcagcaggtggagcaggcccagtggctggatgaggtgaagcaggccctggcccccagcgcccaccggggcagcctggtgatcatgcagggcctgctggtgatgggcgccaagatcgccagcagccccagcgtggacaaggcccgggcagagctgcaggagctgctgaccatcgccgagcgctgggaggagaaggcccacttctgcctggaggcccggcagaagcaccccccagccaccctggaggccatcatccgggagacagagaacatccctgtgcacctgcccaacatccaggccctgaaggaggccctgaccaaggcccaggcctggattgctgatgtggatgagatccagaatggagaccactacccctgcctggatgacctggagggcctggtggccgtgggccgggacctgcctgtgggcctggaggagctgcggcagctggagctgcaggtgctgacagcccacagctggagggagaaggccagcaagaccttcctgaagaagaacagctgctacaccctgctggaggtgctgtgcccctgtgctgatgctggcagtgacagcaccaagaggagccgctggatggagaaggccctgggcctgtaccagtgtgacacagagctgctgggcctgagcgcccaggacctgcgggaccccggcagcgtcatcgtggccttcaaggagggggagcagaaggagaaggagggcatcctgcagctgcggaggaccaacagcgccaagcccagccccctggcccccagcctgatggccagcagccccaccagcatctgtgtgtgtggccaggtgcctgctggggtgggcgtgctgcagtgtgacctgtgccaggactggttccacggccagtgtgtgtctgtgccccacctgctgaccagccccaagcccagcctgaccagcagccccctgctggcctggtgggagtgggacaccaagttcctgtgccccctgtgcatgaggagccggcggccccggctggagaccatcctggccctgctggtggccctgcagaggctgcctgtgcggctgcctgagggggaggccctgcagtgcctgacagagcgggccatcggctggcaggaccgggccaggaaggccctggcctctgaagatgtgacagccctgctgcggcagctggccgagctgcggcagcagctgcaggccaagcccaggcctgaggaggcctctgtgtacaccagcgccacagcctgtgaccccatccgggagggcagcggcaacaacatcagcaaggtgcagggcctgctggagaatggagacagcgtgaccagccctgagaacatggcccctgggaagggcagtgacctggagctgctgagcagcctgctgccccagctgactggacctgtgctggagctgcctgaggccatccgggcccccctggaggagctgatgatggagggggacctgctggaggtgaccctggatgagaaccacagcatctggcagctgctgcaggccggccagcccccagacctggaccgcatccgcaccctgctggagctggagaagtttgagcaccagggcagcaggaccaggagccgggccctggagaggagaagaagacggcagaaggtggaccagggcagaaatgtggagaacctggtgcagcaggagctgcagagcaagagggcccggagcagcggcatcatgagccaggtgggccgggaggaggagcactaccaggagaaggctgaccgggagaacatgttcctgacccccagcacagaccacagccccttcctgaagggcaaccagaacagcctgcagcacaaggacagcggcagcagcgctgcctgccccagcctgatgcccctgctgcagctgagctacagtgatgagcagcagctgtag

SEQ ID NO: 158294 - DNA, 4449 bp, synthetic construct
  misc_feature 1..4449: note = Description of Artificial Sequence: Synthetic coding sequence
  source 1..4449: mol_type = other DNA
atggagcccggctgtgatgagttcctgcccccaccagaatgtcctgtgtttgagcccagctgggccgagttccaggaccccctgggctacatcgccaagatccggcccatcgccgagaagagcggcatctgcaagatccggcccccagctgactggcagcccccatttgctgtggaggtggacaacttccgcttcaccccccgggtgcagaggctgaatgagctggaggcccagaccagggtgaagctgaactacctggaccagatcgccaagttctgggagatccagggcagcagcctgaagatccccaacgtggagaggaagatcctggacctgtacagcctgagcaagcagtgcaacacccacccctttgacaatgaggtgaaggacaaggagtacaagccccacagcatccccctgcggcagagcgtgcagcccagcaagttcagcagctacagccggcgggccaagaggctgcagcctgaccctgagcccacagaggaggacatcgagaagcaccctgagctgaagaagctgcagatctacggccctggccccaagatgatgggcctgggcctgatggccaaggacaaggacaagacagtgcacaagaaggtgacctgccccccaacagtgacagtgaaggatgagcagagcggcggcggcaatgtgagcagcaccctgctgaagcagcacctgagcctggagccctgcaccaagaccaccatgcagctgaggaagaaccacagcagcgcccagttcatcgacagctacatctgccaggtgtgcagcagaggagatgaagatgacaagctgctcttctgtgatggctgtgatgacaactaccacatcttctgcctgctgccccccctgcctgagatcccccggggcatctggcgctgccccaagtgcatcctggccgagtgcaagcagcccccagaggccttcggctttgagcaggccacccaggagtacagcctgcagagctttggagagatggctgacagcttcaagagtgactacttcaacatgcctgtgcacatggtgcccacagagctggtggagaaggagttctggaggctggtgagcagcattgaagaagatgtgacagtggagtatggagctgacatccacagcaaggagtttggcagcggcttccctgtgagcaacagcaagcagaacctgagccctgaggagaaggagtatgccaccagcggctggaacctgaatgtgatgcctgtgctggaccagagcgtgctgtgccacatcaatgctgacatcagcggcatgaaggtgccctggctgtatgtgggcatggtgttcagcgccttctgctggcacatcgaggaccactggagctacagcatcaactacctgcactggggcgagcccaagacctggtacggcgtgcccagcctggccgctgagcacctggaggaggtgatgaagatgctgaccccagagctgtttgacagccagcctgacctgctgcaccagctggtgaccctgatgaaccccaacaccctgatgagccacggcgtgcctgtggtgaggaccaaccagtgtgccggggagtttgtgatcaccttcccccgggcctaccacagcggcttcaaccagggctacaactttgctgaggccgtgaacttctgcacagctgactggctgcctgctggccggcagtgcatcgagcactacagaaggctgcggcgctactgtgtgttcagccatgaggagctgatctgcaagatggccgccttccctgagaccctggacctgaacctggccgtggccgtgcacaaggagatgttcatcatggtgcaggaggagcggcggctgaggaaggccctgctggagaagggcgtgacagaagctgagcgggaggcctttgagctgctgcctgatgatgagcggcagtgcatcaagtgcaagaccacctgcttcctgagcgccctggcctgctatgactgcccagatggcctggtgtgcctgagccacatcaatgacctgtgcaagtgcagcagcagccggcagtacctgcgctaccgctacaccctggatgagctgcccaccatgctgcacaagctgaagatccgggcagagagctttgacacctgggccaacaaggtgcgggtggccctggaggtggaggatggcaggaagaggagctttgaggagctgcgggccctggagagcgaggcccgggagcggcgcttccccaacagcgagctgctgcagaggctgaagaactgcctgtctgaggtggaggcctgcatcgcccaggtgctgggcctggtgtctggccaggtggccaggatggacaccccccagctgaccctgacagagctgcgggtgctgctggagcagatgggcagcctgccctgtgccatgcaccagattggagatgtgaaggatgtgctggagcaggtggaggcctaccaggccgaggcccgggaggccctggccaccctgcccagcagccctggcctgctgcggagcctgctggagcggggccagcagctgggcgtggaggtgcctgaggcccaccagctgcagcagcaggtggagcaggcccagtggctggatgaggtgaagcaggccctggcccccagcgcccaccggggcagcctggtgatcatgcagggcctgctggtgatgggcgccaagatcgccagcagccccagcgtggacaaggcccgggcagagctgcaggagctgctgaccatcgccgagcgctgggaggagaaggcccacttctgcctggaggcccggcagaagcaccccccagccaccctggaggccatcatccgggagacagagaacatccctgtgcacctgcccaacatccaggccctgaaggaggccctgaccaaggcccaggcctggattgctgatgtggatgagatccagaatggagaccactacccctgcctggatgacctggagggcctggtggccgtgggccgggacctgcctgtgggcctggaggagctgcggcagctggagctgcaggtgctgacagcccacagctggagggagaaggccagcaagaccttcctgaagaagaacagctgctacaccctgctggaggtgctgtgcccctgtgctgatgctggcagtgacagcaccaagaggagccgctggatggagaaggccctgggcctgtaccagtgtgacacagagctgctgggcctgagcgcccaggacctgcgggaccccggctctgtgattgtggccttcaaggagggggagcagaaggagaaggagggcatcctgcagctgcggaggaccaacagcgccaagcccagccccctggcccccagcctgatggccagcagccccaccagcatctgtgtgtgtggccaggtgcctgctggggtgggcgtgctgcagtgtgacctgtgccaggactggttccacggccagtgtgtgtctgtgccccacctgctgaccagccccaagcccagcctgaccagcagccccctgctggcctggtgggagtgggacaccaagttcctgtgccccctgtgcatgaggagcagaagaccccggctggagaccatcctggccctgctggtggccctgcagaggctgcctgtgcggctgcctgagggggaggccctgcagtgcctgacagagcgggccatcggctggcaggaccgggccaggaaggccctggcctctgaagatgtgacagccctgctgcggcagctggccgagctgcggcagcagctgcaggccaagcccaggcctgaggaggcctctgtgtacaccagcgccacagcctgtgaccccatccgggagggcagcggcaacaacatcagcaaggtgcagggcctgctggagaatggagacagcgtgaccagccctgagaacatggcccctggaaaaggaagtgacctggagctgctgagcagcctgctgccccagctgaccggccctgtgctggagctgcctgaggccatccgggcccccctggaggagctgatgatggagggggacctgctggaggtgaccctggatgagaaccacagcatctggcagctgctgcaggccggccagcccccagacctggaccgcatccgcaccctgctggagctggagaagtttgagcaccagggcagcaggaccaggagccgggccctggagaggagaagaagacggcagaaggtggaccagggcagaaatgtggagaacctggtgcagcaggagctgcagagcaagagggcccggagcagcggcatcatgagccaggtgggccgggaggaggagcactaccaggagaaggctgaccgggagaacatgttcctgacccccagcacagaccacagccccttcctgaagggcaaccagaacagcctgcagcacaaggacagcggcagcagcgctgcctgccccagcctgatgcccctgctgcagctgagctacagtgatgagcagcagctgtag

SEQ ID NO: 158295 - DNA, 882 bp, synthetic construct
  misc_feature 1..882: note = Description of Artificial Sequence: Synthetic coding sequence
  source 1..882: mol_type = other DNA
ctgcccaacatccaggccctgaaggaggccctgaccaaggcccaggcctggattgctgatgtggatgagatccagaatggagaccactacccctgcctggatgacctggagggcctggtggccgtgggccgggacctgcctgtgggcctggaggagctgcggcagctggagctgcaggtgctgtgcccctgtgctgatgctggcagtgacagcaccaagaggagccgctggatggagaaggccctgggcctgtaccagtgtgacacagagctgctgggcctgagcgcccaggacctgcgggaccccggcagcgtcatcgtggccttcaaggagggggagcagaaggagaaggagggcatcctgcagctgcggaggaccaacagcgccaagcccagccccctggcccccagcctgatggccagcagccccaccagcatctgtgtgtgtggccaggtgcctgctggggtgggcgtgctgcagtgtgacctgtgccaggactggttccacggccagtgtgtgtctgtgccccacctgctgaccagccccaagcccagcctgaccagcagccccctgctggcctggtgggagtgggacaccaagttcctgtgccccctgtgcatgaggagccggcggccccggctggagaccatcctggccctgctggtggccctgcagaggctgcctgtgcggctgcctgagggggaggccctgcagtgcctgacagagcgggccatcggctggcaggaccgggccaggaaggccctggcctctgaagatgtgacagccctgctgcggcagctggccgagctgcggcagcagctgcaggccaagcccaggcctgaggaggcctctgtgtacaccagcgccacagcctgtgactag

SEQ ID NO: 158296 - DNA, 4431 bp, synthetic construct
  misc_feature 1..4431: note = Description of Artificial Sequence: Synthetic coding sequence
  source 1..4431: mol_type = other DNA
atggagcccggctgtgatgagttcctgcccccaccagaatgtcctgtgtttgagcccagctgggccgagttccaggaccccctgggctacatcgccaagatccggcccatcgccgagaagagcggcatctgcaagatccggcccccagctgactggcagcccccatttgctgtggaggtggacaacttccgcttcaccccccgggtgcagaggctgaatgagctggagatcgtgattgaggagggcggctatgaggccatctgcaaggaccggcgctgggcccgggtggcccagaggctgcactacccacctgggaagaacatcggcagcctgctgcggagccactatgaaagaatcatctacccctatgagatgttccagagcggggccaaccacgtgcagtgcaacacccacccctttgacaatgaggtgaaggacaaggagtacaagccccacagcatccccctgcggcagagcgtgcagcccagcaagttcagcagctacagccggcgggccaagaggctgcagcctgaccctgagcccacagaggaggacatcgagaagcaccctgagctgaagaagctgcagatctacggccctggccccaagatgatgggcctgggcctgatggccaaggacaaggacaagacagtgcacaagaaggtgacctgccccccaacagtgacagtgaaggatgagcagagcggcggcggcaatgtgagcagcaccctgctgaagcagcacctgagcctggagccctgcaccaagaccaccatgcagctgaggaagaaccacagcagcgcccagttcatcgacagctacatctgccaggtgtgcagcagaggagatgaagatgacaagctgctcttctgtgatggctgtgatgacaactaccacatcttctgcctgctgccccccctgcctgagatcccccggggcatctggcgctgccccaagtgcatcctggccgagtgcaagcagcccccagaggccttcggctttgagcaggccacccaggagtacagcctgcagagctttggagagatggctgacagcttcaagagtgactacttcaacatgcctgtgcacatggtgcccacagagctggtggagaaggagttctggaggctggtgagcagcattgaagaagatgtgacagtggagtatggagctgacatccacagcaaggagtttggcagcggcttccctgtgagcaacagcaagcagaacctgagccctgaggagaaggagtatgccaccagcggctggaacctgaatgtgatgcctgtgctggaccagagcgtgctgtgccacatcaatgctgacatcagcggcatgaaggtgccctggctgtatgtgggcatggtgttcagcgccttctgctggcacatcgaggaccactggagctacagcatcaactacctgcactggggcgagcccaagacctggtacggcgtgcccagcctggccgctgagcacctggaggaggtgatgaagatgctgaccccagagctgtttgacagccagcctgacctgctgcaccagctggtgaccctgatgaaccccaacaccctgatgagccacggcgtgcctgtggtgaggaccaaccagtgtgccggggagtttgtgatcaccttcccccgggcctaccacagcggcttcaaccagggctacaactttgctgaggccgtgaacttctgcacagctgactggctgcctgctggccggcagtgcatcgagcactacagaaggctgcggcgctactgtgtgttcagccatgaggagctgatctgcaagatggccgccttccctgagaccctggacctgaacctggccgtggccgtgcacaaggagatgttcatcatggtgcaggaggagcggcggctgaggaaggccctgctggagaagggcgtgacagaagctgagcgggaggcctttgagctgctgcctgatgatgagcggcagtgcatcaagtgcaagaccacctgcttcctgagcgccctggcctgctatgactgcccagatggcctggtgtgcctgagccacatcaatgacctgtgcaagtgcagcagcagccggcagtacctgcgctaccgctacaccctggatgagctgcccaccatgctgcacaagctgaagatccgggcagagagctttgacacctgggccaacaaggtgcgggtggccctggaggtggaggatggcaggaagaggagctttgaggagctgcgggccctggagagcgaggcccgggagcggcgcttccccaacagcgagctgctgcagaggctgaagaactgcctgtctgaggtggaggcctgcatcgcccaggtgctgggcctggtgtctggccaggtggccaggatggacaccccccagctgaccctgacagagctgcgggtgctgctggagcagatgggcagcctgccctgtgccatgcaccagattggagatgtgaaggatgtgctggagcaggtggaggcctaccaggccgaggcccgggaggccctggccaccctgcccagcagccctggcctgctgcggagcctgctggagcggggccagcagctgggcgtggaggtgcctgaggcccaccagctgcagcagcaggtggagcaggcccagtggctggatgaggtgaagcaggccctggcccccagcgcccaccggggcagcctggtgatcatgcagggcctgctggtgatgggcgccaagatcgccagcagccccagcgtggacaaggcccgggcagagctgcaggagctgctgaccatcgccgagcgctgggaggagaaggcccacttctgcctggaggcccggcagaagcaccccccagccaccctggaggccatcatccgggagacagagaacatccctgtgcacctgcccaacatccaggccctgaaggaggccctgaccaaggcccaggcctggattgctgatgtggatgagatccagaatggagaccactacccctgcctggatgacctggagggcctggtggccgtgggccgggacctgcctgtgggcctggaggagctgcggcagctggagctgcaggtgctgacagcccacagctggagggagaaggccagcaagaccttcctgaagaagaacagctgctacaccctgctggaggtgctgtgcccctgtgctgatgctggcagtgacagcaccaagaggagccgctggatggagaaggccctgggcctgtaccagtgtgacacagagctgctgggcctgagcgcccaggacctgcgggaccccggctctgtgattgtggccttcaaggagggggagcagaaggagaaggagggcatcctgcagctgcggaggaccaacagcgccaagcccagccccctggcccccagcctgatggccagcagccccaccagcatctgtgtgtgtggccaggtgcctgctggggtgggcgtgctgcagtgtgacctgtgccaggactggttccacggccagtgtgtgtctgtgccccacctgctgaccagccccaagcccagcctgaccagcagccccctgctggcctggtgggagtgggacaccaagttcctgtgccccctgtgcatgaggagcagaagaccccggctggagaccatcctggccctgctggtggccctgcagaggctgcctgtgcggctgcctgagggggaggccctgcagtgcctgacagagcgggccatcggctggcaggaccgggccaggaaggccctggcctctgaagatgtgacagccctgctgcggcagctggccgagctgcggcagcagctgcaggccaagcccaggcctgaggaggcctctgtgtacaccagcgccacagcctgtgaccccatccgggagggcagcggcaacaacatcagcaaggtgcagggcctgctggagaatggagacagcgtgaccagccctgagaacatggcccctggaaaaggaagtgacctggagctgctgagcagcctgctgccccagctgaccggccctgtgctggagctgcctgaggccatccgggcccccctggaggagctgatgatggagggggacctgctggaggtgaccctggatgagaaccacagcatctggcagctgctgcaggccggccagcccccagacctggaccgcatccgcaccctgctggagctggagaagtttgagcaccagggcagcaggaccaggagccgggccctggagaggagaagaagacggcagaaggtggaccagggcagaaatgtggagaacctggtgcagcaggagctgcagagcaagagggcccggagcagcggcatcatgagccaggtgggccgggaggaggagcactaccaggagaaggctgaccgggagaacatgttcctgacccccagcacagaccacagccccttcctgaagggcaaccagaacagcctgcagcacaaggacagcggctag

SEQ ID NO: 158297 - DNA, 1278 bp, synthetic construct
  misc_feature 1..1278: note = Description of Artificial Sequence: Synthetic coding sequence
  source 1..1278: mol_type = other DNA
atggagcccggctgtgatgagttcctgcccccaccagaatgtcctgtgtttgagcccagctgggccgagttccaggaccccctgggctacatcgccaagatccggcccatcgccgagaagagcggcatctgcaagatccggcccccagctgactggcagcccccatttgctgtggaggtggacaacttccgcttcaccccccgggtgcagaggctgaatgagctggaggcccagaccagggtgaagctgaactacctggaccagatcgccaagttctgggagatccagggcagcagcctgaagatccccaacgtggagaggaagatcctggacctgtacagcctgagcaagatcgtcatcgaggagggcggctatgaggccatctgcaaggaccggcgctgggcccgggtggcccagaggctgcactacccacctgggaagaacatcggcagcctgctgcggagccactatgagcgcatcatctacccctatgagatgttccagagcggggccaaccacgtgcctgagcccacagaggaggacatcgagaagcaccctgagctgaagaagctgcagatctacggccctggccccaagatgatgggcctgggcctgatggccaaggacaaggacaagacagtgcacaagaaggtgacctgccccccaacagtgacagtgaaggatgagcagagcggcggcggcaatgtgagcagcaccctgctgaagcagcacctgagcctggagccctgcaccaagaccaccatgcagctgaggaagaaccacagcagcgcccagttcatcgacagctacatctgccaggtgtgcagcagaggagatgaagatgacaagctgctcttctgtgatggctgtgatgacaactaccacatcttctgcctgctgccccccctgcctgagatcccccggggcatctggcgctgccccaagtgcatcctggccgagtgcaagcagcccccagaggccttcggctttgagcaggccacccaggagtacagcctgcagagctttggagagatggctgacagcttcaagagtgactacttcaacatgcctgtgcacatggtgcccacagagctggtggagaaggagttctggaggctggtgagcagcattgaagaagatgtgacagtggagtatggagctgacatccacagcaaggagtttggcagcggcttccctgtgagcaacagcaagcagaacctgagccctgaggagaaggagtatgccaccagcggctggaacctgaatgtgatgccctag

SEQ ID NO: 158298 - DNA, 2667 bp, synthetic construct
  misc_feature 1..2667: note = Description of Artificial Sequence: Synthetic coding sequence
  source 1..2667: mol_type = other DNA
atggagcccggctgtgatgagttcctgcccccaccagaatgtcctgtgtttgagcccagctgggccgagttccaggaccccctgggctacatcgccaagatccggcccatcgccgagaagagcggcatctgcaagatccggcccccagctgactggcagcccccatttgctgtggaggtggacaacttccgcttcaccccccgggtgcagaggctgaatgagctggaggcccagaccagggtgaagctgaactacctggaccagatcgccaagttctgggagatccagggcagcagcctgaagatccccaacgtggagaggaagatcctggacctgtacagcctgagcaagatcgtcatcgaggagggcggctatgaggccatctgcaaggaccggcgctgggcccgggtggcccagaggctgcactacccacctgggaagaacatcggcagcctgctgcggagccactatgagcgcatcatctacccctatgagatgttccagagcggggccaaccacgtgcagtgcaacacccacccctttgacaatgaggtgaaggacaaggagtacaagccccacagcatccccctgcggcagagcgtgcagcccagcaagttcagcagctacagcagaagagccaagaggctgcagcctgaccctgagcccacagaagaagatattgagaagcaccctgagctgaagaagctgcagatctacggccctggccccaagatgatgggcctgggcctgatggccaaggacaaggacaagacagtgcacaagaaggtgacctgcccccccaccgtgacagtgaaggatgagcagagcggcggcggcaatgtgagcagcaccctgctgaagcagcacctgagcctggagccctgcaccaagaccaccatgcagctgaggaagaaccacagcagcgcccagttcatcgacagctacatctgccaggtgtgcagcagaggagatgaagatgacaagctgctcttctgtgatggctgtgatgacaactaccacatcttctgcctgctgccccccctgcctgagatcccccggggcatctggcgctgccccaagtgcatcctggccgagtgcaagcagcccccagaggcctttggatttgagcaggccacccaggagtacagcctgcagagctttggagagatggctgacagcttcaagagtgactacttcaacatgcctgtgcacatggtgcccacagagctggtggagaaggagttctggaggctggtgagcagcattgaggaggatgtgacagtggagtatggagctgacatccacagcaaggagtttggaagtggcttccctgtgagcaacagcaagcagaacctgagccctgaggagaaggagtatgccaccagcggctggaacctgaatgtgatgcctgtgctggaccagagcgtgctgtgccacatcaatgctgacatcagcggcatgaaggtgccctggctgtatgtgggcatggtgttttctgccttctgctggcacatcgaggaccactggagctacagcatcaactacctgcactggggcgagcccaagacctggtatggagtgcccagcctggccgctgagcacctggaggaggtgatgaagatgctgaccccagagctgtttgacagccagcctgacctgctgcaccagctggtgaccctgatgaaccccaacaccctgatgagccatggagtgcctgtggtgaggaccaaccagtgtgccggggagtttgtgatcaccttcccccgggcctaccacagcggcttcaaccagggctacaactttgctgaggccgtgaacttctgcacagctgactggctgcctgctggccggcagtgcatcgagcactaccgccgcctgcggcgctactgtgtgttcagccatgaggagctgatctgcaagatggccgccttccctgagaccctggacctgaacctggccgtggccgtgcacaaggagatgttcatcatggtgcaggaggagcggcggctgaggaaggccctgctggagaagggcgtgacagaggccgagcgggaggcctttgagctgctgcctgatgatgagcggcagtgcatcaagtgcaagaccacctgcttcctgagcgccctggcctgctatgactgcccagatggcctggtgtgcctgagccacatcaatgacctgtgcaagtgcagcagcagccggcagtacctgcgctaccgctacaccctggatgagctgcccaccatgctgcacaagctgaagatccgggcagagagctttgacacctgggccaacaaggtgcgggtggccctggaggtggaggatggcaggaagaggagctttgaggagctgcgggccctggagagcgaggcccgggagcggcgcttccccaacagcgagctgctgcagaggctgaagaactgcctgtctgaggtggaggcctgcatcgcccaggtgctgggcctggtgtctggccaggtggccaggatggacaccccccagctgaccctgacagagctgcgggtgctgctggagcagatgggcagcctgccctgtgccatgcaccagattggagatgtgaaggtgctgtcctggaagtggaggcgctacgtgttcccctaccacctgtgtgtgtacagcatgcagggcaacatcctgcctgactag

SEQ ID NO: 158299 - DNA, 4713 bp, synthetic construct
  misc_feature 1..4713: note = Description of Artificial Sequence: Synthetic coding sequence
  source 1..4713: mol_type = other DNA
atggagcccggctgtgatgagttcctgcccccaccagaatgtcctgtgtttgagcccagctgggccgagttccaggaccccctgggctacatcgccaagatccggcccatcgccgagaagagcggcatctgcaagatccggcccccagctgactggcagcccccatttgctgtggaggtggacaacttccgcttcaccccccgggtgcagaggctgaatgagctggaggcccagaccagggtgaagctgaactacctggaccagatcgccaagttctgggagatccagggcagcagcctgaagatccccaacgtggagaggaagatcctggacctgtacagcctgagcaagatcgtcatcgaggagggcggctatgaggccatctgcaaggaccggcgctgggcccgggtggcccagaggctgcactacccacctgggaagaacatcggcagcctgctgcggagccactatgagcgcatcatctacccctatgagatgttccagagcggggccaaccacgtgcagtgcaacacccacccctttgacaatgaggtgaaggacaaggagtacaagccccacagcatccccctgcggcagagcgtgcagcccagcaagttcagcagctacagcagaagagccaagaggctgcagcctgaccctgagcccacagaagaagatattgagaagcaccctgagctgaagaagctgcagatctacggccctggccccaagatgatgggcctgggcctgatggccaaggacaaggacaagacagtgcacaagaaggtgacctgcccccccaccgtgacagtgaaggatgagcagagcggcggcggcaatgtgagcagcaccctgctgaagcagcacctgagcctggagccctgcaccaagaccaccatgcagctgaggaagaaccacagcagcgcccagttcatcgacagctacatctgccaggtgtgcagcagaggagatgaagatgacaagctgctcttctgtgatggctgtgatgacaactaccacatcttctgcctgctgccccccctgcctgagatcccccggggcatctggcgctgccccaagtgcatcctggccgagtgcaagcagcccccagaggcctttggatttgagcaggccacccaggagtacagcctgcagagctttggagagatggctgacagcttcaagagtgactacttcaacatgcctgtgcacatggtgcccacagagctggtggagaaggagttctggaggctggtgagcagcattgaggaggatgtgacagtggagtatggagctgacatccacagcaaggagtttggaagtggcttccctgtgagcaacagcaagcagaacctgagccctgaggagaagaggcagagcctgactgtgctgaccaggctcatcagcagcttctgggcccaggccgtgctgcccccctggccacccaaggtgctgggcctgcaggagtatgccaccagcggctggaacctgaatgtgatgcctgtgctggaccagagcgtgctgtgccacatcaatgctgacatcagcggcatgaaggtgccctggctgtatgtgggcatggtgttcagcgccttctgctggcacatcgaggaccactggagctacagcatcaactacctgcactggggcgagcccaagacctggtacggcgtgcccagcctggccgctgagcacctggaggaggtgatgaagatgctgaccccagagctgtttgacagccagcctgacctgctgcaccagctggtgaccctgatgaaccccaacaccctgatgagccacggcgtgcctgtggtgaggaccaaccagtgtgccggggagtttgtgatcaccttcccccgggcctaccacagcggcttcaaccagggctacaactttgctgaggccgtgaacttctgcacagctgactggctgcctgctggccggcagtgcatcgagcactacagaaggctgcggcgctactgtgtgttcagccatgaggagctgatctgcaagatggccgccttccctgagaccctggacctgaacctggccgtggccgtgcacaaggagatgttcatcatggtgcaggaggagcggcggctgaggaaggccctgctggagaagggcgtgacagaagctgagcgggaggcctttgagctgctgcctgatgatgagcggcagtgcatcaagtgcaagaccacctgcttcctgagcgccctggcctgctatgactgcccagatggcctggtgtgcctgagccacatcaatgacctgtgcaagtgcagcagcagccggcagtacctgcgctaccgctacaccctggatgagctgcccaccatgctgcacaagctgaagatccgggcagagagctttgacacctgggccaacaaggtgcgggtggccctggaggtggaggatggcaggaagaggagctttgaggagctgcgggccctggagagcgaggcccgggagcggcgcttccccaacagcgagctgctgcagaggctgaagaactgcctgtctgaggtggaggcctgcatcgcccaggtgctgggcctggtgtctggccaggtggccaggatggacaccccccagctgaccctgacagagctgcgggtgctgctggagcagatgggcagcctgccctgtgccatgcaccagattggagatgtgaaggatgtgctggagcaggtggaggcctaccaggccgaggcccgggaggccctggccaccctgcccagcagccctggcctgctgcggagcctgctggagcggggccagcagctgggcgtggaggtgcctgaggcccaccagctgcagcagcaggtggagcaggcccagtggctggatgaggtgaagcaggccctggcccccagcgcccaccggggcagcctggtgatcatgcagggcctgctggtgatgggcgccaagatcgccagcagccccagcgtggacaaggcccgggcagagctgcaggagctgctgaccatcgccgagcgctgggaggagaaggcccacttctgcctggaggcccggcagaagcaccccccagccaccctggaggccatcatccgggagacagagaacatccctgtgcacctgcccaacatccaggccctgaaggaggccctgaccaaggcccaggcctggattgctgatgtggatgagatccagaatggagaccactacccctgcctggatgacctggagggcctggtggccgtgggccgggacctgcctgtgggcctggaggagctgcggcagctggagctgcaggtgctgacagcccacagctggagggagaaggccagcaagaccttcctgaagaagaacagctgctacaccctgctggaggtgctgtgcccctgtgctgatgctggcagtgacagcaccaagaggagccgctggatggagaaggccctgggcctgtaccagtgtgacacagagctgctgggcctgagcgcccaggacctgcgggaccccggctctgtgattgtggccttcaaggagggggagcagaaggagaaggagggcatcctgcagctgcggaggaccaacagcgccaagcccagccccctggcccccagcctgatggccagcagccccaccagcatctgtgtgtgtggccaggtgcctgctggggtgggcgtgctgcagtgtgacctgtgccaggactggttccacggccagtgtgtgtctgtgccccacctgctgaccagccccaagcccagcctgaccagcagccccctgctggcctggtgggagtgggacaccaagttcctgtgccccctgtgcatgaggagcagaagaccccggctggagaccatcctggccctgctggtggccctgcagaggctgcctgtgcggctgcctgagggggaggccctgcagtgcctgacagagcgggccatcggctggcaggaccgggccaggaaggccctggcctctgaagatgtgacagccctgctgcggcagctggccgagctgcggcagcagctgcaggccaagcccaggcctgaggaggcctctgtgtacaccagcgccacagcctgtgaccccatccgggagggcagcggcaacaacatcagcaaggtgcagggcctgctggagaatggagacagcgtgaccagccctgagaacatggcccctggaaaaggaagtgacctggagctgctgagcagcctgctgccccagctgaccggccctgtgctggagctgcctgaggccatccgggcccccctggaggagctgatgatggagggggacctgctggaggtgaccctggatgagaaccacagcatctggcagctgctgcaggccggccagcccccagacctggaccgcatccgcaccctgctggagctggagaagtttgagcaccagggcagcaggaccaggagccgggccctggagaggagaagaagacggcagaaggtggaccagggcagaaatgtggagaacctggtgcagcaggagctgcagagcaagagggcccggagcagcggcatcatgagccaggtgggccgggaggaggagcactaccaggagaaggctgaccgggagaacatgttcctgacccccagcacagaccacagccccttcctgaagggcaaccagaacagcctgcagcacaaggacagcggcagcagcgctgcctgccccagcctgatgcccctgctgcagctgagctacagtgatgagcagcagctgtag

SEQ ID NO: 158300 - DNA, 3297 bp, synthetic construct
  misc_feature 1..3297: note = Description of Artificial Sequence: Synthetic coding sequence
  source 1..3297: mol_type = other DNA
atggacctgggcaccctgtatgagagctgcaaccagccccaggatgccatcaagtgctacctgaatgccaccaggagcaagagctgcagcaacaccagcgccctggccgcccgcatcaagtacctgcaggcccagctgtgcaacctgccccagggcagcctgcagaacaagaccaagctgctgcccagcattgaggaggcctggagcctgcccatcccagctgagctgaccagccggcagggcgccatgaacacagcccagcaggcctgcaagccccaccaccccaacacagagcctgtgctgggcctgagccagacccccatcagccagcagagcctgcccctgcacatgatccccagcagccaggtggatgacctgagcagccctgccaagaggaagaggaccagcagccccaccaagaacaccagtgacaactggagcggcggccatgctgtgagccacccccctgtgcagcagcaggcccacagctggtgcctgaccccccagaagctgcagcacctggagcagctgcgggccaacagaaacaacctgaacccagcccagaagctgatgctggagcagctggagagccagtttgtgctgatgcagcagcaccagatgaggcccaccggggtggcccaggtgcgcagcacaggcatccccaacggccccacagctgacagcagcctgcccaccaacagcgtgtctggccagcagccccagctggccctgaccagggtgcccagcgtgtcccagcccggggtgcggcctgcctgccccggccagcccctggccaacggccccttctctgctggccacgtgccctgcagcaccagcaggaccctgggcagcacagacaccatcctgattggcaacaaccacatcaccggcagcggcagcaatggaaatgtgccctacctgcagagaaatgccctgaccctgccccacaacagaaccaacctgaccagcagcgctgaggagccctggaagaaccagctgagcaacagcacccagggcctgcacaagggccagagcagccacagcgctggccccaacggggagcggcccctgagcagcacaggccccagccagcacctgcaggccgccggcagcggcatccagaaccagaatggccaccccaccctgcccagcaacagcgtgacccagggcgccgccctgaaccacctgagcagccacacagccaccagcggcggccagcagggcatcaccctgaccaaggagagcaagcccagcggcaacatcctgactgtgcctgagaccagccgccacactggagagacccccaacagcacagcctctgtggagggcctgcccaaccacgtgcaccagatgacagcagatgctgtgtgcagccccagccatggagacagcaagagccctggcctgctgagcagtgacaacccccagctgagcgccctgctgatgggcaaggccaacaacaacgtgggcaccggcacctgtgacaaggtgaacaacatccaccctgctgtgcacaccaagacagacaacagcgtggccagcagccccagcagcgccatcagcacagccacccccagccccaagagcacagagcagaccaccaccaacagcgtgaccagcctgaacagcccccacagcggcctgcacaccatcaacggggagggcatggaggagagccagagccccatgaagacagacctgctgctggtgaaccacaagcccagcccccagatcatccccagcatgtctgtgtccatctaccccagcagcgctgaggtgctgaaggcctgcaggaacctgggcaagaatggcctgagcaacagcagcatcctgctggacaagtgccccccaccccggccccccagcagcccctacccacccctgcccaaggacaagctgaacccccccacccccagcatctacctggagaacaagagagatgccttcttcccccccctgcaccagttctgcaccaaccccaacaaccctgtgaccgtcatccggggcctggccggggccctgaagctggacctgggcctcttcagcaccaagaccctggtggaggccaacaatgagcacatggtggaggtgaggacccagctgctgcagcctgcagatgagaactgggaccccaccggcaccaagaagatctggcactgtgagagcaacagaagccacaccaccatcgccaagtatgcccagtaccaggccagcagcttccaggagagcctgcgggaggagaatgagaagaggagccaccacaaggaccacagcgacagcgagagcaccagcagtgacaacagcggcagaagaaggaagggccccttcaagaccatcaagtttggcaccaacatcgacctgagtgatgacaagaagtggaagctgcagctgcacgagctgaccaagctgcctgcctttgtgcgggtggtgtctgctggcaacctgctgagccacgtgggccacaccatcctgggcatgaacacagtgcagctgtacatgaaggtgcccggcagcaggaccccaggccaccaggagaacaacaacttctgcagcgtgaacatcaacatcggccctggggactgtgagtggtttgtggtgcctgagggctactggggcgtgctgaatgacttctgtgagaagaacaacctgaacttcctgatgggctcctggtggcccaacctggaggacctgtatgaggccaacgtgcctgtgtaccgcttcatccagaggcctggggacctggtgtggatcaatgccggcaccgtgcactgggtgcaggccatcggctggtgcaacaacatcgcctggaatgtgggccccctgacagcctgccagtacaagctggccgtggagagatatgagtggaacaagctgcagagcgtgaagagcatcgtgcccatggtgcacctgtcctggaacatggccaggaacatcaaggtgtctgaccccaagctgtttgagatgatcaagtactgcctgctgcggaccctgaagcagtgccagaccctgcgggaggccctgattgctgctgggaaggagatcatctggcacggccgcaccaaggaggagcccgcccactactgcagcatctgtgaggtggaggtgtttgacctgctgtttgtgaccaatgaaagcaacagcaggaagacctacatcgtgcactgccaggactgtgccaggaagaccagcggcaacctggagaactttgtggtgctggagcagtacaagatggaggacctgatgcaggtgtatgaccagttcaccctggccccacccctgcccagcgccagcagctag

SEQ ID NO: 158301 - DNA, 4206 bp, synthetic construct
  misc_feature 1..4206: note = Description of Artificial Sequence: Synthetic coding sequence
  source 1..4206: mol_type = other DNA
atgaagagctgtggggtgtccctggccacagctgctgctgctgctgctgcctttggagatgaggagaagaagatggctgctgggaaggccagcggggagagcgaggaggccagccccagcctgacagctgaggagcgggaggccctgggcggcctggacagccggctgtttggatttgtgcgcttccatgaagatggagcccggaccaaggccctgctgggcaaggctgtgcgctgctatgagagcctcatcctgaaggccgagggcaaggtggagagtgacttcttctgccagctgggccacttcaacctgctgctggaggactaccccaaggccctgagcgcctaccagcgctactacagcctgcagagcgactactggaagaatgctgccttcctgtatggcctgggcctggtgtacttccactacaatgccttccagtgggccatcaaggccttccaggaggtgctgtatgtggaccccagcttctgccgggccaaggagatccacctgcggctgggcctgatgttcaaggtgaacacagattatgagagcagcctgaagcacttccagctggccctggtggactgcaacccctgcaccctgagcaatgctgagatccagttccacatcgcccacctgtatgagacccagaggaagtaccacagcgccaaggaggcctatgagcagctgctgcagacagagaacctgagcgcccaggtgaaggccaccgtgctgcagcagctgggctggatgcaccacacagtggacctgctgggggacaaggccaccaaggagagctatgccatccagtacctgcagaagagcctggaggccgaccccaacagcggccagagctggtacttcctgggccgctgctacagcagcatcggcaaggtgcaggatgccttcatctcctaccggcagagcattgacaagtctgaggccagcgctgacacctggtgcagcattggagtgctgtaccagcagcagaaccagcccatggatgccctgcaggcctacatctgtgctgtgcagctggaccacggccacgccgccgcctggatggacctgggcaccctgtatgagagctgcaaccagccccaggatgccatcaagtgctacctgaatgccaccaggagcaagagctgcagcaacaccagcgccctggccgcccgcatcaagtacctgcaggcccagctgtgcaacctgccccagggcagcctgcagaacaagaccaagctgctgcccagcattgaggaggcctggagcctgcccatcccagctgagctgaccagccggcagggcgccatgaacacagcccagcagaacaccagtgacaactggagcggcggccatgctgtgagccacccccctgtgcagcagcaggcccacagctggtgcctgaccccccagaagctgcagcacctggagcagctgcgggccaacagaaacaacctgaacccagcccagaagctgatgctggagcagctggagagccagtttgtgctgatgcagcagcaccagatgaggcccactggagtggcccaggtgcgcagcacaggcatccccaacggccccacagctgacagcagcctgcccaccaacagcgtgtctggccagcagccccagctggccctgaccagggtgcccagcgtgtcccagcccggggtgcggcctgcctgccccggccagcccctggccaacggccccttctctgctggccacgtgccctgcagcaccagcaggaccctgggcagcacagacaccatcctgattggcaacaaccacatcactggaagtggcagcaatggaaatgtgccctacctgcagagaaatgccctgaccctgccccacaacagaaccaacctgaccagcagcgctgaggagccctggaagaaccagctgagcaacagcacccagggcctgcacaagggccagagcagccacagcgctggccccaatggagagcggcccctgagcagcacaggccccagccagcacctgcaggccgccggcagcggcatccagaaccagaatggccaccccaccctgcccagcaacagcgtgacccagggcgccgccctgaaccacctgagcagccacacagccaccagcggcggccagcagggcatcaccctgaccaaggagagcaagcccagcggcaacatcctgactgtgcctgagaccagccgccacactggagagacccccaacagcacagcctctgtggagggcctgcccaaccacgtgcaccagatgacagcagatgctgtgtgcagccccagccacggggacagcaagagccctggcctgctgagcagtgacaacccccagctgagcgccctgctgatgggcaaggccaacaacaacgtgggcaccggcacctgtgacaaggtgaacaacatccaccctgctgtgcacaccaagacagacaacagcgtggccagcagccccagcagcgccatcagcacagccacccccagccccaagagcacagagcagaccaccaccaacagcgtgaccagcctgaacagcccccacagcggcctgcacaccatcaatggagagggcatggaggagagccagagccccatgaagacagacctgctgctggtgaaccacaagcccagcccccagatcatccccagcatgtctgtgtccatctaccccagcagcgctgaggtgctgaaggcctgcaggaacctgggcaagaatggcctgagcaacagcagcatcctgctggacaagtgccccccacccaggcctcccagcagcccctacccacccctgcccaaggacaagctgaacccccccacccccagcatctacctggagaacaagagagatgccttcttcccccccctgcaccagttctgcaccaaccccaacaaccctgtgaccgtcatccggggcctggccggggccctgaagctggacctgggcctcttcagcaccaagaccctggtggaggccaacaatgagcacatggtggaggtgaggacccagctgctgcagcctgcagatgagaactgggaccccaccggcaccaagaagatctggcactgtgagagcaacagaagccacaccaccatcgccaagtatgcccagtaccaggccagcagcttccaggagagcctgcgggaggagaatgagaagaggagccaccacaaggaccacagcgacagcgagagcaccagcagtgacaacagcggcagaagaaggaagggccccttcaagaccatcaagtttggcaccaacatcgacctgagtgatgacaagaagtggaagctgcagctgcacgagctgaccaagctgcctgcctttgtgcgggtggtgtctgctggcaacctgctgagccacgtgggccacaccatcctgggcatgaacacagtgcagctgtacatgaaggtgcccggcagcaggaccccaggccaccaggagaacaacaacttctgcagcgtgaacatcaacatcggccctggggactgtgagtggtttgtggtgcctgagggctactggggcgtgctgaatgacttctgtgagaagaacaacctgaacttcctgatgggctcctggtggcccaacctggaggacctgtatgaggccaacgtgcctgtgtaccgcttcatccagaggcctggggacctggtgtggatcaatgccggcaccgtgcactgggtgcaggccatcggctggtgcaacaacatcgcctggaatgtgggccccctgacagcctgccagtacaagctggccgtggagagatatgagtggaacaagctgcagagcgtgaagagcatcgtgcccatggtgcacctgtcctggaacatggccaggaacatcaaggtgtctgaccccaagctgtttgagatgatcaagtactgcctgctgcggaccctgaagcagtgccagaccctgcgggaggccctgattgctgctgggaaggagatcatctggcacggccgcaccaaggaggagcccgcccactactgcagcatctgtgaggtggaggtgtttgacctgctgtttgtgaccaatgaaagcaacagcaggaagacctacatcgtgcactgccaggactgtgccaggaagaccagcggcaacctggagaactttgtggtgctggagcagtacaagatggaggacctgatgcaggtgtatgaccagttcaccctggccccacccctgcccagcgccagcagctag

SEQ ID NO: 158302 - DNA, 4227 bp, synthetic construct
  misc_feature 1..4227: note = Description of Artificial Sequence: Synthetic coding sequence
  source 1..4227: mol_type = other DNA
atgaagagctgtggggtgtccctggccacagctgctgctgctgctgctgcctttggagatgaggagaagaagatggctgctgggaaggccagcggggagagcgaggaggccagccccagcctgacagctgaggagcgggaggccctgggcggcctggacagccggctgtttggatttgtgcgcttccatgaagatggagcccggaccaaggccctgctgggcaaggctgtgcgctgctatgagagcctcatcctgaaggccgagggcaaggtggagagtgacttcttctgccagctgggccacttcaacctgctgctggaggactaccccaaggccctgagcgcctaccagcgctactacagcctgcagagcgactactggaagaatgctgccttcctgtatggcctgggcctggtgtacttccactacaatgccttccagtgggccatcaaggccttccaggaggtgctgtatgtggaccccagcttctgccgggccaaggagatccacctgcggctgggcctgatgttcaaggtgaacacagattatgagagcagcctgaagcacttccagctggccctggtggactgcaacccctgcaccctgagcaatgctgagatccagttccacatcgcccacctgtatgagacccagaggaagtaccacagcgccaaggaggcctatgagcagctgctgcagacagagaacctgagcgcccaggtgaaggccaccgtgctgcagcagctgggctggatgcaccacacagtggacctgctgggggacaaggccaccaaggagagctatgccatccagtacctgcagaagagcctggaggccgaccccaacagcggccagagctggtacttcctgggccgctgctacagcagcatcggcaaggtgcaggatgccttcatctcctaccggcagagcattgacaagtctgaggccagcgctgacacctggtgcagcattggagtgctgtaccagcagcagaaccagcccatggatgccctgcaggcctacatctgtgctgtgcagctggaccacggccacgccgccgcctggatggacctgggcaccctgtatgagagctgcaaccagccccaggatgccatcaagtgctacctgaatgccaccaggagcaagagctgcagcaacaccagcgccctggccgcccgcatcaagtacctgcaggcctgcaagccccaccaccccaacacagagcctgtgctgggcctgagccagacccccatcagccagcagagcctgcccctgcacatgatccccagcagccaggtggatgacctgagcagccctgccaagaggaagaggaccagcagccccaccaagaacaccagtgacaactggagcggcggccatgctgtgagccacccccctgtgcagcagcaggcccacagctggtgcctgaccccccagaagctgcagcacctggagcagctgcgggccaacagaaacaacctgaacccagcccagaagctgatgctggagcagctggagagccagtttgtgctgatgcagcagcaccagatgaggcccaccggggtggcccaggtgcgcagcacaggcatccccaacggccccacagctgacagcagcctgcccaccaacagcgtgtctggccagcagccccagctggccctgaccagggtgcccagcgtgtcccagcccggggtgcggcctgcctgccccggccagcccctggccaacggccccttctctgctggccacgtgccctgcagcaccagcaggaccctgggcagcacagacaccatcctgattggcaacaaccacatcaccggcagcggcagcaatggaaatgtgccctacctgcagagaaatgccctgaccctgccccacaacagaaccaacctgaccagcagcgctgaggagccctggaagaaccagctgagcaacagcacccagggcctgcacaagggccagagcagccacagcgctggccccaacggggagcggcccctgagcagcacaggccccagccagcacctgcaggccgccggcagcggcatccagaaccagaatggccaccccaccctgcccagcaacagcgtgacccagggcgccgccctgaaccacctgagcagccacacagccaccagcggcggccagcagggcatcaccctgaccaaggagagcaagcccagcggcaacatcctgactgtgcctgagaccagccgccacactggagagacccccaacagcacagcctctgtggagggcctgcccaaccacgtgcaccagatgacagcagatgctgtgtgcagccccagccatggagacagcaagagccctggcctgctgagcagtgacaacccccagctgagcgccctgctgatgggcaaggccaacaacaacgtgggcaccggcacctgtgacaaggtgaacaacatccaccctgctgtgcacaccaagacagacaacagcgtggccagcagccccagcagcgccatcagcacagccacccccagccccaagagcacagagcagaccaccaccaacagcgtgaccagcctgaacagcccccacagcggcctgcacaccatcaacggggagggcatggaggagagccagagccccatgaagacagacctgctgctggtgaaccacaagcccagcccccagatcatccccagcatgtctgtgtccatctaccccagcagcgctgaggtgctgaaggcctgcaggaacctgggcaagaatggcctgagcaacagcagcatcctgctggacaagtgccccccaccccggccccccagcagcccctacccacccctgcccaaggacaagctgaacccccccacccccagcatctacctggagaacaagagagatgccttcttcccccccctgcaccagttctgcaccaaccccaacaaccctgtgaccgtcatccggggcctggccggggccctgaagctggacctgggcctcttcagcaccaagaccctggtggaggccaacaatgagcacatggtggaggtgaggacccagctgctgcagcctgcagatgagaactgggaccccaccggcaccaagaagatctggcactgtgagagcaacagaagccacaccaccatcgccaagtatgcccagtaccaggccagcagcttccaggagagcctgcgggaggagaatgagaagaggagccaccacaaggaccacagcgacagcgagagcaccagcagtgacaacagcggcagaagaaggaagggccccttcaagaccatcaagtttggcaccaacatcgacctgagtgatgacaagaagtggaagctgcagctgcacgagctgaccaagctgcctgcctttgtgcgggtggtgtctgctggcaacctgctgagccacgtgggccacaccatcctgggcatgaacacagtgcagctgtacatgaaggtgcccggcagcaggaccccaggccaccaggagaacaacaacttctgcagcgtgaacatcaacatcggccctggggactgtgagtggtttgtggtgcctgagggctactggggcgtgctgaatgacttctgtgagaagaacaacctgaacttcctgatgggctcctggtggcccaacctggaggacctgtatgaggccaacgtgcctgtgtaccgcttcatccagaggcctggggacctggtgtggatcaatgccggcaccgtgcactgggtgcaggccatcggctggtgcaacaacatcgcctggaatgtgggccccctgacagcctgccagtacaagctggccgtggagagatatgagtggaacaagctgcagagcgtgaagagcatcgtgcccatggtgcacctgtcctggaacatggccaggaacatcaaggtgtctgaccccaagctgtttgagatgatcaagtactgcctgctgcggaccctgaagcagtgccagaccctgcgggaggccctgattgctgctgggaaggagatcatctggcacggccgcaccaaggaggagcccgcccactactgcagcatctgtgaggtggaggtgtttgacctgctgtttgtgaccaatgaaagcaacagcaggaagacctacatcgtgcactgccaggactgtgccaggaagaccagcggcaacctggagaactttgtggtgctggagcagtacaagatggaggacctgatgcaggtgtatgaccagttcaccctggccccacccctgcccagcgccagcagctag

SEQ ID NO: 158303 - DNA, 3000 bp, synthetic construct
  misc_feature 1..3000: note = Description of Artificial Sequence: Synthetic coding sequence
  source 1..3000: mol_type = other DNA
tgaggaaccctgtatgagagctgcaaccagccccaggatgccatcaagtgctacctgaatgccaccaggagcaagagctgcagcaacaccagcgccctggccgcccgcatcaagtacctgcagaacaccagtgacaactggagcggcggccatgctgtgagccacccccctgtgcagcagcaggcccacagctggtgcctgaccccccagaagctgcagcacctggagcagctgcgggccaacagaaacaacctgaacccagcccagaagctgatgctggagcagctggagagccagtttgtgctgatgcagcagcaccagatgaggcccactggagtggcccaggtgcgcagcacaggcatccccaacggccccacagctgacagcagcctgcccaccaacagcgtgtctggccagcagccccagctggccctgaccagggtgcccagcgtgtcccagcccggggtgcggcctgcctgccccggccagcccctggccaacggccccttctctgctggccacgtgccctgcagcaccagcaggaccctgggcagcacagacaccatcctgattggcaacaaccacatcactggaagtggcagcaatggaaatgtgccctacctgcagagaaatgccctgaccctgccccacaacagaaccaacctgaccagcagcgctgaggagccctggaagaaccagctgagcaacagcacccagggcctgcacaagggccagagcagccacagcgctggccccaatggagagcggcccctgagcagcacaggccccagccagcacctgcaggccgccggcagcggcatccagaaccagaatggccaccccaccctgcccagcaacagcgtgacccagggcgccgccctgaaccacctgagcagccacacagccaccagcggcggccagcagggcatcaccctgaccaaggagagcaagcccagcggcaacatcctgactgtgcctgagaccagccgccacactggagagacccccaacagcacagcctctgtggagggcctgcccaaccacgtgcaccagatgacagcagatgctgtgtgcagccccagccacggggacagcaagagccctggcctgctgagcagtgacaacccccagctgagcgccctgctgatgggcaaggccaacaacaacgtgggcaccggcacctgtgacaaggtgaacaacatccaccctgctgtgcacaccaagacagacaacagcgtggccagcagccccagcagcgccatcagcacagccacccccagccccaagagcacagagcagaccaccaccaacagcgtgaccagcctgaacagcccccacagcggcctgcacaccatcaatggagagggcatggaggagagccagagccccatgaagacagacctgctgctggtgaaccacaagcccagcccccagatcatccccagcatgtctgtgtccatctaccccagcagcgctgaggtgctgaaggcctgcaggaacctgggcaagaatggcctgagcaacagcagcatcctgctggacaagtgccccccacccaggcctcccagcagcccctacccacccctgcccaaggacaagctgaacccccccacccccagcatctacctggagaacaagagagatgccttcttcccccccctgcaccagttctgcaccaaccccaacaaccctgtgaccgtcatccggggcctggccggggccctgaagctggacctgggcctcttcagcaccaagaccctggtggaggccaacaatgagcacatggtggaggtgaggacccagctgctgcagcctgcagatgagaactgggaccccaccggcaccaagaagatctggcactgtgagagcaacagaagccacaccaccatcgccaagtatgcccagtaccaggccagcagcttccaggagagcctgcgggaggagaatgagaagaggagccaccacaaggaccacagcgacagcgagagcaccagcagtgacaacagcggcagaagaaggaagggccccttcaagaccatcaagtttggcaccaacatcgacctgagtgatgacaagaagtggaagctgcagctgcacgagctgaccaagctgcctgcctttgtgcgggtggtgtctgctggcaacctgctgagccacgtgggccacaccatcctgggcatgaacacagtgcagctgtacatgaaggtgcccggcagcaggaccccaggccaccaggagaacaacaacttctgcagcgtgaacatcaacatcggccctggggactgtgagtggtttgtggtgcctgagggctactggggcgtgctgaatgacttctgtgagaagaacaacctgaacttcctgatgggctcctggtggcccaacctggaggacctgtatgaggccaacgtgcctgtgtaccgcttcatccagaggcctggggacctggtgtggatcaatgccggcaccgtgcactgggtgcaggccatcggctggtgcaacaacatcgcctggaatgtgggccccctgacagcctgccagtacaagctggccgtggagagatatgagtggaacaagctgcagagcgtgaagagcatcgtgcccatggtgcacctgtcctggaacatggccaggaacatcaaggtgtctgaccccaagctgtttgagatgatcaagtactgcctgctgcggaccctgaagcagtgccagaccctgcgggaggccctgattgctgctgggaaggagatcatctggcacggccgcaccaaggaggagcccgcccactactgcagcatctgtgaggtggaggtgtttgacctgctgtttgtgaccaatgaaagcaacagcaggaagacctacatcgtgcactgccaggactgtgccaggaagaccagcggcaacctggagaactttgtggtgctggagcagtacaagatggaggacctgatgcaggtgtatgaccagttcaccctggccccacccctgcccagcgccagcagctag

SEQ ID NO: 158304 - DNA, 486 bp, synthetic construct
  misc_feature 1..486: note = Description of Artificial Sequence: Synthetic coding sequence
  source 1..486: mol_type = other DNA
tgagccaggaacatcaaggtgtctgaccccaagctgtttgagatgatcaagatcttcagcctgagccccaacttccgggcagagaagtgcctgcgggaccacctggtgcagcccctgcggagcaatggagagcctgagcccctgcgcttcaccggggagtactgcctgctgcggaccctgaagcagtgccagaccctgcgggaggccctgattgctgctgggaaggagatcatctggcacggccgcaccaaggaggagcccgcccactactgcagcatctgtgaggtggaggtgtttgacctgctgtttgtgaccaatgaaagcaacagcaggaagacctacatcgtgcactgccaggactgtgccaggaagaccagcggcaacctggagaactttgtggtgctggagcagtacaagatggaggacctgatgcaggtgtatgaccagttcaccctggccccacccctgcccagcgccagcagctag

SEQ ID NO: 158305 - DNA, 3135 bp, synthetic construct
  misc_feature 1..3135: note = Description of Artificial Sequence: Synthetic coding sequence
  source 1..3135: mol_type = other DNA
tgaaacaagaccaagctgctgcccagcattgaggaggcctggagcctgcccatcccagctgagctgaccagccggcagggcgccatgaacacagcccagcaggcctgcaagccccaccaccccaacacagagcctgtgctgggcctgagccagacccccatcagccagcagagcctgcccctgcacatgatccccagcagccaggtggatgacctgagcagccctgccaagaggaagaggaccagcagccccaccaagaacaccagtgacaactggagcggcggccatgctgtgagccacccccctgtgcagcagcaggcccacagctggtgcctgaccccccagaagctgcagcacctggagcagctgcgggccaacagaaacaacctgaacccagcccagaagctgatgctggagcagctggagagccagtttgtgctgatgcagcagcaccagatgaggcccaccggggtggcccaggtgcgcagcacaggcatccccaacggccccacagctgacagcagcctgcccaccaacagcgtgtctggccagcagccccagctggccctgaccagggtgcccagcgtgtcccagcccggggtgcggcctgcctgccccggccagcccctggccaacggccccttctctgctggccacgtgccctgcagcaccagcaggaccctgggcagcacagacaccatcctgattggcaacaaccacatcaccggcagcggcagcaatggaaatgtgccctacctgcagagaaatgccctgaccctgccccacaacagaaccaacctgaccagcagcgctgaggagccctggaagaaccagctgagcaacagcacccagggcctgcacaagggccagagcagccacagcgctggccccaacggggagcggcccctgagcagcacaggccccagccagcacctgcaggccgccggcagcggcatccagaaccagaatggccaccccaccctgcccagcaacagcgtgacccagggcgccgccctgaaccacctgagcagccacacagccaccagcggcggccagcagggcatcaccctgaccaaggagagcaagcccagcggcaacatcctgactgtgcctgagaccagccgccacactggagagacccccaacagcacagcctctgtggagggcctgcccaaccacgtgcaccagatgacagcagatgctgtgtgcagccccagccatggagacagcaagagccctggcctgctgagcagtgacaacccccagctgagcgccctgctgatgggcaaggccaacaacaacgtgggcaccggcacctgtgacaaggtgaacaacatccaccctgctgtgcacaccaagacagacaacagcgtggccagcagccccagcagcgccatcagcacagccacccccagccccaagagcacagagcagaccaccaccaacagcgtgaccagcctgaacagcccccacagcggcctgcacaccatcaacggggagggcatggaggagagccagagccccatgaagacagacctgctgctggtgaaccacaagcccagcccccagatcatccccagcatgtctgtgtccatctaccccagcagcgctgaggtgctgaaggcctgcaggaacctgggcaagaatggcctgagcaacagcagcatcctgctggacaagtgccccccaccccggccccccagcagcccctacccacccctgcccaaggacaagctgaacccccccacccccagcatctacctggagaacaagagagatgccttcttcccccccctgcaccagttctgcaccaaccccaacaaccctgtgaccgtcatccggggcctggccggggccctgaagctggacctgggcctcttcagcaccaagaccctggtggaggccaacaatgagcacatggtggaggtgaggacccagctgctgcagcctgcagatgagaactgggaccccaccggcaccaagaagatctggcactgtgagagcaacagaagccacaccaccatcgccaagtatgcccagtaccaggccagcagcttccaggagagcctgcgggaggagaatgagaagaggagccaccacaaggaccacagcgacagcgagagcaccagcagtgacaacagcggcagaagaaggaagggccccttcaagaccatcaagtttggcaccaacatcgacctgagtgatgacaagaagtggaagctgcagctgcacgagctgaccaagctgcctgcctttgtgcgggtggtgtctgctggcaacctgctgagccacgtgggccacaccatcctgggcatgaacacagtgcagctgtacatgaaggtgcccggcagcaggaccccaggccaccaggagaacaacaacttctgcagcgtgaacatcaacatcggccctggggactgtgagtggtttgtggtgcctgagggctactggggcgtgctgaatgacttctgtgagaagaacaacctgaacttcctgatgggctcctggtggcccaacctggaggacctgtatgaggccaacgtgcctgtgtaccgcttcatccagaggcctggggacctggtgtggatcaatgccggcaccgtgcactgggtgcaggccatcggctggtgcaacaacatcgcctggaatgtgggccccctgacagcctgccagtacaagctggccgtggagagatatgagtggaacaagctgcagagcgtgaagagcatcgtgcccatggtgcacctgtcctggaacatggccaggaacatcaaggtgtctgaccccaagctgtttgagatgatcaagtactgcctgctgcggaccctgaagcagtgccagaccctgcgggaggccctgattgctgctgggaaggagatcatctggcacggccgcaccaaggaggagcccgcccactactgcagcatctgtgaggtggaggtgtttgacctgctgtttgtgaccaatgaaagcaacagcaggaagacctacatcgtgcactgccaggactgtgccaggaagaccagcggcaacctggagaactttgtggtgctggagcagtacaagatggaggacctgatgcaggtgtatgaccagttcaccctggccccacccctgcccagcgccagcagctag

SEQ ID NO: 158306 - DNA, 675 bp, synthetic construct
  misc_feature 1..675: note = Description of Artificial Sequence: Synthetic coding sequence
  source 1..675: mol_type = other DNA
tgactgcaggcctacatctgtgctgtgcagctggaccacggccacgccgccgcctggatggacctgggcaccctgtatgagagctgcaaccagccccaggatgccatcaagtgctacctgaatgccaccaggagcaagagctgcagcaacaccagcgccctggccgcccgcatcaagtacctgcaggcccagctgtgcaacctgccccagggcagcctgcagaacaagaccaagctgctgcccagcattgaggaggcctggagcctgcccatcccagctgagctgaccagccggcagggcgccatgaacacagcccagcagaacaccagtgacaactggagcggcggccatgctgtgagccacccccctgtgcagcagcaggcccacagctggtgcctgaccccccagaagctgcagatgaggcccactggagtggcccaggtgcgcagcacaggcatccccaacggccccacagctgacagcagcctgcccaccaacagcgtgtctggccagcagccccagctggccctgaccagggtgcccagcgtgtcccagcccggggtgcggcctgcctgccccggccagcccctggccaacggccccttctctgctggccacgtgccctgcagcaccagcaggaccctgggcagcacagacaccatcctgattggatag

SEQ ID NO: 158307 - DNA, 516 bp, synthetic construct
  misc_feature 1..516: note = Description of Artificial Sequence: Synthetic coding sequence
  source 1..516: mol_type = other DNA
agcctgcagaacaagaccaagctgctgcccagcattgaggaggcctggagcctgcccatcccagctgagctgaccagccggcagggcgccatgaacacagcccagcagaacaccagtgacaactggagcggcggccatgctgtgagccacccccctgtgcagcagcaggcccacagctggtgcctgaccccccagaagctgcagcacctggagcagctgcgggccaacagaaacaacctgaacccagcccagaagctgatgctggagcagctggagagccagtttgtgctgatgcagcagcaccagatgaggcccaccggggtggcccaggtgcgcagcacaggcatccccaacggccccacagctgacagcagcctgcccaccaacagcgtgtctggccagcagccccagctggccctgaccagggtgcccagcgtgtcccagcccggggtgcggcctgcctgccccggccagcccctggccaacggccccttctgccggccctgcagcctgtag

SEQ ID NO: 158308 - DNA, 4071 bp, synthetic construct
  misc_feature 1..4071: note = Description of Artificial Sequence: Synthetic coding sequence
  source 1..4071: mol_type = other DNA
atgaagagctgtggggtgtccctggccacagctgctgctgctgctgctgcctttggagatgaggagaagaagatggctgctgggaaggccagcggggagagcgaggaggccagccccagcctgacagctgaggagcgggaggccctgggcggcctggacagccggctgtttggatttgtgcgcttccatgaagatggagcccggaccaaggccctgctgggcaaggctgtgcgctgctatgagagcctcatcctgaaggccgagggcaaggtggagagtgacttcttctgccagctgggccacttcaacctgctgctggaggactaccccaaggccctgagcgcctaccagcgctactacagcctgcagagcgactactggaagaatgctgccttcctgtatggcctgggcctggtgtacttccactacaatgccttccagtgggccatcaaggccttccaggaggtgctgtatgtggaccccagcttctgccgggccaaggagatccacctgcggctgggcctgatgttcaaggtgaacacagattatgagagcagcctgaagcacttccagctggccctggtggactgcaacccctgcaccctgagcaatgctgagatccagttccacatcgcccacctgtatgagacccagaggaagtaccacagcgccaaggaggcctatgagcagctgctgcagacagagaacctgagcgcccaggtgaaggccaccgtgctgcagcagctgggctggatgcaccacacagtggacctgctgggggacaaggccaccaaggagagctatgccatccagtacctgcagaagagcctggaggccgaccccaacagcggccagagctggtacttcctgggccgctgctacagcagcatcggcaaggtgcaggatgccttcatctcctaccggcagagcattgacaagtctgaggccagcgctgacacctggtgcagcattggagtgctgtaccagcagcagaaccagcccatggatgccctgcaggcctacatctgtgctgtgcagctggaccacggccacgccgccgcctggatggacctgggcaccctgtatgagagctgcaaccagccccaggatgccatcaagtgctacctgaatgccaccaggagcaagagctgcagcaacaccagcgccctggccgcccgcatcaagtacctgcagaacaccagtgacaactggagcggcggccatgctgtgagccacccccctgtgcagcagcaggcccacagctggtgcctgaccccccagaagctgcagcacctggagcagctgcgggccaacagaaacaacctgaacccagcccagaagctgatgctggagcagctggagagccagtttgtgctgatgcagcagcaccagatgaggcccaccggggtggcccaggtgcgcagcacaggcatccccaacggccccacagctgacagcagcctgcccaccaacagcgtgtctggccagcagccccagctggccctgaccagggtgcccagcgtgtcccagcccggggtgcggcctgcctgccccggccagcccctggccaacggccccttctctgctggccacgtgccctgcagcaccagcaggaccctgggcagcacagacaccatcctgattggcaacaaccacatcaccggcagcggcagcaatggaaatgtgccctacctgcagagaaatgccctgaccctgccccacaacagaaccaacctgaccagcagcgctgaggagccctggaagaaccagctgagcaacagcacccagggcctgcacaagggccagagcagccacagcgctggccccaacggggagcggcccctgagcagcacaggccccagccagcacctgcaggccgccggcagcggcatccagaaccagaatggccaccccaccctgcccagcaacagcgtgacccagggcgccgccctgaaccacctgagcagccacacagccaccagcggcggccagcagggcatcaccctgaccaaggagagcaagcccagcggcaacatcctgactgtgcctgagaccagccgccacactggagagacccccaacagcacagcctctgtggagggcctgcccaaccacgtgcaccagatgacagcagatgctgtgtgcagccccagccatggagacagcaagagccctggcctgctgagcagtgacaacccccagctgagcgccctgctgatgggcaaggccaacaacaacgtgggcaccggcacctgtgacaaggtgaacaacatccaccctgctgtgcacaccaagacagacaacagcgtggccagcagccccagcagcgccatcagcacagccacccccagccccaagagcacagagcagaccaccaccaacagcgtgaccagcctgaacagcccccacagcggcctgcacaccatcaacggggagggcatggaggagagccagagccccatgaagacagacctgctgctggtgaaccacaagcccagcccccagatcatccccagcatgtctgtgtccatctaccccagcagcgctgaggtgctgaaggcctgcaggaacctgggcaagaatggcctgagcaacagcagcatcctgctggacaagtgccccccaccccggccccccagcagcccctacccacccctgcccaaggacaagctgaacccccccacccccagcatctacctggagaacaagagagatgccttcttcccccccctgcaccagttctgcaccaaccccaacaaccctgtgaccgtcatccggggcctggccggggccctgaagctggacctgggcctcttcagcaccaagaccctggtggaggccaacaatgagcacatggtggaggtgaggacccagctgctgcagcctgcagatgagaactgggaccccaccggcaccaagaagatctggcactgtgagagcaacagaagccacaccaccatcgccaagtatgcccagtaccaggccagcagcttccaggagagcctgcgggaggagaatgagaagaggagccaccacaaggaccacagcgacagcgagagcaccagcagtgacaacagcggcagaagaaggaagggccccttcaagaccatcaagtttggcaccaacatcgacctgagtgatgacaagaagtggaagctgcagctgcacgagctgaccaagctgcctgcctttgtgcgggtggtgtctgctggcaacctgctgagccacgtgggccacaccatcctgggcatgaacacagtgcagctgtacatgaaggtgcccggcagcaggaccccaggccaccaggagaacaacaacttctgcagcgtgaacatcaacatcggccctggggactgtgagtggtttgtggtgcctgagggctactggggcgtgctgaatgacttctgtgagaagaacaacctgaacttcctgatgggctcctggtggcccaacctggaggacctgtatgaggccaacgtgcctgtgtaccgcttcatccagaggcctggggacctggtgtggatcaatgccggcaccgtgcactgggtgcaggccatcggctggtgcaacaacatcgcctggaatgtgggccccctgacagcctgccagtacaagctggccgtggagagatatgagtggaacaagctgcagagcgtgaagagcatcgtgcccatggtgcacctgtcctggaacatggccaggaacatcaaggtgtctgaccccaagctgtttgagatgatcaagtactgcctgctgcggaccctgaagcagtgccagaccctgcgggaggccctgattgctgctgggaaggagatcatctggcacggccgcaccaaggaggagcccgcccactactgcagcatctgtgaggtggaggtgtttgacctgctgtttgtgaccaatgaaagcaacagcaggaagacctacatcgtgcactgccaggactgtgccaggaagaccagcggcaacctggagaactttgtggtgctggagcagtacaagatggaggacctgatgcaggtgtatgaccagttcaccctggccccacccctgcccagcgccagcagctag

SEQ ID NO: 158309 - DNA, 675 bp, synthetic construct
  misc_feature 1..675: note = Description of Artificial Sequence: Synthetic coding sequence
  source 1..675: mol_type = other DNA
atgaagagctgtggggtgtccctggccacagctgctgctgctgctgctgcctttggagatgaggagaagaagatggctgctgggaaggccagcggggagagcgaggaggccagccccagcctgacagctgaggagcgggaggccctgggcggcctggacagccggctgtttggatttgtgcgcttccatgaagatggagcccggaccaaggccctgctgggcaaggctgtgcgctgctatgagagcctcatcctgaaggccgagggcaaggtggagagtgacttcttctgccagctgggccacttcaacctgctgctggaggactaccccaaggccctgagcgcctaccagcgctactacagcctgcagagcgactactggaagaatgctgccttcctgtatggcctgggcctggtgtacttccactacaatgccttccagtgggccatcaaggccttccaggaggtgctgtatgtggaccccagcttctgccgggccaaggagatccacctgcggctgggcctgatgttcaaggtgaacacagattatgagagcagcctgaagcacttccagctggccctggtggactgcaacccctgcaccctgagcaatgctgagatccagttccacatcgcccacctgtatgagacccaggtgggctgcatcaccctgtag

SEQ ID NO: 158310 - DNA, 3969 bp, synthetic construct
  misc_feature 1..3969: note = Description of Artificial Sequence: Synthetic coding sequence
  source 1..3969: mol_type = other DNA
atgaagagctgtggggtgtccctggccacagctgctgctgctgctgctgcctttggagatgaggagaagaagatggctgctgggaaggccagcggggagagcgaggaggccagccccagcctgacagctgaggagcgggaggccctgggcggcctggacagccggctgtttggatttgtgcgcttccatgaagatggagcccggaccaaggccctgctgggcaaggctgtgcgctgctatgagagcctcatcctgaaggccgagggcaaggtggagagtgacttcttctgccagctgggccacttcaacctgctgctggaggactaccccaaggccctgagcgcctaccagcgctactacagcctgcagagcgactactggaagaatgctgccttcctgtatggcctgggcctggtgtacttccactacaatgccttccagtgggccatcaaggccttccaggaggtgctgtatgtggaccccagcttctgccgggccaaggagatccacctgcggctgggcctgatgttcaaggtgaacacagattatgagagcagcctgaagcacttccagctggccctggtggactgcaacccctgcaccctgagcaatgctgagatccagttccacatcgcccacctgtatgagacccagaggaagtaccacagcgccaaggaggcctatgagcagctgctgcagacagagaacctgagcgcccaggtgaaggccaccgtgctgcagcagctgggctggatgcaccacacagtggacctgctgggggacaaggccaccaaggagagctatgccatccagtacctgcagaagagcctggaggccgaccccaacagcggccagagctggtacttcctgggccgctgctacagcagcatcggcaaggtgcaggatgccttcatctcctaccggcagagcattgacaagtctgaggccagcgctgacacctggtgcagcattggagtgctgtaccagcagcagaaccagcccatggatgccctgcaggcctacatctgtgctgtgcagctggaccacggccacgccgccgcctggatggacctgggcaccctgtatgagagctgcaaccagccccaggatgccatcaagtgctacctgaatgccaccaggagcaagagctgcagcaacaccagcgccctggccgcccgcatcaagtacctgcagaacaccagtgacaactggagcggcggccatgctgtgagccacccccctgtgcagcagcaggcccacagctggtgcctgaccccccagaagctgcagatgaggcccaccggggtggcccaggtgcgcagcacaggcatccccaacggccccacagctgacagcagcctgcccaccaacagcgtgtctggccagcagccccagctggccctgaccagggtgcccagcgtgtcccagcccggggtgcggcctgcctgccccggccagcccctggccaacggccccttctctgctggccacgtgccctgcagcaccagcaggaccctgggcagcacagacaccatcctgattggcaacaaccacatcaccggcagcggcagcaatggaaatgtgccctacctgcagagaaatgccctgaccctgccccacaacagaaccaacctgaccagcagcgctgaggagccctggaagaaccagctgagcaacagcacccagggcctgcacaagggccagagcagccacagcgctggccccaacggggagcggcccctgagcagcacaggccccagccagcacctgcaggccgccggcagcggcatccagaaccagaatggccaccccaccctgcccagcaacagcgtgacccagggcgccgccctgaaccacctgagcagccacacagccaccagcggcggccagcagggcatcaccctgaccaaggagagcaagcccagcggcaacatcctgactgtgcctgagaccagccgccacactggagagacccccaacagcacagcctctgtggagggcctgcccaaccacgtgcaccagatgacagcagatgctgtgtgcagccccagccatggagacagcaagagccctggcctgctgagcagtgacaacccccagctgagcgccctgctgatgggcaaggccaacaacaacgtgggcaccggcacctgtgacaaggtgaacaacatccaccctgctgtgcacaccaagacagacaacagcgtggccagcagccccagcagcgccatcagcacagccacccccagccccaagagcacagagcagaccaccaccaacagcgtgaccagcctgaacagcccccacagcggcctgcacaccatcaacggggagggcatggaggagagccagagccccatgaagacagacctgctgctggtgaaccacaagcccagcccccagatcatccccagcatgtctgtgtccatctaccccagcagcgctgaggtgctgaaggcctgcaggaacctgggcaagaatggcctgagcaacagcagcatcctgctggacaagtgccccccaccccggccccccagcagcccctacccacccctgcccaaggacaagctgaacccccccacccccagcatctacctggagaacaagagagatgccttcttcccccccctgcaccagttctgcaccaaccccaacaaccctgtgaccgtcatccggggcctggccggggccctgaagctggacctgggcctcttcagcaccaagaccctggtggaggccaacaatgagcacatggtggaggtgaggacccagctgctgcagcctgcagatgagaactgggaccccaccggcaccaagaagatctggcactgtgagagcaacagaagccacaccaccatcgccaagtatgcccagtaccaggccagcagcttccaggagagcctgcgggaggagaatgagaagaggagccaccacaaggaccacagcgacagcgagagcaccagcagtgacaacagcggcagaagaaggaagggccccttcaagaccatcaagtttggcaccaacatcgacctgagtgatgacaagaagtggaagctgcagctgcacgagctgaccaagctgcctgcctttgtgcgggtggtgtctgctggcaacctgctgagccacgtgggccacaccatcctgggcatgaacacagtgcagctgtacatgaaggtgcccggcagcaggaccccaggccaccaggagaacaacaacttctgcagcgtgaacatcaacatcggccctggggactgtgagtggtttgtggtgcctgagggctactggggcgtgctgaatgacttctgtgagaagaacaacctgaacttcctgatgggctcctggtggcccaacctggaggacctgtatgaggccaacgtgcctgtgtaccgcttcatccagaggcctggggacctggtgtggatcaatgccggcaccgtgcactgggtgcaggccatcggctggtgcaacaacatcgcctggaatgtgggccccctgacagcctgccagtacaagctggccgtggagagatatgagtggaacaagctgcagagcgtgaagagcatcgtgcccatggtgcacctgtcctggaacatggccaggaacatcaaggtgtctgaccccaagctgtttgagatgatcaagtactgcctgctgcggaccctgaagcagtgccagaccctgcgggaggccctgattgctgctgggaaggagatcatctggcacggccgcaccaaggaggagcccgcccactactgcagcatctgtgaggtggaggtgtttgacctgctgtttgtgaccaatgaaagcaacagcaggaagacctacatcgtgcactgccaggactgtgccaggaagaccagcggcaacctggagaactttgtggtgctggagcagtacaagatggaggacctgatgcaggtgtatgaccagttcaccctggccccacccctgcccagcgccagcagctag

SEQ ID NO: 158311 - DNA, 5049 bp, synthetic construct
  misc_feature 1..5049: note = Description of Artificial Sequence: Synthetic coding sequence
  source 1..5049: mol_type = other DNA
atgcacagagctgtggaccccccaggggcccgggccgcccgggaggcctttgccctgggcggcctgagctgtgccggggcctggagcagctgccccccccaccccccacccaggtctgcctggctgcccggcggccgctgcagcgccagcatcggccagccccccctgcctgcccccctgccccccagccacggcagcagcagcggccaccccagcaagccctactatgcccctggggcccccaccccccggcccctgcacggcaagctggagagcctgcacggctgtgtgcaggccctgctgcgggagcccgcccagcccggcctgtgggagcagctgggccagctgtatgaaagtgaacatgattctgaggaggccacccgctgctaccacagcgccctgcgctatggaggcagctttgctgagctgggccccagaattggccgcctgcagcaggcccagctgtggaacttccacacaggcagctgccagcaccgggccaaggtgctgccccccctggagcaggtgtggaacctgctgcacctggagcacaagaggaactacggggccaagagaggaggcccccctgtgaagagagctgctgagccccctgtggtgcagcctgtgcccccagctgccctgagcggccccagcggggaggagggcctgagccctgggggcaagagaagaagaggctgcaacagcgagcagacaggcctgcccccaggcctgcccctgcccccaccacccctgcccccacctcctcctcctcctcctcctcctcctccacccctgcccggcctggccaccagcccccccttccagctgaccaagccaggcctgtggagcaccctgcatggagatgcctggggccctgagaggaaaggaagtgcccctcctgagcggcaggagcagaggcacagcctgccccacccctacccctacccagccccagcctacacagcccaccccccaggccaccggctggtgcctgctgcccctcctggccctggccccaggcctcctggagctgagagccacggctgcctgcctgccaccaggcctcctggcagtgacctgcgggagagccgggtgcagaggagcaggatggacagctctgtgtccccagctgccaccacagcctgtgtgccctatgcccccagccggcccccaggcctgcccggcaccaccaccagcagcagcagcagcagcagcagcaacacaggcctgcggggcgtggagcccaaccctggcatccctggagctgaccactaccagaccccagccctggaggtgagccaccacggccgcctgggccccagcgcccacagcagcaggaagcccttcctgggcgccccagctgccaccccccacctgagcctgcccccaggccccagcagccccccacctccaccctgcccccggctgctgcggcccccacctcctccagcctggctgaagggccctgcctgcagagctgcccgggaggatggagagatcctggaggagctgttcttcggcacagagggcccccccaggcctgcccccccacccctgccccaccgggagggcttcctgggccccccagccagccgcttctctgtgggcacccaggacagccacaccccacccaccccacccacccccaccaccagcagcagcaacagcaacagcggcagccacagcagcagccctgctggccctgtgtccttccccccaccaccctacctggcccggagcattgaccccctgcccaggcctcccagccctgcccagaacccccaggacccccccctggtgcccctgaccctggccctgcccccagccccacccagcagctgccaccagaacaccagcggcagcttcagaagacctgagagcccccggccccgggtgtccttccccaagaccccagaggtgggccctggccccccacctggccccctgagcaaggccccccagcctgtgcccccaggagtgggggagctgcctgcccggggcccccggctgtttgacttcccccccacccccctggaggaccagtttgaggagcctgctgagttcaagatcctgcctgatggcctggccaacatcatgaagatgctggatgagagcatcaggaaggaggaggagcagcagcagcatgaagctggggtggccccccagccccccctgaaggagccctttgccagcctgcagagccccttccccacagacacagcccccaccaccacagccccagctgtggccgtgaccaccaccaccaccaccaccaccaccaccacagccacccaggaggaggagaagaagcccccaccagccctgcccccacctccacccctggccaagtttcctccacccagccagccccagcccccacctcctcctccacccagccctgccagcctgctgaagagcctggcctctgtgctggagggccagaagtactgctaccggggcactggagctgctgtgtccaccaggcctggccccctgcccaccacccagtacagccctggccccccatctggggccacagccctgccccccaccagcgctgcccccagcgcccagggcagcccccagcccagcgccagcagcagcagccagttcagcaccagcggcggcccctgggcccgggagcggcgggccggggaggagcctgtgcccggccccatgacccccacccagcccccaccacccctgagcctgcccccagcccggtctgagagcgaggtgctggaggagatcagccgggcctgtgagaccctggtggagcgggtgggccgcagcgccacagatcctgctgaccctgtggacacagctgagcctgctgacagcggcacagagcggctgctgcccccagcccaggccaaggaggaggccggcggcgtggccgctgtgtctggcagctgcaagaggcggcagaaggagcaccagaaggagcaccggcggcacagaagagcctgcaaggacagcgtgggccggcggccccgggagggccgggccaaggccaaggccaaggtgcccaaggagaagagcagaagagtgctgggcaacctggacctgcagagcgaggagatccagggccgggagaagagcaggccagacctgggcggggccagcaaggccaagccacccacagccccagccccacccagcgccccagcccccagcgcccagcccaccccacccagcgcctctgtgcctgggaagaaggcccgggaggaggcccctggccccccaggagtgtccagagctgacatgctgaagctgcggagcctgtctgagggcccccccaaggagctgaagatccgcctcatcaaggtggagagcggggacaaggagaccttcatcgccagcgaggtggaggagcggcggctgaggatggctgacctgaccatcagccactgtgccgcagatgtggtgcgggccagcagaaatgccaaggtgaagggcaagttccgggagagctacctgagccctgcccagagcgtgaagcccaagatcaacacagaggagaagctgccccgggagaagctgaacccccccacccccagcatctacctggagagcaagagagatgccttcagccctgtgctgctgcagttctgcacagaccccaggaaccccatcaccgtcatccggggcctggccggcagcctgcggctgaacctgggcctcttcagcaccaagaccctggtggaggccagcggggagcacacagtggaggtgaggacccaggtgcagcagcccagtgatgagaactgggacctgaccggcacccggcagatctggccctgtgagagcagccgcagccacaccaccatcgccaagtatgcccagtaccaggccagcagcttccaggagagcctgcaggaggagaaggagagtgaagatgaggagagcgaggagccagacagcaccaccggcaccccacccagcagcgccccagaccccaagaaccaccacatcatcaagtttggcaccaacatcgacctgagtgatgccaagcgctggaagccccagctgcaggagctgctgaagctgcctgccttcatgagggtgaccagcactggaaacatgctgagccacgtgggccacaccatcctgggcatgaacacagtgcagctgtacatgaaggtgcccggcagcaggaccccaggccaccaggagaacaacaacttctgcagcgtgaacatcaacatcggccctggggactgtgagtggtttgctgtgcatgagcactactgggagaccatcagcgccttctgtgacagacatggagtggactacctgaccggctcctggtggcccatcctggatgacctgtatgccagcaacatccctgtgtacagatttgtgcagaggcctggggacctggtgtggatcaatgccggcaccgtgcactgggtgcaggccaccggctggtgcaacaacatcgcctggaatgtgggccccctgacagcctaccagtaccagctggccctggagagatatgagtggaatgaggtgaagaatgtgaagagcatcgtgcccatgatccacgtgtcctggaatgtggccaggacagtgaagatcagtgaccctgacctcttcaagatgatcaagttctgcctgctgcagagcatgaagcactgccaggtgcagcgggagagcctggtgcgggccggcaagaagatcgcctaccagggccgggtgaaggatgagcccgcctactactgcaatgaatgtgatgtggaggtgttcaacatcctgtttgtgaccagtgaaaatggcagcaggaacacctacctggtgcactgtgagggctgtgcccggcggcgctctgctggcctgcagggcgtggtggtgctggagcagtacagaacagaggagctggcccaggcctatgatgccttcaccctggtgcgggcccggcgggcccggggccagaggagaagagccctgggccaggccgccggcaccggcttcggcagccctgctgcccccttccctgagcccccaccagccttcagcccccaggccccagccagcaccagcaggtag

SEQ ID NO: 158312 - DNA, 4932 bp, synthetic construct
  misc_feature 1..4932: note = Description of Artificial Sequence: Synthetic coding sequence
  source 1..4932: mol_type = other DNA
atgcacagagctgtggaccccccaggggcccgggccgcccgggaggcctttgccctgggcggcctgagctgtgccggggcctggagcagctgccccccccaccccccacccaggtctgcctggctgcccggcggccgctgcagcgccagcatcggccagccccccctgcctgcccccctgccccccagccacggcagcagcagcggccaccccagcaagccctactatgcccctggggcccccaccccccggcccctgcacggcaagctggagagcctgcacggctgtgtgcaggccctgctgcgggagcccgcccagcccggcctgtgggagcagctgggccagctgtatgaaagtgaacatgattctgaggaggccacccgctgctaccacagcgccctgcgctatggaggcagctttgctgagctgggccccagaattggccgcctgcagcaggcccagctgtggaacttccacacaggcagctgccagcaccgggccaaggtgctgccccccctggagcaggtgtggaacctgctgcacctggagcacaagaggaactacggggccaagagaggaggcccccctgtgaagagagctgctgagccccctgtggtgcagcctgtgcccccagctgccctgagcggccccagcggggaggagggcctgagccctgggggcaagagaagaagaggctgcaacagcgagcagacaggcctgcccccaggcctgcccctgcccccaccacccctgcccccacctcctcctcctcctcctcctcctcctccacccctgcccggcctggccaccagcccccccttccagctgaccaagccaggcctgtggagcaccctgcatggagatgcctggggccctgagaggaaaggaagtgcccctcctgagcggcaggagcagaggcacagcctgccccacccctacccctacccagccccagcctacacagcccaccccccaggccaccggctggtgcctgctgcccctcctggccctggccccaggcctcctggagctgagagccacggctgcctgcctgccaccaggcctcctggcagtgacctgcgggagagccgggtgcagaggagcaggatggacagctctgtgtccccagctgccaccacagcctgtgtgccctatgcccccagccggcccccaggcctgcccggcaccaccaccagcagcagcagcagcagcagcagcaacacaggcctgcggggcgtggagcccaaccctggcatccctggagctgaccactaccagaccccagccctggaggtgagccaccacggccgcctgggccccagcgcccacagcagcaggaagcccttcctgggcgccccagctgccaccccccacctgagcctgcccccaggccccagcagccccccacctccaccctgcccccggctgctgcggcccccacctcctccagcctggctgaagggccctgcctgcagagctgcccgggaggatggagagatcctggaggagctgttcttcggcacagagggcccccccaggcctgcccccccacccctgccccaccgggagggcttcctgggccccccagccagccgcttctctgtgggcacccaggacagccacaccccacccaccccacccacccccaccaccagcagcagcaacagcaacagcggcagccacagcagcagccctgctggccctgtgtccttccccccaccaccctacctggcccggagcattgaccccctgcccaggcctcccagccctgcccagaacccccaggacccccccctggtgcccctgaccctggccctgcccccagccccacccagcagctgccaccagaacaccagcggcagcttcagaagacctgagagcccccggccccgggtgtccttccccaagaccccagaggtgggccctggccccccacctggccccctgagcaaggccccccagcctgtgcccccaggagtgggggagctgcctgcccggggcccccggctgtttgacttcccccccacccccctggaggaccagtttgaggagcctgctgagttcaagatcctgcctgatggcctggccaacatcatgaagatgctggatgagagcatcaggaaggaggaggagcagcagcagcatgaagctggggtggccccccagccccccctgaaggagccctttgccagcctgcagagccccttccccacagacacagcccccaccaccacagccccagctgtggccgtgaccaccaccaccaccaccaccaccaccaccacagccacccaggaggaggagaagaagcccccaccagccctgcccccacctccacccctggccaagtttcctccacccagccagccccagcccccacctcctcctccacccagccctgccagcctgctgaagagcctggcctctgtgctggagggccagaagtactgctaccggggcactggagctgctgtgtccaccaggcctggccccctgcccaccacccagtacagccctggccccccatctggggccacagccctgccccccaccagcgctgcccccagcgcccagggcagcccccagcccagcgccagcagcagcagccagttcagcaccagcggcggcccctgggcccgggagcggcgggccggggaggagcctgtgcccggccccatgacccccacccagcccccaccacccctgagcctgcccccagcccggtctgagagcgaggtgctggaggagatcagccgggcctgtgagaccctggtggagcgggtgggccgcagcgccacagatcctgctgaccctgtggacacagctgagcctgctgacagcggcacagagcggctgctgcccccagcccaggccaaggaggaggccggcggcgtggccgctgtgtctggcagctgcaagaggcggcagaaggagcaccagaaggagcaccggcggcacagaagagcctgcaaggacagcgtgggccggcggccccgggagggccgggccaaggccaaggccaaggtgcccaaggagaagagcagaagagtgctgggcaacctggacctgcagagcgaggagatccagggccgggagaagagcaggccagacctgggcggggccagcaaggccaagccacccacagccccagccccacccagcgccccagcccccagcgcccagcccaccccacccagcgcctctgtgcctgggaagaaggcccgggaggaggcccctggccccccaggagtgtccagagctgacatgctgaagctgcggagcctgtctgagggcccccccaaggagctgaagatccgcctcatcaaggtggagagcggggacaaggagaccttcatcgccagcgaggtggaggagcggcggctgaggatggctgacctgaccatcagccactgtgccgcagatgtggtgcgggccagcagaaatgccaaggtgaagggcaagttccgggagagctacctgagccctgcccagagcgtgaagcccaagatcaacacagaggagaagctgccccgggagaagctgaacccccccacccccagcatctacctggagagcaagagagatgccttcagccctgtgctgctgcagttctgcacagaccccaggaaccccatcaccgtcatccggggcctggccggcagcctgcggctgaacctgggcctcttcagcaccaagaccctggtggaggccagcggggagcacacagtggaggtgaggacccaggtgcagcagcccagtgatgagaactgggacctgaccggcacccggcagatctggccctgtgagagcagccgcagccacaccaccatcgccaagtatgcccagtaccaggccagcagcttccaggagagcctgcaggaggagaaggagagtgaagatgaggagagcgaggagccagacagcaccaccggcaccccacccagcagcgccccagaccccaagaaccaccacatcatcaagtttggcaccaacatcgacctgagtgatgccaagcgctggaagccccagctgcaggagctgctgaagctgcctgccttcatgagggtgaccagcactggaaacatgctgagccacgtgggccacaccatcctgggcatgaacacagtgcagctgtacatgaaggtgcccggcagcaggaccccaggccaccaggagaacaacaacttctgcagcgtgaacatcaacatcggccctggggactgtgagtggtttgctgtgcatgagcactactgggagaccatcagcgccttctgtgacagacatggagtggactacctgaccggctcctggtggcccatcctggatgacctgtatgccagcaacatccctgtgtacagatttgtgcagaggcctggggacctggtgtggatcaatgccggcaccgtgcactgggtgcaggccaccggctggtgcaacaacatcgcctggaatgtgggccccctgacagcctaccagtaccagctggccctggagagatatgagtggaatgaggtgaagaatgtgaagagcatcgtgcccatgatccacgtgtcctggaatgtggccaggacagtgaagatcagtgaccctgacctcttcaagatgatcaagttctgcctgctgcagagcatgaagcactgccaggtgcagcgggagagcctggtgcgggccggcaagaagatcgcctaccagggccgggtgaaggatgagcccgcctactactgcaatgaatgtgatgtggaggtgttcaacatcctgtttgtgaccagtgaaaatggcagcaggaacacctacctggtgcactgtgagggctgtgcccggcggcgctctgctggcctgcagggcgtggtggtgctggagcagtacagaacagaggagctggcccaggcctatgatgccttcaccctggccccagccagcaccagcaggtag

SEQ ID NO: 158313 - DNA, 1245 bp, synthetic construct
  misc_feature 1..1245: note = Description of Artificial Sequence: Synthetic coding sequence
  source 1..1245: mol_type = other DNA
atgcacagccggggccgggagatcgtggtgctgctgaacccctggagcatcaatgaggccgtgtcctcctactgcacctacttcatcaagcaggacagcaagagctttggcatcatggtgtcctggaagggcatctacttcatcctgaccctcttctggggcagcttcttcggcagcatcttcatgctgagccccttcctgcccctgatgtttgtgaaccccagctggtaccgctggatcaacaaccggctggtggccacctggctgaccctgcctgtggccctgctggagaccatgtttggagtgaaggtgatcatcactggagatgcctttgtgcctggagagaggagcgtcatcatcatgaaccacaggaccaggatggactggatgttcctgtggaactgcctgatgagatacagctacctgcggctggagaagatctgcctgaaggccagcctgaagggcgtgcccggcttcggctgggccatgcaggccgccgcctacatcttcatccacaggaagtggaaggatgacaagagccactttgaggacatgattgactacttctgtgacatccacgagcccctgcagctgctgatcttccctgagggcacagacctgacagagaacagcaagagccgcagcaatgcctttgctgagaagaatggcctgcagaagtatgaatatgtgctgcaccccaggaccaccggcttcacctttgtggtggaccggctgcgggagggcaagaacctggatgctgtgcatgacatcaccgtggcctacccccacaacatcccccagagcgagaagcacctgctgcagggcgacttcccccgggagatccacttccacgtgcaccgctaccccatcgacaccctgcccaccagcaaggaggacctgcagctgtggtgccacaagcgctgggaggagaaggaggagcggctgcgctccttctaccagggcgagaagaacttctacttcaccggccagagcgtcatccccccctgcaagtctgagctgcgggtgctggtggtgaagctgctgagcatcctgtactggaccctcttcagccctgccatgtgcctgctgatctacctgtacagcctggtgaagtggtacttcatcatcaccatcgtcatctttgtgctgcaggagcgcatctttggaggcctggagatcatcgagctggcctgctaccgcctgctgcacaagcagccccacctgaacagcaagaagaatgaatag

SEQ ID NO: 158314 - DNA, 927 bp, synthetic construct
  misc_feature 1..927: note = Description of Artificial Sequence: Synthetic coding sequence
  source 1..927: mol_type = other DNA
atgcacagccggggccgggagatcgtggtgctgctgaacccctggagcatcaatgaggccgtgtcctcctactgcacctacttcatcaagcaggacagcaagagctttggcatcatggtgtcctggaagggcatctacttcatcctgaccctcttctggggcagcttcttcggcagcatcttcatgctgagccccttcctgcccctgatgtttgtgaaccccagctggtaccgctggatcaacaaccggctggtggccacctggctgaccctgcctgtggccctgctggagaccatgtttggagtgaaggtgatcatcactggagatgcctttgtgcctggagagaggagcgtcatcatcatgaaccacaggaccaggatggactggatgttcctgtggaactgcctgatgagatacagctacctgcggctggagaagatctgcctgaaggccagcctgaagggcgtgcccggcttcggctgggccatgcaggccgccgcctacatcttcatccacaggaagtggaaggatgacaagagccactttgaggacatgattgactacttctgtgacatccacgagcccctgcagctgctgatcttccctgagggcacagacctgacagagaacagcaagagccgcagcaatgcctttgctgagaagaatggcctgcagaagtatgaatatgtgctgcaccccaggaccaccggcttcacctttgtggtggaccggctgcgggagggccggcggcagagcgagggcagcaagggccccctgcagggcgagctgcagatcacagcccagggcaaccagaggggccacaagcagatggagaagcacagcatgctgatggactggaagaaccagtaccgggagatcggccacacagcccagagcaacctgcagatccagtgctacagccactag

SEQ ID NO: 158315 - DNA, 927 bp, synthetic construct; identical to SEQ ID NO: 158314
  misc_feature 1..927: note = Description of Artificial Sequence: Synthetic coding sequence
  source 1..927: mol_type = other DNA

SEQ ID NO: 158316 - DNA, 1131 bp, synthetic construct
  misc_feature 1..1131: note = Description of Artificial Sequence: Synthetic coding sequence
  source 1..1131: mol_type = other DNA
atggtgtcctggaagggcatctacttcatcctgaccctcttctggggcagcttcttcggcagcatcttcatgctgagccccttcctgcccctgatgtttgtgaaccccagctggtaccgctggatcaacaaccggctggtggccacctggctgaccctgcctgtggccctgctggagaccatgtttggagtgaaggtgatcatcactggagatgcctttgtgcctggagagaggagcgtcatcatcatgaaccacaggaccaggatggactggatgttcctgtggaactgcctgatgagatacagctacctgcggctggagaagatctgcctgaaggccagcctgaagggcgtgcccggcttcggctgggccatgcaggccgccgcctacatcttcatccacaggaagtggaaggatgacaagagccactttgaggacatgattgactacttctgtgacatccacgagcccctgcagctgctgatcttccctgagggcacagacctgacagagaacagcaagagccgcagcaatgcctttgctgagaagaatggcctgcagaagtatgaatatgtgctgcaccccaggaccaccggcttcacctttgtggtggaccggctgcgggagggcaagaacctggatgctgtgcatgacatcaccgtggcctacccccacaacatcccccagagcgagaagcacctgctgcagggcgacttcccccgggagatccacttccacgtgcaccgctaccccatcgacaccctgcccaccagcaaggaggacctgcagctgtggtgccacaagcgctgggaggagaaggaggagcggctgcgctccttctaccagggcgagaagaacttctacttcaccggccagagcgtcatccccccctgcaagtctgagctgcgggtgctggtggtgaagctgctgagcatcctgtactggaccctcttcagccctgccatgtgcctgctgatctacctgtacagcctggtgaagtggtacttcatcatcaccatcgtcatctttgtgctgcaggagcgcatctttggaggcctggagatcatcgagctggcctgctaccgcctgctgcacaagcagccccacctgaacagcaagaagaatgaatag

SEQ ID NO: 158317 - DNA, 993 bp, synthetic construct
  misc_feature 1..993: note = Description of Artificial Sequence: Synthetic coding sequence
  source 1..993: mol_type = other DNA
atggtgtcctggaagggcatctacttcatcctgaccctcttctggggcagcttcttcggcagcatcttcatgctgagccccttcctgcccctgatgtttgtgaaccccagctggtaccgctggatcaacaaccggctggtggccacctggctgaccctgcctgtggccctgctggagaccatgtttggagtgaaggtgatcatcactggagatgcctttgtgcctggagagaggagcgtcatcatcatgaaccacaggaccaggatggactggatgttcctgtggaactgcctgatgagatacagctacctgcggctggagaagatctgcctgaaggccagcctgaagggcgtgcccggcttcggctgggccatgcaggccgccgcctacatcttcatccacaggaagtggaaggatgacaagagccactttgaggacatgattgactacttctgtgacatccacgagcccctgcagctgctgatcttccctgagggcacagacctgacagagaacagcaagagccgcagcaatgcctttgctgagaagaatggcctgcagaagtatgaatatgtgctgcaccccaggaccaccggcttcacctttgtggtggaccggctgcgggagggcaagaacctggatgctgtgcatgacatcaccgtggcctacccccacaacatcccccagagcgagaagcacctgctgcagggcgacttcccccgggagatccacttccacgtgcaccgctaccccatcgacaccctgcccaccagcaaggaggacctgcagctgtggtgccacaagcgctgggaggagaaggaggagcggctgcgctccttctaccagggcgagaagaacttctacttcaccggccagagcgtcatccccccctgcaagtctgagctgcgggtgctggtggtgaagctgtacacagtgctggaccctgtgcagccctgcaatgtgcccacccacatctttgtgcagagctgctag

SEQ ID NO: 158318 - DNA, 462 bp, synthetic construct
  misc_feature 1..462: note = Description of Artificial Sequence: Synthetic coding sequence
  source 1..462: mol_type = other DNA
atgcacagccggggccgggagatcgtggtgctgctgaacccctggagcatcaatgaggccgtgtcctcctactgcacctacttcatcaagcaggacagcaagagctttggcatcatggtgtcctggaagggcatctacttcatcctgaccctcttctggggcagcttcttcggcagcatcttcatgctgagccccttcctgcccctgatgtttgtgaaccccagctggtaccgctggatcaacaaccggctggtggccacctggctgaccctgcctgtggccctgctggagaccatgtttggagtgaaggtgatcatcactggagatgcctttgtgcctggagagaggagcgtcatcatcatgaaccacaggaccaggatggactggatgttcctgtggaactgcctgatgagatacagctacctgcggctggagaagatctgcctgaaggccagcctgtag

SEQ ID NO: 158319 - DNA, 1131 bp, synthetic construct; identical to SEQ ID NO: 158316
  misc_feature 1..1131: note = Description of Artificial Sequence: Synthetic coding sequence
  source 1..1131: mol_type = other DNA

SEQ ID NO: 158320 - DNA, 1095 bp, synthetic construct
  misc_feature 1..1095: note = Description of Artificial Sequence: Synthetic coding sequence
  source 1..1095: mol_type = other DNA
atggccgccatcagcaccagcatccctgtgatcagccagccccagttcaccgccatgaatgagccccagtgcttctacaatgaaagcatcgccttcttctacaacagaagtggcaagcacctggccacagagtggaacacagtgtccaagctggtgatgggcctgggcatcaccgtgtgcatcttcatcatgctggccaacctgctggtgatggtggccatctacgtgaacagacgcttccacttccccatctactacctgatggccaacctggccgctgctgacttctttgctggcctggcctacttctacctgatgttcaacacaggccccaacacccggcggctgactgtgtccacctggctgctgcggcagggcctgattgacaccagcctgacagcctctgtggccaacctgctggccatcgccatcgagcggcacatcaccgtcttcaggatgcagctgcacaccaggatgagcaacagaagagtggtggtggtgattgtggtgatctggaccatggccatcgtgatgggcgccatccccagcgtgggctggaactgcatctgtgacatcgagaactgcagcaacatggcccccctgtacagcgacagctacctggtgttctgggccatcttcaacctggtgacctttgtggtgatggtggtgctgtatgcccacatcttcggctacgtgcggcagaggaccatgaggatgagccgccacagcagcggccccaggaggaacagagacaccatgatgagcctgctgaagacagtggtgattgtgctgggcgccttcatcatctgctggaccccaggcctggtgctgctgctgctggatgtgtgctgcccccagtgtgatgtgctggcctatgagaagttcttcctgctgctggccgagttcaacagcgccatgaaccccatcatctacagctacagagacaaggagatgtctgccaccttccggcagatcctgtgctgccagaggtctgagaaccccaccggccccacagagggcagtgacagaagtgccagcagcctgaaccacaccatcctggccggcgtgcacagcaatgaccacagcgtggtgtag

SEQ ID NO: 158321 - DNA, 1095 bp, synthetic construct; identical to SEQ ID NO: 158320
  misc_feature 1..1095: note = Description of Artificial Sequence: Synthetic coding sequence
  source 1..1095: mol_type = other DNA

SEQ ID NO: 158322 - DNA, 1095 bp, synthetic construct; identical to SEQ ID NO: 158320
  misc_feature 1..1095: note = Description of Artificial Sequence: Synthetic coding sequence
  source 1..1095: mol_type = other DNA

SEQ ID NO: 158323 - DNA, 549 bp, synthetic construct
  misc_feature 1..549: note = Description of Artificial Sequence: Synthetic coding sequence
  source 1..549: mol_type = other DNA
atggccgccatcagcaccagcatccctgtgatcagccagccccagttcaccgccatgaatgagccccagtgcttctacaatgaaagcatcgccttcttctacaacagaagtggcaagcacctggccacagagtggaacacagtgtccaagctggtgatgggcctgggcatcaccgtgtgcatcttcatcatgctggccaacctgctggtgatggtggccatctacgtgaacagacgcttccacttccccatctactacctgatggccaacctggccgctgctgacttctttgctggcctggcctacttctacctgatgttcaacacaggccccaacacccggcggctgactgtgtccacctggctgctgcggcagggcctgattgacaccagcctgacagcctctgtggccaacctgctggccatcgccatcgagcggcacatcaccgtcttcaggatgcagctgcacaccaggatgagcaacagaagagtggtggtggtgattgtggtgatctggaccatggccatcgtgatgggcgccatcccctag

SEQ ID NO: 158324 - DNA, 1041 bp, synthetic construct
  misc_feature 1..1041: note = Description of Artificial Sequence: Synthetic coding sequence
  source 1..1041: mol_type = other DNA
atgaatgagccccagtgcttctacaatgaaagcatcgccttcttctacaacagaagtggcaagcacctggccacagagtggaacacagtgtccaagctggtgatgggcctgggcatcaccgtgtgcatcttcatcatgctggccaacctgctggtgatggtggccatctacgtgaacagacgcttccacttccccatctactacctgatggccaacctggccgctgctgacttctttgctggcctggcctacttctacctgatgttcaacacaggccccaacacccggcggctgactgtgtccacctggctgctgcggcagggcctgattgacaccagcctgacagcctctgtggccaacctgctggccatcgccatcgagcggcacatcaccgtcttcaggatgcagctgcacaccaggatgagcaacagaagagtggtggtggtgattgtggtgatctggaccatggccatcgtgatgggcgccatccccagcgtgggctggaactgcatctgtgacatcgagaactgcagcaacatggcccccctgtacagcgacagctacctggtgttctgggccatcttcaacctggtgacctttgtggtgatggtggtgctgtatgcccacatcttcggctacgtgcggcagaggaccatgaggatgagccgccacagcagcggccccaggaggaacagagacaccatgatgagcctgctgaagacagtggtgattgtgctgggcgccttcatcatctgctggaccccaggcctggtgctgctgctgctggatgtgtgctgcccccagtgtgatgtgctggcctatgagaagttcttcctgctgctggccgagttcaacagcgccatgaaccccatcatctacagctacagagacaaggagatgtctgccaccttccggcagatcctgtgctgccagaggtctgagaaccccaccggccccacagagggcagtgacagaagtgccagcagcctgaaccacaccatcctggccggcgtgcacagcaatgaccacagcgtggtgtag

SEQ ID NO: 158325 - DNA, 1098 bp, synthetic construct
  misc_feature 1..1098: note = Description of Artificial Sequence: Synthetic coding sequence
  source 1..1098: mol_type = other DNA
atggaggagggcgcccagaggtctggggccctgggcgccccccaccagttcaccgccatgaatgagccccagtgcttctacaatgaaagcatcgccttcttctacaacagaagtggcaagcacctggccacagagtggaacacagtgtccaagctggtgatgggcctgggcatcaccgtgtgcatcttcatcatgctggccaacctgctggtgatggtggccatctacgtgaacagacgcttccacttccccatctactacctgatggccaacctggccgctgctgacttctttgctggcctggcctacttctacctgatgttcaacacaggccccaacacccggcggctgactgtgtccacctggctgctgcggcagggcctgattgacaccagcctgacagcctctgtggccaacctgctggccatcgccatcgagcggcacatcaccgtcttcaggatgcagctgcacaccaggatgagcaacagaagagtggtggtggtgattgtggtgatctggaccatggccatcgtgatgggcgccatccccagcgtgggctggaactgcatctgtgacatcgagaactgcagcaacatggcccccctgtacagcgacagctacctggtgttctgggccatcttcaacctggtgacctttgtggtgatggtggtgctgtatgcccacatcttcggctacgtgcggcagaggaccatgaggatgagccgccacagcagcggccccaggaggaacagagacaccatgatgagcctgctgaagacagtggtgattgtgctgggcgccttcatcatctgctggaccccaggcctggtgctgctgctgctggatgtgtgctgcccccagtgtgatgtgctggcctatgagaagttcttcctgctgctggccgagttcaacagcgccatgaaccccatcatctacagctacagagacaaggagatgtctgccaccttccggcagatcctgtgctgccagaggtctgagaaccccaccggccccacagagggcagtgacagaagtgccagcagcctgaaccacaccatcctggccggcgtgcacagcaatgaccacagcgtggtgtag

SEQ ID NO: 158326 - DNA, 1098 bp, synthetic construct
  misc_feature 1..1098: note = Description of Artificial Sequence: Synthetic coding sequence
  source 1..1098: mol_type = other DNA
atgctgctgctgctgatcccagcccacagctctgtgctggagaatgagttcaccgccatgaatgagccccagtgcttctacaatgaaagcatcgccttcttctacaacagaagtggcaagcacctggccacagagtggaacacagtgtccaagctggtgatgggcctgggcatcaccgtgtgcatcttcatcatgctggccaacctgctggtgatggtggccatctacgtgaacagacgcttccacttccccatctactacctgatggccaacctggccgctgctgacttctttgctggcctggcctacttctacctgatgttcaacacaggccccaacacccggcggctgactgtgtccacctggctgctgcggcagggcctgattgacaccagcctgacagcctctgtggccaacctgctggccatcgccatcgagcggcacatcaccgtcttcaggatgcagctgcacaccaggatgagcaacagaagagtggtggtggtgattgtggtgatctggaccatggccatcgtgatgggcgccatccccagcgtgggctggaactgcatctgtgacatcgagaactgcagcaacatggcccccctgtacagcgacagctacctggtgttctgggccatcttcaacctggtgacctttgtggtgatggtggtgctgtatgcccacatcttcggctacgtgcggcagaggaccatgaggatgagccgccacagcagcggccccaggaggaacagagacaccatgatgagcctgctgaagacagtggtgattgtgctgggcgccttcatcatctgctggaccccaggcctggtgctgctgctgctggatgtgtgctgcccccagtgtgatgtgctggcctatgagaagttcttcctgctgctggccgagttcaacagcgccatgaaccccatcatctacagctacagagacaaggagatgtctgccaccttccggcagatcctgtgctgccagaggtctgagaaccccaccggccccacagagggcagtgacagaagtgccagcagcctgaaccacaccatcctggccggcgtgcacagcaatgaccacagcgtggtgtag

SEQ ID NO: 158327 - DNA, 1056 bp, synthetic construct
  misc_feature 1..1056: note = Description of Artificial Sequence: Synthetic coding sequence
  source 1..1056: mol_type = other DNA
atggtgatcatgggccagtgctactacaatgagaccatcggcttcttctacaacaacagcggcaaggagctgagcagccactggaggcccaaggatgtggtggtggtggccctgggcctgactgtgtctgtgctggtgctgctgaccaacctgctggtgattgctgccatcgccagcaacagacgcttccaccagcccatctactacctgctgggcaacctggccgctgctgacctgtttgctggggtggcctacctgttcctgatgttccacacaggccccaggacagcccggctgagcctggagggctggttcctgcggcagggcctgctggacaccagcctgacagcctctgtggccaccctgctggccatcgctgtggagcggcacaggtctgtgatggctgtgcagctgcacagccggctgccccggggccgggtggtgatgctgattgtgggcgtgtgggtggccgccctgggcctgggcctgctgcctgcccacagctggcactgcctgtgtgccctggaccgctgcagcaggatggcccccctgctgagccgcagctacctggccgtgtgggccctgagcagcctgctggtgttcctgctgatggtggccgtgtacacccgcatcttcttctacgtgagaagaagagtgcagaggatggccgagcacgtgtcctgccacccccgctaccgggagaccaccctgagcctggtgaagacagtggtgatcatcctgggcgcctttgtggtgtgctggaccccaggccaggtggtgctgctgctggatggcctgggctgtgagagctgcaatgtgctggccgtggagaagtacttcctgctgctggccgaggccaacagcctggtgaatgctgctgtgtacagctgcagagatgctgagatgaggaggaccttccggcggctgctgtgctgtgcctgcctgcggcagagcacccgggagagcgtgcactacaccagcagcgcccagggcggggccagcacccgcatcatgctgcctgaaaatggccaccccctgatggacagcaccctgtag

SEQ ID NO: 158328 - DNA, 1056 bp, synthetic construct; identical to SEQ ID NO: 158327
  misc_feature 1..1056: note = Description of Artificial Sequence: Synthetic coding sequence
  source 1..1056: mol_type = other DNA

SEQ ID NO: 158329 - DNA, 1062 bp, synthetic construct
  misc_feature 1..1062: note = Description of Artificial Sequence: Synthetic coding sequence
  source 1..1062: mol_type = other DNA
atgaatgaatgccactatgacaagcacatggacttcttctacaacagaagcaacacagacacagtggatgactggacaggcaccaagctggtgattgtgctgtgtgtgggcaccttcttctgcctcttcatcttcttcagcaacagcctggtgattgctgctgtgatcaagaacaggaagttccacttccccttctactacctgctggccaacctggccgctgctgacttctttgctggcatcgcctacgtgttcctgatgttcaacacaggccctgtgtccaagaccctgactgtgaaccgctggttcctgcggcagggcctgctggacagcagcctgacagccagcctgaccaacctgctggtgattgctgtggagcggcacatgagcatcatgaggatgagggtgcacagcaacctgaccaagaagagggtgaccctgctgatcctgctggtgtgggccatcgccatcttcatgggcgctgtgcccaccctgggctggaactgcctgtgcaacatcagcgcctgcagcagcctggcccccatctacagccgcagctacctggtgttctggacagtgagcaacctgatggccttcctgatcatggtggtggtgtacctgcgcatctacgtgtatgtgaagaggaagaccaacgtgctgagcccccacaccagcggcagcatcagcagaagaaggacccccatgaagctgatgaagacagtgatgacagtgctgggcgcctttgtggtgtgctggaccccaggcctggtggtgctgctgctggatggcctgaactgccggcagtgtggggtgcagcacgtgaagcgctggttcctgctgctggccctgctgaacagcgtggtgaaccccatcatctacagctacaaggatgaggacatgtatggcaccatgaagaagatgatctgctgcttcagccaggagaaccctgagcggcggcccagccgcatccccagcacagtgctgagcagaagtgacaccggcagccagtacattgaagattccatcagccagggcgctgtgtgcaacaagagcaccagctag

SEQ ID NO: 158330 - DNA, 1062 bp, synthetic construct; identical to SEQ ID NO: 158329
  misc_feature 1..1062: note = Description of Artificial Sequence: Synthetic coding sequence
  source 1..1062: mol_type = other DNA

SEQ ID NO: 158331 - DNA, 1113 bp, synthetic construct
  misc_feature 1..1113: note = Description of Artificial Sequence: Synthetic coding sequence
  source 1..1113: mol_type = other DNA
atgggagaccggcgcttcatcgacttccagttccaggacagcaacagcagcctgcggccccggctgggcaatgccacagccaacaacacctgcatcgtggatgacagcttcaagtacaacctgaatggagctgtgtacagcgtggtgttcatcctgggcctcatcaccaacagcgtgtccctgtttgtgttctgcttcaggatgaagatgagaagtgaaacagccatcttcatcaccaacctggccgtgtctgacctgctgtttgtgtgcaccctgcccttcaagatcttctacaacttcaacagacactggccctttggagacaccctgtgcaagatcagcggcacagccttcctgaccaacatctacggctccatgctgttcctgacctgcatctctgtggaccgcttcctggccatcgtgtaccccttccgcagcaggaccatccgcaccaggagaaattctgccatcgtgtgtgccggcgtgtggatcctggtgctgagcggcggcatcagcgccagcctcttcagcaccaccaacgtgaacaatgccaccaccacctgctttgagggcttcagcaagagggtgtggaagacctacctgagcaagatcaccatcttcatcgaggtggtgggcttcatcatccccctcatcctgaatgtgtcctgcagctctgtggtgctgcggaccctgaggaagccagccaccctgagccagatcggcaccaacaagaagaaggtgctgaagatgatcaccgtgcacatggctgtgtttgtggtgtgctttgtgccctacaacagcgtgctcttcctgtatgccctggtgcgcagccaggccatcaccaactgcttcctggagagatttgccaagatcatgtaccccatcaccctgtgcctggccaccctgaactgctgctttgaccccttcatctactacttcaccctggagagcttccagaagagcttctacatcaatgcccacatccgcatggagagcctcttcaagacagagacccccctgaccaccaagcccagcctgcctgccatccaggaggaggtgtctgaccagaccaccaacaacggcggggagctgatgctggagagcaccttctag

SEQ ID NO: 158332 - DNA, 1113 bp, synthetic construct; identical to SEQ ID NO: 158331
  misc_feature 1..1113: note = Description of Artificial Sequence: Synthetic coding sequence
  source 1..1113: mol_type = other DNA

SEQ ID NO: 158333 - DNA, 1119 bp, synthetic construct
  misc_feature 1..1119: note = Description of Artificial Sequence: Synthetic coding sequence
  source 1..1119: mol_type = other DNA
atgctggccaacagcagcagcaccaacagctctgtgctgccctgcccagactaccggcccacccaccggctgcacctggtggtgtacagcctggtgctggccgccggcctgcccctgaatgccctggccctgtgggtgttcctgcgggccctgcgggtgcacagcgtggtgtctgtgtacatgtgcaacctggccgccagtgacctgctcttcaccctgagcctgcctgtgcggctgagctactatgccctgcaccactggcccttcccagacctgctgtgccagaccactggagccatcttccagatgaacatgtatggcagctgcatcttcctgatgctgatcaacgtggacagatatgctgccatcgtgcaccccctgcggctgcggcacctgcggcggccccgggtggcccggctgctgtgcctgggcgtgtgggccctgatcctggtgtttgctgtgcctgctgcccgggtgcaccggcccagccgctgccgctacagagacctggaggtgcggctgtgctttgagagcttcagtgatgagctgtggaagggccgcctgctgcccctggtgctgctggccgaggccctgggcttcctgctgcccctggccgctgtggtgtacagcagcggccgggtcttctggaccctggcccggccagatgccacccagagccagaggaggaggaagacagtgcggctgctgctggccaacctggtgatcttcctgctgtgctttgtgccctacaacagcaccctggccgtgtatggcctgctgcggagcaagctggtggccgcctctgtgcctgcccgggacagagtgcggggcgtgctgatggtgatggtgctgctggccggggccaactgtgtgctggaccccctggtgtactacttctctgctgagggcttcaggaacaccctgcggggcctgggcaccccccaccgggcccggaccagcgccaccaacggcaccagggctgccctggcccagagcgagaggtctgctgtgaccacagatgccaccaggccagatgctgccagccagggcctgctgcggcccagcgacagccacagcctgagcagcttcacccagtgcccccaggacagcgccctgtag

SEQ ID NO: 158334 - DNA, 1119 bp, synthetic construct; identical to SEQ ID NO: 158333
  misc_feature 1..1119: note = Description of Artificial Sequence: Synthetic coding sequence
  source 1..1119: mol_type = other DNA

SEQ ID NO: 158335 - DNA, 1290 bp, synthetic construct
  misc_feature 1..1290: note = Description of Artificial Sequence: Synthetic coding sequence
  source 1..1290: mol_type = other DNA
atgctggccaacagcagcagcaccaacagctctgtgctgccctgcccagactaccggcccacccaccggctgcacctggtggtgtacagcctggtgctggccgccggcctgcccctgaatgccctggccctgtgggtgttcctgcgggccctgcgggtgcacagcgtggtgtctgtgtacatgtgcaacctggccgccagtgacctgctcttcaccctgagcctgcctgtgcggctgagctactatgccctgcaccactggcccttcccagacctgctgtgccagaccactggagccatcttccagatgaacatgtatggcagctgcatcttcctgatgctgatcaacgtggacagatatgctgccatcgtgcaccccctgcggctgcggcacctgcggcggccccgggtggcccggctgctgtgcctgggcgtgtgggccctgatcctggtgtttgctgtgcctgctgcccgggtgcaccggcccagccgctgccgctacagagacctggaggtgcggctgtgctttgagagcttcagtgatgagctgtggaagggccgcctgctgcccctggtgctgctggccgaggccctgggcttcctgctgcccctggccgctgtggtgtacagcagcggccgggtcttctggaccctggcccggccagatgccacccagagccagaggaggaggaagacagtgcggctgctgctggccaacctggtgatcttcctgctgtgctttgtgccctacaacagcaccctggccgtgtatggcctgctgcggagcaagctggtggccgcctctgtgcctgcccgggacagagtgcggggcgtgctgatggtgatggtgctgctggccggggccaactgtgtgctggaccccctggtgtactacttctctgctgagggcttcaggaacaccctgcggggcctgggcaccccccaccgggcccggaccagcgccaccaacggcaccagggctgccctggcccagagcgagaggtctgctgtgaccacagatgccaccaggccagatgctgccagccagggcctgctgcggcccagcgacagccacagcctgagcagcttcacccacgccatcgccctgtctgtgcctgacagccagaggctgtccttctgggaggcctacagagtgtacacccaggagggcggcctgggcacctggaccttcggctggcagttccagctgagcaatgctgaggagtacaaggtgtggaagccaggcccccgggagggcagcgctgctggaaatggcttcttcaagctgtag

SEQ ID NO: 158336 - DNA, 1605 bp, synthetic construct
  misc_feature 1..1605: note = Description of Artificial Sequence: Synthetic coding sequence
  source 1..1605: mol_type = other DNA
atgaggctgcggggctgcggcccccgggccgccccagccagcagcgctggggccagtgatgcccggctgctggcccctcctggaagaaacccctttgtgcatgagctgcggctgagcgccctgcagaaggcccaggtggccctgatgaccctgaccctcttccctgtgcggctgctggtggccgccgccatgatgctgctggcctggcccctggccctggtggccagcctgggcagcgctgagaaggagcctgagcagcccccagccctgtggaggaaggtggtggacttcctgctgaaggccatcatgaggaccatgtggtttgctgggggcttccaccgggtggccgtgaagggccggcaggccctgcccacagaagctgccatcctgaccctggccccccacagcagctactttgatgccatccctgtgaccatgaccatgagcagcatcgtgatgaaggccgagagccgggacatccccatctggggcaccctcatccagtacatccggcctgtgtttgtgtccagaagtgaccaggacagcaggaggaagacagtggaggagatcaagaggcgggcccagagcaatggcaagtggccccagatcatgatcttccctgagggcacctgcaccaacagaacctgcctgatcaccttcaagccaggggccttcatccctggggcccctgtgcagcctgtggtgctgcgctaccccaacaagctggacaccatcacctggacctggcagggccctggggccctggagatcctgtggctgaccctgtgccagttccacaaccaggtggagattgagttcctgcctgtgtacagccccagcgaggaggagaagagaaatcctgccctgtatgccagcaatgtgagaagagtgatggccgaggccctgggcgtgtctgtgacagactacacctttgaggactgccagctggccctggccgagggccagctgcggctgcctgctgacacctgcctgctggagtttgcccggctggtgcggggcctgggcctgaagccagagaagctggagaaggacctggaccgctacagcgagcgggccaggatgaagggcggggagaagattggaattgctgagtttgctgccagcctggaggtgcctgtgtctgacctgctggaggacatgttcagcctgtttgatgagagcggcagcggggaggtggacctgagagaatgtgtggtggccctgtctgtggtgtgcaggcctgcccggaccctggacaccatccagctggccttcaagatgtacggggcccaggaggatggctctgtgggggagggggacctgagctgcatcctgaagacagccctgggcgtggccgagctgactgtgacagacctcttccgggccatcgaccaggaggagaagggcaagatcacctttgctgacttccacagatttgctgagatgtacccagcctttgctgaggagtacctgtacccagaccagacccactttgagagctgtgccgagaccagccctgcccccatccccaacggcttctgtgccgacttcagccctgagaacagtgatgctggcaggaagcctgtgaggaagaagctggactag

SEQ ID NO: 158337 - DNA, 1605 bp, synthetic construct; identical to SEQ ID NO: 158336
  misc_feature 1..1605: note = Description of Artificial Sequence: Synthetic coding sequence
  source 1..1605: mol_type = other DNA

SEQ ID NO: 158338 - DNA, 1464 bp, synthetic construct
  misc_feature 1..1464: note = Description of Artificial Sequence: Synthetic coding sequence
  source 1..1464: mol_type = other DNA
atggccagcagcgcagaaggagatgagggcaccgtggtggccctggccggcgtgctgcagagcggcttccaggagctgagcctgaacaagctggccaccagcctgggcgccagcgagcaggccctgcggctcatcatcagcatcttcctgggctacccctttgccctcttctaccgccactacctgttctacaaggagacctacctgatccacctgttccacaccttcaccggcctgagcatcgcctacttcaactttggaaaccagctgtaccacagcctgctgtgcatcgtgctgcagttcctgatcctgcggctgatgggccgcaccatcacagctgtgctgaccaccttctgcttccagatggcctacctgctggccggctactactacacagccaccggcaactatgacatcaagtggaccatgccccactgtgtgctgaccctgaagctgattggcctggccgtggactactttgatggcggcaaggaccagaacagcctgagcagcgagcagcagaagtatgccatccggggcgtgcccagcctgctggaggtggccggcttctcctacttctacggggccttcctggtgggcccccagttctccatgaaccactacatgaagctggtgcagggcgagctgattgacatccctgggaagatccccaacagcatcatcccagccctgaagaggctgagcctgggcctcttctacctggtgggctacaccctgctgagcccccacatcacagaggactacctgctgacagaagattatgacaaccaccccttctggttccgctgcatgtacatgctgatctggggcaagtttgtgctgtacaagtatgtgacctgctggctggtgacagaaggagtgtgcatcctgaccggcctgggcttcaatggatttgaggagaagggcaaggccaagtgggatgcctgtgccaacatgaaggtgtggctgtttgagaccaacccccgcttcaccggcaccatcgccagcttcaacatcaacaccaatgcctgggtggcccgctacatcttcaagaggctgaagttcctgggcaacaaggagctgagccagggcctgagcctgctcttcctggccctgtggcacggcctgcacagcggctacctggtgtgcttccagatggagttcctgattgtcatcgtggagcggcaggccgcccggctcatccaggagagccccaccctgagcaagctggccgccatcaccgtgctgcagcccttctactacctggtgcagcagaccatccactggctgttcatgggctacagcatgacagccttctgcctcttcacctgggacaagtggctgaaggtgtacaagagcatctacttcctgggccacatcttcttcctgagcctgctcttcatcctgccctacatccacaaggccatggtgcccaggaaggagaagctgaagaagatggagtag

SEQ ID NO: 158339 - DNA, 1575 bp, synthetic construct
  misc_feature 1..1575: note = Description of Artificial Sequence: Synthetic coding sequence
  source 1..1575: mol_type = other DNA
atgagccagggcagccctggggactgggcccccctggaccccaccccaggccccccagccagccccaacccctttgtgcatgagctgcacctgagccggctgcagagggtgaagttctgcctgctgggcgccctgctggcccccatccgggtgctgctggccttcatcgtgctcttcctgctgtggccctttgcctggctgcaggtggccggcctgtctgaggagcagctgcaggagcccatcaccggctggaggaagacagtgtgccacaatggagtgctgggcctgagccggctgctcttcttcctgctgggcttcctgcgcatccgggtgcggggccagagggccagccggctgcaggcccctgtgctggtggccgccccccacagcaccttctttgaccccatcgtgctgctgccctgtgacctgcccaaggtggtgtccagagctgagaacctgtctgtgcctgtgattggagccctgctgcgcttcaaccaggccatcctggtgtccagacatgaccctgccagcagaagaagagtggtggaggaggtgagaagaagagccaccagcggcggcaagtggccccaggtgctcttcttccctgagggcacctgcagcaacaagaaggccctgctgaagttcaagccaggggccttcatcgccggcgtgcctgtgcagcctgtgctgatccgctaccccaacagcctggacaccacctcctgggcctggaggggccctggggtgctgaaggtgctgtggctgacagccagccagccctgcagcatcgtggatgtggagttcctgcctgtgtaccaccccagccctgaggagagccgggaccccaccctgtatgccaacaacgtgcagagggtgatggcccaggccctgggcatcccagccacagaatgtgaatttgtgggcagcctgcctgtgattgtggtgggccgcctgaaggtggccctggagccccagctgtgggagctgggcaaggtgctgaggaaggccggcctgtctgctggctacgtggatgctggagctgagcccggccgcagcaggatgatcagccaggaggagtttgcccggcagctgcagctgagtgacccccagacagtggccggggccttcggctacttccagcaggacaccaagggcctggtggacttcagagatgtggccctggccctggccgccctggatggcggccgcagcctggaggagctgacccggctggcctttgagctgtttgctgaggagcaggccgagggccccaaccggctgctgtacaaggatggcttcagcaccatcctgcacctgctgctgggcagcccccaccctgctgccacagccctgcatgctgagctgtgccaggccggcagcagccagggcctgagcctgtgccagttccagaacttcagcctgcatgaccccctgtatggcaagctgttcagcacctacctgcggcccccccacaccagccggggcaccagccagaccccaaatgccagcagccctggcaaccccacagccctggccaatggaacagtgcaggcccccaagcagaagggggactag

SEQ ID NO: 158340 - DNA, 693 bp, synthetic construct
  misc_feature 1..693: note = Description of Artificial Sequence: Synthetic coding sequence
  source 1..693: mol_type = other DNA
atgtgtggcaacaacatgagcacccccctgcctgccatcgtgcctgctgccaggaaggccacagctgctgtgatcttcctgcacggcctgggggacaccggccacggctgggccgaggcctttgctggcatccgcagcagccacatcaagtacatctgcccccacgcccctgtgcggcctgtgaccctgaacatgaatgtggccatgcccagctggtttgacatcatcggcctgagcccagacagccaggaggatgaaagtggcatcaagcaggccgctgagaacatcaaggccctgattgaccaggaggtgaagaatggcatccccagcaaccgcatcatcctgggcggcttcagccagggcggggccctgagcctgtacacagccctgaccacccagcagaagctggccggcgtgacagccctgagctgctggctgcccctgcgggccagcttcccccagggccccatcggcggggccaacagagacatcagcatcctgcagtgccacggggactgtgaccccctggtgcccctgatgtttggcagcctgactgtggagaagctgaagaccctggtgaacccagccaacgtgaccttcaagacctatgagggcatgatgcacagcagctgccagcaggagatgatggatgtgaagcagttcatcgacaagctgctgccccccattgattag

SEQ ID NO: 158341 - DNA, 645 bp, synthetic construct
  misc_feature 1..645: note = Description of Artificial Sequence: Synthetic coding sequence
  source 1..645: mol_type = other DNA
atgtgtggcaacaacatgagcacccccctgcctgccatcgtgcctgctgccaggaaggccacagctgctgtgatcttcctgcacggcctgggggacaccggccacggctgggccgaggcctttgctggcatccgcagcagccacatcaagtacatctgcccccacgcctttgacatcatcggcctgagcccagacagccaggaggatgaaagtggcatcaagcaggccgctgagaacatcaaggccctgattgaccaggaggtgaagaatggcatccccagcaaccgcatcatcctgggcggcttcagccagggcggggccctgagcctgtacacagccctgaccacccagcagaagctggccggcgtgacagccctgagctgctggctgcccctgcgggccagcttcccccagggccccatcggcggggccaacagagacatcagcatcctgcagtgccacggggactgtgaccccctggtgcccctgatgtttggcagcctgactgtggagaagctgaagaccctggtgaacccagccaacgtgaccttcaagacctatgagggcatgatgcacagcagctgccagcaggagatgatggatgtgaagcagttcatcgacaagctgctgccccccattgattag

SEQ ID NO: 158342 - DNA, 1092 bp, synthetic construct
  misc_feature 1..1092: note = Description of Artificial Sequence: Synthetic coding sequence
  source 1..1092: mol_type = other DNA
atggagctgcacgagaggccagatgagaggaggaaggcccggaccagcacccagggccgcctgggggactggaggagagtgcatgctgatggcttcacccaccgggtgtggagcagcagctcctggctggagcccgccatgaccagcaggaccagggtgacctggcccagccccccccggcccctgcctgtgcctgctgctgctgctgtggccttcggggccaagggcacagatcctgctgaggcccggagcagccggggcatcgaggaggccggcccccgggcccacggccgggccggccgggagcctgagcggcggcgcagccggcagcagaggcggggcggcctgcaggcccggcgcagcaccctgctgaagacctgtgcccgggcccgggccacagcccctggggccatgaagatggtggccccctggacccgcttctacagcaacagctgctgcctgtgctgccacgtgaggacaggcaccatcctgctgggcgtgtggtacctgatcatcaatgctgtggtgctgctgatcctgctgagcgccctggccgaccctgaccagtacaacttcagcagcagcgagctgggcggggactttgagttcatggatgatgccaacatgtgcatcgccatcgccatcagcctgctgatgatcctgatctgtgccatggccacctacggggcctacaagcagagagctgcctggatcatccccttcttctgctaccagatctttgattttgccctgaacatgctggtggccatcaccgtgctgatctaccccaacagcatccaggagtacatccggcagctgccccccaacttcccctacagagatgatgtgatgtctgtgaaccccacctgcctggtgctgatcatcctgctcttcatcagcatcatcctgaccttcaagggctacctgatcagctgtgtgtggaactgctaccgctacatcaatggaagaaacagcagtgatgtgctggtgtatgtgaccagcaatgacaccaccgtgctgctgcccccctatgatgatgccaccgtgaatggagctgccaaggagcccccaccaccctacgtgtctgcctag

SEQ ID NO: 158343 - DNA, 954 bp, synthetic construct
  misc_feature 1..954: note = Description of Artificial Sequence: Synthetic coding sequence
  source 1..954: mol_type = other DNA
atgaccagcaggaccagggtgacctggcccagccccccccggcccctgcctgtgcctgctgctgctgctgtggccttcggggccaagggcacagatcctgctgaggcccggagcagccggggcatcgaggaggccggcccccgggcccacggccgggccggccgggagcctgagcggcggcgcagccggcagcagaggcggggcggcctgcaggcccggcgcagcaccctgctgaagacctgtgcccgggcccgggccacagcccctggggccatgaagatggtggccccctggacccgcttctacagcaacagctgctgcctgtgctgccacgtgaggacaggcaccatcctgctgggcgtgtggtacctgatcatcaatgctgtggtgctgctgatcctgctgagcgccctggccgaccctgaccagtacaacttcagcagcagcgagctgggcggggactttgagttcatggatgatgccaacatgtgcatcgccatcgccatcagcctgctgatgatcctgatctgtgccatggccacctacggggcctacaagcagagagctgcctggatcatccccttcttctgctaccagatctttgattttgccctgaacatgctggtggccatcaccgtgctgatctaccccaacagcatccaggagtacatccggcagctgccccccaacttcccctacagagatgatgtgatgtctgtgaaccccacctgcctggtgctgatcatcctgctcttcatcagcatcatcctgaccttcaagggctacctgatcagctgtgtgtggaactgctaccgctacatcaatggaagaaacagcagtgatgtgctggtgtatgtgaccagcaatgacaccaccgtgctgctgcccccctatgatgatgccaccgtgaatggagctgccaaggagcccccaccaccctacgtgtctgcctag

SEQ ID NO: 158344 - DNA, 681 bp, synthetic construct
  misc_feature 1..681: note = Description of Artificial Sequence: Synthetic coding sequence
  source 1..681: mol_type = other DNA
atgaagatggtggccccctggacccgcttctacagcaacagctgctgcctgtgctgccacgtgaggacaggcaccatcctgctgggcgtgtggtacctgatcatcaatgctgtggtgctgctgatcctgctgagcgccctggccgaccctgaccagtacaacttcagcagcagcgagctgggcggggactttgagttcatggatgatgccaacatgtgcatcgccatcgccatcagcctgctgatgatcctgatctgtgccatggccacctatggagcctacaagcagagagctgcctggatcatccccttcttctgctaccagatctttgattttgccctgaacatgctggtggccatcaccgtgctgatctaccccaacagcatccaggagtacatccggcagctgccccccaacttcccctacagagatgatgtgatgtctgtgaaccccacctgcctggtgctgatcatcctgctcttcatcagcatcatcctgaccttcaagggctacctgatcagctgtgtgtggaactgctaccgctacatcaatggaagaaacagcagtgatgtgctggtgtatgtgaccagcaatgacaccaccgtgctgctgcccccctatgatgatgccaccgtgaatggagctgccaaggagcccccaccaccctacgtgtctgcctag

SEQ ID NO: 158345 - DNA, 789 bp, synthetic construct
  misc_feature 1..789: note = Description of Artificial Sequence: Synthetic coding sequence
  source 1..789: mol_type = other DNA
atggacccccggctgagcacagtgcggcagacctgctgctgcttcaacgtgagaattgccaccacagccctggccatctaccacgtgatcatgtctgtgctgctcttcatcgagcacagcgtggaggtggcccacggcaaggccagctgcaagctgagccagatgggctacctgagaattgctgacctgatcagcagcttcctgctgatcaccatgctgttcatcatcagcctgagcctgctgattggagtggtgaagaaccgggagaagtacctgctgcccttcctgagcctgcagatcatggactacctgctgtgcctgctgaccctgctgggcagctacatcgagctgcctgcctacctgaagctggccagccgcagccgggccagcagcagcaagttccccctgatgaccctgcagctgctggacttctgcctgagcatcctgaccctgtgcagcagctacatggaggtgcccacctacctgaacttcaagtccatgaaccacatgaactacctgcccagccaggaggacatgccccacaaccagttcatcaagatgatgatcatcttcagcatcgccttcatcaccgtgctgatcttcaaggtgtacatgtttaaatgtgtgtggcgctgctaccgcctcatcaagtgcatgaacagcgtggaggagaagaggaacagcaagatgctgcagaaggtggtgctgcccagctatgaggaggccctgagcctgcccagcaagaccccagagggcggccctgcccccccaccctacagcgaggtgtag

SEQ ID NO: 158346 - DNA, 873 bp, synthetic construct
  misc_feature 1..873: note = Description of Artificial Sequence: Synthetic coding sequence
  source 1..873: mol_type = other DNA
atggacccccggctgagcacagtgcggcagacctgctgctgcttcaacgtgagaattgccaccacagccctggccatctaccacgtgatcatgtctgtgctgctcttcatcgagcacagcgtggaggtggcccacggcaaggccagctgcaagctgagccagatgggctacctgagaattgctgacctgatcagcagcttcctgctgatcaccatgctgttcatcatcagcctgagcctgctgattggagtggtgaagaaccgggagaagtacctgctgcccttcctgagcctgcagatcatggactacctgctgtgcctgctgaccctgctgggcagctacatcgagctgcctgcctacctgaagctggccagccgcagccgggccagcagcagcaagttccccctgatgaccctgcagctgctggacttctgcctgagcatcctgaccctgtgcagcagctacatggaggtgcccacctacctgaacttcaagtccatgaaccacatgaactacctgcccagccaggaggacatgccccacaaccagttcatcaagatgatgatcatcttcagcatcgccttcatcaccgtgctgatcttcaaggtgtacatgtttaaatgtgtgtggcgctgctaccgcctcatcaagtgcatgaacagcgtggaggagaagaggaacagcaagatgctgcagaaggtggtgctgcccagctatgaggaggccctgagccctgctggccctgtgtcctgcagccagctgggccagcgcttccggctgagccacagcagcggcctgagcatcatccagcccaacaatgcctggttcatcagcatcagcagtgacacctgcctggatgactggcccttctag

SEQ ID NO: 158347 - DNA, 11406 bp, synthetic construct
  misc_feature 1..11406: note = Description of Artificial Sequence: Synthetic coding sequence
  source 1..11406: mol_type = other DNA
atgagcacagacagcaacagcctggcccgggagttcctgacagatgtgaaccggctgtgcaatgctgtggtgcagagggtggaggcccgggaggaggaggaggaggagacccacatggccaccctgggccagtacctggtgcacggccggggcttcctgctgctgaccaagctgaacagcatcatcgaccaggccctgacctgccgggaggagctgctgaccctgctgctgagcctgctgcccctggtgtggaagatccctgtgcaggaggagaaggccacagacttcaacctgcccctgtctgctgacatcatcctgaccaaggagaagaacagcagcagccagaggagcacccaggagaagctgcacctggagggcagcgccctgagcagccaggtgtctgccaaggtgaatgtgttcaggaagagccggcggcagaggaagatcacccaccgctacagcgtgagagatgccaggaagacccagctgagcaccagtgacagcgaggccaacagtgatgagaagggcatcgccatgaacaagcacagaagaccccacctgctgcaccacttcctgaccagcttccccaagcaggaccaccccaaggccaagctggaccggctggccaccaaggagcagaccccaccagatgccatggccctggagaacagccgggagatcatcccccggcagggcagcaacacagacatcctgtctgagcctgctgccctgagcgtcatcagcaacatgaacaacagcccctttgacctgtgccacgtgctgctgagcctgctggagaaggtgtgcaagtttgatgtgaccctgaaccacaacagccccctggccgcctctgtggtgcccaccctgacagagttcctggccggctttggagactgctgcagcctgagtgacaacctggagagccgggtggtgtctgctggctggacagaggagcctgtggccctgatccagaggatgctgttcagaacagtgctgcacctgctgtctgtggatgtgtccacagctgagatgatgcctgagaacctgaggaagaacctgacagagctgctgcgggccgccctgaagatccgcatctgcctggagaagcagcctgacccctttgccccccggcagaagaagaccctgcaggaggtgcaggaggactttgtgttcagcaagtaccgccaccgggccctgctgctgcctgagctgctggagggcgtgctgcagatcctgatctgctgcctgcagagcgctgccagcaaccccttctacttcagccaggccatggacctggtgcaggagttcatccagcaccacggcttcaacctgtttgaaacagctgtgctgcagatggagtggctggtgctgagagatggagtgcccccagaggccagcgagcacctgaaggccctgatcaacagcgtgatgaagatcatgagcacagtgaagaaggtgaagtctgagcagctgcaccacagcatgtgcaccaggaagaggcaccggcgctgtgagtacagccacttcatgcaccaccaccgggacctgagcggcctgctggtgtctgccttcaagaaccaggtgtccaagaacccctttgaggagacagcagatggagatgtgtactacccagagcgctgctgctgcatcgctgtgtgtgcccaccagtgcctgcggctgctgcagcaggccagcctgagcagcacctgtgtgcagatcctgtctggagtgcacaacatcggcatctgctgctgcatggaccccaagagcgtcatcatccccctgctgcacgccttcaagctgcctgccctgaagaacttccagcagcacatcctgaacatcctgaacaagctgatcctggaccagctgggcggcgctgagatcagccccaagatcaagaaggccgcctgcaacatctgcaccgtggacagcgaccagctggcccagctggaggagaccctgcagggcaacctgtgtgatgctgagctgagcagcagcctgagcagccccagctaccgcttccagggcatcctgcccagcagcggcagcgaggacctgctgtggaagtgggatgccctgaaggcctaccagaactttgtgtttgaagaagatcggctgcacagcatccagatcgccaaccacatctgcaacctgatccagaagggcaacatcgtggtgcagtggaagctgtacaactacatcttcaaccctgtgctgcagaggggcgtggagctggcccaccactgccagcacctgtctgtgaccagcgcccagagccacgtgtgcagccaccacaaccagtgcctgccccaggatgtgctgcagatctacgtgaagaccctgcccatcctgctgaagagcagggtcatccgggacctcttcctgagctgcaatggagtgtcccagatcatcgagctgaactgcctgaatggcatccgcagccacagcctgaaggcctttgagaccctcatcatcagcctgggggagcagcagaaggatgcctctgtgcctgacattgatggcatcgacatcgagcagaaggagctgagctctgtgcacgtgggcaccagcttccaccaccagcaggcctacagcgacagcccccagagcctgagcaagttctacgccggcctgaaggaggcctaccccaagaggaggaagacagtgaaccaggatgtgcacatcaacaccatcaacctcttcctgtgtgtggccttcctgtgtgtgtccaaggaggccgagagtgaccgggagagcgccaatgattctgaggacaccagcggctatgacagcacagccagcgagcccctgagccacatgctgccctgcatcagcctggagagcctggtgctgcccagccctgagcacatgcaccaggccgctgacatctggagcatgtgccgctggatctacatgctgagctctgtgttccagaagcagttctaccgcctgggcggcttccgggtgtgccacaagctgatcttcatgatcatccagaagctgttccgcagccacaaggaggagcagggcaagaaggagggggacacctctgtgaatgaaaaccaggacctgaaccgcatcagccagcccaagaggaccatgaaggaggacctgctgagcctggccatcaagagtgaccccatccccagcgagctgggcagcctgaagaagtctgctgacagcctgggcaagctggagctgcagcacatcagcagcatcaacgtggaggaggtgtctgccacagaagctgcccctgaggaggccaagctgttcaccagccaggagagcgagaccagcctgcagagcatccggctgctggaggccctgctggccatctgcctgcatggagcccggaccagccagcagaagatggagctggagctgcccaaccagaacctgtctgtggagagcatcctgtttgagatgagggaccacctgagccagagcaaggtgattgagacccagctggccaagcccctgtttgatgccctgctgcgggtggccctgggcaactacagcgctgactttgagcacaatgatgccatgacagagaagagccaccagagcgctgaggagctgagcagccagcccggggacttcagcgaggaggccgaggacagccagtgctgcagcttcaagctgctggtggaggaggagggctatgaagctgacagcgagagcaacccagaagatggagagacccaggatgatggagtggacctgaagtcagaaacagagggcttcagcgccagcagcagccccaatgacctgctggagaacctgacccagggcgagatcatctacccagagatctgcatgctggagctgaacctgctgagcgccagcaaggccaagctggatgtgctggcccacgtgtttgagagcttcctgaagatcatccggcagaaggagaagaatgtgttcctgctgatgcagcagggcaccgtgaagaacctgctgggcggcttcctgagcatcctgacccaggatgacagcgacttccaggcctgccagagggtgctggtggacctgctggtgtccctgatgagcagcaggacctgcagcgaggagctgaccctgctgctgcgcatcttcctggagaagagcccctgcaccaagatcctgctgctgggcatcctgaagatcattgaaagtgacaccaccatgagccccagccagtacctgaccttccccctgctgcacgcccccaacctgagcaatggagtgagcagccagaagtacccaggcatcctgaacagcaaggccatgggcctgctgcggcgggcccgggtgagccgcagcaagaaggaggccgaccgggagagcttcccccaccggctgctgagctcctggcacatcgcccctgtgcacctgcccctgctgggccagaactgctggccccacctgtctgagggcttctctgtgtccctgtggttcaacgtggagtgcatccatgaagctgagagcaccacagagaagggcaagaagatcaagaagaggaacaagagcctcatcctgcctgacagcagctttgatggaacagaaagtgacaggcctgagggcgctgagtacatcaaccctggagagcggctcatcgaggagggctgcatccacatcatcagcctgggcagcaaggccctgatgatccaggtgtgggccgacccccacaatgccaccctcatcttccgggtgtgcatggacagcaatgatgacatgaaggctgtgctgctggcccaggtggagagccaggagaacatcttcctgcccagcaagtggcagcacctggtgctgacctacctgcagcagccccagggcaagaggcgcatccacggcaagatcagcatctgggtgtctggccagaggaagccagatgtgaccctggacttcatgctgcccaggaagaccagcctgagcagtgacagcaacaagaccttctgcatgattggccactgcctgagcagccaggaggagttcctgcagctggccggcaagtgggacctgggcaacctgctgctcttcaacggggccaaggtgggcagccaggaggccttctacctgtatgcctgtggccccaaccacacctctgtgatgccctgcaagtatggcaagcctgtgaatgactacagcaagtacatcaacaaggagatcctgcgctgtgagcagatccgggagctgttcatgaccaagaaggatgtggacatcggcctgctgattgagagcctgtctgtggtgtacaccacctactgcccagcccagtacaccatctatgagcccgtcatccggctgaagggccagatgaagacccagctgagccagaggcccttcagcagcaaggaggtgcagagcatcctgctggagccccaccacctgaagaacctgcagcccacagagtacaagaccatccagggcatcctgcacgagatcggcggcaccggcatctttgtgttcctgtttgcccgggtggtggagctgagcagctgtgaggagacccaggccctggccctgcgggtcatcctgagcctcatcaagtacaaccagcagagggtgcatgagctggagaactgcaatggcctgtccatgatccaccaggtgctgatcaagcagaagtgcatcgtgggcttctacatcctgaagaccctgctggagggctgctgcggggaggacatcatctacatgaatgaaaatggagagttcaagctggatgtggacagcaatgccatcatccaggatgtgaagctgctggaggagctgctgctggactggaagatctggagcaaggccgagcagggcgtgtgggagaccctgctggccgccctggaggtgctgatccgggctgaccaccaccagcagatgttcaacatcaagcagctgctgaaggcccaggtggtgcaccacttcctgctgacctgccaggtgctgcaggagtacaaggagggccagctgacccccatgccccgggaggtgtgccgcagctttgtgaagatcatcgccgaggtgctgggcagccccccagacctggagctgctgaccatcatcttcaacttcctgctggccgtgcacccccccaccaacacctacgtgtgccacaaccccaccaacttctacttcagcctgcacattgatggcaagatcttccaggagaaggtgcgcagcatcatgtacctgcggcacagcagcagcggcggccgcagcctgatgagccctggcttcatggtgatcagccccagcggcttcaccgccagcccctatgaaggagagaacagcagcaacatcatcccccagcagatggccgcccacatgctgcggagccgcagcctgcctgccttccccaccagcagcctgctgacccagagccagaagctgaccggcagcctgggctgcagcattgaccggctgcagaacattgctgacacctacgtggccacccagagcaagaagcagaacagcctgggcagcagtgacaccctgaagaagggcaaggaggatgccttcatcagcagctgtgagagcgccaagacagtgtgtgagatggaggccgtgctgagcgcccaggtgtctgtgtctgatgtgcccaagggcgtgctgggcttccctgtggtgaaggctgaccacaagcagctgggcgctgagcccaggagtgaagatgacagccctggagatgagagctgccccaggaggccagactacctgaagggcctggccagcttccagaggagccacagcaccatcgccagcctgggcctggccttccccagccagaatggcagcgctgctgtgggccgctggcccagcctggtggacaggaacacagatgactgggagaactttgcctacagcctgggctatgagcccaactacaacagaacagccagcgcccacagcgtgacagaggactgcctggtgcccatctgctgcggcctgtatgagctgctgagcggcgtgctgctgatcctgcctgatgtgctgctggaggatgtgatggacaagctgatccaggccgacaccctgctggtgctggtgaaccaccccagccctgccatccagcagggcgtcatcaagctgctggatgcctactttgcccgggccagcaaggagcagaaggacaagttcctgaagaacagaggcttcagcctgctggccaaccagctgtacctgcaccggggcacccaggagctgctggagtgcttcatcgagatgttcttcggccgccacatcggcctggatgaggagtttgacctggaggatgtgaggaacatgggcctcttccagaagtggagcgtcatccccatcctgggcctcatcgagaccagcctgtatgacaacatcctgctgcacaatgccctgctgctgctgctgcagatcctgaacagctgcagcaaggtggccgacatgctgctggacaatggcctgctgtatgtgctgtgcaacacagtggccgccctgaatggcctggagaagaacatccccatgtctgagtacaagctgctggcctgtgacatccagcagctgttcatcgctgtgaccatccacgcctgcagcagcagcggcagccagtacttccgggtgattgaggacctgattgtgatgctgggctacctgcagaacagcaagaacaagaggacccagaacatggctgtggccctgcagctgcgggtgctgcaggccgccatggagttcatccgcaccacagccaaccacgacagcgagaacctgacagacagcctgcagagccccagcgccccccaccacgctgtggtgcagaagaggaagagcattgctggccccaggaagttccccctggcccagacagagagcctgctgatgaagatgaggtctgtggccaatgatgagctgcacgtgatgatgcagaggaggatgagccaggagaaccccagccaggccacagaaacagagctggcccagaggctgcagaggctgactgtgctggccgtgaaccgcatcatctaccaggagttcaacagcgacatcatcgacatcctgcggaccccagaaaatgtgacccagagcaagacctctgtgttccagacagagatcagcgaggagaacatccaccacgagcagagcagcgtcttcaaccccttccagaaggagatcttcacctacctggtggagggcttcaaggtgtccatcggcagcagcaaggccagcggcagcaagcagcagtggaccaagatcctgtggagctgcaaggagaccttcaggatgcagctgggccgcctgctggtgcacatcctgagccctgcccatgctgcccaggagaggaagcagatctttgaaattgtgcatgagcccaaccaccaggagatcctgcgggactgcctgagccccagcctgcagcacggggccaagctggtgctgtacctgtctgagctgatccacaaccaccagggcgagctgacagaggaggagctgggcacagctgagctgctgatgaatgccctgaagctgtgtggccacaagtgcatcccccccagcgccagcaccaaggctgacctgatcaagatgatcaaggaggagcagaagaagtatgaaacagaggagggcgtgaacaaggccgcctggcagaagacagtgaacaacaaccagcagagcctcttccagaggctggacagcaagagcaaggacatcagcaagattgctgctgacatcacccaggccgtgtccctgagccagggcaatgaaaggaagaaggtgatccagcacatccggggcatgtacaaggtggacctgagcgccagccgccactggcaggagctgatccagcagctgacccatgacagagctgtgtggtatgaccccatctactaccccacctcctggcagctggaccccacagagggccccaaccgggagcggcggcggctgcagcgctgctacctgaccatccccaacaagtacctgctgcgggaccggcagaagtcagaagatgtggtgaagccacccctgagctacctgtttgaggacaagacccacagcagcttcagcagcacagtgaaggacaaggccgccagcgagagcatccgggtgaacagacgctgcatctctgtggcccccagccgggagacagctggggagctgctgctgggcaaatgtggcatgtactttgtggaggacaatgccagtgacacagtggagagcagcagcctgcagggcgagctggagcccgccagcttctcctggacctatgaggagatcaaggaggtgcacaagcgctggtggcagctgcgggacaatgctgtggagatcttcctgaccaatggaagaaccctgctgctggcctttgacaacaccaaggtgagagatgatgtgtaccacaacatcctgaccaacaacctgcccaacctgctggagtatggcaacatcacagccctgaccaacctgtggtacacaggccagatcaccaactttgagtacctgacccacctgaacaagcatgctggccgctccttcaatgacctgatgcagtaccctgtgttccccttcatcctggccgactatgtgtctgagaccctggacctgaatgacctgctgatctacagaaacctgagcaagcccatcgctgtgcagtacaaggagaaggaggaccgctacgtggacacctacaagtacctggaggaggagtacagaaaaggagccagagaagatgaccccatgcctcctgtgcagccctaccactacggcagccactacagcaacagcggcaccgtgctgcacttcctggtgaggatgccacccttcaccaagatgttcctggcctaccaggaccagagctttgacatcccagacaggaccttccacagcaccaacaccacctggaggctgagcagctttgagagcatgacagatgtgaaggagctgatccctgagttcttctacctgcctgagttcctggtgaaccgggagggctttgattttggagtgcggcagaatggagagcgggtgaaccacgtgaacctgcccccctgggccagaaatgaccccaggctcttcatcctgatccaccggcaggccctggagagtgactatgtgtcccagaacatctgccagtggattgacctggtgtttggctacaagcagaagggcaaggcctctgtgcaggccatcaacgtgttccacccagccacctacttcggcatggatgtgtctgctgtggaggaccctgtgcagaggcgggccctggagaccatgatcaagacctacggccagaccccccggcagctgttccacatggcccacgtgtccaggcctggggccaagctgaacattgaaggagagctgcctgctgctgtgggcctgctggtgcagtttgccttccgggagacccgggagcaggtgaaggagatcacctaccccagccccctgtcctggatcaagggcctgaagtggggcgagtatgtgggcagccccagcgcccctgtgcctgtggtgtgcttcagccagccccatggagagagatttggcagcctgcaggccctgcccacccgggccatctgtggcctgagcaggaacttctgcctgctgatgacctacagcaaggagcagggcgtgcgctccatgaacagcacagacatccagtggagcgccatcctgtcctggggctacgccgacaacatcctgcggctgaagagcaagcagagcgagccccctgtgaacttcatccagagcagccagcagtaccaggtgaccagctgtgcctgggtgcctgacagctgccagctgttcaccggcagcaaatgtggggtcatcacagcctacaccaaccgcttcaccagcagcacccccagcgagattgagatggagacccagatccacctgtatggccacacagaggagatcaccagcctgtttgtgtgcaagccctacagcatcctgatctctgtgtccagagatggcacctgcatcatctgggacctgaaccggctgtgctacgtgcagagcctggccggccacaagagccctgtgacagctgtgtctgccagcgagaccagcggggacatcgccaccgtgtgtgacagcgctgggggcggcagtgacctgcggctgtggacagtgaatggagacctggtgggccacgtgcactgccgggagatcatctgcagcgtggccttcagcaaccagcctgagggcgtgtccatcaacgtgattgctgggggcctggagaatggcatcgtgcggctgtggagcacctgggacctgaagcctgtgcgggagatcaccttccccaagagcaacaagcccatcatcagcctgaccttcagctgtgatggccaccacctgtacacagccaacagtgatggcaccgtcatcgcctggtgcaggaaggaccagcagaggctgaagcagcccatgttctacagcttcctgagcagctatgctgctggatag

SEQ ID NO: 158348 - DNA, 11406 bp, synthetic construct; identical to SEQ ID NO: 158347
  misc_feature 1..11406: note = Description of Artificial Sequence: Synthetic coding sequence
  source 1..11406: mol_type = other DNA

SEQ ID NO: 158349 - DNA, 4149 bp, synthetic construct
  misc_feature 1..4149: note = Description of Artificial Sequence: Synthetic coding sequence
  source 1..4149: mol_type = other DNA
atgagcacagacagcaacagcctggcccgggagttcctgacagatgtgaaccggctgtgcaatgctgtggtgcagagggtggaggcccgggaggaggaggaggaggagacccacatggccaccctgggccagtacctggtgcacggccggggcttcctgctgctgaccaagctgaacagcatcatcgaccaggccctgacctgccgggaggagctgctgaccctgctgctgagcctgctgcccctggtgtggaagatccctgtgcaggaggagaaggccacagacttcaacctgcccctgtctgctgacatcatcctgaccaaggagaagaacagcagcagccagaggagcacccaggagaagctgcacctggagggcagcgccctgagcagccaggtgtctgccaaggtgaatgtgttcaggaagagccggcggcagaggaagatcacccaccgctacagcgtgagagatgccaggaagacccagctgagcaccagtgacagcgaggccaacagtgatgagaagggcatcgccatgaacaagcacagaagaccccacctgctgcaccacttcctgaccagcttccccaagcaggaccaccccaaggccaagctggaccggctggccaccaaggagcagaccccaccagatgccatggccctggagaacagccgggagatcatcccccggcagggcagcaacacagacatcctgtctgagcctgctgccctgagcgtcatcagcaacatgaacaacagcccctttgacctgtgccacgtgctgctgagcctgctggagaaggtgtgcaagtttgatgtgaccctgaaccacaacagccccctggccgcctctgtggtgcccaccctgacagagttcctggccggctttggagactgctgcagcctgagtgacaacctggagagccgggtggtgtctgctggctggacagaggagcctgtggccctgatccagaggatgctgttcagaacagtgctgcacctgctgtctgtggatgtgtccacagctgagatgatgcctgagaacctgaggaagaacctgacagagctgctgcgggccgccctgaagatccgcatctgcctggagaagcagcctgacccctttgccccccggcagaagaagaccctgcaggaggtgcaggaggactttgtgttcagcaagtaccgccaccgggccctgctgctgcctgagctgctggagggcgtgctgcagatcctgatctgctgcctgcagagcgctgccagcaaccccttctacttcagccaggccatggacctggtgcaggagttcatccagcaccacggcttcaacctgtttgaaacagctgtgctgcagatggagtggctggtgctgagagatggagtgcccccagaggccagcgagcacctgaaggccctgatcaacagcgtgatgaagatcatgagcacagtgaagaaggtgaagtctgagcagctgcaccacagcatgtgcaccaggaagaggcaccggcgctgtgagtacagccacttcatgcaccaccaccgggacctgagcggcctgctggtgtctgccttcaagaaccaggtgtccaagaacccctttgaggagacagcagatggagatgtgtactacccagagcgctgctgctgcatcgctgtgtgtgcccaccagtgcctgcggctgctgcagcaggccagcctgagcagcacctgtgtgcagatcctgtctggagtgcacaacatcggcatctgctgctgcatggaccccaagagcgtcatcatccccctgctgcacgccttcaagctgcctgccctgaagaacttccagcagcacatcctgaacatcctgaacaagctgatcctggaccagctgggcggcgctgagatcagccccaagatcaagaaggccgcctgcaacatctgcaccgtggacagcgaccagctggcccagctggaggagaccctgcagggcaacctgtgtgatgctgagctgagcagcagcctgagcagccccagctaccgcttccagggcatcctgcccagcagcggcagcgaggacctgctgtggaagtgggatgccctgaaggcctaccagaactttgtgtttgaagaagatcggctgcacagcatccagatcgccaaccacatctgcaacctgatccagaagggcaacatcgtggtgcagtggaagctgtacaactacatcttcaaccctgtgctgcagaggggcgtggagctggcccaccactgccagcacctgtctgtgaccagcgcccagagccacgtgtgcagccaccacaaccagtgcctgccccaggatgtgctgcagatctacgtgaagaccctgcccatcctgctgaagagcagggtcatccgggacctcttcctgagctgcaatggagtgtcccagatcatcgagctgaactgcctgaatggcatccgcagccacagcctgaaggcctttgagaccctcatcatcagcctgggggagcagcagaaggatgcctctgtgcctgacattgatggcatcgacatcgagcagaaggagctgagctctgtgcacgtgggcaccagcttccaccaccagcaggcctacagcgacagcccccagagcctgagcaagttctacgccggcctgaaggaggcctaccccaagaggaggaagacagtgaaccaggatgtgcacatcaacaccatcaacctcttcctgtgtgtggccttcctgtgtgtgtccaaggaggccgagagtgaccgggagagcgccaatgattctgaggacaccagcggctatgacagcacagccagcgagcccctgagccacatgctgccctgcatcagcctggagagcctggtgctgcccagccctgagcacatgcaccaggccgctgacatctggagcatgtgccgctggatctacatgctgagctctgtgttccagaagcagttctaccgcctgggcggcttccgggtgtgccacaagctgatcttcatgatcatccagaagctgttccgcagccacaaggaggagcagggcaagaaggagggggacacctctgtgaatgaaaaccaggacctgaaccgcatcagccagcccaagaggaccatgaaggaggacctgctgagcctggccatcaagagtgaccccatccccagcgagctgggcagcctgaagaagtctgctgacagcctgggcaagctggagctgcagcacatcagcagcatcaacgtggaggaggtgtctgccacagaagctgcccctgaggaggccaagctgttcaccagccaggagagcgagaccagcctgcagagcatccggctgctggaggccctgctggccatctgcctgcatggagcccggaccagccagcagaagatggagctggagctgcccaaccagaacctgtctgtggagagcatcctgtttgagatgagggaccacctgagccagagcaaggtgattgagacccagctggccaagcccctgtttgatgccctgctgcgggtggccctgggcaactacagcgctgactttgagcacaatgatgccatgacagagaagagccaccagagcgctgaggagctgagcagccagcccggggacttcagcgaggaggccgaggacagccagtgctgcagcttcaagctgctggtggaggaggagggctatgaagctgacagcgagagcaacccagaagatggagagacccaggatgatggagtggacctgaagtcagaaacagagggcttcagcgccagcagcagccccaatgacctgctggagaacctgacccagggcgagatcatctacccagagatctgcatgctggagctgaacctgctgagcgccagcaaggccaagctggatgtgctggcccacgtgtttgagagcttcctgaagatcatccggcagaaggagaagaatgtgttcctgctgatgcagcagggcaccgtgaagaacctgctgggcggcttcctgagcatcctgacccaggatgacagcgacttccaggcctgccagagggtgctggtggacctgctggtgtccctgatgagcagcaggacctgcagcgaggagctgaccctgctgctgcgcatcttcctggagaagagcccctgcacccgggccacagaccagaaggtgcagagcacctag

SEQ ID NO: 158350 - DNA, 1254 bp, synthetic construct
  misc_feature 1..1254: note = Description of Artificial Sequence: Synthetic coding sequence
  source 1..1254: mol_type = other DNA
atggccgcccctggcagcgcccggcggcccctgctgctgctgctgctgctgctgctgctgggcctgatgcactgtgccagcgctgccatgttcatggtgaagaatggaaatggaacagcctgcatcatggccaacttctctgctgccttctctgtgaactatgacaccaagagcggccccaagaacatgacctttgacctgcccagtgatgccaccgtggtgctgaacagaagcagctgtgggaaggagaacaccagtgaccccagcctggtgattgccttcggccggggccacaccctgaccctgaacttcaccagaaatgccacccgctacagcgtgcagctgatgagctttgtgtacaacctgagtgacacccacctgttccccaatgccagcagcaaggagatcaagacagtggagagcatcacagacatccgggctgacatcgacaagaagtaccgctgtgtgtctggcacccaggtgcacatgaacaacgtgacagtgaccctgcatgatgccaccatccaggcctacctgagcaacagcagcttcagcagaggagagacccgctgtgagcaggaccggcccagccccaccacagcccccccagccccacccagccccagccccagccctgtgcccaagagccccagcgtggacaagtacaacgtgtctggcaccaacggcacctgcctgctggcctccatgggcctgcagctgaacctgacctatgaaaggaaggacaacaccaccgtgacccggctgctgaacatcaaccccaacaagaccagcgccagcggcagctgtggggcccacctggtgaccctggagctgcacagcgagggcaccaccgtgctgctcttccagtttggcatgaatgccagcagcagccgcttcttcctgcagggcatccagctgaacaccatcctgcctgatgcccgggaccctgccttcaaggccgccaacggcagcctgcgggccctgcaggccaccgtgggcaacagctacaagtgcaatgctgaggagcacgtgcgggtgaccaaggccttctctgtgaacatcttcaaggtgtgggtgcaggccttcaaggtggagggcggccagtttggatctgtggaggagtgcctgctggatgaaaattccatgctgatccccatcgctgtgggcggggccctggccggcctggtgctgattgtgctgattgcctacctggtgggcaggaagaggagccacgccggctaccagaccatctag

SEQ ID NO: 158351 - DNA, 1095 bp, synthetic construct
  misc_feature 1..1095: note = Description of Artificial Sequence: Synthetic coding sequence
  source 1..1095: mol_type = other DNA
atggccgcccctggcagcgcccggcggcccctgctgctgctgctgctgctgctgctgctgggcctgatgcactgtgccagcgctgccatgttcatggtgaagaatggaaatggaacagcctgcatcatggccaacttctctgctgccttctctgtgaactatgacaccaagagcggccccaagaacatgacctttgacctgcccagtgatgccaccgtggtgctgaacagaagcagctgtgggaaggagaacaccagtgaccccagcctggtgattgccttcggccggggccacaccctgaccctgaacttcaccagaaatgccacccgctacagcgtgcagctgatgagctttgtgtacaacctgagtgacacccacctgttccccaatgccagcagcaaggagacccgctgtgagcaggaccggcccagccccaccacagcccccccagccccacccagccccagccccagccctgtgcccaagagccccagcgtggacaagtacaacgtgtctggcaccaacggcacctgcctgctggcctccatgggcctgcagctgaacctgacctatgaaaggaaggacaacaccaccgtgacccggctgctgaacatcaaccccaacaagaccagcgccagcggcagctgtggggcccacctggtgaccctggagctgcacagcgagggcaccaccgtgctgctcttccagtttggcatgaatgccagcagcagccgcttcttcctgcagggcatccagctgaacaccatcctgcctgatgcccgggaccctgccttcaaggccgccaacggcagcctgcgggccctgcaggccaccgtgggcaacagctacaagtgcaatgctgaggagcacgtgcgggtgaccaaggccttctctgtgaacatcttcaaggtgtgggtgcaggccttcaaggtggagggcggccagtttggatctgtggaggagtgcctgctggatgagaacagcatgctgatccccatcgctgtgggcggggccctggccggcctggtgctgattgtgctgattgcctacctggtgggcaggaagaggagccatgctggctaccagaccatctag

SEQ ID NO: 158352 - DNA, 1233 bp, synthetic construct
  misc_feature 1..1233: note = Description of Artificial Sequence: Synthetic coding sequence
  source 1..1233: mol_type = other DNA
atggtgtgcttccgcctcttccctgtgcccggcagcggcctggtgctggtgtgcctggtgctgggcgctgtgcgctcctatgccctggagctgaacctgacagacagtgaaaatgccacctgcctgtatgccaagtggcagatgaacttcaccgtgcgctatgagaccaccaacaagacctacaagacagtgaccatcagtgaccatggaacagtgacctacaacggcagcatctgtggagatgaccagaatggccccaagattgctgtgcagtttggacctggcttctcctggatcgccaacttcaccaaggccgccagcacctacagcattgattctgtgtccttctcctacaacacaggagacaacaccaccttcccagatgctgaggacaagggcatcctgactgtggatgagctgctggccatccgcatccccctgaatgacctcttccgctgcaacagcctgagcaccctggagaagaatgatgtggtgcagcactactgggatgtgctggtgcaggcctttgtgcagaatggaacagtgtccaccaatgagttcctgtgtgacaaggacaagaccagcacagtggcccccaccatccacaccaccgtgcccagccccaccaccacccccacccccaaggagaagccagaggccggcacctacagcgtgaacaatggaaatgacacctgcctgctggccaccatgggcctgcagctgaacatcacccaggacaaggtggccagcgtcatcaacatcaaccccaacaccacccacagcacaggcagctgccgcagccacacagccctgctgcggctgaacagcagcaccatcaagtacctggactttgtgtttgctgtgaagaatgaaaatcgcttctacctgaaggaggtgaacatctccatgtacctggtgaatggatctgtgttcagcatcgccaacaacaacctgagctactgggatgcccccctgggcagcagctacatgtgcaacaaggagcagacagtgtctgtgtctggggccttccagatcaacacctttgacctgcgggtgcagcccttcaacgtgacccagggcaagtacagcacagcccaggactgcagcgcagatgatgacaacttcctggtgcccatcgctgtgggcgccgccctggccggcgtgctgatcctggtgctgctggcctacttcatcggcctgaagcaccaccacgccggctatgagcagttctag

SEQ ID NO: 158353 - DNA, 1233 bp, synthetic construct
  misc_feature 1..1233: note = Description of Artificial Sequence: Synthetic coding sequence
  source 1..1233: mol_type = other DNA
atggtgtgcttccgcctcttccctgtgcccggcagcggcctggtgctggtgtgcctggtgctgggcgctgtgcgctcctatgccctggagctgaacctgacagacagtgaaaatgccacctgcctgtatgccaagtggcagatgaacttcaccgtgcgctatgagaccaccaacaagacctacaagacagtgaccatcagtgaccatggaacagtgacctacaacggcagcatctgtggagatgaccagaatggccccaagattgctgtgcagtttggacctggcttctcctggatcgccaacttcaccaaggccgccagcacctacagcattgattctgtgtccttctcctacaacacaggagacaacaccaccttcccagatgctgaggacaagggcatcctgactgtggatgagctgctggccatccgcatccccctgaatgacctcttccgctgcaacagcctgagcaccctggagaagaatgatgtggtgcagcactactgggatgtgctggtgcaggcctttgtgcagaatggaacagtgtccaccaatgagttcctgtgtgacaaggacaagaccagcacagtggcccccaccatccacaccaccgtgcccagccccaccaccacccccacccccaaggagaagccagaggccggcacctacagcgtgaacaatggaaatgacacctgcctgctggccaccatgggcctgcagctgaacatcacccaggacaaggtggccagcgtcatcaacatcaaccccaacaccacccacagcacaggcagctgccgcagccacacagccctgctgcggctgaacagcagcaccatcaagtacctggactttgtgtttgctgtgaagaatgaaaatcgcttctacctgaaggaggtgaacatctccatgtacctggtgaatggatctgtgttcagcatcgccaacaacaacctgagctactgggatgcccccctgggcagcagctacatgtgcaacaaggagcagacagtgtctgtgtctggggccttccagatcaacacctttgacctgcgggtgcagcccttcaacgtgacccagggcaagtacagcacagcccaggagtgcagcctggatgatgacaccatcctgatccccatcatcgtgggcgccggcctgagcggcctcatcatcgtcatcgtcatcgcctacgtgattggccgcaggaagagctatgccggctaccagaccctgtag

SEQ ID NO: 158354 - DNA, 1236 bp, synthetic construct
  misc_feature 1..1236: note = Description of Artificial Sequence: Synthetic coding sequence
  source 1..1236: mol_type = other DNA
atggtgtgcttccgcctcttccctgtgcccggcagcggcctggtgctggtgtgcctggtgctgggcgctgtgcgctcctatgccctggagctgaacctgacagacagtgaaaatgccacctgcctgtatgccaagtggcagatgaacttcaccgtgcgctatgagaccaccaacaagacctacaagacagtgaccatcagtgaccatggaacagtgacctacaacggcagcatctgtggagatgaccagaatggccccaagattgctgtgcagtttggacctggcttctcctggatcgccaacttcaccaaggccgccagcacctacagcattgattctgtgtccttctcctacaacacaggagacaacaccaccttcccagatgctgaggacaagggcatcctgactgtggatgagctgctggccatccgcatccccctgaatgacctcttccgctgcaacagcctgagcaccctggagaagaatgatgtggtgcagcactactgggatgtgctggtgcaggcctttgtgcagaatggaacagtgtccaccaatgagttcctgtgtgacaaggacaagaccagcacagtggcccccaccatccacaccaccgtgcccagccccaccaccacccccacccccaaggagaagccagaggccggcacctacagcgtgaacaatggaaatgacacctgcctgctggccaccatgggcctgcagctgaacatcacccaggacaaggtggccagcgtcatcaacatcaaccccaacaccacccacagcacaggcagctgccgcagccacacagccctgctgcggctgaacagcagcaccatcaagtacctggactttgtgtttgctgtgaagaatgaaaatcgcttctacctgaaggaggtgaacatctccatgtacctggtgaatggatctgtgttcagcatcgccaacaacaacctgagctactgggatgcccccctgggcagcagctacatgtgcaacaaggagcagacagtgtctgtgtctggggccttccagatcaacacctttgacctgcgggtgcagcccttcaacgtgacccagggcaagtacagcacagcagaagaatgttctgctgacagcgacctgaacttcctgatccctgtggccgtgggcgtggccctgggcttcctgatcatcgtggtgttcatctcctacatgattggaagaaggaagagcaggacaggctaccagagcgtgtag

SEQ ID NO: 158355 - DNA, 903 bp, synthetic construct
  misc_feature 1..903: note = Description of Artificial Sequence: Synthetic coding sequence
  source 1..903: mol_type = other DNA
atggtgtgcttccgcctcttccctgtgcccggcagcggcctggtgctggtgtgcctggtgctgggcatcctgactgtggatgagctgctggccatccgcatccccctgaatgacctcttccgctgcaacagcctgagcaccctggagaagaatgatgtggtgcagcactactgggatgtgctggtgcaggcctttgtgcagaatggcaccgtgtccaccaatgagttcctgtgtgacaaggacaagaccagcacagtggcccccaccatccacaccaccgtgcccagccccaccaccacccccacccccaaggagaagccagaggccggcacctacagcgtgaacaatggaaatgacacctgcctgctggccaccatgggcctgcagctgaacatcacccaggacaaggtggccagcgtcatcaacatcaaccccaacaccacccacagcacaggcagctgccgcagccacacagccctgctgcggctgaacagcagcaccatcaagtacctggactttgtgtttgctgtgaagaatgaaaatcgcttctacctgaaggaggtgaacatctccatgtacctggtgaatggcagcgtcttcagcatcgccaacaacaacctgagctactgggatgcccccctgggcagcagctacatgtgcaacaaggagcagacagtgtctgtgtctggggccttccagatcaacacctttgacctgcgggtgcagcccttcaacgtgacccagggcaagtacagcacagctgaggagtgcagcgctgacagcgacctgaacttcctgatccctgtggccgtgggcgtggccctgggcttcctgatcatcgtggtgttcatctcctacatgattggccgcaggaagagcaggacaggctaccagagcgtgtag

SEQ ID NO: 158356 - DNA, 1092 bp, synthetic construct
  misc_feature 1..1092: note = Description of Artificial Sequence: Synthetic coding sequence
  source 1..1092: mol_type = other DNA
atgaacttcaccgtgcgctatgagaccaccaacaagacctacaagacagtgaccatcagtgaccacggcaccgtgacctacaacggcagcatctgtggagatgaccagaatggccccaagattgctgtgcagtttggacctggcttctcctggatcgccaacttcaccaaggccgccagcacctacagcattgacagcgtgtccttctcctacaacacaggagacaacaccaccttcccagatgctgaagataaaggcatcctgactgtggatgagctgctggccatccgcatccccctgaatgacctcttccgctgcaacagcctgagcaccctggagaagaatgatgtggtgcagcactactgggatgtgctggtgcaggcctttgtgcagaatggcaccgtgtccaccaatgagttcctgtgtgacaaggacaagaccagcacagtggcccccaccatccacaccaccgtgcccagccccaccaccacccccacccccaaggagaagccagaggccggcacctacagcgtgaacaatggaaatgacacctgcctgctggccaccatgggcctgcagctgaacatcacccaggacaaggtggccagcgtcatcaacatcaaccccaacaccacccacagcacaggcagctgccgcagccacacagccctgctgcggctgaacagcagcaccatcaagtacctggactttgtgtttgctgtgaagaatgaaaatcgcttctacctgaaggaggtgaacatctccatgtacctggtgaatggcagcgtcttcagcatcgccaacaacaacctgagctactgggatgcccccctgggcagcagctacatgtgcaacaaggagcagacagtgtctgtgtctggggccttccagatcaacacctttgacctgcgggtgcagcccttcaacgtgacccagggcaagtacagcacagcccaggagtgcagcctggatgatgacaccatcctgatccccatcatcgtgggcgccggcctgagcggcctcatcatcgtgattgtgattgcctacgtgattggaagaaggaagagctatgccggctaccagaccctgtag

SEQ ID NO: 158357 - DNA, 447 bp, synthetic construct
  misc_feature 1..447: note = Description of Artificial Sequence: Synthetic coding sequence
  source 1..447: mol_type = other DNA
atgaaggccctgattgtgctgggcctggtgctgctgtctgtgacagtgcagggcaaggtgtttgagcgctgtgagctggcccggaccctgaagaggctgggcatggatggctaccggggcatcagcctggccaactggatgtgcctggccaagtgggagagcggctacaacacccgggccaccaactacaatgctggggacaggagcacagattatggcatcttccagatcaacagccgctactggtgcaatgatggcaagaccccaggagctgtgaatgcctgccacctgagctgcagcgccctgctgcaggacaacattgctgatgctgtggcctgtgccaagagggtggtgcgggacccccagggcatccgggcctgggtggcctggaggaaccgctgccagaacagagatgtgcggcagtatgtgcagggctgcggcgtgtag

SEQ ID NO: 158358 - DNA, 585 bp, synthetic construct
  misc_feature 1..585: note = Description of Artificial Sequence: Synthetic coding sequence
  source 1..585: mol_type = other DNA
atgcaggatgcccccctgagctgcctgagccccaccaagtggagctctgtgtcctctgctgacagcacagagaagagcgccagcgctgctggcaccaggaacctgcccttccagttctgcctgcggcaggccctgaggatgaaggccgccggcatcctgaccctcatcggctgcctggtgactggagctgagagcaagatctacacccgctgcaagctggccaagatcttcagccgggccggcctggacaactactggggcttcagcctgggcaactggatctgcatggcctactatgaaagtggctacaacaccacagcccagacagtgctggatgatggcagcattgattatggcatcttccagatcaacagctttgcctggtgccggcggggcaagctgaaggagaacaaccactgccacgtggcctgcagcgccctggtgacagatgacctgacagatgccatcatctgtgccaagaagatcgtgaaggagacccagggcatgaactactggcagggctggaagaagcactgtgagggccgggacctgagtgactggaagaaggactgtgaggtgtcctag

SEQ ID NO: 158359 - DNA, 441 bp, synthetic construct
  misc_feature 1..441: note = Description of Artificial Sequence: Synthetic coding sequence
  source 1..441: mol_type = other DNA
atgaaggcctctgtggtgctgagcctgctgggctacctggtggtgcccagcggggcctacatcctgggccgctgcaccgtggccaagaagctgcatgatggcggcctggactactttgagggctacagcctggagaactgggtgtgcctggcctactttgagagcaagttcaaccccatggccatctatgagaacacccgggagggctacacaggcttcggcctcttccagatgaggggcagtgactggtgtggggaccatggaagaaaccgctgccacatgagctgcagcgccctgctgaaccccaacctggagaagaccatcaagtgtgccaagaccatcgtgaagggcaaggagggcatgggcgcctggcccacctggagccgctactgccagtacagcgacaccctggcccgctggctggatggctgcaagctgtag

SEQ ID NO: 158360 - DNA, 441 bp, synthetic construct; identical to SEQ ID NO: 158359
  misc_feature 1..441: note = Description of Artificial Sequence: Synthetic coding sequence
  source 1..441: mol_type = other DNA

SEQ ID NO: 158361 - DNA, 447 bp, synthetic construct
  misc_feature 1..447: note = Description of Artificial Sequence: Synthetic coding sequence
  source 1..447: mol_type = other DNA
atgaccaaggccctgctgatctacctggtgagcagcttcctggccctgaaccaggccagcctcatcagccgctgtgacctggcccaggtgctgcagctggaggacctggatggctttgagggctacagcctgagtgactggctgtgcctggcctttgtggagagcaagttcaacatcagcaagatcaatgaaaatgctgatggcagctttgattatggcctcttccagatcaacagccactactggtgcaatgactacaagagctacagcgagaacctgtgccacgtggactgccaggacctgctgaaccccaacctgctggccggcatccactgtgccaagagaattgtgtctggggcccggggcatgaacaactgggtggagtggaggctgcactgcagcggccggcccctcttctactggctgaccggctgccgcctgaggtag

SEQ ID NO: 158362 - DNA, 447 bp, synthetic construct; identical to SEQ ID NO: 158361
  misc_feature 1..447: note = Description of Artificial Sequence: Synthetic coding sequence
  source 1..447: mol_type = other DNA

SEQ ID NO: 158363 - DNA, 447 bp, synthetic construct; identical to SEQ ID NO: 158361
  misc_feature 1..447: note = Description of Artificial Sequence: Synthetic coding sequence
  source 1..447: mol_type = other DNA

SEQ ID NO: 158364 - DNA, 2952 bp, synthetic construct
  misc_feature 1..2952: note = Description of Artificial Sequence: Synthetic coding sequence
  source 1..2952: mol_type = other DNA
atggagatgaagctgcccggccaggagggctttgaggccagcagcgcccccaggaacatccccagcggggagctggacagcaacccagaccccggcaccggccccagcccagatggccccagcgacacagagagcaaggagctgggcgtgcccaaggaccccctgctcttcatccagctgaatgagctgctgggctggccccaggccctggagtggagggagaccggcagcagcagcgccagcctgctgctggacatgggagagatgcccagcatcaccctgagcacccacctgcaccaccgctgggtgctgtttgaggagaagctggaggtggccgccggccgctggagcgccccccacgtgcccaccctggccctgcccagcctgcagaagctgcggagcctgctggccgagggcctggtgctgctggactgcccagcccagagcctgctggagctggtggagcaggtgaccagggtggagagcctgagccctgagctgcggggccagctgcaggccctgctgctgcagaggccccagcactacaaccagaccaccggcacccggccctgctggggcagcacccaccccaggaaggccagtgacaatgaggaggcccccctgcgggagcagtgccagaaccccctgcggcagaagctgcccccaggagctgaggccggcaccgtgctggccggggagctgggcttcctggcccagcccctgggcgcctttgtgcggctgaggaaccctgtggtgctgggcagcctgacagaggtgtccctgcccagccgcttcttctgcctgctgctgggcccctgcatgctgggcaagggctaccacgagatgggccgggctgctgctgtgctgctgagtgacccccagttccagtggagcgtgcggcgggccagcaacctgcatgacctgctggccgccctggatgccttcctggaggaggtgacagtgctgcccccaggccgctgggaccccacagcccgcatccccccacccaagtgcctgcccagccagcacaagaggctgcccagccagcagcgggagatccggggccctgctgtgccccggctgaccagcgcagaagatagacaccgccacggcccccacgcccacagccctgagctgcagaggacaggccgcctgtttggaggcctcatccaggatgtgcggaggaaggtgccctggtaccccagcgacttcctggatgccctgcacctgcagtgcttctctgctgtgctgtacatctacctggccaccgtgaccaatgccatcaccttcggcggcctgctgggagatgccacagatggagcccagggcgtgctggagagcttcctgggcacagctgtggccggggccgccttctgcctgatggccggccagcccctgaccatcctgagcagcacaggccctgtgctggtgtttgagcggctgctcttctccttcagccgggactacagcctggactacctgcccttccggctgtgggtgggcatctgggtggccaccttctgcctggtgctggtggccacagaggcctctgtgctggtgcgctacttcacccgcttcacagaggagggcttctgtgccctgatcagcctcatcttcatctatgatgctgtgggcaagatgctgaacctgacccacacctaccccatccagaagccaggcagcagcgcctacggctgcctgtgccagtacccaggccctggaggaaatgaaagccagtggatccgcacccggcccaaggacagagatgacatcgtgtccatggacctgggcctcatcaatgccagcctgctgcccccacctgagtgcacccggcagggcggccacccccggggccctggctgccacacagtgcctgacatcgccttcttcagcctgctgctcttcctgaccagcttcttctttgccatggccctgaagtgtgtgaagaccagccgcttcttccccagcgtggtgaggaagggcctgagtgacttcagctctgtgctggccatcctgctgggctgcggcctggatgccttcctgggcctggccacccccaagctgatggtgccccgggagttcaagcccaccctgcccggccggggctggctggtgagcccctttggagccaacccctggtggtggagcgtggccgccgccctgcctgccctgctgctgagcatcctgatcttcatggaccagcagatcacagctgtgatcctgaacaggatggagtaccgcctgcagaagggggccggcttccacctggacctcttctgtgtggccgtgctgatgctgctgaccagcgccctgggcctgccctggtacgtgtctgccaccgtcatcagcctggcccacatggacagcctgcggcgggagagccgggcctgtgcccctggagagcggcccaacttcctgggcatccgggagcagaggctgaccggcctggtggtgttcatcctgaccggggccagcatcttcctggcccctgtgctgaagttcatccccatgcctgtgctgtatggcatcttcctgtacatgggcgtggccgccctgagcagcatccagttcaccaacagagtgaagctgctgctgatgcctgccaagcaccagcctgacctgctgctgctgcggcacgtgcccctgaccagggtgcacctgttcaccgccatccagctggcctgcctgggcctgctgtggatcatcaagagcaccccagctgccatcatcttccccctgatgctgctgggcctggtgggcgtgaggaaggccctggagagggtcttcagcccccaggagctgctgtggctggatgagctgatgcctgaggaggagaggagcatccctgagaagggcctggagcctgagcacagcttcagcggcagtgacagtgaagattctgagctgatgtaccagcccaaggcccctgagatcaacatctctgtgaactag

SEQ ID NO: 158365 - DNA, 123 bp, synthetic construct
  misc_feature 1..123: note = Description of Artificial Sequence: Synthetic coding sequence
  source 1..123: mol_type = other DNA
atgagatttgcctggacagtgctgctgctgggccccctgcagctgtgtgccctggtgcactgtgcccctcctgctgctggccagcagcagcccccccgggagcccccagctgcccctggatag

SEQ ID NO: 158366 - DNA, 1134 bp, synthetic construct
  misc_feature 1..1134: note = Description of Artificial Sequence: Synthetic coding sequence
  source 1..1134: mol_type = other DNA
atgagatttgcctggacagtgctgctgctgggccccctgcagctgtgtgccctggtgcactgtgcccctcctgctgctggccagcagcagcccccccgggagcccccagctgcccctggagctgccagcgcccagcagcccaggacccccatcctgctgatccgggacaacagaacagctgctgcccggaccaggacagctggcagcagcggcgtgacagctggccggccccggcccacagcccggcactggttccaggccggctacagcaccagccgggcccgggaggccggggccagcagagctgagaaccagacagcccctggagaggtgcctgccctgagcaacctgcggccccccagccgggtggatggcatggtgggagatgacccctacaacccctacaagtacagtgatgacaacccctactacaactactatgacacctatgaaagacccaggcctgggggccgctacagacctggctatggaacaggctacttccagtatggcctgcctgacctggtggccgacccctactacatccaggccagcacctacgtgcagaagatgtccatgtacaacctgcgctgtgccgctgaggagaactgcctggccagcacagcctacagagcagatgtgcgggactatgaccaccgggtgctgctgcgcttcccccagagggtgaagaaccagggcaccagtgacttcctgcccagccggccccgctacagctgggagtggcacagctgccaccagcactaccacagcatggatgagttcagccactatgacctgctggatgccaacacccagaggagagtggccgagggccacaaggccagcttctgcctggaggacaccagctgtgactatggctaccacagaagatttgcctgcacagcccacacccagggcctgagccctggctgctatgacacctatggagctgacatcgactgccagtggattgacatcacagatgtgaagccaggcaactacatcctgaaggtgtctgtgaaccccagctacctggtgcctgagagtgactacaccaacaacgtggtgcgctgtgacatccgctacacaggccaccacgcctatgccagcggctgcaccatcagcccctactag

SEQ ID NO: 158367 - DNA, 2325 bp, synthetic construct
  misc_feature 1..2325: note = Description of Artificial Sequence: Synthetic coding sequence
  source 1..2325: mol_type = other DNA
atggagcggcccctgtgcagccacctgtgcagctgcctggccatgctggccctgctgagccccctgagcctggcccagtatgacagctggccccactacccagagtacttccagcagcctgcccctgagtaccaccagccccaggccccagccaacgtggccaagatccagctgcggctggccggccagaagaggaagcacagcgagggccgggtggaggtgtactatgatggccagtggggcaccgtgtgtgatgatgacttcagcatccacgccgcccacgtggtgtgccgggagctgggctacgtggaggccaagtcctggacagccagcagcagctatggcaagggggagggccccatctggctggacaacctgcactgcacaggaaatgaggccaccctggccgcctgcaccagcaatggctggggcgtgacagactgcaagcacacagaagatgtgggcgtggtgtgcagcgacaagagaattcctggcttcaagtttgacaacagcctcatcaaccagatcgagaacctgaacatccaggtggaggacatccgcatccgggccatcctgagcacctacaggaagaggacccctgtgatggagggctacgtggaggtgaaggagggcaagacctggaagcagatctgtgacaagcactggacagccaagaacagccgggtggtgtgtggcatgtttggcttccctggagagaggacctacaacaccaaggtgtacaagatgtttgccagcaggaggaagcagcgctactggcccttctccatggactgcaccggcacagaggcccacatcagcagctgcaagctgggcccccaggtgtccctggaccccatgaagaatgtgacctgtgaaaatggcctgcctgctgtggtgtcctgtgtgcccggccaggtgttctccccagatggccccagccgcttcaggaaggcctacaagccagagcagcccctggtgcggctgcggggcggggcctacatcggggagggccgggtggaggtgctgaagaatggagagtggggcaccgtgtgtgatgacaagtgggacctggtgtctgcctctgtggtgtgccgggagctgggctttggaagtgccaaggaggccgtgacaggcagccggctgggccagggcatcggccccatccacctgaatgagatccagtgcacaggaaatgagaagagcatcatcgactgcaagttcaatgctgagagccagggctgcaaccacgaggaggatgctggggtgcgctgcaacaccccagccatgggcctgcagaagaagctgcggctgaatggaggaagaaacccctatgagggccgggtggaggtgctggtggagagaaatggcagcctggtgtggggcatggtgtgtggccagaactggggcatcgtggaggccatggtggtgtgccggcagctgggcctgggctttgccagcaatgccttccaggagacctggtactggcatggagatgtgaacagcaacaaggtggtgatgtctggagtgaagtgcagcggcacagagctgagcctggcccactgcagacatgatggagaagatgtggcctgcccccagggcggcgtgcagtatggagctggggtggcctgcagcgagacagccccagacctggtgctgaatgctgagatggtgcagcagaccacctacctggaggaccggcccatgttcatgctgcagtgtgccatggaggagaactgcctgagcgccagcgctgcccagacagaccccaccaccggctaccgccgcctgctgcgcttcagcagccagatccacaacaacggccagagcgacttccggcccaagaatggaagacatgcctggatctggcatgactgccaccgccactaccacagcatggaggtgttcacccactatgacctgctgaacctgaatggcaccaaggtggccgagggccacaaggccagcttctgcctggaggacacagaatgtgagggggacatccagaagaactatgaatgtgccaactttggagaccagggcatcaccatgggctgctgggacatgtacagacatgacatcgactgccagtgggtggacatcacagatgtgcccccaggggactacctgttccaggtggtgatcaaccccaactttgaggtggccgagagtgactacagcaacaacatcatgaagtgccgcagccgctatgatggccaccgcatctggatgtacaactgccacatcggcggcagcttcagcgaggagacagagaagaagtttgagcacttcagcggcctgctgaacaaccagctgagcccccagtag

SEQ ID NO: 158368 - DNA, 456 bp, synthetic construct
  misc_feature 1..456: note = Description of Artificial Sequence: Synthetic coding sequence
  source 1..456: mol_type = other DNA
atggagcggcccctgtgcagccacctgtgcagctgcctggccatgctggccctgctgagccccctgagcctggcccagtatgacagctggccccactacccagagtacttccagcagcctgcccctgagtaccaccagccccaggccccagccaacgtggccaagatccagctgcggctggccggccagaagaggaagcacagcgagggccgggtggaggtgtactatgatggccagtggggcaccgtgtgtgatgatgacttcagcatccacgccgcccacgtggtgtgccgggagctgggctacgtggaggccaagtcctggacagccagcagcagctatggcaagggggagggccccatctggctggacaacctgcactgcacaggaaatgaggccaccctggccgcctgcaccagcaatggctggggcgtgacagactgcaagcacacctag

SEQ ID NO: 158369 - DNA, 291 bp, synthetic construct
  misc_feature 1..291: note = Description of Artificial Sequence: Synthetic coding sequence
  source 1..291: mol_type = other DNA
atggagcggcccctgtgcagccacctgtgcagctgcctggccatgctggccctgctgagccccctgagcctggcccagtatgacagctggccccactacccagagtacttccagcagcctgcccctgagtaccaccagccccaggccccagccaacgtggccaagatccagctgcggctggccggccagaagaggaagcacagcgagggccgggtggaggtgtactatgatggccagtggggcaccgtgtgtgatgatgacttcagcatccacgccgcccacgtggtgtag

SEQ ID NO: 158370 - DNA, 420 bp, synthetic construct
  misc_feature 1..420: note = Description of Artificial Sequence: Synthetic coding sequence
  source 1..420: mol_type = other DNA
atggagcggcccctgtgcagccacctgtgcagctgcctggccatgctggccctgctgagccccctgagcctggcccagtatgacagctggccccactacccagagtacttccagcagcctgcccctgagtaccaccagccccaggccccagccaacgtggccaagatccagctgcggctggccggccagaagaggaagcacagcgagggccgggtggaggtgtactatgatggccagtggggcaccgtgtgtgatgatgacttcagcatccacgccgcccacgtggtgtgccgggagctgggctacgtggaggccaagtcctggacagccagcagcagctatggcaagggggagggccccatctggctggacaacctgcactgcacaggaaatgaggccaccctggccgcctgcacctag

SEQ ID NO: 158371 - DNA, 2262 bp, synthetic construct
  misc_feature 1..2262: note = Description of Artificial Sequence: Synthetic coding sequence
  source 1..2262: mol_type = other DNA
atgaggcctgtgtctgtgtggcagtggagcccctggggcctgctgctgtgcctgctgtgcagcagctgcctgggcagccccagccccagcactggacctgagaagaaggccggcagccagggcctgcgcttccggctggccggcttccccaggaagccctatgagggccgggtggagatccagagagctggggagtggggcaccatctgtgatgatgacttcaccctgcaggccgcccacatcctgtgccgggagctgggcttcacagaggccaccggctggacccacagcgccaagtatggccctggcaccggccgcatctggctggacaacctgagctgcagcggcacagagcagagcgtgacagaatgtgccagccggggctggggcaacagcgactgcacccatgatgaagatgctggggtcatctgcaaggaccagaggctgcccggcttcagtgacagcaatgtcatcgaggtggagcaccacctgcaggtggaggaggtgcgcatccggcctgctgtgggctggggcagaagacccctgcctgtgacagagggcctggtggaggtgcggctgcctgatggctggagccaggtgtgtgacaagggctggagcgcccacaacagccacgtggtgtgtggcatgctgggcttccccagcgagaagagggtgaatgctgccttctaccgcctgctggcccagaggcagcagcacagctttggcctgcacggcgtggcctgtgtgggcacagaggcccacctgagcctgtgcagcctggagttctaccgggccaatgacacagcccgctgccctgggggcggccctgctgtggtgtcctgtgtgcccggccctgtgtatgctgccagcagcggccagaagaagcagcagcagagcaagccccagggcgaggcccgggtgcggctgaagggcggggcccaccctggagagggccgggtggaggtgctgaaggccagcacctggggcaccgtgtgtgacaggaagtgggacctgcacgccgcctctgtggtgtgccgggagctgggcttcggcagcgcccgggaggccctgagcggggccaggatgggccagggcatgggcgccatccacctgtctgaggtgcgctgcagcggccaggagctgagcctgtggaagtgcccccacaagaacatcacagctgaggactgcagccacagccaggatgctggggtgcgctgcaacctgccctacacaggagctgagacccgcatccggctgagcggcggccgcagccagcacgagggccgggtggaggtgcagatcggcggccctggccccctgcgctggggcctcatctgtggagatgactggggcaccctggaggccatggtggcctgccggcagctgggcctgggctacgccaaccacggcctgcaggagacctggtactgggacagcggcaacatcacagaggtggtgatgtctggagtgcgctgcacaggaacagagctgagcctggaccagtgtgcccaccacggcacccacatcacctgcaagaggacaggcacccgcttcaccgctggggtcatctgcagcgagacagccagtgacctgctgctgcacagcgccctggtgcaggagacagcctacattgaagatcggcccctgcacatgctgtactgtgccgctgaggagaactgcctggccagcagcgcccggagcgccaactggccctacggccaccggcggctgctgcgcttcagcagccagatccacaacctgggccgggctgacttccggcccaaggccggccgccacagctgggtgtggcatgaatgtcatggccactaccacagcatggacatcttcacccactatgacatcctgaccccaaatggcaccaaggtggccgagggccacaaggccagcttctgcctggaggacacagagtgccaggaggatgtgtccaagagatatgaatgtgccaactttggagagcagggcatcaccgtgggctgctgggacctgtacagacatgacatcgactgccagtggattgacatcacagatgtgaagccaggcaactacatcctgcaggtggtgatcaaccccaactttgaggtggccgagagtgacttcaccaacaatgccatgaagtgcaactgcaagtatgatggccaccgcatctgggtgcacaactgccacatcggagatgccttcagcgaggaggccaacagaagatttgagcgctacccaggccagaccagcaaccagatcatctag

SEQ ID NO: 158372 - DNA, 1827 bp, synthetic construct
  misc_feature 1..1827: note = Description of Artificial Sequence: Synthetic coding sequence
  source 1..1827: mol_type = other DNA
atgaggcctgtgtctgtgtggcagtggagcccctggggcctgctgctgtgcctgctgtgcagcagctgcctgggcagccccagccccagcactggacctgagaagaaggccggcagccagggcctgcgcttccggctggccggcttccccaggaagccctatgagggccgggtggagatccagagagctggggagtggggcaccatctgtgatgatgacttcaccctgcaggccgcccacatcctgtgccgggagctgggcttcacagaggccaccggctggacccacagcgccaagtatggccctggcaccggccgcatctggctggacaacctgagctgcagcggcacagagcagagcgtgacagaatgtgccagccggggctggggcaacagcgactgcacccatgatgaagatgctggggtcatctgcaaggaccagaggctgcccggcttcagtgacagcaatgtcatcgaggcccgggtgcggctgaagggcggggcccaccctggagagggccgggtggaggtgctgaaggccagcacctggggcaccgtgtgtgacaggaagtgggacctgcatgctgcctctgtggtgtgccgggagctgggctttggaagtgcccgggaggccctgagcggggccaggatgggccagggcatgggcgccatccacctgtctgaggtgcgctgcagcggccaggagctgagcctgtggaagtgcccccacaagaacatcacagctgaggactgcagccacagccaggatgctggggtgcgctgcaacctgccctacaccggggctgagacccgcatccggctgagcggcggccgcagccagcacgagggccgggtggaggtgcagattggaggccctggccccctgcgctggggcctcatctgtggagatgactggggcaccctggaggccatggtggcctgccggcagctgggcctgggctacgccaaccacggcctgcaggagacctggtactgggacagcggcaacatcacagaggtggtgatgtctggagtgcgctgcaccggcacagagctgagcctggaccagtgtgcccaccacggcacccacatcacctgcaagaggacaggcacccgcttcaccgctggggtcatctgcagcgagacagccagtgacctgctgctgcacagcgccctggtgcaggagacagcctacatcgaggaccggcccctgcacatgctgtactgtgccgctgaggagaactgcctggccagcagcgcccggagcgccaactggccctacggccaccggcggctgctgcgcttcagcagccagatccacaacctgggccgggctgacttccggcccaaggccggccgccacagctgggtgtggcatgagtgccacggccactaccacagcatggacatcttcacccactatgacatcctgacccccaacggcaccaaggtggccgagggccacaaggccagcttctgcctggaggacacagagtgccaggaggatgtgtccaagagatatgaatgtgccaactttggagagcagggcatcaccgtgggctgctgggacctgtacagacatgacatcgactgccagtggattgacatcacagatgtgaagccaggcaactacatcctgcaggtggtgatcaaccccaactttgaggtggccgagagtgacttcaccaacaatgccatgaagtgcaactgcaagtatgatggccaccgcatctgggtgcacaactgccacatcggagatgccttcagcgaggaggccaacagaagatttgagcgctacccaggccagaccagcaaccagatcatctag

SEQ ID NO: 158373 - DNA, 2094 bp, synthetic construct
  misc_feature 1..2094: note = Description of Artificial Sequence: Synthetic coding sequence
  source 1..2094: mol_type = other DNA
atgaggcctgtgtctgtgtggcagtggagcccctggggcctgctgctgtgcctgctgtgcagcagctgcctgggcagccccagccccagcactggacctgagaagaaggccggcagccagggcctgcgcttccggctggccggcttccccaggaagccctatgagggccgggtggagatccagagagctggggagtggggcaccatctgtgatgatgacttcaccctgcaggccgcccacatcctgtgccgggagctgggcttcacagaggccaccggctggacccacagcgccaagtatggccctggcaccggccgcatctggctggacaacctgagctgcagcggcacagagcagagcgtgacagaatgtgccagccggggctggggcaacagcgactgcacccatgatgaagatgctggggtcatctgcaaggaccagaggctgcccggcttcagtgacagcaatgtcatcgaggtggagcaccacctgcaggtggaggaggtgcgcatccggcctgctgtgggctggggcagaagacccctgcctgtgacagagggcctggtggaggtgcggctgcctgatggctggagccaggtgtgtgacaagggctggagcgcccacaacagccacgtggtgtgtggcatgctgggcttccccagcgagaagagggtgaatgctgccttctaccgcctgctggcccagaggcagcagcacagctttggcctgcacggcgtggcctgtgtgggcacagaggcccacctgagcctgtgcagcctggagttctaccgggccaatgacacagcccgctgccctgggggcggccctgctgtggtgtcctgtgtgcccggccctgtgtatgctgccagcagcggccagaagaagcagcagcagagcaagccccagggcgaggcccgggtgcggctgaagggcggggcccaccctggagagggccgggtggaggtgctgaaggccagcacctggggcaccgtgtgtgacaggaagtgggacctgcacgccgcctctgtggtgtgccgggagctgggcttcggcagcgcccgggaggccctgagcggggccaggatgggccagggcatgggcgccatccacctgtctgaggtgcgctgcagcggccaggagctgagcctgtggaagtgcccccacaagaacatcacagctgaggactgcagccacagccaggatgctggggtgcgctgcaacctgccctacacaggagctgagacccgggagacctggtactgggacagcggcaacatcacagaggtggtgatgtctggagtgcgctgcacaggaacagagctgagcctggaccagtgtgcccaccacggcacccacatcacctgcaagaggacaggcacccgcttcaccgctggggtcatctgcagcgagacagccagtgacctgctgctgcacagcgccctggtgcaggagacagcctacattgaagatcggcccctgcacatgctgtactgtgccgctgaggagaactgcctggccagcagcgcccggagcgccaactggccctacggccaccggcggctgctgcgcttcagcagccagatccacaacctgggccgggctgacttccggcccaaggccggccgccacagctgggtgtggcatgaatgtcatggccactaccacagcatggacatcttcacccactatgacatcctgaccccaaatggcaccaaggtggccgagggccacaaggccagcttctgcctggaggacacagagtgccaggaggatgtgtccaagagatatgaatgtgccaactttggagagcagggcatcaccgtgggctgctgggacctgtacagacatgacatcgactgccagtggattgacatcacagatgtgaagccaggcaactacatcctgcaggtggtgatcaaccccaactttgaggtggccgagagtgacttcaccaacaatgccatgaagtgcaactgcaagtatgatggccaccgcatctgggtgcacaactgccacatcggagatgccttcagcgaggaggccaacagaagatttgagcgctacccaggccagaccagcaaccagatcatctag

SEQ ID NO: 158374 - DNA, 912 bp, synthetic construct
  misc_feature 1..912: note = Description of Artificial Sequence: Synthetic coding sequence
  source 1..912: mol_type = other DNA
atgaggcctgtgtctgtgtggcagtggagcccctggggcctgctgctgtgcctgctgtgcagcagctgcctgggcagccccagccccagcactggacctgagaagaaggccggcagccagggcctgcgcttccggctggccggcttccccaggaagccctatgagggccgggtggagatccagagagctggggagtggggcaccatctgtgatgatgacttcaccctgcaggccgcccacatcctgtgccgggagctgggcttcacagaggccaccggctggacccacagcgccaagtatggccctggcaccggccgcatctggctggacaacctgagctgcagcggcacagagcagagcgtgacagaatgtgccagccggggctggggcaacagcgactgcacccatgatgaagatgctggggtcatctgcaaggaccagaggctgcccggcttcagtgacagcaatgtcatcgaggtggagcaccacctgcaggtggaggaggtgcgcatccggcctgctgtgggctggggcagaagacccctgcctgtgacagagggcctggtggaggtgcggctgcctgatggctggagccaggtgtgtgacaagggctggagcgcccacaacagccacgtggtgtgtggcatgctgggcttccccagcgagaagagggtgaatgctgccttctaccgcctgctggcccagaggcagcagcacagctttggcctgcacggcgtggcctgtgtgggcacagaggcccacctgagcctgtgcagcctggagttctaccgggccaatgacacagcccgctgccctgggggcggccctgctgtggtgtcctgtgtgcccggccctgtgtatgctgccagcagcggccagaagaagcagcagcagagcaagccccagggctag

SEQ ID NO: 158375 - DNA, 2271 bp, synthetic construct
  misc_feature 1..2271: note = Description of Artificial Sequence: Synthetic coding sequence
  source 1..2271: mol_type = other DNA
atggcctggagccccccagccaccctcttcctgttcctgctgctgctgggccagcccccacccagccggccccagagcctgggcaccaccaagctgcggctggtgggccctgagagcaagccagaggagggccgcctggaggtgctgcaccagggccagtggggcaccgtgtgtgatgacaactttgccatccaggaggccaccgtggcctgccggcagctgggctttgaggccgccctgacctgggcccacagcgccaagtatggccagggcgagggccccatctggctggacaacgtgcgctgtgtgggcacagagagcagcctggaccagtgtggcagcaatggctggggcgtgtctgactgcagccacagtgaagatgtgggcgtcatctgccaccccaggaggcaccggggctacctgtctgagaccgtgtccaatgccctgggcccccagggccggcggctggaggaggtgcggctgaagcccatcctggccagcgccaagcagcacagccctgtgacagaaggagctgtggaggtgaagtatgagggccactggaggcaggtgtgtgaccagggctggaccatgaacaacagccgggtggtgtgtggcatgctgggcttccccagcgaggtgcctgtggacagccactactacaggaaggtgtgggacctgaagatgagggaccccaagagccggctgaagagcctgaccaacaagaacagcttctggatccaccaggtgacctgcctgggcacagagccccacatggccaactgccaggtgcaggtggccccagcccggggcaagctgcggcctgcctgccctgggggcatgcatgctgtggtgtcctgtgtggccggcccccacttccggccccccaagaccaagccccagaggaagggctcctgggccgaggagccccgggtgcggctgcggagcggggcccaggtgggggagggccgggtggaggtgctgatgaaccggcagtggggcaccgtgtgtgaccaccgctggaacctgatcagcgcctctgtggtgtgccggcagctgggcttcggcagcgcccgggaggccctgtttggagcccggctgggccagggcctgggccccatccacctgtctgaggtgcgctgccggggctatgaaagaaccctgagtgactgcccagccctggagggcagccagaatggctgccagcatgaaaatgatgctgctgtgcgctgcaatgtgcccaacatgggcttccagaaccaggtgcggctggccggcggccgcatccctgaggagggcctgctggaggtgcaggtggaggtgaatggagtgccccgctggggctctgtgtgcagcgagaactggggcctgacagaggccatggtggcctgccggcagctgggcctgggctttgccatccacgcctacaaggagacctggttctggagcggcaccccccgggcccaggaggtggtgatgtctggagtgcgctgcagcggcacagagctggccctgcagcagtgccagagacatggccctgtgcactgcagccatggaggcggccgcttcctggccggcgtgtcctgcatggattctgccccagacctggtgatgaatgcccagctggtgcaggagacagcctacctggaggaccggcccctgagccagctgtactgtgcccacgaggagaactgcctgagcaagtctgctgaccacatggactggccctacggctacagaaggctgctgcgcttcagcacccagatctacaacctgggccgcacagacttccggcccaagacaggccgggacagctgggtgtggcaccagtgccaccgccactaccacagcattgaggtgttcacccactatgacctgctgaccctgaatggcagcaaggtggccgagggccacaaggccagcttctgcctggaggacaccaactgccccaccggcctgcagaggagatatgcctgtgccaactttggagagcagggcgtgacagtgggctgctgggacacctacagacatgacatcgactgccagtgggtggacatcacagatgtgggccctggcaactacatcttccaggtgattgtgaacccccactatgaggtggccgagagtgacttcagcaacaacatgctgcagtgccgctgcaagtatgatggccaccgggtgtggctgcacaactgccacactggaaacagctacccagccaatgctgagctgagcctggagcaggagcagaggctgaggaacaacctgatctag

SEQ ID NO: 158376 - DNA, 1794 bp, synthetic construct
  misc_feature 1..1794: note = Description of Artificial Sequence: Synthetic coding sequence
  source 1..1794: mol_type = other DNA
atggctgctgtgcaggccgctgaggtgaaggtggatggcagcgagcccaagctgagcaagaatgagctgaagaggcggctgaaggccgagaagaaggtggccgagaaggaggccaagcagaaggagctgtctgagaagcagctgagccaggccacagctgctgccaccaaccacaccacagacaacggggtgggccctgaggaggagagcgtggaccccaaccagtactacaagatccgcagccaggccatccaccagctgaaggtgaatggagaggacccctacccccacaagttccacgtggacatcagcctgacagacttcatccagaagtacagccacctgcagcccggggaccacctgacagacatcaccctgaaggtggccggccgcatccacgccaagagggccagcggcggcaagctgatcttctatgacctgcggggggagggcgtgaagctgcaggtgatggccaacagcaggaactacaagtctgaggaggagttcatccacatcaacaacaagctgcggcggggggacatcatcggcgtgcagggcaaccctgggaagaccaagaagggggagctgagcatcatcccctatgagatcaccctgctgagcccctgcctgcacatgctgccccacctgcacttcggcctgaaggacaaggagacccgctaccggcagcgctacctggacctgatcctgaatgactttgtgcggcagaagttcatcatccgcagcaagatcatcacctacatccgctccttcctggatgagctgggcttcctggagattgagacccccatgatgaacatcatccctggaggagctgtggccaagcccttcatcacctaccacaatgagctggacatgaacctgtacatgagaattgcccctgagctgtaccacaagatgctggtggtgggcggcatcgacagagtgtatgagatcggccggcagttcagaaatgaaggaattgacctgacccacaaccctgagttcaccacctgtgagttctacatggcctatgctgactaccatgacctgatggagatcacagagaagatggtgtctggcatggtgaagcacatcaccggcagctacaaggtgacctaccacccagatggccctgagggccaggcctatgatgtggacttcaccccacccttccgccgcatcaacatggtggaggagctggagaaggccctgggcatgaagctgcctgagaccaacctgtttgaaacagaggagaccaggaagatcctggatgacatctgtgtggccaaggctgtggagtgccccccacccaggaccacagcccggctgctggacaagctggtgggggagttcctggaggtgacctgcatcaaccccaccttcatctgtgaccacccccagatcatgagccccctggccaagtggcacaggagcaaggagggcctgacagaaagatttgagctgtttgtgatgaagaaggagatctgcaatgcctacacagagctgaatgaccccatgaggcagaggcagctgtttgaggagcaggccaaggccaaggctgctggagatgatgaggccatgtttattgatgagaacttctgcacagccctggagtatggcctgcccccaacagctggctggggcatgggcatcgacagagtggccatgttcctgacagacagcaacaacatcaaggaggtgctgctcttccctgccatgaagccagaggacaagaaggaaaatgtggccaccacagacaccctggagagcaccaccgtgggcacctctgtgtag

SEQ ID NO: 158377 - DNA, 1878 bp, synthetic construct
  misc_feature 1..1878: note = Description of Artificial Sequence: Synthetic coding sequence
  source 1..1878: mol_type = other DNA
atgctgacccaggccgctgtgcggctggtgcggggcagcctgaggaagacctcctgggccgagtggggccaccgggagctgcggctgggccagctggcccccttcaccgccccccacaaggacaagagcttcagtgaccagaggtctgagctgaagaggcggctgaaggccgagaagaaggtggccgagaaggaggccaagcagaaggagctgtctgagaagcagctgagccaggccacagctgctgccaccaaccacaccacagacaacggggtgggccctgaggaggagagcgtggaccccaaccagtactacaagatccgcagccaggccatccaccagctgaaggtgaatggagaggacccctacccccacaagttccacgtggacatcagcctgacagacttcatccagaagtacagccacctgcagcccggggaccacctgacagacatcaccctgaaggtggccggccgcatccacgccaagagggccagcggcggcaagctgatcttctatgacctgcggggggagggcgtgaagctgcaggtgatggccaacagcaggaactacaagtctgaggaggagttcatccacatcaacaacaagctgcggcggggggacatcatcggcgtgcagggcaaccctgggaagaccaagaagggggagctgagcatcatcccctatgagatcaccctgctgagcccctgcctgcacatgctgccccacctgcacttcggcctgaaggacaaggagacccgctaccggcagcgctacctggacctgatcctgaatgactttgtgcggcagaagttcatcatccgcagcaagatcatcacctacatccgctccttcctggatgagctgggcttcctggagattgagacccccatgatgaacatcatccctggaggagctgtggccaagcccttcatcacctaccacaatgagctggacatgaacctgtacatgagaattgcccctgagctgtaccacaagatgctggtggtgggcggcatcgacagagtgtatgagatcggccggcagttcagaaatgaaggaattgacctgacccacaaccctgagttcaccacctgtgagttctacatggcctatgctgactaccatgacctgatggagatcacagagaagatggtgtctggcatggtgaagcacatcaccggcagctacaaggtgacctaccacccagatggccctgagggccaggcctatgatgtggacttcaccccacccttccgccgcatcaacatggtggaggagctggagaaggccctgggcatgaagctgcctgagaccaacctgtttgaaacagaggagaccaggaagatcctggatgacatctgtgtggccaaggctgtggagtgccccccacccaggaccacagcccggctgctggacaagctggtgggggagttcctggaggtgacctgcatcaaccccaccttcatctgtgaccacccccagatcatgagccccctggccaagtggcacaggagcaaggagggcctgacagaaagatttgagctgtttgtgatgaagaaggagatctgcaatgcctacacagagctgaatgaccccatgaggcagaggcagctgtttgaggagcaggccaaggccaaggctgctggagatgatgaggccatgtttattgatgagaacttctgcacagccctggagtatggcctgcccccaacagctggctggggcatgggcatcgacagagtggccatgttcctgacagacagcaacaacatcaaggaggtgctgctcttccctgccatgaagccagaggacaagaaggaaaatgtggccaccacagacaccctggagagcaccaccgtgggcacctctgtgtag

SEQ ID NO: 158378 - DNA, 1569 bp, synthetic construct
  misc_feature 1..1569: note = Description of Artificial Sequence: Synthetic coding sequence
  source 1..1569: mol_type = other DNA
atgcagccctggcacggcaaggccatgcagagggccagcgaggccggggccacagcccccaaggccagcgccagaaatgcccggggggcccccatggaccccacagagagccctgctgcccctgaggccgccctgcccaaggccggcaagtttggacctgccaggaagagcggcagccggcagaagaagagcgccccagacacccaggagcggccccctgtgcgggccactggagcccgggccaagaaggccccccagagggcccaggacacccagcccagtgatgccaccagcgcccctggagctgagggcctggagcccccagctgcccgggagcccgccctgagccgggccggcagctgccggcagagaggagcccgctgcagcaccaagccccggcccccacctggcccctgggatgtgcccagccctggcctgcctgtgtctgcccccatcctggtgagaagagatgctgcccctggggccagcaagctgcgggctgtgctggagaagctgaagctgagcagagatgacatcagcacagctgctggcatggtgaagggcgtggtggaccacctgctgctgcggctgaagtgtgacagcgccttccggggcgtgggcctgctgaacacaggcagctactatgaacatgtgaagatcagcgccccaaatgaatttgatgtgatgttcaagctggaggtgccccgcatccagctggaggagtacagcaacacccgggcctactactttgtgaagttcaagaggaaccccaaggagaaccccctgagccagttcctggagggggagatcctgagcgccagcaagatgctgagcaagttcaggaagatcatcaaggaggagatcaatgacatcaaggacacagatgtgatcatgaagaggaagagaggaggcagccctgctgtgaccctgctgatcagcgagaagatctctgtggacatcaccctggccctggagagcaagagctcctggccagccagcacccaggagggcctgcgcatccagaactggctgagcgccaaggtgaggaagcagctgcggctgaagcccttctacctggtgcccaagcacgccaaggagggcaatggcttccaggaggagacctggaggctgtccttcagccacatcgagaaggagatcctgaacaaccacggcaagagcaagacctgctgtgagaacaaggaggagaagtgctgcaggaaggactgcctgaagctgatgaagtacctgctggagcagctgaaggagcgcttcaaggacaagaagcacctggacaagttcagcagctaccacgtgaagacagccttcttccacgtgtgcacccagaacccccaggacagccagtgggacaggaaggacctgggcctgtgctttgacaactgtgtgacctacttcctgcagtgcctgaggacagagaagctggagaactacttcatccctgagttcaacctcttcagcagcaacctgattgacaagaggagcaaggagttcctgaccaagcagatcgagtatgaaagaaataatgagttccctgtgtttgatgagttctag

SEQ ID NO: 158379 - DNA, 1344 bp, synthetic construct
  misc_feature 1..1344: note = Description of Artificial Sequence: Synthetic coding sequence
  source 1..1344: mol_type = other DNA
atgcagccctggcacggcaaggccatgcagagggccagcgaggccggggccacagcccccaaggccagcgccagaaatgcccggggggcccccatggaccccacagagagccctgctgcccctgaggccgccctgcccaaggccggcaagtttggacctgccaggaagagcggcagccggcagaagaagagcgccccagacacccaggagcggccccctgtgcgggccactggagcccgggccaagaaggccccccagagggcccaggacacccagcccagtgatgccaccagcgcccctggagctgagggcctggagcccccagctgcccgggagcccgccctgagccgggccggcagctgccggcagagaggagcccgctgcagcaccaagccccggcccccacctggcccctgggatgtgcccagccctggcctgcctgtgtctgcccccatcctggtgagaagagatgctgcccctggggccagcaagctgcgggctgtgctggagaagctgaagctgagcagagatgacatcagcacagctgctggcatggtgaagggcgtggtggaccacctgctgctgcggctgaagtgtgacagcgccttccggggcgtgggcctgctgaacacaggcagctactatgaacatgtgaagatcagcgccccaaatgaatttgatgtgatgttcaagctggaggtgccccgcatccagctggaggagtacagcaacacccgggcctactactttgtgaagttcaagaggaaccccaaggagaaccccctgagccagttcctggagggggagatcctgagcgccagcaagatgctgagcaagttcaggaagatcatcaaggaggagatcaatgacatcaaggacacagatgtgatcatgaagaggaagagaggaggcagccctgctgtgaccctgctgatcagcgagaagatctctgtggacatcaccctggccctggagagcaagagctcctggccagccagcacccaggagggcctgcgcatccagaactggctgagcgccaaggtgaggaagcagctgcggctgaagcccttctacctggtgcccaagcacgccaaggagggcaatggcttccaggaggagacctggaggctgtccttcagccacatcgagaaggagatcctgaacaaccacggcaagagcaagacctgctgtgagaacaaggaggagaagtgctgcaggaaggactgcctgaagctgatgaagtacctgctggagcagctgaaggagcgcttcaaggacaagaagcacctggacaagttcagcagctaccacgtgaagacagccttcttccaccggctgtactag

SEQ ID NO: 158380 - DNA, 1080 bp, synthetic construct
  misc_feature 1..1080: note = Description of Artificial Sequence: Synthetic coding sequence
  source 1..1080: mol_type = other DNA
atgattgctgcccaggccaagctggtgtaccacctgaacaagtactacaatgagaagtgccaggccaggaaggccgccatcgccaagaccatccgggaggtgtgcaaggtggtgtctgatgtgctgaaggaggtggaggtgcaggagccccgcttcatcagcagcctgaatgagatggacaacagatatgagggcctggaggtgatcagccccacagaatttgaggtggtgctgtacctgaaccagatgggcgtcttcaactttgtggatgatggcagcctgcccggctgtgctgtgctgaagctgagtgatggcaggaagaggtccatgagcctgtgggtggagttcatcacagccagcggctacctgagcgccaggaagatccgcagccgcttccagaccctggtggcccaggccgtggacaagtgcagctacagagatgtggtgaagatggtggccgacaccagcgaggtgaagctgcgcatccgggaccgctacgtggtgcagatcaccccagccttcaagtgcaccggcatctggcccaggtctgctgcccactggcccctgccccacatcccctggccaggccccaacagagtggccgaggtgaaggccgagggcttcaacctgctgagcaaggagtgccacagcctggccggcaagcagagcagcgctgagagtgatgcctgggtgctgcagtttgctgaggccgagaaccggctgcagatgggcggctgcaggaagaagtgcctgagcatcctgaagaccctgcgggacagacacctggagctgcccggccagcccctgaacaactaccacatgaagaccctggtgtcctatgaatgtgagaagcacccccgggagagtgactgggatgagagctgcctgggggaccggctgaatggcatcctgctgcagctgatcagctgcctgcagtgccgccgctgcccccactacttcctgcccaacctggacctcttccagggcaagccccacagcgccctggagaatgctgccaagcagacctggaggctggcccgggagatcctgaccaaccccaagagcctggagaagctgtag

SEQ ID NO: 158381 - DNA, 1176 bp, synthetic construct
  misc_feature 1..1176: note = Description of Artificial Sequence: Synthetic coding sequence
  source 1..1176: mol_type = other DNA
atgagcggccctgtgcccagccgggcccgggtgtacacagatgtgaacacccaccggccccgggagtactgggactatgagagccacgtggtggagtggggcaaccaggatgactaccagctggtgaggaagctgggccggggcaagtacagcgaggtgtttgaggccatcaacatcaccaacaatgagaaggtggtggtgaagatcctgaagcctgtgaagaagaagaagatcaagcgggagatcaagatcctggagaacctgcggggcggccccaacatcatcaccctggccgacatcgtgaaggaccctgtgtccaggaccccagccctggtgtttgaacatgtgaacaacacagacttcaagcagctgtaccagaccctgacagattatgacatccgcttctacatgtatgagatcctgaaggccctggactactgccacagcatgggcatcatgcacagagatgtgaagccccacaacgtgatgattgaccacgagcacaggaagctgcggctgattgactggggcctggccgagttctaccaccctggccaggagtacaacgtgcgggtggccagccgctacttcaagggccctgagctgctggtggactaccagatgtatgactacagcctggacatgtggagcctgggctgcatgctggcctccatgatcttcaggaaggagcccttcttccacggccatgacaactatgaccagctggtgagaattgccaaggtgctgggcacagaggacctgtatgactacatcgacaagtacaacatcgagctggacccccgcttcaatgacatcctgggccgccacagcaggaagcgctgggagagatttgtgcacagcgagaaccagcacctggtgtccccagaggccctggacttcctggacaagctgctgcgctatgaccaccagagccggctgacagcccgggaggccatggagcacccctacttctacacagtggtgaaggaccaggccaggatgggcagcagctccatgcctgggggcagcacccctgtgagcagcgccaacatgatgagcggcatcagctctgtgcccacccccagccccctgggccccctggccggcagccctgtgattgctgctgccaaccccctgggcatgcctgtgcctgctgctgctggggcccagcagtag

SEQ ID NO: 158382 - DNA, 1347 bp, synthetic construct
  misc_feature 1..1347: note = Description of Artificial Sequence: Synthetic coding sequence
  source 1..1347: mol_type = other DNA
atgtaccccagcaacaagaagaagaaggtgtggagggaggagaaggagcggctgctgaagatgaccctggaggagaggaggaaggagtacctgcgggactacatccccctgaacagcatcctgtcctggaaggaggagatgaagggcaagggccagaatgatgaggagaacacccaggagaccagccaggtgaagaagagcctgacagagaaggtgtccctgtacagaggagacatcaccctgctggaggtggatgccatcgtgaatgctgccaatgccagcctgctgggcggcggcggcgtggatggctgcatccacagagctgctggcccctgcctgctggccgagtgcaggaacctgaatggctgtgacaccggccacgccaagatcacctgtggctatgacctgcctgccaagtatgtgatccacacagtgggccccatcgcccggggccacatcaatggcagccacaaggaggacctggccaactgctacaagagcagcctgaagctggtgaaggagaacaacatccgctctgtggccttcccctgcatcagcacaggcatctacggcttccccaatgaacctgctgctgtgattgccctgaacaccatcaaggagtggctggccaagaaccaccacgaggtggaccgcatcatcttctgtgtgttcctggaggtggacttcaagatctacaagaagaagatgaatgagttcttctctgtggatgacaacaatgaggaggaggaggatgtggagatgaaggaggacagtgatgaaaatggacctgaggagaagcagagcgtggaggagatggaggagcagagccaggatgctgatggagtgaacacagtgacagtgcccggccctgccagcgaggaggccgtggaggactgcaaggatgaggactttgccaaggatgagaacatcaccaagggcggggaggtgacagaccacagcgtgcgggaccaggaccacccagatggccaggagaatgacagcaccaagaatgagatcaagattgaaacagagagccagagcagctacatggagacagaggagctgagcagcaaccaggaggatgctgtgattgtggagcagcctgaggtgatccccctgacagaggaccaggaggagaaggagggggagaaggcccctggagaggacacccccaggatgcctgggaagtctgagggcagcagtgacctggagaacaccccaggcccagatgtggagatgaacagccaggtggacaaggtgaatgaccccacagagagccagcaggaggaccagctgattgctggggcccaggatgaggccaaggagcagagaaatggcaccaagtag

SEQ ID NO: 158383 - DNA, 642 bp, synthetic construct
  misc_feature 1..642: note = Description of Artificial Sequence: Synthetic coding sequence
  source 1..642: mol_type = other DNA
atgaatgagttcttctctgtggatgacaacaatgaggaggaggaggatgtggagatgaaggaggacagtgatgaaaatggacctgaggagaagcagagcgtggaggagatggaggagcagagccaggatgctgatggagtgaacacagtgacagtgcccggccctgccagcgaggaggccgtggaggactgcaaggatgaagattttgccaaggatgagaacatcaccaagggcggggaggtgacagaccacagcgtgcgggaccaggaccacccagatggccaggagaatgacagcaccaagaatgagatcaagattgaaacagagagccagagcagctacatggagacagaggagctgagcagcaaccaggaggatgctgtgattgtggagcagcctgaggtgatccccctgacagaggaccaggaggagaaggagggggagaaggcccctggagaggacacccccaggatgcctgggaagtctgagggcagcagtgacctggagaacaccccaggcccagatgtggagatgaacagccaggtggacaaggtgaatgaccccacagagagccagcaggaggaccagctgattgctggggcccaggatgaggccaaggagcagagaaatggcaccaagtag

SEQ ID NO: 158384 - DNA, 642 bp, synthetic construct; identical to SEQ ID NO: 158383
  misc_feature 1..642: note = Description of Artificial Sequence: Synthetic coding sequence
  source 1..642: mol_type = other DNA

SEQ ID NO: 158385 - DNA, 1068 bp, synthetic construct
  misc_feature 1..1068: note = Description of Artificial Sequence: Synthetic coding sequence
  source 1..1068: mol_type = other DNA
atggctgtgcaggagagcgctgcccagctgtccatgaccctgaaggtgcaggagtaccccaccctgaaggtgccctatgagaccctgaacaagcgcttccgggccgcccagaagaacatcgaccgggagaccagccacgtgaccatggtggtggccgagctggagaagaccctgagcggctgcccagctgtggacagcgtggtgtccctgctggatggagtggtggagaagctgtctgtgctgaagaggaaggctgtggagagcatccaggccgaggatgaaagtgccaagctgtgcaagagaagaattgagcacctgaaggagcacagcagtgaccagcctgctgctgcctctgtgtggaagaggaagaggatggacaggatgatggtggagcacctgctgcgctgtggctactacaacacagctgtgaagctggcccggcagagcggcatcgagagctgcctggagttcagcctgcgcatccaggagttcatcgagctgatccggcagaacaagaggctggatgctgtgagacatgccaggaagcacttcagccaggccgagggcagccagctggatgaggtgcggcaggccatgggcatgctggccttccccccagacacccacatcagcccctacaaggacctgctggaccctgcccgctggaggatgctgatccagcagttccgctatgacaactaccgcctgcaccagctgggcaacaacagcgtcttcaccctgaccctgcaggccggcctgagcgccatcaagaccccccagtgctacaaggaggatggcagcagcaagagcccagactgccctgtgtgcagccgcagcctgaacaagctggcccagcccctgcccatggcccactgtgccaacagccggctggtgtgcaagatctctggagatgtgatgaatgaaaacaacccccccatgatgctgcccaacggctacgtgtatggctacaacagcctgctgagcatccggcaggatgacaaggtggtgtgccccaggaccaaggaggtgttccacttcagccaggccgagaaggtgtacatcatgtag

SEQ ID NO: 158386 - DNA, 1191 bp, synthetic construct
  misc_feature 1..1191: note = Description of Artificial Sequence: Synthetic coding sequence
  source 1..1191: mol_type = other DNA
atggctgtgcaggagagcgctgcccagctgtccatgaccctgaaggtgcaggagtaccccaccctgaaggtgccctatgagaccctgaacaagcgcttccgggccgcccagaagaacatcgaccgggagaccagccacgtgaccatggtggtggccgagctggagaagaccctgagcggctgcccagctgtggacagcgtggtgtccctgctggatggagtggtggagaagctgtctgtgctgaagaggaaggctgtggagagcatccaggccgaggatgaaagtgccaagctgtgcaagagaagaattgagcacctgaaggagcacagcagtgaccagcctgctgctgcctctgtgtggaagaggaagaggatggacaggatgatggtggagcacctgctgcgctgtggctactacaacacagctgtgaagctggcccggcagagcggcatcgaggacctggtgaacatcgagatgttcctgacagccaaggaggtggaggagagcctggagcggcgggagacagccacctgcctggcctggtgccacgacaacaagagccggctgaggaagatgaagagctgcctggagttcagcctgcgcatccaggagttcatcgagctgatccggcagaacaagaggctggatgctgtgagacatgccaggaagcacttcagccaggccgagggcagccagctggatgaggtgcggcaggccatgggcatgctggccttccccccagacacccacatcagcccctacaaggacctgctggaccctgcccgctggaggatgctgatccagcagttccgctatgacaactaccgcctgcaccagctgggcaacaacagcgtcttcaccctgaccctgcaggccggcctgagcgccatcaagaccccccagtgctacaaggaggatggcagcagcaagagcccagactgccctgtgtgcagccgcagcctgaacaagctggcccagcccctgcccatggcccactgtgccaacagccggctggtgtgcaagatctctggagatgtgatgaatgaaaacaacccccccatgatgctgcccaacggctacgtgtatggctacaacagcctgctgagcatccggcaggatgacaaggtggtgtgccccaggaccaaggaggtgttccacttcagccaggccgagaaggtgtacatcatgtag

SEQ ID NO: 158387 - DNA, 987 bp, synthetic construct
  misc_feature 1..987: note = Description of Artificial Sequence: Synthetic coding sequence
  source 1..987: mol_type = other DNA
atggctgtgcaggagagcgctgcccagctgtccatgaccctgaaggtgcaggagtaccccaccctgaaggtgccctatgagaccctgaacaagcgcttccgggccgcccagaagaacatcgaccgggagaccagccacgtgaccatggtggtggccgagctggagaagaccctgagcggctgcccagctgtggacagcgtggtgtccctgctggatggagtggtggagaagctgtctgtgctgaagaggaaggctgtggagagcatccaggccgaggatgaaagtgccaagctgtgcaagagaagaattgagcacctgaaggagcacagcagtgaccagcctgctgctgcctctgtgtggaagaggaagaggatggacaggatgatggtggagcacctgctgcgctgtggctactacaacacagctgtgaagctggcccggcagagcggcatcgagacctgcaagaaggccctgcagcccagccggcgggagcccgccggccgcggggcccctggccacggccacgccggcctgcctgcccggcatgcccacctgcctgtgcagggccccagcggcccctgcaccgtggctgatgctgaccctgctgtgcctgtgcggcagctgcccaccaccccagctgggaagcagttctgtgtgcacccccaccctgctggctggcccctgagccaccaggagcagtgctacaaggaggatggcagcagcaagagcccagactgccctgtgtgcagccgcagcctgaacaagctggcccagcccctgcccatggcccactgtgccaacagccggctggtgtgcaagatctctggagatgtgatgaatgaaaacaacccccccatgatgctgcccaacggctacgtgtatggctacaacagcctgctgagcatccggcaggatgacaaggtggtgtgccccaggaccaaggaggtgttccacttcagccaggccgagaaggtgtacatcatgtag

SEQ ID NO: 158388 - DNA, 954 bp, synthetic construct
  misc_feature 1..954: note = Description of Artificial Sequence: Synthetic coding sequence
  source 1..954: mol_type = other DNA
atgaccctgaaggtgcaggagtaccccaccctgaaggtgccctatgagaccctgaacaagcgcttccgggccgcccagaagaacatcgaccgggagaccagccacgtgaccatggtggtggccgagctggagaagaccctgagcggctgcccagctgtggacagcgtggtgtccctgctggatggagtggtggagaagctgtctgtgctgaagaggaaggacctggtgaacatcgagatgttcctgacagccaaggaggtggaggagagcctggagcggcgggagacagccacctgcctggcctggtgccacgacaacaagagccggctgaggaagatgaagagctgcctggagttcagcctgcgcatccaggagttcatcgagctgatccggcagaacaagaggctggatgctgtgagacatgccaggaagcacttcagccaggccgagggcagccagctggatgaggtgcggcaggccatgggcatgctggccttccccccagacacccacatcagcccctacaaggacctgctggaccctgcccgctggaggatgctgatccagcagttccgctatgacaactaccgcctgcaccagctgggcaacaacagcgtcttcaccctgaccctgcaggccggcctgagcgccatcaagaccccccagtgctacaaggaggatggcagcagcaagagcccagactgccctgtgtgcagccgcagcctgaacaagctggcccagcccctgcccatggcccactgtgccaacagccggctggtgtgcaagatctctggagatgtgatgaatgaaaacaacccccccatgatgctgcccaacggctacgtgtatggctacaacagcctgctgagcatccggcaggatgacaaggtggtgtgccccaggaccaaggaggtgttccacttcagccaggccgagaaggtgtacatcatgtag

SEQ ID NO: 158389 - DNA, 1305 bp, synthetic construct
  misc_feature 1..1305: note = Description of Artificial Sequence: Synthetic coding sequence
  source 1..1305: mol_type = other DNA
atggctgtgcaggagagcgctgcccagctgtccatgaccctgaaggtgcaggagtaccccaccctgaaggtgccctatgagaccctgaacaagcgcttccgggccgcccagaagaacatcgaccgggagaccagccacgtgaccatggtggtggccgagctggagaagaccctgagcggctgcccagctgtggacagcgtggtgtccctgctggatggagtggtggagaagctgtctgtgctgaagaggaaggctgtggagagcatccaggccgaggatgaaagtgccaagctgtgcaagagaagaattgagcacctgaaggagcacagcagtgaccagcctgctgctgcctctgtgtggaagaggaagaggatggacaggatgatggtggagcacctgctgcgctgtggctactacaacacagctgtgaagctggcccggcagagcggcatcgaggacctggtgaacatcgagatgttcctgacagccaaggaggtggaggagagcctggagcggcgggagacagccacctgcctggcctggtgccacgacaacaagagccggctgaggaagatgaagggccggcagaacaagcatgaggccaagacaggcaggaagagcagagctgccagcagcagccccaaggagagcctggacctgggcatggagaccctgaagggcaagccagagctgagctgcctggagttcagcctgcgcatccaggagttcatcgagctgatccggcagaacaagaggctggatgctgtgagacatgccaggaagcacttcagccaggccgagggcagccagctggatgaggtgcggcaggccatgggcatgctggccttccccccagacacccacatcagcccctacaaggacctgctggaccctgcccgctggaggatgctgatccagcagttccgctatgacaactaccgcctgcaccagctgggcaacaacagcgtcttcaccctgaccctgcaggccggcctgagcgccatcaagaccccccagtgctacaaggaggatggcagcagcaagagcccagactgccctgtgtgcagccgcagcctgaacaagctggcccagcccctgcccatggcccactgtgccaacagccggctggtgtgcaagatctctggagatgtgatgaatgaaaacaacccccccatgatgctgcccaacggctacgtgtatggctacaacagcctgctgagcatccggcaggatgacaaggtggtgtgccccaggaccaaggaggtgttccacttcagccaggccgagaaggtgtacatcatgtag

SEQ ID NO: 158390 - DNA, 1047 bp, synthetic construct
  misc_feature 1..1047: note = Description of Artificial Sequence: Synthetic coding sequence
  source 1..1047: mol_type = other DNA
atggtggtggccgagctggagaagaccctgagcggctgcccagctgtggacagcgtggtgtccctgctggatggagtggtggagaagctgtctgtgctgaagaggaaggctgtggagagcatccaggccgaggatgaaagtgccaagctgtgcaagagaagaattgagcacctgaaggagcacagcagtgaccagcctgctgctgcctctgtgtggaagaggaagaggatggacaggatgatggtggagcacctgctgcgctgtggctactacaacacagctgtgaagctggcccggcagagcggcatcgaggacctggtgaacatcgagatgttcctgacagccaaggaggtggaggagagcctggagcggcgggagacagccacctgcctggcctggtgccacgacaacaagagccggctgaggaagatgaagagctgcctggagttcagcctgcgcatccaggagttcatcgagctgatccggcagaacaagaggctggatgctgtgagacatgccaggaagcacttcagccaggccgagggcagccagctggatgaggtgcggcaggccatgggcatgctggccttccccccagacacccacatcagcccctacaaggacctgctggaccctgcccgctggaggatgctgatccagcagttccgctatgacaactaccgcctgcaccagctgggcaacaacagcgtcttcaccctgaccctgcaggccggcctgagcgccatcaagaccccccagtgctacaaggaggatggcagcagcaagagcccagactgccctgtgtgcagccgcagcctgaacaagctggcccagcccctgcccatggcccactgtgccaacagccggctggtgtgcaagatctctggagatgtgatgaatgaaaacaacccccccatgatgctgcccaacggctacgtgtatggctacaacagcctgctgagcatccggcaggatgacaaggtggtgtgccccaggaccaaggaggtgttccacttcagccaggccgagaaggtgtacatcatgtag

SEQ ID NO: 158391 - DNA, 1188 bp, synthetic construct
  misc_feature 1..1188: note = Description of Artificial Sequence: Synthetic coding sequence
  source 1..1188: mol_type = other DNA
atgtggaccctgcgggccaccggccgggaggtgggcagcagcagctgtgaagatactgtggcccctgtgccctatgagaccctgaacaagcgcttccgggccgcccagaagaacatcgaccgggagaccagccacgtgaccatggtggtggccgagctggagaagaccctgagcggctgcccagctgtggacagcgtggtgtccctgctggatggagtggtggagaagctgtctgtgctgaagaggaaggctgtggagagcatccaggctgaagatgagagcgccaagctgtgcaagaggcgcatcgagcacctgaaggagcacagcagtgaccagcctgctgctgcctctgtgtggaagaggaagaggatggacaggatgatggtggagcacctgctgcgctgtggctactacaacacagctgtgaagctggcccggcagagcggcatcgaggacctggtgaacatcgagatgttcctgacagccaaggaggtggaggagagcctggagcggcgggagacagccacctgcctggcctggtgccacgacaacaagagccggctgaggaagatgaagagctgcctggagttcagcctgcgcatccaggagttcatcgagctgatccggcagaacaagaggctggatgctgtgagacatgccaggaagcacttcagccaggccgagggcagccagctggatgaggtgcggcaggccatgggcatgctggccttccccccagacacccacatcagcccctacaaggacctgctggaccctgcccgctggaggatgctgatccagcagttccgctatgacaactaccgcctgcaccagctgggcaacaacagcgtcttcaccctgaccctgcaggccggcctgagcgccatcaagaccccccagtgctacaaggaggatggcagcagcaagagcccagactgccctgtgtgcagccgcagcctgaacaagctggcccagcccctgcccatggcccactgtgccaacagccggctggtgtgcaagatctctggagatgtgatgaatgaaaacaacccccccatgatgctgcccaacggctacgtgtatggctacaacagcctgctgagcatccggcaggatgacaaggtggtgtgccccaggaccaaggaggtgttccacttcagccaggccgagaaggtgtacatcatgtag

SEQ ID NO: 158392 - DNA, 987 bp, synthetic construct
  misc_feature 1..987: note = Description of Artificial Sequence: Synthetic coding sequence
  source 1..987: mol_type = other DNA
atggctgtgcaggagagcgctgcccagctgtccatgaccctgaaggtgcaggagtaccccaccctgaaggtgccctatgagaccctgaacaagcgcttccgggccgcccagaagaacatcgaccgggagaccagccacgtgaccatggtggtggccgagctggagaagaccctgagcggctgcccagctgtggacagcgtggtgtccctgctggatggagtggtggagaagctgtctgtgctgaagaggaaggctgtggagagcatccaggccgaggatgaaagtgccaagctgtgcaagagaagaattgagcacctgaaggagcacagcagtgaccagcctgctgctgcctctgtgtggaagaggaagaggatggacaggatgatggtggagcacctgctgcgctgtggctactacaacacagctgtgaagctggcccggcagagcggcatcgagacctgcaagaaggccctgcagcccagccggcgggagcccgccggccgcggggcccctggccacggccacgccggcctgcctgcccggcatgcccacctgcctgtgcagggccccagcggcccctgcaccgtggctgatgctgaccctgctgtgcctgtgcggcagctgcccaccaccccagctgggaagcagttctgtgtgcacccccaccctgctggctggcccctgagccaccaggacacctgctacaaggaggatggcagcagcaagagcccagactgccctgtgtgcagccgcagcctgaacaagctggcccagcccctgcccatggcccactgtgccaacagccggctggtgtgcaagatctctggagatgtgatgaatgaaaacaacccccccatgatgctgcccaacggctacgtgtatggctacaacagcctgctgagcatccggcaggatgacaaggtggtgtgccccaggaccaaggaggtgttccacttcagccaggccgagaaggtgtacatcatgtag

SEQ ID NO: 158393 - DNA, 1128 bp, synthetic construct
  misc_feature 1..1128: note = Description of Artificial Sequence: Synthetic coding sequence
  source 1..1128: mol_type = other DNA
atggctgtgcaggagagcgctgcccagctgtccatgaccctgaaggtgcaggagtaccccaccctgaaggtgccctatgagaccctgaacaagcgcttccgggccgcccagaagaacatcgaccgggagaccagccacgtgaccatggtggtggccgagctggagaagctgtctgtgctgaagaggaaggctgtggagagcatccaggctgaagatgagagcgccaagctgtgcaagaggcgcatcgagcacctgaaggagcacagcagtgaccagcctgctgctgcctctgtgtggaagaggaagaggatggacaggatgatggtggagcacctgctgcgctgtggctactacaacacagctgtgaagctggcccggcagagcggcatcgaggacctggtgaacatcgagatgttcctgacagccaaggaggtggaggagagcctggagcggcgggagacagccacctgcctggcctggtgccacgacaacaagagccggctgaggaagatgaagagctgcctggagttcagcctgcgcatccaggagttcatcgagctgatccggcagaacaagaggctggatgctgtgagacatgccaggaagcacttcagccaggccgagggcagccagctggatgaggtgcggcaggccatgggcatgctggccttccccccagacacccacatcagcccctacaaggacctgctggaccctgcccgctggaggatgctgatccagcagttccgctatgacaactaccgcctgcaccagctgggcaacaacagcgtcttcaccctgaccctgcaggccggcctgagcgccatcaagaccccccagtgctacaaggaggatggcagcagcaagagcccagactgccctgtgtgcagccgcagcctgaacaagctggcccagcccctgcccatggcccactgtgccaacagccggctggtgtgcaagatctctggagatgtgatgaatgaaaacaacccccccatgatgctgcccaacggctacgtgtatggctacaacagcctgctgagcatccggcaggatgacaaggtggtgtgccccaggaccaaggaggtgttccacttcagccaggccgagaaggtgtacatcatgtag

SEQ ID NO: 158394 - DNA, 1467 bp, synthetic construct
  misc_feature 1..1467: note = Description of Artificial Sequence: Synthetic coding sequence
  source 1..1467: mol_type = other DNA
atggccccagctgcctggctgcggtctgctgctgcccgggccctgctgccccccatgctgctgctgctgctgcagcccccacccctgctggcccgggccctgcccccagatgcccaccacctgcatgctgagcggcggggcccccagccctggcatgctgccctgcccagcagccctgccccagccccagccacccaggaggcccccaggcctgccagcagcctgcggcccccaagatgtggggtgcctgaccccagtgatggcctgagcgccaggaaccggcagaagagatttgtgctgagcggcggccgctgggagaagacagacctgacctaccgcatcctgcgcttcccctggcagctggtgcaggagcaggtgcggcagaccatggccgaggccctgaaggtgtggagcgatgtgacccccctgaccttcacagaggtgcatgagggccgggctgacatcatgattgactttgcccgctactggcatggagatgacctgccctttgatggccctgggggcatcctggcccacgccttcttccccaagacccaccgggagggagatgtgcactttgattatgatgagacctggaccatcggagatgaccagggcacagacctgctgcaggtggccgcccatgaatttggacatgtgctgggcctgcagcacaccacagctgccaaggccctgatgtctgccttctacaccttccgctaccccctgagcctgagcccagatgactgccggggcgtgcagcacctgtatggccagccctggcccaccgtgaccagcaggaccccagccctgggcccccaggccggcatcgacaccaatgagatcgcccccctggagccagatgcccccccagatgcctgtgaggccagctttgatgctgtgtccaccatccggggggagctgttcttcttcaaggccggctttgtgtggaggctgcggggcggccagctgcagcccggctacccagccctggccagccgccactggcagggcctgcccagccctgtggatgctgcctttgaagatgcccagggccacatctggttcttccagggcgcccagtactgggtgtatgatggagagaagcctgtgctgggccctgcccccctgacagagctgggcctggtgcgcttccctgtgcatgctgccctggtgtggggccctgagaagaacaagatctacttcttccggggccgggactactggaggttccaccccagcacccggcgggtggacagccctgtgccccggcgggccacagactggaggggcgtgcccagcgagattgatgctgccttccaggatgctgatggctacgcctacttcctgcggggccgcctgtactggaagtttgatcctgtgaaggtgaaggccctggagggcttcccccggctggtgggccctgacttcttcggctgtgccgagcccgccaacaccttcctgtag

SEQ ID NO: 158395 - DNA, 1563 bp, synthetic construct
  misc_feature 1..1563: note = Description of Artificial Sequence: Synthetic coding sequence
  source 1..1563: mol_type = other DNA
atgaggaacaagaagatcctgaaggaggatgagctgctgtctgagacccagcaggccgccttccaccagatcgccatggagccctttgagatcaacgtgcccaagcccaagagaagaaatggagtgaacttcagcctggccgtggtggtgatctacctgatcctgctgacagctggggccggcctgctggtggtgcaggtgctgaacctgcaggcccggctgcgggtgctggagatgtacttcctgaatgacaccctggccgctgaggacagccccagcttcagcctgctgcagagcgcccaccctggagagcacctggcccagggcgccagccggctgcaggtgctgcaggcccagctgacctgggtgcgggtgtcccatgagcacctgctgcagagggtggacaacttcacccagaaccctggcatgttccgcatcaagggggagcagggcgcccctggcctgcagggccacaagggggccatgggcatgcctggggcccctggccccccaggccccccagctgagaagggggccaagggggccatgggcagagatggagccaccggccccagcggcccccagggccccccaggagtgaagggggaggccggcctgcagggcccccagggcgcccctgggaagcagggcgccaccggcaccccaggcccccagggcgagaagggcagcaaaggagatggcggcctgattggccccaagggggagaccggcaccaagggggagaagggggacctgggcctgcccggcagcaagggggaccggggcatgaagggagatgctggggtgatgggccccccaggggcccagggcagcaaaggagactttggccggcccggccccccaggcctggccggcttccctggggccaagggggaccagggccagcccggcctgcagggcgtgcccggccccccaggagctgtgggccaccctggggccaagggggagcccggcagcgctggcagccctggccgggccggcctgcccggcagccctggcagccctggggccaccggcctgaagggcagcaaaggagacaccggcctgcagggccagcagggcaggaaaggagagagcggcgtgcccggccctgctggggtgaagggggagcagggcagccctggcctggccggccccaagggggcccctggccaggccggccagaagggggaccagggcgtgaagggcagcagtggagagcagggcgtgaagggggagaagggggagagaggagaaaattctgtgtctgtgcgcatcgtgggcagcagcaacagaggccgggcagaggtgtactacagcggcacctggggcaccatctgtgatgatgagtggcagaacagtgatgccatcgtgttctgcaggatgctgggctacagcaagggccgggccctgtacaaggtgggcgccggcaccggccagatctggctggacaacgtgcagtgccggggcacagagagcaccctgtggagctgcaccaagaacagctggggccaccacgactgcagccatgaggaggatgctggggtggagtgcagcgtgtag

SEQ ID NO: 158396 - DNA, 1329 bp, synthetic construct
  misc_feature 1..1329: note = Description of Artificial Sequence: Synthetic coding sequence
  source 1..1329: mol_type = other DNA
atgtacttcctgaatgacaccctggccgctgaggacagccccagcttcagcctgctgcagagcgcccaccctggagagcacctggcccagggcgccagccggctgcaggtgctgcaggcccagctgacctgggtgcgggtgtcccatgagcacctgctgcagagggtggacaacttcacccagaaccctggcatgttccgcatcaagggggagcagggcgcccctggcctgcagggccacaagggggccatgggcatgcctggggcccctggccccccaggccccccagctgagaagggggccaagggggccatgggcagagatggagccaccggccccagcggcccccagggccccccaggagtgaagggggaggccggcctgcagggcccccagggcgcccctgggaagcagggcgccaccggcaccccaggcccccagggcgagaagggcagcaaaggagatggcggcctgattggccccaagggggagaccggcaccaagggggagaagggggacctgggcctgcccggcagcaagggggaccggggcatgaagggagatgctggggtgatgggccccccaggggcccagggcagcaaaggagactttggccggcccggccccccaggcctggccggcttccctggggccaagggggaccagggccagcccggcctgcagggcgtgcccggccccccaggagctgtgggccaccctggggccaagggggagcccggcagcgctggcagccctggccgggccggcctgcccggcagccctggcagccctggggccaccggcctgaagggcagcaaaggagacaccggcctgcagggccagcagggcaggaaaggagagagcggcgtgcccggccctgctggggtgaagggggagcagggcagccctggcctggccggccccaagggggcccctggccaggccggccagaagggggaccagggcgtgaagggcagcagtggagagcagggcgtgaagggggagaagggggagagaggagaaaattctgtgtctgtgcgcatcgtgggcagcagcaacagaggccgggcagaggtgtactacagcggcacctggggcaccatctgtgatgatgagtggcagaacagtgatgccatcgtgttctgcaggatgctgggctacagcaagggccgggccctgtacaaggtgggcgccggcaccggccagatctggctggacaacgtgcagtgccggggcacagagagcaccctgtggagctgcaccaagaacagctggggccaccacgactgcagccatgaggaggatgctggggtggagtgcagcgtgtag

SEQ ID NO: 158397 - DNA, 1356 bp, synthetic construct
  misc_feature 1..1356: note = Description of Artificial Sequence: Synthetic coding sequence
  source 1..1356: mol_type = other DNA
atggagcagtgggaccacttccacaaccagcaggaggacacagacagctgcagcgagagcgtgaagtttgatgcccgctccatgacagccctgctgccccccaaccccaagaacagccccagcctgcaggagaagctgaagagcttcaaggccgccctgattgccctgtacctgctggtgtttgctgtgctgatccccctcatcggcatcgtggccgcccagctgctgaagtgggagaccaagaactgcagcgtgagcagcaccaatgccaatgacatcacccagagcctgactggaaaaggaaatgacagcgaggaggagatgaggttccaggaggtgttcatggagcacatgagcaacatggagaagaggatccagcacatcctggacatggaggccaacctgatggacacagagcacttccagaacttctccatgaccacagaccagcgcttcaatgacatcctgctgcagctgagcaccctcttcagctctgtgcagggccatggaaatgccattgatgagatcagcaagagcctcatcagcctgaacaccaccctgctggacctgcagctgaacatcgagaacctgaatggcaagatccaggagaacaccttcaagcagcaggaggagatcagcaagctggaggagcgggtgtacaacgtgtctgctgagatcatggccatgaaggaggagcaggtgcacctggagcaggagatcaagggggaggtgaaggtgctgaacaacatcaccaatgacctgcggctgaaggactgggagcacagccagaccctgaggaacatcaccctcatccagggccccccaggccccccaggagagaagggggaccggggccccactggagagagcggcccccggggcttccctggccccatcggccccccaggcctgaagggggacagaggagccatcggcttccctggcagccggggcctgcccggctacgccggccggcccggcaacagcggccccaagggccagaagggggagaagggcagcggcaacaccctgacccccttcaccaaggtgcggctggtgggcggcagcggcccccatgagggccgggtggagatcctgcacagcggccagtggggcaccatctgtgatgaccgctgggaggtgcgggtgggccaggtggtgtgccgcagcctgggctacccaggagtgcaggccgtgcacaaggccgcccacttcggccagggcaccggccccatctggctgaatgaggtgttctgcttcggccgggagagcagcattgaggagtgcaagatccggcagtggggcacccgggcctgcagccacagtgaagatgctggggtgacctgcaccctgtag

SEQ ID NO: 158398 - DNA, 1167 bp, synthetic construct
  misc_feature 1..1167: note = Description of Artificial Sequence: Synthetic coding sequence
  source 1..1167: mol_type = other DNA
atggagcagtgggaccacttccacaaccagcaggaggacacagacagctgcagcgagagcgtgaagtttgatgcccgctccatgacagccctgctgccccccaaccccaagaacagccccagcctgcaggagaagctgaagagcttcaaggccgccctgattgccctgtacctgctggtgtttgctgtgctgatccccctcatcggcatcgtggccgcccagctgctgaagtgggagaccaagaactgcagcgtgagcagcaccaatgccaatgacatcacccagagcctgactggaaaaggaaatgacagcgaggaggagatgaggttccaggaggtgttcatggagcacatgagcaacatggagaagaggatccagcacatcctggacatggaggccaacctgatggacacagagcacttccagaacttctccatgaccacagaccagcgcttcaatgacatcctgctgcagctgagcaccctcttcagctctgtgcagggccatggaaatgccattgatgagatcagcaagagcctcatcagcctgaacaccaccctgctggacctgcagctgaacatcgagaacctgaatggcaagatccaggagaacaccttcaagcagcaggaggagatcagcaagctggaggagcgggtgtacaacgtgtctgctgagatcatggccatgaaggaggagcaggtgcacctggagcaggagatcaagggggaggtgaaggtgctgaacaacatcaccaatgacctgcggctgaaggactgggagcacagccagaccctgaggaacatcaccctcatccagggccccccaggccccccaggagagaagggggaccggggccccactggagagagcggcccccggggcttccctggccccatcggccccccaggcctgaagggggacagaggagccatcggcttccctggcagccggggcctgcccggctacgccggccggcccggcaacagcggccccaagggccagaagggggagaagggcagcggcaacaccctgagcacaggccccatctggctgaatgaggtgttctgcttcggccgggagagcagcattgaggagtgcaagatccggcagtggggcacccgggcctgcagccacagtgaagatgctggggtgacctgcaccctgtag

SEQ ID NO: 158399 - DNA, 1167 bp, synthetic construct; identical to SEQ ID NO: 158398
  misc_feature 1..1167: note = Description of Artificial Sequence: Synthetic coding sequence
  source 1..1167: mol_type = other DNA

SEQ ID NO: 158400 - DNA, 1077 bp, synthetic construct
  misc_feature 1..1077: note = Description of Artificial Sequence: Synthetic coding sequence
  source 1..1077: mol_type = other DNA
atggagcagtgggaccacttccacaaccagcaggaggacacagacagctgcagcgagagcgtgaagtttgatgcccgctccatgacagccctgctgccccccaaccccaagaacagccccagcctgcaggagaagctgaagagcttcaaggccgccctgattgccctgtacctgctggtgtttgctgtgctgatccccctcatcggcatcgtggccgcccagctgctgaagtgggagaccaagaactgcagcgtgagcagcaccaatgccaatgacatcacccagagcctgactggaaaaggaaatgacagcgaggaggagatgaggttccaggaggtgttcatggagcacatgagcaacatggagaagaggatccagcacatcctggacatggaggccaacctgatggacacagagcacttccagaacttctccatgaccacagaccagcgcttcaatgacatcctgctgcagctgagcaccctcttcagctctgtgcagggccatggaaatgccattgatgagatcagcaagagcctcatcagcctgaacaccaccctgctggacctgcagctgaacatcgagaacctgaatggcaagatccaggagaacaccttcaagcagcaggaggagatcagcaagctggaggagcgggtgtacaacgtgtctgctgagatcatggccatgaaggaggagcaggtgcacctggagcaggagatcaagggggaggtgaaggtgctgaacaacatcaccaatgacctgcggctgaaggactgggagcacagccagaccctgaggaacatcaccctcatccagggccccccaggccccccaggagagaagggggaccggggccccactggagagagcggcccccggggcttccctggccccatcggccccccaggcctgaagggggacagaggagccatcggcttccctggcagccggggcctgcccggctacgccggccggcccggcaacagcggccccaagggccagaagggggagaagggcagcggcaacaccctgcggcctgtgcagctgacagaccacatccgggccggccccagctag

SEQ ID NO: 158401 - DNA, 1410 bp, synthetic construct
  misc_feature 1..1410: note = Description of Artificial Sequence: Synthetic coding sequence
  source 1..1410: mol_type = other DNA
atgtgctacctgagcgccatcatcagcatcagcctgctgaacaagaagcccagcatggagcagtgggaccacttccacaaccagcaggaggacacagacagctgcagcgagagcgtgaagtttgatgcccgctccatgacagccctgctgccccccaaccccaagaacagccccagcctgcaggagaagctgaagagcttcaaggccgccctgattgccctgtacctgctggtgtttgctgtgctgatccccctcatcggcatcgtggccgcccagctgctgaagtgggagaccaagaactgcagcgtgagcagcaccaatgccaatgacatcacccagagcctgactggaaaaggaaatgacagcgaggaggagatgaggttccaggaggtgttcatggagcacatgagcaacatggagaagaggatccagcacatcctggacatggaggccaacctgatggacacagagcacttccagaacttctccatgaccacagaccagcgcttcaatgacatcctgctgcagctgagcaccctcttcagctctgtgcagggccatggaaatgccattgatgagatcagcaagagcctcatcagcctgaacaccaccctgctggacctgcagctgaacatcgagaacctgaatggcaagatccaggagaacaccttcaagcagcaggaggagatcagcaagctggaggagcgggtgtacaacgtgtctgctgagatcatggccatgaaggaggagcaggtgcacctggagcaggagatcaagggggaggtgaaggtgctgaacaacatcaccaatgacctgcggctgaaggactgggagcacagccagaccctgaggaacatcaccctcatccagggccccccaggccccccaggagagaagggggaccggggccccactggagagagcggcccccggggcttccctggccccatcggccccccaggcctgaagggggacagaggagccatcggcttccctggcagccggggcctgcccggctacgccggccggcccggcaacagcggccccaagggccagaagggggagaagggcagcggcaacaccctgacccccttcaccaaggtgcggctggtgggcggcagcggcccccatgagggccgggtggagatcctgcacagcggccagtggggcaccatctgtgatgaccgctgggaggtgcgggtgggccaggtggtgtgccgcagcctgggctacccaggagtgcaggccgtgcacaaggccgcccacttcggccagggcaccggccccatctggctgaatgaggtgttctgcttcggccgggagagcagcattgaggagtgcaagatccggcagtggggcacccgggcctgcagccacagtgaagatgctggggtgacctgcaccctgtag

SEQ ID NO: 158402 - DNA, 195 bp, synthetic construct
  misc_feature 1..195: note = Description of Artificial Sequence: Synthetic coding sequence
  source 1..195: mol_type = other DNA
atggagcagtgggaccacttccacaaccagcaggaggacacagacagctgcagcgagagcgtgaagtttgatgcccgctccatgacagccctgctgccccccaaccccaagaacagccccagcctgcaggagaagctgaagagcttcaaggccgccctgattgccctgtacctgctggtgtttgctgtgctgtag

SEQ ID NO: 158403 - DNA, 399 bp, synthetic construct
  misc_feature 1..399: note = Description of Artificial Sequence: Synthetic coding sequence
  source 1..399: mol_type = other DNA
atggccatgaaggaggagcaggtgcacctggagcaggagatcaagggggaggtgaaggtgctgaacaacatcaccaatgacctgcggctgaaggactgggagcacagccagaccctgaggaacatcaccctcatccagggccccccaggccccccaggagagaagggggaccggggccccactggagagagcggcccccggggcttccctggccccatcggccccccaggcctgaagggggacagaggagccatcggcttccctggcagccggggcctgcccggctacgccggccggcccggcaacagcggccccaagggccagaagggggagaagggcagcggcaacaccctgcggcctgtgcagctgacagaccacatccgggccggccccagctag

SEQ ID NO: 158404 - DNA, 4203 bp, synthetic construct
  misc_feature 1..4203: note = Description of Artificial Sequence: Synthetic coding sequence
  source 1..4203: mol_type = other DNA
atggagctgctgccccccctgccccagagcttcctgctgctgctgctgctgcctgccaagccagctgctggggaggactggcagtgccccaggaccccctatgctgccagccgggactttgatgtgaagtatgtggtgcccagcttctctgctgggggcctggtgcaggccatggtgacctatgaaggagacagaaatgaatctgctgtgtttgtggccatccggaaccggctgcacgtgctgggccctgacctgaagtctgtgcagagcctggccactggacctgctggggaccccggctgccagacctgtgccgcctgtggccctggcccccacggccccccaggggacacagacaccaaggtgctggtgctggaccctgccctgcctgccctggtgtcctgtggcagcagcctgcagggccgctgcttcctgcatgacctggagccccagggcacagctgtgcacctggccgccccagcctgcctcttcagcgcccaccacaacagaccagatgactgcccagactgtgtggccagccccctgggcaccagggtgacagtggtggagcagggccaggccagctacttctacgtggccagcagcctggatgctgctgtggccgccagcttcagccccaggtctgtgtccatccggcggctgaaggcagatgccagcggctttgcccctggctttgtggccctgtctgtgctgcccaagcacctggtgtcctacagcattgaatatgtgcacagcttccacactggagcctttgtgtacttcctgactgtgcagcctgcctctgtgacagatgaccccagcgccctgcacacccggctggcccggctgagcgccacagagcctgagctgggggactaccgggagctggtgctggactgccgctttgcccccaagagaagaagaagaggagcccctgagggcggccagccctaccctgtgctgcgggtggcccacagcgcccctgtgggcgcccagctggccacagagctgagcattgctgagggccaggaggtgctgtttggagtgtttgtgacaggcaaggatggcggccctggggtgggccccaacagcgtggtgtgtgccttccccatcgacctgctggacaccctgattgatgaaggagtggagcgctgctgtgagagccctgtgcaccctggcctgcggcggggcctggacttcttccagagccccagcttctgccccaaccccccaggcctggaggccctgagccccaacaccagctgccgccacttccccctgctggtgagcagcagcttcagccgggtggacctcttcaacggcctgctgggccctgtgcaggtgacagccctgtatgtgacccggctggacaacgtgacagtggcccacatgggcaccatggatggccgcatcctgcaggtggagctggtgcgcagcctgaactacctgctgtatgtgagcaacttcagcctgggggacagcggccagcctgtgcagagagatgtgtcccggctgggggaccacctgctgtttgccagcggggaccaggtgttccaggtgcccatccagggccctggctgccgccacttcctgacctgtggccgctgcctgcgggcctggcacttcatgggctgcggctggtgtggcaacatgtgtggccagcagaaggaatgtcctggctcctggcagcaggaccactgcccccccaagctgacagagttccacccccacagcggccccctgcggggcagcacccggctgaccctgtgtggcagcaacttctacctgcaccccagcggcctggtgcctgagggcacccaccaggtgacagtgggccagagcccctgccggcccctgcccaaggacagcagcaagctgcggcctgtgcccaggaaggactttgtggaggagtttgaatgtgagctggagcccctgggcacccaggccgtgggccccaccaacgtgtccctgactgtgaccaacatgcctcctgggaagcacttccgggtggatggcacctctgtgctgcggggcttctccttcatggagcctgtgctgattgctgtgcagcccctgtttggccccagggctgggggcacctgcctgaccctggagggccagagcctgtctgtgggcaccagcagagctgtgctggtgaatggaacagaatgtctgctggcccgggtgtctgagggccagctgctgtgtgccaccccacctggggccaccgtggcctctgtgcccctgagcctgcaggtgggcggggcccaggtgcccggctcctggaccttccagtaccgggaggaccctgtggtgctgagcatcagccccaactgtggctacatcaacagccacatcaccatctgtggccagcacctgaccagcgcctggcacctggtgctgtccttccatgatggcctgcgggctgtggagagccgctgtgagcggcagctgcctgagcagcagctgtgccgcctgcctgaatatgtggtgcgggacccccagggctgggtggccggcaacctgagcgcccggggagatggagctgctggcttcaccctgcccggcttccgcttcctgcccccaccccaccccccatctgccaacctggtgcccctgaagccagaggagcacgccatcaagtttgagtacatcggcctgggcgctgtggccgactgtgtgggcatcaacgtgacagtgggcggggagagctgccagcacgagttccggggggacatggtggtgtgccccctgccccccagcctgcagctgggccaggatggagcccccctgcaggtgtgtgtggatggagagtgccacatcctgggccgggtggtgcggcccggcccagatggagtgccccagagcaccctgctgggcatcctgctgcccctgctgctgctggtggccgccctggccacagccctggtgttctcctactggtggaggaggaagcagctggtgctgccccccaacctgaatgacctggccagcctggaccagacagctggggccacccccctgcccatcctgtacagcggcagtgactacagaagtggcctggccctgcctgccattgatggcctggacagcaccacctgtgtgcacggggccagcttcagtgacagtgaagatgagagctgtgtgcccctgctgaggaaggagagcatccagctgcgggacctggacagcgccctgctggccgaggtgaaggatgtgctgatcccccatgagcgggtggtgacccacagcgacagagtcatcggcaagggccactttggagtggtgtaccacggggagtacatcgaccaggcccagaaccgcatccagtgtgccatcaagagcctgagccgcatcacagagatgcagcaggtggaggccttcctgcgggagggcctgctgatgaggggcctgaaccaccccaacgtgctggccctgattggcatcatgctgcccccagagggcctgccccacgtgctgctgccctacatgtgccacggggacctgctgcagttcatccgcagcccccagaggaaccccaccgtgaaggacctgatcagctttggcctgcaggtggcccgctccatggagtacctggccgagcagaagtttgtgcaccgggacctggccgccaggaactgcatgctggatgagagcttcaccgtgaaggtggccgactttggcctggcccgggacatcctggaccgggagtactacagcgtgcagcagcacagacatgcccggctgcctgtgaagtggatggccctggagagcctgcagacctaccgcttcaccaccaagagtgatgtgtggagctttggagtgctgctgtgggagctgctgaccaggggggccccaccctaccgccacatcgacccctttgacctgacccacttcctggcccagggccggcggctgccccagcctgagtactgcccagacagcctgtaccaggtgatgcagcagtgctgggaggccgaccctgctgtgcggcccaccttccgggtgctggtgggggaggtggagcagatcgtgtctgccctgctgggggaccactacgtgcagctgcctgccacctacatgaacctgggccccagcaccagccatgagatgaatgtgcggcctgagcagccccagttcagccccatgcctggaaatgtgcggcggccccggcccctgtctgagcccccccggcccacctag

SEQ ID NO: 158405 - DNA, 4056 bp, synthetic construct
  misc_feature 1..4056: note = Description of Artificial Sequence: Synthetic coding sequence
  source 1..4056: mol_type = other DNA
atggagctgctgccccccctgccccagagcttcctgctgctgctgctgctgcctgccaagccagctgctggggaggactggcagtgccccaggaccccctatgctgccagccgggactttgatgtgaagtatgtggtgcccagcttctctgctgggggcctggtgcaggccatggtgacctatgaaggagacagaaatgaatctgctgtgtttgtggccatccggaaccggctgcacgtgctgggccctgacctgaagtctgtgcagagcctggccactggacctgctggggaccccggctgccagacctgtgccgcctgtggccctggcccccacggccccccaggggacacagacaccaaggtgctggtgctggaccctgccctgcctgccctggtgtcctgtggcagcagcctgcagggccgctgcttcctgcatgacctggagccccagggcacagctgtgcacctggccgccccagcctgcctcttcagcgcccaccacaacagaccagatgactgcccagactgtgtggccagccccctgggcaccagggtgacagtggtggagcagggccaggccagctacttctacgtggccagcagcctggatgctgctgtggccgccagcttcagccccaggtctgtgtccatccggcggctgaaggcagatgccagcggctttgcccctggctttgtggccctgtctgtgctgcccaagcacctggtgtcctacagcattgaatatgtgcacagcttccacactggagcctttgtgtacttcctgactgtgcagcctgcctctgtgacagatgaccccagcgccctgcacacccggctggcccggctgagcgccacagagcctgagctgggggactaccgggagctggtgctggactgccgctttgcccccaagagaagaagaagaggagcccctgagggcggccagccctaccctgtgctgcgggtggcccacagcgcccctgtgggcgcccagctggccacagagctgagcattgctgagggccaggaggtgctgtttggagtgtttgtgacaggcaaggatggcggccctggggtgggccccaacagcgtggtgtgtgccttccccatcgacctgctggacaccctgattgatgaaggagtggagcgctgctgtgagagccctgtgcaccctggcctgcggcggggcctggacttcttccagagccccagcttctgccccaaccccccaggcctggaggccctgagccccaacaccagctgccgccacttccccctgctggtgagcagcagcttcagccgggtggacctcttcaacggcctgctgggccctgtgcaggtgacagccctgtatgtgacccggctggacaacgtgacagtggcccacatgggcaccatggatggccgcatcctgcaggtggagctggtgcgcagcctgaactacctgctgtatgtgagcaacttcagcctgggggacagcggccagcctgtgcagagagatgtgtcccggctgggggaccacctgctgtttgccagcggggaccaggtgttccaggtgcccatccagggccctggctgccgccacttcctgacctgtggccgctgcctgcgggcctggcacttcatgggctgcggctggtgtggcaacatgtgtggccagcagaaggaatgtcctggctcctggcagcaggaccactgcccccccaagctgacagagttccacccccacagcggccccctgcggggcagcacccggctgaccctgtgtggcagcaacttctacctgcaccccagcggcctggtgcctgagggcacccaccaggtgacagtgggccagagcccctgccggcccctgcccaaggacagcagcaagctgcggcctgtgcccaggaaggactttgtggaggagtttgaatgtgagctggagcccctgggcacccaggccgtgggccccaccaacgtgtccctgactgtgaccaacatgcctcctgggaagcacttccgggtggatggcacctctgtgctgcggggcttctccttcatggagcctgtgctgattgctgtgcagcccctgtttggccccagggctgggggcacctgcctgaccctggagggccagagcctgtctgtgggcaccagcagagctgtgctggtgaatggaacagaatgtctgctggcccgggtgtctgagggccagctgctgtgtgccaccccacctggggccaccgtggcctctgtgcccctgagcctgcaggtgggcggggcccaggtgcccggctcctggaccttccagtaccgggaggaccctgtggtgctgagcatcagccccaactgtggctacatcaacagccacatcaccatctgtggccagcacctgaccagcgcctggcacctggtgctgtccttccatgatggcctgcgggctgtggagagccgctgtgagcggcagctgcctgagcagcagctgtgccgcctgcctgaatatgtggtgcgggacccccagggctgggtggccggcaacctgagcgcccggggagatggagctgctggcttcaccctgcccggcttccgcttcctgcccccaccccaccccccatctgccaacctggtgcccctgaagccagaggagcacgccatcaagtttgaggtgtgtgtggatggagagtgccacatcctgggccgggtggtgcggcccggcccagatggagtgccccagagcaccctgctgggcatcctgctgcccctgctgctgctggtggccgccctggccacagccctggtgttctcctactggtggaggaggaagcagctggtgctgccccccaacctgaatgacctggccagcctggaccagacagctggggccacccccctgcccatcctgtacagcggcagtgactaccgcagcggcctggccctgcctgccattgatggcctggacagcaccacctgtgtgcatggagccagcttcagtgacagtgaagatgagagctgtgtgcccctgctgaggaaggagagcatccagctgcgggacctggacagcgccctgctggccgaggtgaaggatgtgctgatcccccatgagcgggtggtgacccacagcgacagagtgattggcaagggccactttggagtggtgtaccatggagagtacatcgaccaggcccagaaccgcatccagtgtgccatcaagagcctgagccgcatcacagagatgcagcaggtggaggccttcctgcgggagggcctgctgatgaggggcctgaaccaccccaacgtgctggccctgattggcatcatgctgcccccagagggcctgccccacgtgctgctgccctacatgtgccacggggacctgctgcagttcatccgcagcccccagaggaaccccaccgtgaaggacctgatcagctttggcctgcaggtggcccgctccatggagtacctggccgagcagaagtttgtgcaccgggacctggccgccaggaactgcatgctggatgagagcttcaccgtgaaggtggccgactttggcctggcccgggacatcctggaccgggagtactacagcgtgcagcagcacagacatgcccggctgcctgtgaagtggatggccctggagagcctgcagacctaccgcttcaccaccaagagtgatgtgtggagctttggagtgctgctgtgggagctgctgaccaggggggccccaccctaccgccacatcgacccctttgacctgacccacttcctggcccagggccgccgcctgccccagcctgagtactgcccagacagcctgtaccaggtgatgcagcagtgctgggaggccgaccctgctgtgcggcccaccttccgggtgctggtgggggaggtggagcagatcgtgtctgccctgctgggggaccactacgtgcagctgcctgccacctacatgaacctgggccccagcaccagccatgagatgaatgtgcggcctgagcagccccagttcagccccatgcctggaaatgtgagaagaccccggcccctgtctgagcccccccggcccacctag

SEQ ID NO: 158406 - DNA, 2157 bp, synthetic construct
  misc_feature 1..2157: note = Description of Artificial Sequence: Synthetic coding sequence
  source 1..2157: mol_type = other DNA
atggaggacctgggggagaacaccatggtgctgagcaccctgcggagcctgaacaacttcatcagccagagggtggagggcggcagcggcctggacatcagcaccagcgcccctggcagcctgcagatgcagtaccagcagagcatgcagctggaggagagagctgagcagatccgcagcaagagccacctgatccaggtggagcgggagaagatgcagatggagctgagccacaagagggcccgggtggagctggagcgggccgccagcaccagcgccaggaactatgaaagagaggtggacaggaaccaggagctgctgacccgcatccggcagctgcaggagcgggaggccggggctgaggagaagatgcaggagcagctggagaggaaccggcagtgccagcagaacctggatgctgccagcaagaggctgcgggagaaggaggacagcctggcccaggccggggagaccatcaatgccctgaagggccgcatcagcgagctgcagtggagcgtgatggaccaggagatgagggtgaagaggctggagagcgagaagcaggagctgcaggagcagctggacctgcagcacaagaagtgccaggaggccaaccagaagatccaggagctgcaggccagccaggaggcccgggctgaccacgagcagcagatcaaggacctggagcagaagctgagcctgcaggagcaggatgctgccatcgtgaagaacatgaagtctgagctggtgcggctgccccggctggagcgggagctgaagcagctgcgggaggagagcgcccacctgcgggagatgagggagaccaacggcctgctgcaggaggagctggagggcctgcagaggaagctgggccggcaggagaagatgcaggagaccctggtgggcctggagctggagaatgaaaggctgctggccaagctgcagagctgggagcggctggaccagaccatgggcctgagcatccgcaccccagaggacctgagcagatttgtggtggagctgcagcagcgggagctggccctgaaggacaagaacagcgctgtgaccagcagcgcccggggcctggagaaggcccggcagcagctgcaggaggagctgcggcaggtgtctggccagctgctggaggagaggaagaagcgggagacccatgaggccctggcccggcggctgcagaagagggtgctgctgctgaccaaggagagagatggcatgagggccatcctgggcagctatgacagcgagctgaccccagctgagtacagcccccagctgaccaggaggatgagggaggccgaggacatggtgcagaaggtgcacagccacagcgctgagatggaggcccagctgagccaggccctggaggagctgggcggccagaagcagagagctgacatgctggagatggagctgaagatgctgaagagccagagcagcagcgctgagcagagcttcctgttcagccgggaggaggccgacaccctgcggctgaaggtggaggagctggagggggagaggagccggctggaggaggagaagaggatgctggaggcccagctggagcggcgggccctgcagggcgactatgaccagagcaggaccaaggtgctgcacatgagcctgaaccccacctctgtggcccggcagaggctgcgggaggaccacagccagctgcaggctgaatgtgagcggctgcggggcctgctgcgggccatggagcggggcggcaccgtgcctgctgacctggaggccgccgccgccagcctgcccagcagcaaggaggtggccgagctgaagaagcaggtggagagcgctgagctgaagaaccagaggctgaaggaggtgttccagaccaagatccaggagttcaggaaggcctgctacaccctgaccggctaccagattgacatcaccacagagaaccagtaccgcctgaccagcctgtatgcagagcaccctggggactgcctgatcttcaaggccaccagccccagcggcagcaagatgcagctgctggagacagagttcagccacacagtgggggagctgattgaggtgcacctgcggcggcaggacagcatcccagccttcctgagcagcctgaccctggagctgttcagccggcagacagtggcctag

SEQ ID NO: 158407 - DNA, 2157 bp, synthetic construct; identical to SEQ ID NO: 158406
  misc_feature 1..2157: note = Description of Artificial Sequence: Synthetic coding sequence
  source 1..2157: mol_type = other DNA

SEQ ID NO: 158408 - DNA, 1881 bp, synthetic construct
  misc_feature 1..1881: note = Description of Artificial Sequence: Synthetic coding sequence
  source 1..1881: mol_type = other DNA
atgctgcctgcccggggctgtgtgaggaagaggacagtgtggccccggctggcccgggtgctgattgtgaccctgctgaccctggagctgtcctatgcccccctgccctgccagctgagcggcgtgccctacaacacaggagaccctgtgggccgctgggcccggccctgcatctggccctgcccctggcacaccaccatcaatgccctgaagggccgcatcagcgagctgcagtggagcgtgatggaccaggagatgagggtgaagaggctggagagcgagaagcaggagctgcaggagcagctggacctgcagcacaagaagtgccaggaggccaaccagaagatccaggagctgcaggccagccaggaggcccgggctgaccacgagcagcagatcaaggacctggagcagaagctgagcctgcaggagcaggatgctgccatcgtgaagaacatgaagtctgagctggtgcggctgccccggctggagcgggagctgaagcagctgcgggaggagagcgcccacctgcgggagatgagggagaccaacggcctgctgcaggaggagctggagggcctgcagaggaagctgggccggcaggagaagatgcaggagaccctggtgggcctggagctggagaatgaaaggctgctggccaagctgcagagctgggagcggctggaccagaccatgggcctgagcatccgcaccccagaggacctgagcagatttgtggtggagctgcagcagcgggagctggccctgaaggacaagaacagcgctgtgaccagcagcgcccggggcctggagaaggcccggcagcagctgcaggaggagctgcggcaggtgtctggccagctgctggaggagaggaagaagcgggagacccatgaggccctggcccggcggctgcagaagagggtgctgctgctgaccaaggagagagatggcatgagggccatcctgggcagctatgacagcgagctgaccccagctgagtacagcccccagctgaccaggaggatgagggaggccgaggacatggtgcagaaggtgcacagccacagcgctgagatggaggcccagctgagccaggccctggaggagctgggcggccagaagcagagagctgacatgctggagatggagctgaagatgctgaagagccagagcagcagcgctgagcagagcttcctgttcagccgggaggaggccgacaccctgcggctgaaggtggaggagctggagggggagaggagccggctggaggaggagaagaggatgctggaggcccagctggagcggcgggccctgcagggcgactatgaccagagcaggaccaaggtgctgcacatgagcctgaaccccacctctgtggcccggcagaggctgcgggaggaccacagccagctgcaggctgaatgtgagcggctgcggggcctgctgcgggccatggagcggggcggcaccgtgcctgctgacctggaggccgccgccgccagcctgcccagcagcaaggaggtggccgagctgaagaagcaggtggagagcgctgagctgaagaaccagaggctgaaggaggtgttccagaccaagatccaggagttcaggaaggcctgctacaccctgaccggctaccagattgacatcaccacagagaaccagtaccgcctgaccagcctgtatgcagagcaccctggggactgcctgatcttcaaggccaccagccccagcggcagcaagatgcagctgctggagacagagttcagccacacagtgggggagctgattgaggtgcacctgcggcggcaggacagcatcccagccttcctgagcagcctgaccctggagctgttcagccggcagacagtggcctag

SEQ ID NO: 158409 - DNA, 2157 bp, synthetic construct; identical to SEQ ID NO: 158406
  misc_feature 1..2157: note = Description of Artificial Sequence: Synthetic coding sequence
  source 1..2157: mol_type = other DNA

SEQ ID NO: 158410 - DNA, 474 bp, synthetic construct
  misc_feature 1..474: note = Description of Artificial Sequence: Synthetic coding sequence
  source 1..474: mol_type = other DNA
atggaggacctgggggagaacaccatggtgctgagcaccctgcggagcctgaacaacttcatcagccagagggtggagggcggcagcggcctggacatcagcaccagcgcccctggcagcctgcagatgcagtaccagcagagcatgcagctggaggagagagctgagcagatccgcagcaagagccacctgatccaggtggagcgggagaagatgcagatggagctgagccacaagagggcccgggtggagctggagcgggccgccagcaccagcgccaggaactatgaaagagaggtggacaggaaccaggagctgctgacccgcatccggcagctgcaggagcgggaggccggggctgaggagaagatgcaggagcagctggagaggaaccggcagtgccagcagaacctggatgctgccagcaagaggctgcgggagaaggaggacagcctggcccaggccggggagtag

SEQ ID NO: 158411 - DNA, 810 bp, synthetic construct
  misc_feature 1..810: note = Description of Artificial Sequence: Synthetic coding sequence
  source 1..810: mol_type = other DNA
atgagggagctggagtttgccaagctggagtgctgcctggcctggcagctgcaggccagcagaagagagctggagatggagctgaagatgctgaagagccagagcagcagcgctgagcagagcttcctgttcagccgggaggaggccgacaccctgcggctgaaggtggaggagctggagggggagaggagccggctggaggaggagaagaggatgctggaggcccagctggagcggcgggccctgcagggcgactatgaccagagcaggaccaaggtgctgcacatgagcctgaaccccacctctgtggcccggcagaggctgcgggaggaccacagccagctgcaggccgagtgtgagcggctgcggggcctgctgcgggccatggagcggggcggcaccgtgcctgctgacctggaggccgctgctgccagcctgcccagcagcaaggaggtggccgagctgaagaagcaggtggagagcgctgagctgaagaaccagaggctgaaggaggtgttccagaccaagatccaggagttcaggaaggcctgctacaccctgaccggctaccagattgacatcaccacagagaaccagtaccgcctgaccagcctgtatgcagagcaccctggggactgcctgatcttcaaggccaccagccccagcggcagcaagatgcagctgctggagacagagttcagccacacagtgggggagctgattgaggtgcacctgcggcggcaggacagcatcccagccttcctgagcagcctgaccctggagctgttcagccggcagacagtggcctag

SEQ ID NO: 158412 - DNA, 618 bp, synthetic construct
  misc_feature 1..618: note = Description of Artificial Sequence: Synthetic coding sequence
  source 1..618: mol_type = other DNA
atggccctgcagctgagccgggagcagggcatcaccctgcggggcagcgctgagatcgtggccgagttcttctcctttggcatcaacagcatcctgtaccagaggggcatctaccccagcgagaccttcaccagggtgcagaagtatggcctgaccctgctggtgaccacagacctggagctgatcaagtacctgaacaacgtggtggagcagctgaaggactggctgtacaagtgcagcgtgcagaagctggtggtggtgatcagcaacattgaaagtggagaggtgctggagcgctggcagtttgatattgaatgtgacaagacagccaaggatgacagcgccccccgggagaagagccagaaggccatccaggatgagatccgcagcgtcatccggcagatcacagccaccgtgaccttcctgcccctgctggaggtgtcctgcagctttgacctgctgatctacacagacaaggacctggtggtgcctgagaagtgggaggagagcggcccccagttcatcaccaacagcgaggaggtgcggctgcgctccttcaccaccaccatccacaaggtgaacagcatggtggcctacaagatccctgtgaatgactag

SEQ ID NO: 158413 - DNA, 1212 bp, synthetic construct
  misc_feature 1..1212: note = Description of Artificial Sequence: Synthetic coding sequence
  source 1..1212: mol_type = other DNA
atgcccaacaggaaggccagcagaaatgcctactacttctttgtgcaggagaagatccctgagctgcggcggcggggcctgcctgtggcccgggtggctgatgccatcccctactgcagcagtgactgggccaagcctgtgttcacccccctgcggcggcccggcatgctggtgcccaagcagaatgtgtccccaccagacatgtctgccctgagcctgaagggggaccaggccctgctgggcggcatcttctacttcctgaacatcttcagccacggggagctgcccccccactgtgagcagcgcttcctgccctgtgagatcggctgtgtgaagtacagcctgcaggagggcatcatggctgacttccacagcttcatcaaccctggagagatcccccggggcttccgcttccactgccaggccgccagtgacagcagccacaagatccccatcagcaactttgagcggggccacaaccaggccaccgtgctgcagaacctgtaccgcttcatccaccccaaccctggcaactggccacccatctactgcaagagtgatgacaggaccagggtgaactggtgcctgaagcacatggccaaggccagcgagatccggcaggacctgcagctgctgactgtggaggacctggtggtgggcatctaccagcagaagttcctgaaggagcccagcaagacctggatccgcagcctgctggatgtggccatgtgggactacagcagcaacacccgctgcaagtggcatgaagaaaatgacatcctcttctgtgccctggccgtgtgcaagaagatcgcctactgcatcagcaacagcctggccaccctgtttggcatccagctgacagaggcccacgtgcccctgcaggactatgaggccagcaacagcgtgacccccaagatggtggtgctggatgctggccgctaccagaagctgcgggtgggcagcagcggcttcagccacttcaacagcagcaatgaggagcagaggagcaacacccccatcggggactaccccagccgggccaagatcagcggccagaacagctctgtgcggggccggggcatcacccggctgctggagagcatcagcaacagcagcagcaacatccacaagttcagcaactgtgacaccagcctgagcccctacatgagccagaaggatggctacaagagcttcagcagcctgtcctag

SEQ ID NO: 158414 - DNA, 1305 bp, synthetic construct
  misc_feature 1..1305: note = Description of Artificial Sequence: Synthetic coding sequence
  source 1..1305: mol_type = other DNA
atgcccaacaggaaggccagcagaaatgcctactacttctttgtgcaggagaagatccctgagctgcggcggcggggcctgcctgtggcccgggtggctgatgccatcccctactgcagcagtgactgggccctgctgcgggaggaggagaaggagaagtatgcagagatggcccgggagtggagggctgcccagggcaaggaccccggccccagcgagaagcagaagcctgtgttcacccccctgcggcggcccggcatgctggtgcccaagcagaatgtgagccccccagacatgtctgccctgagcctgaagggggaccaggccctgctgggcggcatcttctacttcctgaacatcttcagccatggagagctgcccccccactgtgagcagcgcttcctgccctgtgaaattggctgtgtgaagtacagcctgcaggagggcatcatggctgacttccacagcttcatcaaccctggagagatcccccggggcttccgcttccactgccaggccgccagtgacagcagccacaagatccccatcagcaactttgagcggggccacaaccaggccaccgtgctgcagaacctgtaccgcttcatccaccccaaccctggcaactggccacccatctactgcaagagtgatgacaggaccagggtgaactggtgcctgaagcacatggccaaggccagcgagatccggcaggacctgcagctgctgactgtggaggacctggtggtgggcatctaccagcagaagttcctgaaggagcccagcaagacctggatccgcagcctgctggatgtggccatgtgggactacagcagcaacacccgctgcaagtggcatgaggagaatgacatcctcttctgtgccctggccgtgtgcaagaagatcgcctactgcatcagcaacagcctggccaccctgtttggcatccagctgacagaggcccacgtgcccctgcaggactatgaggccagcaacagcgtgacccccaagatggtggtgctggatgctggccgctaccagaagctgcgggtgggcagcagcggcttcagccacttcaacagcagcaatgaggagcagaggagcaacacccccatcggggactaccccagccgggccaagatcagcggccagaacagctctgtgcggggccggggcatcacccggctgctggagagcatcagcaacagcagcagcaacatccacaagttcagcaactgtgacaccagcctgagcccctacatgagccagaaggatggctacaagagcttcagcagcctgtcctag

SEQ ID NO: 158415 - DNA, 951 bp, synthetic construct
  misc_feature 1..951: note = Description of Artificial Sequence: Synthetic coding sequence
  source 1..951: mol_type = other DNA
atgcccaacaggaaggccagcagaaatgcctactacttctttgtgcaggagaagatccctgagctgcggcggcggggcctgcctgtggcccgggtggctgatgccatcccctactgcagcagtgactgggccaagcctgtgttcacccccctgcggcggcccggcatgctggtgcccaagcagaatgtgtccccaccagacatgtctgccctgagcctgaagggggaccaggccctgctgggcggcatcttctacttcctgaacatcttcagccacggggagctgcccccccactgtgagcagcgcttcctgccctgtgagatcggctgtgtgaagtacagcctgcaggagggcatcatggctgacttccacagcttcatcaaccctggagagatcccccggggcttccgcttccactgccaggccgccagtgacagcagccacaagatccccatcagcaactttgagcggggccacaaccaggccaccgtgctgcagaacctgtaccgcttcatccaccccaaccctggcaactggccacccatctactgcaagagtgatgacaggaccagggtgaactggtgcctgaagcacatggccaaggccagcgagatccggcaggacctgcagctgctgactgtggaggacctggtggtgggcatctaccagcagaagttcctgaaggagcccagcaagacctggatccgcagcctgctggatgtggccatgtgggactacagcagcaacacccgctgcaagtggcatgaagaaaatgacatcctcttctgtgccctggccgtgtgcaagaagatcgcctactgcatcagcaacagcctggccaccctgtttggcatccagctgacagaggcccacgtgcccctgcaggactatgaggccagcaacagcgtgacccccaagatggtggtgctggatgctggccgctaccagtag

SEQ ID NO: 158416 - DNA, 471 bp, synthetic construct
  misc_feature 1..471: note = Description of Artificial Sequence: Synthetic coding sequence
  source 1..471: mol_type = other DNA
ctgctgcagcgctgcaagtggcatgaggagaatgacatcctcttctgtgccctggccgtgtgcaagaagatcgcctactgcatcagcaacagcctggccaccctgtttggcatccagctgacagaggcccacgtgcccctgcaggactatgaggccagcaacagcgtgacccccaagatggtggtgctggatgctggccgctaccagaagctgcgggtgggcagcagcggcttcagccacttcaacagcagcaatgaggagcagaggagcaacacccccatcggggactaccccagccgggccaagatcagcggccagaacagctctgtgcggggccggggcatcacccggctgctggagagcatcagcaacagcagcagcaacatccacaagttcagcaactgtgacaccagcctgagcccctacatgagccagaaggatggctacaagagcttcagcagcctgtcctag

SEQ ID NO: 158417 - DNA, 747 bp, synthetic construct
  misc_feature 1..747: note = Description of Artificial Sequence: Synthetic coding sequence
  source 1..747: mol_type = other DNA
atggaccagaggcagaggcgcatcctgggccagcccctgagcatccccaccagccagcccaagcagaagaggacctccatgatctccttcttcagcaaggtgtcctggaagctgcgcttccagaagcgggagcccctgaagaatgtgttcttcatcctggccgagcgggcccgggaccccagcgccaagaagaggcacatggccatgaggaacctgggcaccatggcctatgaggccccagacaaggtgaggaagtacaagaagatcgtgctggacctgctggtgtatggcctgtatgaccctgtgaacctggaggtgatccacgagagcatgaagaccctgactgtggtgctgggcaagatccagggcaagggcctgggcagcttcttcatcgacatcaccctgcagaccaggaccctgctggatgatgaaaatgacagcctgcgctacagcgcctttgtgctgtttggccagctggccgcctttgctggcaggaagtggaagaagttcttcaccagccaggtgaagcagacccgggacagcctgctgatccacctgcaggacaggaacccccaggtggccaaggcctgcaagaccaccttccaggcctgcagcccctacctgaagctgaaggaggagtacagcttccagagcgaggaggaccagaggaacaccaagctgtaccagcagctgagccactaccaccctgagatcctgcagttcttctacgccaacaagatcctgtag

SEQ ID NO: 158418 - DNA, 747 bp, synthetic construct; identical to SEQ ID NO: 158417
  misc_feature 1..747: note = Description of Artificial Sequence: Synthetic coding sequence
  source 1..747: mol_type = other DNA

SEQ ID NO: 158419 - DNA, 591 bp, synthetic construct
  misc_feature 1..591: note = Description of Artificial Sequence: Synthetic coding sequence
  source 1..591: mol_type = other DNA
atggaccagaggcagaggcgcatcctgggccagcccctgagcatccccaccagccagcccaagcagaagaggacctccatgatctccttcttcagcaaggtgtcctggaagctgcgcttccagaagcgggagcccctgaagaatgtgttcttcatcctggccgagcgggcccgggaccccagcgccaagaagaggcacatggccatgaggaacctgggcaccatggcctatgaggccccagacaaggtgaggaagtacaagaagatcgtgctggacctgctggtgtatggcctgtatgaccctgtgaacctggaggtgatccacgagagcatgaagaccctgactgtggtgctgggcaagatccagggcaagggcctgggcagcttcttcatcgacatcaccctgcagaccaggaccctgctggatgatgcctgcaagaccaccttccaggcctgcagcccctacctgaagctgaaggaggagtacagcttccagagcgaggaggaccagaggaacaccaagctgtaccagcagctgagccactaccaccctgagatcctgcagttcttctacgccaacaagatcctgtag

SEQ ID NO: 158420 - DNA, 633 bp, synthetic construct
  misc_feature 1..633: note = Description of Artificial Sequence: Synthetic coding sequence
  source 1..633: mol_type = other DNA
atggcctggggcagcaagggcatccagggctgggagaacctggccgagagcagccacctggccaccacccgggagagcagccccccagagagcggcactggaagtggcagcagccggggcagccggctgcaggagccccaggtgtcctggaagctgcgcttccagaagcgggagcccctgaagaatgtgttcttcatcctggccgagcgggcccgggaccccagcgccaagaagaggcacatggccatgaggaacctgggcaccatggcctatgaggccccagacaaggtgaggaagtacaagaagatcgtgctggacctgctggtgtatggcctgtatgaccctgtgaacctggaggtgatccacgagagcatgaagaccctgactgtggtgctgggcaagatccagggcaagggcctgggcagcttcttcatcgacatcaccctgcagaccaggaccctgctggatgatgcctgcaagaccaccttccaggcctgcagcccctacctgaagctgaaggaggagtacagcttccagagcgaggaggaccagaggaacaccaagctgtaccagcagctgagccactaccaccctgagatcctgcagttcttctacgccaacaagatcctgtag

SEQ ID NO: 158421 - DNA, 789 bp, synthetic construct
  misc_feature 1..789: note = Description of Artificial Sequence: Synthetic coding sequence
  source 1..789: mol_type = other DNA
atggcctggggcagcaagggcatccagggctgggagaacctggccgagagcagccacctggccaccacccgggagagcagccccccagagagcggcactggaagtggcagcagccggggcagccggctgcaggagccccaggtgtcctggaagctgcgcttccagaagcgggagcccctgaagaatgtgttcttcatcctggccgagcgggcccgggaccccagcgccaagaagaggcacatggccatgaggaacctgggcaccatggcctatgaggccccagacaaggtgaggaagtacaagaagatcgtgctggacctgctggtgtatggcctgtatgaccctgtgaacctggaggtgatccacgagagcatgaagaccctgactgtggtgctgggcaagatccagggcaagggcctgggcagcttcttcatcgacatcaccctgcagaccaggaccctgctggatgatgaaaatgacagcctgcgctacagcgcctttgtgctgtttggccagctggccgcctttgctggcaggaagtggaagaagttcttcaccagccaggtgaagcagacccgggacagcctgctgatccacctgcaggacaggaacccccaggtggccaaggcctgcaagaccaccttccaggcctgcagcccctacctgaagctgaaggaggagtacagcttccagagcgaggaggaccagaggaacaccaagctgtaccagcagctgagccactaccaccctgagatcctgcagttcttctacgccaacaagatcctgtag

SEQ ID NO: 158422 - DNA, 591 bp, synthetic construct; identical to SEQ ID NO: 158419
  misc_feature 1..591: note = Description of Artificial Sequence: Synthetic coding sequence
  source 1..591: mol_type = other DNA

SEQ ID NO: 158423 - DNA, 771 bp, synthetic construct
  misc_feature 1..771: note = Description of Artificial Sequence: Synthetic coding sequence
  source 1..771: mol_type = other DNA
atgaagctgctggagaacagcagctttgaggccatcaacagccagctgactgtggagactggagatgcccacatcatcggcagaattgagagctacagctgcaagatggctggagatgacaagcacatgttcaagcagttctgccaggagggccagccccacgtgctggaggccctgagccccccccagaccagcggcctgagccccagccggctgagcaagagccagggcggggaggaggagggccccctgagtgacaagtgcagcaggaagaccctcttctacctgattgccaccctgaatgaaagcttccggccagactatgacttcagcacagcccggagccatgagttcagccgggagcccagcctgtcctgggtggtgaatgctgtgaactgcagcctcttctctgctgtgcgggaggacttcaaggacctgaagccccagctgtggaatgctgtggatgaggagatctgcctggccgagtgtgacatctacagctacaacccagacctggacagcgacccctttggagaagatggcagcctgtggagcttcaactacttcttctacaacaagaggctgaagagaattgtgttcttcagctgccgcagcatcagcggcagcacctacacccccagcgaggccggaaatgagctggacatggagctgggggaggaggaggtggaggaggagagccgcagcggcggcagcggggctgaggagaccagcaccatggaggaggacagagtgcctgtgatctgcatctag

SEQ ID NO: 158424 - DNA, 213 bp, synthetic construct
  misc_feature 1..213: note = Description of Artificial Sequence: Synthetic coding sequence
  source 1..213: mol_type = other DNA
atgaagctgctggagaacagcagctttgaggccatcaacagccagctgactgtggagactggagatgcccacatcatcggcagaattgagagctacagctgcaagatggctggagatgacaagcacatgttcaagcagttctgccaggagggccagccccacgtgctggaggccctgagccccccccagaccagcggcctgagccccagctag

SEQ ID NO: 158425 - DNA, 771 bp, synthetic construct; identical to SEQ ID NO: 158423
  misc_feature 1..771: note = Description of Artificial Sequence: Synthetic coding sequence
  source 1..771: mol_type = other DNA

SEQ ID NO: 158426 - DNA, 1104 bp, synthetic construct
  misc_feature 1..1104: note = Description of Artificial Sequence: Synthetic coding sequence
  source 1..1104: mol_type = other DNA
atgaggaagggcaagggccccatctgcctcttcagccggcccaccctgcggcccagccgcagcaaggtgtccctcatcgagggccgcggggccaacatggccgcccgctggaggttctggtgtgtgtctgtgaccatggtggtggccctgctgattgtgtgtgatgtgcccagcgccagcgcccagaggaagaaggagatggtgctgtctgagaaggtgtcccagctgatggagtggaccaacaagaggcctgtgatccgcatgaatggagacaagttccggcggctggtgaaggccccacccaggaactacagcgtgattgtgatgttcaccgccctgcagctgcaccggcagtgtgtggtgtgcaagcaggctgatgaggagttccagatcctggccaacagctggagatacagcagcgccttcaccaaccgcatcttctttgccatggtggactttgatgagggcagtgatgtgttccagatgctgaacatgaacagcgcccccaccttcatcaacttccctgccaagggcaagcccaagagaggagacacctatgagctgcaggtgcggggcttctctgctgagcagatcgcccgctggattgctgacagaacagatgtgaacatccgggtcatccggccccccaactatgccggccccctgatgctgggcctgctgctggccgtgattggaggcctggtgtacctgcggcgcagcaacatggagttcctgttcaacaagacaggctgggcctttgctgccctgtgctttgtgctggccatgaccagcggccagatgtggaaccacatccggggccccccctatgcccacaagaacccccacactggacatgtgaactacatccacggcagcagccaggcccagtttgtggccgagacccacatcgtgctgctcttcaacggcggcgtgaccctgggcatggtgctgctgtgtgaggccgccaccagtgacatggacatcggcaagaggaagatcatgtgtgtggccggcatcggcctggtggtgctcttcttctcctggatgctgagcatcttccgcagcaagtaccacggctacccctacagcttcctgatgtcctag

SEQ ID NO: 158427 - DNA, 657 bp, synthetic construct
  misc_feature 1..657: note = Description of Artificial Sequence: Synthetic coding sequence
  source 1..657: mol_type = other DNA
atggtggactttgatgagggcagtgatgtgttccagatgctgaacatgaacagcgcccccaccttcatcaacttccctgccaagggcaagcccaagagaggagacacctatgagctgcaggtgcggggcttctctgctgagcagatcgcccgctggattgctgacagaacagatgtgaacatccgggtcatccggccccccaactatgccggccccctgatgctgggcctgctgctggccgtcatcggcggcctggtgtacctgcggcgcagcaacatggagttcctgttcaacaagacaggctgggcctttgctgccctgtgctttgtgctggccatgaccagcggccagatgtggaaccacatccggggccccccctatgcccacaagaacccccacacaggccacgtgaactacatccacggcagcagccaggcccagtttgtggccgagacccacatcgtgctgctcttcaatggaggagtgaccctgggcatggtgctgctgtgtgaggccgccaccagtgacatggacatcggcaagaggaagatcatgtgtgtggccggcatcggcctggtggtgctcttcttctcctggatgctgagcatcttccgcagcaagtaccacggctacccctacagcttcctgatgtcctag

SEQ ID NO: 158428 - DNA, 330 bp, synthetic construct
  misc_feature 1..330: note = Description of Artificial Sequence: Synthetic coding sequence
  source 1..330: mol_type = other DNA
atggagagtgacttctacctgcgctactacgtgggccacaagggcaagtttggacatgagttcctggagtttgagttccggccagatggcaagctgcgctatgccaacaacagcaactacaagaatgatgtgatgatcaggaaggaggagctggagatcgtgattggagatgagcacatctccttcaccaccagcaagattggcagcctgattgatgtgaaccagagcaaggaccctgagggcctgcgggtcttctactacctggtgcaggacctgaagtgcctggtgttcagcctcatcggcctgcacttcaagatcaagcccatctag

SEQ ID NO: 158429 - DNA, 441 bp, synthetic construct
  misc_feature 1..441: note = Description of Artificial Sequence: Synthetic coding sequence
  source 1..441: mol_type = other DNA
atggagagtgacttctacctgcgctactacgtgggccacaagggcaagtttggacatgagttcctggagtttgagttccggccagatggcaagctgcgctatgccaacaacagcaactacaagaatgatgtgatgatcaggaaggaggcctacgtgcacaagtctgtgatggaggagctgaagaggatcattgatgattctgagatcaccaaggaggatgatgccctgtggcccccaccagacagagtgggccggcaggagctggagatcgtgattggagatgagcacatctccttcaccaccagcaagattggcagcctgattgatgtgaaccagagcaaggaccctgagggcctgcgggtcttctactacctggtgcaggacctgaagtgcctggtgttcagcctgattggcctgcacttcaagatcaagcccatctag

SEQ ID NO: 158430 - DNA, 1731 bp, synthetic construct
  misc_feature 1..1731: note = Description of Artificial Sequence: Synthetic coding sequence
  source 1..1731: mol_type = other DNA
atgggcagcatcctgagcagaagaattgctggggtggaggacatcgacatccaggccaacagcgcctaccgctacccacccaagagcggcaactactttgccagccacttcttcatgggcggggagaagtttgacaccccccaccctgagggctacctgtttggagagaacatggacctgaacttcctgggcagcaggcctgtgcagttcccctacgtgaccccagcccctcatgagcctgtgaagaccctgcggagcctggtgaacatcaggaaggacagcctgcggctggtgcgctacaaggatgatgctgacagccccacagaagatggagacaagccccgggtgctgtacagcctggagttcacctttgatgctgatgcccgggtggccatcaccatctactgccaggccagcgaggagttcctgaatggccgggctgtgtacagccccaagagccccagcctgcagagcgagaccgtgcactacaagaggggcgtgtcccagcagttcagcctgcccagcttcaagattgacttcagcgagtggaaggatgatgagctgaactttgacctggacagaggagtcttccctgtggtgatccaggccgtggtggatgaaggagatgtggtggaggtgacaggccacgcccacgtgctgctggccgcctttgagaagcacatggatggcagcttctctgtgaagcccctgaagcagaagcagatcgtggacagagtgtcctacctgctgcaggagatctacggcatcgagaacaagaacaaccaggagaccaagcccagtgatgatgagaacagcgacaacagcaatgaatgtgtggtgtgcctgagtgacctgcgggacaccctcatcctgccctgccgccacctgtgcctgtgcaccagctgtgccgacaccctgcgctaccaggccaacaactgccccatctgccgcctgcccttccgggccctgctgcagatccgggctgtgaggaagaagccaggggccctgagccctgtgtccttcagccctgtgctggcccagagcctggagcatgatgagcacagctgccccttcaagaagagcaagccccacccagccagcctggccagcaagaagcccaagcgggagaccaacagcgacagcgtgcccccaggctatgagcccatcagcctgctggaggccctgaatggcctgcgggctgtgtccccagccatccccagcgcccccctgtatgaggagatcacctacagcggcatcagtgatggcctgagccaggccagctgccccctggccgccatcgaccacatcctggacagcagccggcagaagggccggccccagagcaaggccccagacagcaccctgcggagccccagcagccccatccatgaagaagatgaggagaagctgtctgaagatgtggatgcccccccacccctgggcggcgctgagctggccctgcgggagagcagcagccctgagagcttcatcacagaggaggtggatgagagcagcagcccccagcagggcaccagggctgccagcattgaaaatgtgctgcaggacagcagccctgagcactgcggccggggccccccagctgacatctacctgcccggccggcccacctccatggagacagcccacggcctggccaccaccagccccacctggccacccctgggcggccccagcccagaccccagcgctgctgagctgacccccctgtag

SEQ ID NO: 158431 - DNA, 1659 bp, synthetic construct
  misc_feature 1..1659: note = Description of Artificial Sequence: Synthetic coding sequence
  source 1..1659: mol_type = other DNA
atgggcagcatcctgagcagaagaattgctggggtggaggacatcgacatccaggccaacagcgcctaccgctacccacccaagagcggcaactactttgccagccacttcttcatgggcggggagaagtttgacaccccccaccctgagggctacctgtttggagagaacatggacctgaacttcctgggcagcaggcctgtgcagttcccctacgtgaccccagcccctcatgagcctgtgaagaccctgcggagcctggtgaacatcaggaaggacagcctgcggctggtgcgctacaaggatgatgctgacagccccacagaagatggagacaagccccgggtgctgtacagcctggagttcacctttgatgctgatgcccgggtggccatcaccatctactgccaggccagcgaggagttcctgaatggccgggctgtgtacagccccaagagccccagcctgcagagcgagaccgtgcactacaagaggggcgtgtcccagcagttcagcctgcccagcttcaagattgacttcagcgagtggaaggatgatgagctgaactttgacctggacagaggagtcttccctgtggtgatccaggccgtggtggatgaaggagatgtggtggaggtgacaggccacgcccacgtgctgctggccgcctttgagaagcacatggatggcagcttctctgtgaagcccctgaagcagaagcagatcgtggacagagtgtcctacctgctgcaggagatctacggcatcgagaacaagaacaaccaggagaccaagcccagtgatgatgagaacagcgacaacagcaatgaatgtgtggtgtgcctgagtgacctgcgggacaccctcatcctgccctgccgccacctgtgcctgtgcaccagctgtgccgacaccctgcgctaccaggccaacaactgccccatctgccgcctgcccttccgggccctgctgcagatccgggctgtgaggaagaagccaggggccctgagccctgtgtccttcagccctgtgctggcccagagcctggagcatgatgagcacagctgccccttcaagaagagcaagccccacccagccagcctggccagcaagaagcccaagcgggagaccaacagcgacagcgtgcccccaggctatgagcccatcagcctgctggaggccctgaatggcctgcgggctgtgtccccagccatccccagcgcccccctgtatgaggagatcacctacagcggcatcagtgatggcctgagccaggccagctgccccctggccgccatcgaccacatcctggacagcagccggcagaagggccggccccagagcaaggccccagacagcaccctgcggagccccagcagccccatccatgaagaagatgaggagaagctgtctgaagatgtggatgcccccccacccctgggcggcgctgagctggccctgcgggagagcagcagccctgagagcttcatcacagaggaggtggatgagagcagcagcccccagcagggcaccagggctgccagcattgaaaatgtgctgcaggacagcagccctgagcactgcggccggggccccccagctgacatctacctgcctgccctgggccctgacagctgcagcgtgggcattgatgaatag

SEQ ID NO: 158432 - DNA, 1596 bp, synthetic construct
  misc_feature 1..1596: note = Description of Artificial Sequence: Synthetic coding sequence
  source 1..1596: mol_type = other DNA
atgggcagcatcctgagcagaagaattgctggggtggaggacatcgacatccaggccaacagcgcctaccgctacccacccaagagcggcaactactttgccagccacttcttcatgggcggggagaagtttgacaccccccaccctgagggctacctgtttggagagaacatggacctgaacttcctgggcagcaggcctgtgcagttcccctacgtgaccccagcccctcatgagcctgtgaagaccctgcggagcctggtgaacatcaggaaggacagcctgcggctggtgcgctacaaggatgatgctgacagccccacagaagatggagacaagccccgggtgctgtacagcctggagttcacctttgatgctgatgcccgggtggccatcaccatctactgccaggccagcgaggagttcctgaatggccgggctgtgtacagccccaagagccccagcctgcagagcgagaccgtgcactacaagaggggcgtgtcccagcagttcagcctgcccagcttcaagattgacttcagcgagtggaaggatgatgagctgaactttgacctggacagaggagtcttccctgtggtgatccaggccgtggtggatgaaggagatgctgtggtggaggtgactggacatgcccacgtgctgctggccgcctttgagaagcacatggatggcagcttctctgtgaagcccctgaagcagaagcagatcgtggacagagtgtcctacctgctgcaggagatctatggaattgagaacaagaacaaccaggagaccaagcccagtgatgatgaaaattctgacaacagcaatgaatgtgtggtgtgcctgagtgacctgcgggacaccctcatcctgccctgccgccacctgtgcctgtgcaccagctgtgccgacaccctgcgctaccaggccaacaactgccccatctgccgcctgcccttccgggccctgctgcagatccgggctgtgaggaagaagccaggggccctgagccctgtgtccttcagccctgtgctggcccagagcctggagcatgatgagcacagcaacagcgacagcgtgcccccaggctatgagcccatcagcctgctggaggccctgaatggcctgcgggctgtgtccccagccatccccagcgcccccctgtatgaggagatcacctacagcggcatcagtgatggcctgagccaggccagctgccccctggccgccatcgaccacatcctggacagcagccggcagaagggccggccccagagcaaggccccagacagcaccctgcggagccccagcagccccatccacgaggaggatgaggagaagctgtctgaagatgtggatgcccccccacccctgggcggcgctgagctggccctgcgggagagcagcagccctgagagcttcatcacagaggaggtggatgagagcagcagcccccagcagggcacccgggccgccagcattgaaaatgtgctgcaggacagcagccctgagcactgcggccggggccccccagctgacatctacctgcctgccctgggccctgacagctgcagcgtgggcattgatgaatag

SEQ ID NO: 158433 - DNA, 963 bp, synthetic construct
  misc_feature 1..963: note = Description of Artificial Sequence: Synthetic coding sequence
  source 1..963: mol_type = other DNA
atgggcagcatcctgagcagaagaattgctggggtggaggacatcgacatccaggccaacagcgcctaccgctacccacccaagagcggcaactactttgccagccacttcttcatgggcggggagaagtttgacaccccccaccctgagggctacctgtttggagagaacatggacctgaacttcctgggcagcaggcctgtgcagttcccctacgtgaccccagcccctcatgagcctgtgaagaccctgcggagcctggtgaacatcaggaaggacagcctgcggctggtgcgctacaaggatgatgctgacagccccacagaagatggagacaagccccgggtgctgtacagcctggagttcacctttgatgctgatgcccgggtggccatcaccatctactgccaggccagcgaggagttcctgaatggccgggctgtgtacagccccaagagccccagcctgcagagcgagaccgtgcactacaagaggggcgtgtcccagcagttcagcctgcccagcttcaagattgacttcagcgagtggaaggatgatgagctgaactttgacctggacagaggagtcttccctgtggtgatccaggccgtggtggatgaaggagatgtggtggaggtgacaggccacgcccacgtgctgctggccgcctttgagaagcacatggatggcagcttctctgtgaagcccctgaagcagaagcagatcgtggacagagtgtcctacctgctgcaggagatctacggcatcgagaacaagaacaaccaggagaccaagcccagtgatgatgagaacagcgacaacagcaatgaatgtgtggtgtgcctgagtgacctgcgggacaccctcatcctgccctgccgccacctgtgcctgtgcaccagctgtgccgacaccctgcgctaccaggccaacaactgccccatctgccgcctgcagctgtag

SEQ ID NO: 158434 - DNA, 1632 bp, synthetic construct
  misc_feature 1..1632: note = Description of Artificial Sequence: Synthetic coding sequence
  source 1..1632: mol_type = other DNA
atggccaagggggagggcgctgagagcggcagcgctgctggcctgctgcccaccagcatcctgcagagcacagagaggcctgcccaggtgaagaaggagcccaagaagaagaagcagcagctgtctgtgtgcaacaagctgtgctacgccctgggcggggccccctaccaggtgacaggctgtgccctgggcttcttcctgcagatctacctgctggatgtggcccagaaggatgaggaggtggtgttctgcttcagcagcttccaggtgggccccttcagcgccagcatcatcctgtttgtgggccgggcctgggatgccatcacagaccccctggtgggcctgtgcatcagcaagagcccctggacctgcctgggccgcctgatgccctggatcatcttcagcacccccctggccgtgattgcctacttcctgatctggtttgtgcctgacttcccccacggccagacctactggtacctgctcttctactgcctgtttgagaccatggtgacctgcttccacgtgccctacagcgccctgaccatgttcatcagcacagagcagacagagcgggacagcgccacagcctacaggatgacagtggaggtgctgggcaccgtgctgggcacagccatccagggccagatcgtgggccaggccgacaccccctgcttccaggacctgaacagcagcacagtggccagccagagcgccaaccacacccacggcaccaccagccaccgggagacccagaaggcctacctgctggccgccggggtcatcgtgtgcatctacatcatctgtgccgtcatcctgatcctgggcgtgcgggagcagcgggagccctatgaggcccagcagagcgagcccatcgcctacttccggggcctgcggctggtgatgagccacggcccctacatcaagctgatcaccggcttcctgttcaccagcctggccttcatgctggtggagggcaactttgtgctcttctgcacctacaccctgggcttcagaaatgagttccagaacctgctgctggccatcatgctgagcgccaccctgaccatccccatctggcagtggttcctgaccaggtttgggaagaagacagctgtgtatgtgggcatcagcagcgctgtgcccttcctgatcctggtggccctgatggagagcaacctgatcatcacctatgctgtggccgtggccgccggcatctctgtggccgccgccttcctgctgccctggagcatgctgcctgatgtgattgatgacttccacctgaagcagccccacttccacggcacagagcccatcttcttctccttctacgtgttcttcaccaagtttgccagcggcgtgtccctgggcatcagcaccctgagcctggactttgctggctaccagacccggggctgcagccagcctgagcgggtgaagttcaccctgaacatgctggtgaccatggcccccatcgtgctgatcctgctgggcctgctgctcttcaagatgtaccccattgatgaggagcggcggcggcagaacaagaaggccctgcaggccctgagagatgaggccagcagcagcggctgcagcgagacagacagcacagagctggccagcatcctgtag

SEQ ID NO: 158435 - DNA, 1593 bp, synthetic construct
  misc_feature 1..1593: note = Description of Artificial Sequence: Synthetic coding sequence
  source 1..1593: mol_type = other DNA
atggccaagggggagggcgctgagagcggcagcgctgctggcctgctgcccaccagcatcctgcagagcacagagaggcctgcccaggtgaagaaggagcccaagaagaagaagcagcagctgtctgtgtgcaacaagctgtgctacgccctgggcggggccccctaccaggtgacaggctgtgccctgggcttcttcctgcagatctacctgctggatgtggcccaggtgggccccttcagcgccagcatcatcctgtttgtgggccgggcctgggatgccatcacagaccccctggtgggcctgtgcatcagcaagagcccctggacctgcctgggccgcctgatgccctggatcatcttcagcacccccctggccgtcatcgcctacttcctgatctggtttgtgcctgacttcccccacggccagacctactggtacctgctcttctactgcctgtttgagaccatggtgacctgcttccacgtgccctacagcgccctgaccatgttcatcagcacagagcagacagagcgggacagcgccacagcctacaggatgacagtggaggtgctgggcaccgtgctgggcacagccatccagggccagatcgtgggccaggccgacaccccctgcttccaggacctgaacagcagcacagtggccagccagagcgccaaccacacccacggcaccaccagccaccgggagacccagaaggcctacctgctggccgccggcgtgattgtgtgcatctacatcatctgtgctgtgatcctgatcctgggcgtgcgggagcagcgggagccctatgaggcccagcagagcgagcccatcgcctacttccggggcctgcggctggtgatgagccacggcccctacatcaagctgatcaccggcttcctgttcaccagcctggccttcatgctggtggagggcaactttgtgctcttctgcacctacaccctgggcttcagaaatgagttccagaacctgctgctggccatcatgctgagcgccaccctgaccatccccatctggcagtggttcctgaccaggtttgggaagaagacagctgtgtatgtgggcatcagcagcgctgtgcccttcctgatcctggtggccctgatggagagcaacctgatcatcacctatgctgtggccgtggccgccggcatctctgtggccgccgccttcctgctgccctggagcatgctgcctgatgtgattgatgacttccacctgaagcagccccacttccatggaacagagcccatcttcttctccttctacgtgttcttcaccaagtttgccagcggcgtgtccctgggcatcagcaccctgagcctggactttgctggctaccagacccggggctgcagccagcctgagcgggtgaagttcaccctgaacatgctggtgaccatggcccccatcgtgctgatcctgctgggcctgctgctcttcaagatgtaccccattgatgaggagcggcggcggcagaacaagaaggccctgcaggccctgagagatgaggccagcagcagcggctgcagcgagacagacagcacagagctggccagcatcctgtag

SEQ ID NO: 158436 - DNA, 1125 bp, synthetic construct
  misc_feature 1..1125: note = Description of Artificial Sequence: Synthetic coding sequence
  source 1..1125: mol_type = other DNA
atggtgacctgcttccacgtgccctacagcgccctgaccatgttcatcagcacagagcagacagagcgggacagcgccacagcctacaggatgacagtggaggtgctgggcaccgtgctgggcacagccatccagggccagatcgtgggccaggccgacaccccctgcttccaggacctgaacagcagcacagtggccagccagagcgccaaccacacccacggcaccaccagccaccgggagacccagaaggcctacctgctggccgccggcgtgattgtgtgcatctacatcatctgtgctgtgatcctgatcctgggcgtgcgggagcagcgggagccctatgaggcccagcagagcgagcccatcgcctacttccggggcctgcggctggtgatgagccacggcccctacatcaagctgatcaccggcttcctgttcaccagcctggccttcatgctggtggagggcaactttgtgctcttctgcacctacaccctgggcttcagaaatgagttccagaacctgctgctggccatcatgctgagcgccaccctgaccatccccatctggcagtggttcctgaccaggtttgggaagaagacagctgtgtatgtgggcatcagcagcgctgtgcccttcctgatcctggtggccctgatggagagcaacctgatcatcacctatgctgtggccgtggccgccggcatctctgtggccgccgccttcctgctgccctggagcatgctgcctgatgtgattgatgacttccacctgaagcagccccacttccatggaacagagcccatcttcttctccttctacgtgttcttcaccaagtttgccagcggcgtgtccctgggcatcagcaccctgagcctggactttgctggctaccagacccggggctgcagccagcctgagcgggtgaagttcaccctgaacatgctggtgaccatggcccccatcgtgctgatcctgctgggcctgctgctcttcaagatgtaccccattgatgaggagcggcggcggcagaacaagaaggccctgcaggccctgagagatgaggccagcagcagcggctgcagcgagacagacagcacagagctggccagcatcctgtag

SEQ ID NO: 158437 - DNA, 801 bp, synthetic construct
  misc_feature 1..801: note = Description of Artificial Sequence: Synthetic coding sequence
  source 1..801: mol_type = other DNA
atggccaagggggagggcgctgagagcggcagcgctgctggcctgctgcccaccagcatcctgcagagcacagagaggcctgcccagaaggagcccaagaagaagaagcagcagctgtctgtgtgcaacaagctgtgctacgccctgggcggggccccctaccaggtgacaggctgtgccctgggcttcttcctgcagatctacctgctggatgtggcccaggtgggccccttcagcgccagcatcatcctgtttgtgggccgggcctgggatgccatcacagaccccctggtgggcctgtgcatcagcaagagcccctggacctgcctgggccgcctgatgccctggatcatcttcagcacccccctggccgtcatcgcctacttcctgatctggtttgtgcctgacttcccccacggccagacctactggtacctgctcttctactgcctgtttgagaccatggtgacctgcttccacgtgccctacagcgccctgaccatgttcatcagcacagagcagacagagcgggacagcgccacagcctacaggatgacagtggaggtgctgggcaccgtgctgggcacagccatccagggccagatcgtgggccaggccgacaccccctgcttccaggacctgaacagcagcacagtggccagccagagcgccaaccacacccacggcaccaccagccaccgggagacccagaaggcctacctgctggccgccggcgtgattgtgtgcatctacatcatctgtgctgtgatcctgatcctgggcgtgcgggagcagaggtag

SEQ ID NO: 158438 - DNA, 2376 bp, synthetic construct
  misc_feature 1..2376: note = Description of Artificial Sequence: Synthetic coding sequence
  source 1..2376: mol_type = other DNA
atggctgatgacaaggtggccatcctgacagatgatgaggaggagcagaagaggaaatatgtgctggccgaccccttcaacggcatcagccgggagcctgagccccccagcaatgagacccccagcagcacagagaccagcgccatccctgaggaggagattgactggattgagaagcactgtgtgaagatcaacaatgacctgctgatcagcaaggtgttctacttcttcttctacagcgcctacggcagcctgtaccccctgctgcctgtgtactacaagcagctgggcatgagccccagccagagcggcctgctggtgggcatccgctacttcatcgagttctgcagcgcccccttctggggcgtggtggccgaccgcttcaagaagggcaagatcgtgctgctcttcagcctgctgtgctgggtgctcttcaacctgggcattggatttgtgaagccagccaccctgcgctgtgtgcccaagatccggcccaccacccaccccaccaatgccagccaccagctgaccatcctgcccaccaacagcagcttcaccagcttcctgaccatcagccccaagatgagggagaagaggaacctgctggagacccggctgaatgtgtctgacacagtgaccctgcccacagcccccaacatgaacagcgagcccaccctgcagccccagacaggagagatcaccaacaggatgatggacctgaccctgaacagcagcacagccacccctgtgtccccaggctctgtgaccaaggagaccaccaccgtgattgtgaccaccaccaagagcctgcccagcgaccaggtgatgctggtgtatgaccagcaggaggtggaggccatcttcctggtgatcctggtggtggtgatcattggagagttcttcagcgccagctctgtgaccatcgtggacacagtgaccctgcagtacctgggcaagcaccgggacagatatggcctgcagaggatgtggggcagcctgggctggggcctggccatgctgtctgtgggcatcggcatcgactacacccacatcgaggtgctgattgatggcaagggctgcaagcccccagagtacagaaactaccagatcgtgttcatcgtgtttggagtgctgatgaccatggccctgattgtggccacccagttccgcttccgctacaaccacttcaagaatgatgacagcaagggcaaggaggtggagatcccccaggtggagaggaacaacagcacagagagcagcgaggagacccccaccaccaccagccacagccaggccttcaacttctgggacctgatcaagctgctgtgcagcgtgcagtatggctctgtgctgtttgtggcctggttcatgggcttcggctacggctttgtgttcaccttcctgtactggcacctggaggacctgaatggcaccaccaccctgtttggagtgtgcagcgtgctgagccacgtgtctgagctgacagcctacttcttcagccacaagctgattgagctgattggccacatccgggtgctgtacatcggcctggcctgcaacacagcccgctacatctacatctcctacctggagaatgcctggacagtgctgcccatggaggtgctgcagggcgtgacccacgccgccatctgggccgcctgcatctcctacctgtctgctgctgtgcccccagagctgcggaccagcgcccagggcatcctgcagggcctgcacctgggcctgggccggggctgtggggccatgattggaggagtgctggtgaactactttggagctgctgccaccttccggggcatcggcatggcctgcctggtgatcctgctgctgtttgccctgatccagtggctggccgtgcctgatgaggaggaggacaagaccatgctggccgagcgcatccctgtgcccagcagccctgtgcccatcgccaccatcgacctggtgcagcagcagacagaagatgtgatgcccagaattgagccccggctgccccccaagaagaccaagcaccaggaggagcaggaggatgtgaacaagccagcctggggcgtgagcagcagcccctgggtgacctttgtgtatgccctgtaccagatcaaggagatgatgcagctgacccgggacaacagagccagcgagatccagcccctgcagggcaccaatgaaaatcgggagaacagccctgctggccgggcccagcctgtgccctgtgagacccacagcgaccccagcaggaaccagcccagcccagatgctgctgccagccagacccagaccagccctgcccaccccagcgtggacccctgcacagaggagagcgaggagcagcaggcccagctggccgccggcggccactag

SEQ ID NO: 158439 - DNA, 2376 bp, synthetic construct; identical to SEQ ID NO: 158438
  misc_feature 1..2376: note = Description of Artificial Sequence: Synthetic coding sequence
  source 1..2376: mol_type = other DNA

SEQ ID NO: 158440 - DNA, 129 bp, synthetic construct
  misc_feature 1..129: note = Description of Artificial Sequence: Synthetic coding sequence
  source 1..129: mol_type = other DNA
atggctgatgacaaggtggccatcctgacagatgatgaggaggagcagaagaggaaatatgtgctggccgaccccttcaacggcatcagccgggagcctgagccccccagcaatgagacccccagctag

SEQ ID NO: 158441 - DNA, 345 bp, synthetic construct
  misc_feature 1..345: note = Description of Artificial Sequence: Synthetic coding sequence
  source 1..345: mol_type = other DNA
atggctgatgacaaggtggccatcctgacagatgatgaggaggagcagaagaggaaatatgtgctggccgaccccttcaacggcatcagccgggagcctgagccccccagcaatgagacccccagcagcacagagaccagcgccatccctgaggaggagattgactggattgagaagcactgtgtgaagatcaacaatgacctgctgatcagcaaggtgttctacttcttcttctacagcgcctacggcagcctgtaccccctgctgcctgtgtactacaagcagctgggcatgagccccagccagagcggcctgctggtgggcatccgctacttcattgaatag

SEQ ID NO: 158442 - DNA, 471 bp, synthetic construct
  misc_feature 1..471: note = Description of Artificial Sequence: Synthetic coding sequence
  source 1..471: mol_type = other DNA
atggctgatgacaaggtggccatcctgacagatgatgaggaggagcagaagaggaaatatgtgctggccgaccccttcaacggcatcagccgggagcctgagccccccagcaatgagacccccagcagcacagagaccagcgccatccctgaggaggagattgactggattgagaagcactgtgtgaagatcaacaatgacctgctgatcagcaaggtgttctacttcttcttctacagcgcctacggcagcctgtaccccctgctgcctgtgtactacaagcagctgggcatgagccccagccagagcggcctgctggtgggcatccgctacttcatcgagttctgcagcgcccccttctggggcgtggtggccgaccgcttcaagaagggcaagatcgtgctgctcttcagcctgctgtgctgggtgctcttcaacctgggcattggatttgtgaagccagccacctag

SEQ ID NO: 158443 - DNA, 762 bp, synthetic construct
  misc_feature 1..762: note = Description of Artificial Sequence: Synthetic coding sequence
  source 1..762: mol_type = other DNA
atggaggtgctgcagggcgtgacccacgccgccatctgggccgcctgcatctcctacctgtctgctgctgtgcccccagagctgcggaccagcgcccagggcatcctgcagggcctgcacctgggcctgggccggggctgtggggccatgattggaggagtgctggtgaactactttggagctgctgccaccttccggggcatcggcatggcctgcctggtgatcctgctgctgtttgccctgatccagtggctggccgtgcctgatgaggaggaggacaagaccatgctggccgagcgcatccctgtgcccagcagccctgtgcccatcgccaccatcgacctggtgcagcagcagacagaagatgtgatgcccagaattgagccccggctgccccccaagaagaccaagcaccaggaggagcaggaggatgtgaacaagccagcctggggcgtgagcagcagcccctgggtgacctttgtgtatgccctgtaccagatcaaggagatgatgcagctgacccgggacaacagagccagcgagatccagcccctgcagggcaccaatgaaaatcgggagaacagccctgctggccgggcccagcctgtgccctgtgagacccacagcgaccccagcaggaaccagcccagcccagatgctgctgccagccagacccagaccagccctgcccaccccagcgtggacccctgcacagaggagagcgaggagcagcaggcccagctggccgccggcggccactag

SEQ ID NO: 158444 - DNA, 696 bp, synthetic construct
  misc_feature 1..696: note = Description of Artificial Sequence: Synthetic coding sequence
  source 1..696: mol_type = other DNA
atggaggtgctgcagggcgtgacccacgccgccatctgggccgcctgcatctcctacctgtctgctgctgtgcccccagagctgcggaccagcgcccagggcatcctgcagggcctgcacctgggcctgggccggggctgtggggccatgattggaggagtgctggtgaactactttggagctgctgccaccttccggggcatcggcatggcctgcctggtgatcctgctgctgtttgccctgatccagtggctggccgtgcctgatgaggaggaggacaagaccatgctggccgagcgcatccctgtgcccagcagccctgtgcccatcgccaccatcgacctggtgcagcagcagacagaagatgtgaacaagccagcctggggcgtgagcagcagcccctgggtgacctttgtgtatgccctgtaccagatcaaggagatgatgcagctgacccgggacaacagagccagcgagatccagcccctgcagggcaccaatgaaaatcgggagaacagccctgctggccgggcccagcctgtgccctgtgagacccacagcgaccccagcaggaaccagcccagcccagatgctgctgccagccagacccagaccagccctgcccaccccagcgtggacccctgcacagaggagagcgaggagcagcaggcccagctggccgccggcggccactag

SEQ ID NO: 158445 - DNA, 1557 bp, synthetic construct
  misc_feature 1..1557: note = Description of Artificial Sequence: Synthetic coding sequence
  source 1..1557: mol_type = other DNA
atggccggcctgagaaatgaaagtgagcaggagcccctgctgggggacaccccaggcagccgggagtgggacatcctggagacagaggagcactacaagagccgctggaggagcatccgcatcctgtacctgaccatgttcctgagctctgtgggcttctctgtggtgatgatgagcatctggccctacctgcagaagattgaccccacagctgacaccagcttcctgggctgggtgattgccagctacagcctgggccagatggtggccagccccatcttcggcctgtggagcaactaccggcccaggaaggagcccctcatcgtgtccatcctgatctctgtggccgccaactgcctgtatgcctacctgcacatcccagccagccacaacaagtactacatgctggtggcccggggcctgctgggcatcggggctggaaatgtggccgtggtgcgcagctacacagctggggccaccagcctgcaggagaggaccagctccatggccaacatctccatgtgccaggccctgggcttcatcctgggccctgtgttccagacctgcttcaccttcctgggggagaagggcgtgacctgggatgtgatcaagctgcagatcaacatgtacaccacccctgtgctgctgagcgccttcctgggcatcctgaacatcatcctgatcctggccatcctgcgggagcaccgggtggatgacagcggccggcagtgcaagagcatcaactttgaggaggccagcacagatgaggcccaggtgccccagggcaacatcgaccaggtggccgtggtggccatcaacgtgctcttctttgtgaccctcttcatctttgccctgtttgagaccatcatcacccccctgaccatggacatgtatgcctggacccaggagcaggccgtgctgtacaacggcatcatcctggccgccctgggcgtggaggccgtggtgatcttcctgggcgtgaagctgctgagcaagaagatcggggagcgggccatcctgctgggcggcctgattgtggtgtgggtgggcttcttcatcctgctgccctggggcaaccagttccccaagatccagtgggaggacctgcacaacaacagcatccccaacaccacctttggagagatcatcatcggcctgtggaagagccccatggaggatgacaatgaaagacccaccggctgcagcattgagcaggcctggtgcctgtacacccctgtgatccacctggcccagttcctgaccagcgctgtgctgattggcctgggctaccctgtgtgcaacctgatgagctacaccctgtacagcaagatcctgggccccaagccccagggcgtgtacatgggctggctgacagccagcggcagcggggcccgcatcctgggccccatgttcatcagccaggtgtatgcccactggggcccccgctgggccttcagcctggtgtgtggcatcatcgtgctgaccatcaccctgctgggcgtggtgtacaagaggctgattgccctgtctgtgcgctatggccgcatccaggagtag

SEQ ID NO: 158446 - DNA, 462 bp, synthetic construct
  misc_feature 1..462: note = Description of Artificial Sequence: Synthetic coding sequence
  source 1..462: mol_type = other DNA
atgttcctgagctctgtgggcttctctgtggtgatgatgagcatctggccctacctgcagaagattgaccccacagctgacaccagcttcctgggctgggtgattgccagctacagcctgggccagatggtggccagccccatcttcggcctgtggagcaactaccggcccaggaaggagcccctgattgtgtccatcctgatctctgtggccgccaactgcctgtatgcctacctgcacatcccagccagccacaacaagtactacatgctggtggcccggggcctgctgggcattggagctgtgttccagacctgcttcaccttcctgggggagaagggcgtgacctgggatgtgatcaagctgcagatcaacatgtacaccacccctgtgctgctgagcgccttcctgggcatcctgaacatcatcctgatcctggccatcctgagcaagtacagatag

SEQ ID NO: 158447 - DNA, 555 bp, synthetic construct
  misc_feature 1..555: note = Description of Artificial Sequence: Synthetic coding sequence
  source 1..555: mol_type = other DNA
atgttcctgagctctgtgggcttctctgtggtgatgatgagcatctggccctacctgcagaagattgaccccacagctgacaccagcttcctgggctgggtgattgccagctacagcctgggccagatggtggccagccccatcttcggcctgtggagcaactaccggcccaggaaggagcccctgattgtgtccatcctgatctctgtggccgccaactgcctgtatgcctacctgcacatcccagccagccacaacaagtactacatgctggtggcccggggcctgctgggcattggagctggaaatgtggccgtggtgcgcagctacacagctggggccaccagcctgcaggagaggaccagctccatggccaacatctccatgtgccaggccctgggcttcatcctgggccctgagaacatcgtgtggatgacccaggaggacagcgtgaaggtgctgatcctgaagaagcaggtgcagatgaagctgcgcttccccaaggagatcctgacccggctgctgctgtggcccagcatgttctgcttcctgtag

SEQ ID NO: 158448 - DNA, 750 bp, synthetic construct
  misc_feature 1..750: note = Description of Artificial Sequence: Synthetic coding sequence
  source 1..750: mol_type = other DNA
atgggagagctgatggccttcctgctgcccctcatcatcgtgctgatggtgaagcacagcgacagcaggacccacagcctgcgctacttccggctgggcgtgtctgaccccatccatggagtgcctgagttcatctctgtgggctacgtggacagccaccccatcaccacctatgacagcgtgacccggcagaaggagccccgggccccctggatggccgagaacctggccccagaccactgggagcgctacacccagctgctgcggggctggcagcagatgttcaaggtggagctgaagaggctgcagaggcactacaaccacagcggcagccacacctaccagaggatgattggctgtgagctgctggaggatggcagcaccaccggcttcctgcagtatgcctatgatggccaggacttcctgatcttcaacaaggacaccctgtcctggctggccgtggacaacgtggcccacaccatcaagcaggcctgggaggccaaccagcacgagctgctgtaccagaagaactggctggaggaggagtgcatcgcctggctgaagcgcttcctggagtatggcaaggacaccctgcagaggacagaaagtgagaccatccccctggtgatgaaggctgtgtctggcagcatcgtgctggtgattgtgctggccggcgtgggcgtgctggtgtggaggagaagaccccgggagcagaatggagccatctacctgcccaccccagacagatag

SEQ ID NO: 158449 - DNA, 783 bp, synthetic construct
  misc_feature 1..783: note = Description of Artificial Sequence: Synthetic coding sequence
  source 1..783: mol_type = other DNA
atgaggcctgaggacaggatgttccacatccgggccgtcatcctgcgggccctgagcctggccttcctgctgagcctgcggggagctggggccatcaaggctgaccacgtgtccacctatgctgcctttgtgcagacccaccggcccaccggggagttcatgtttgaatttgatgaagatgagatgttctacgtggacctggacaagaaggagaccgtgtggcacctggaggagtttggccaggccttctcctttgaggcccagggcggcctggccaacatcgccatcctgaacaacaacctgaacaccctcatccagaggagcaaccacacccaggccaccaatgaccccccagaggtgacagtgttccccaaggagcctgtggagctgggccagcccaacaccctcatctgccacatcgacaagttcttcccccctgtgctgaatgtgacctggctgtgcaatggagagctggtgacagagggcgtggccgagagcctcttcctgcccaggacagactacagcttccacaagttccactacctgacctttgtgcccagcgctgaggacttctatgactgccgggtggagcactggggcctggaccagcccctgctgaagcactgggaggcccaggagcccatccagatgcctgagaccacagaaacagtgctgtgtgccctgggcctggtgctgggcctggtgggcatcatcgtgggcaccgtgctgatcatcaagagcctgcggagcggccatgacccccgggcccagggcaccctgtag

SEQ ID NO: 158450 - DNA, 783 bp, synthetic construct; identical to SEQ ID NO: 158449
  misc_feature 1..783: note = Description of Artificial Sequence: Synthetic coding sequence
  source 1..783: mol_type = other DNA

SEQ ID NO: 158451 - DNA, 72 bp, synthetic construct
  misc_feature 1..72: note = Description of Artificial Sequence: Synthetic coding sequence
  source 1..72: mol_type = other DNA
atgaggcctgaggacaggatgttccacatccgggccgtcatcctgcgggccctgagcctggccttcctgtag

SEQ ID NO: 158452 - DNA, 387 bp, synthetic construct
  misc_feature 1..387: note = Description of Artificial Sequence: Synthetic coding sequence
  source 1..387: mol_type = other DNA
tgaaacaccctcatctgccacatcgacaagttcttcccccctgtgctgaatgtgacctggctgtgcaatggagagctggtgacagagggcgtggccgagagcctcttcctgcccaggacagactacagcttccacaagttccactacctgacctttgtgcccagcgctgaggacttctatgactgccgggtggagcactggggcctggaccagcccctgctgaagcactgggaggcccaggagcccatccagatgcctgagaccacagaaacagtgctgtgtgccctgggcctggtgctgggcctggtgggcatcatcgtgggcaccgtgctgatcatcaagagcctgcggagcggccatgacccccgggcccagggcaccctgtag

SEQ ID NO: 158453 - DNA, 630 bp, synthetic construct
  misc_feature 1..630: note = Description of Artificial Sequence: Synthetic coding sequence
  source 1..630: mol_type = other DNA
atgaggcctgaggacaggatgttccacatccgggccgtcatcctgcgggccctgagcctggccttcctgctgagcctgcggggagctggggccatcaaggctgaccacgtgtccacctatgctgcctttgtgcagacccaccggcccaccggggagttcatgtttgaatttgatgaagatgagatgttctacgtggacctggacaagaaggagaccgtgtggcacctggaggagtttggccaggccttctcctttgaggcccagggcggcctggccaacatcgccatcctgaacaacaacctgaacaccctcatccagaggagcaaccacacccaggccaccaatgaccccccagaggtgacagtgttccccaaggagcctgtggagctgggccagcccaacaccctcatctgccacatcgacaagttcttcccccctgtgctgaatgtgacctggctgtgcaatggagagctggtgacagagggcgtggccgagagcctcttcctgcccaggacagactacagcttccacaagttccactacctgacctttgtgcccagcgctgaggacttctatgactgccgggtggagcactggggcctggaccagcccctgctgaagcactggtag

SEQ ID NO: 158454 - DNA, 783 bp, synthetic construct; identical to SEQ ID NO: 158449
  misc_feature 1..783: note = Description of Artificial Sequence: Synthetic coding sequence
  source 1..783: mol_type = other DNA

SEQ ID NO: 158455 - DNA, 72 bp, synthetic construct; identical to SEQ ID NO: 158451
  misc_feature 1..72: note = Description of Artificial Sequence: Synthetic coding sequence
  source 1..72: mol_type = other DNA

SEQ ID NO: 158456 - DNA, 783 bp, synthetic construct; identical to SEQ ID NO: 158449
  misc_feature 1..783: note = Description of Artificial Sequence: Synthetic coding sequence
  source 1..783: mol_type = other DNA

SEQ ID NO: 158457 - DNA, 387 bp, synthetic construct; identical to SEQ ID NO: 158452
  misc_feature 1..387: note = Description of Artificial Sequence: Synthetic coding sequence
  source 1..387: mol_type = other DNA

SEQ ID NO: 158458 - DNA, 783 bp, synthetic construct; identical to SEQ ID NO: 158449
  misc_feature 1..783: note = Description of Artificial Sequence: Synthetic coding sequence
  source 1..783: mol_type = other DNA

SEQ ID NO: 158459 - DNA, 72 bp, synthetic construct; identical to SEQ ID NO: 158451
  misc_feature 1..72: note = Description of Artificial Sequence: Synthetic coding sequence
  source 1..72: mol_type = other DNA

SEQ ID NO: 158460 - DNA, 630 bp, synthetic construct; identical to SEQ ID NO: 158453
  misc_feature 1..630: note = Description of Artificial Sequence: Synthetic coding sequence
  source 1..630: mol_type = other DNA

SEQ ID NO: 158461 - DNA, 72 bp, synthetic construct; identical to SEQ ID NO: 158451
  misc_feature 1..72: note = Description of Artificial Sequence: Synthetic coding sequence
  source 1..72: mol_type = other DNA

SEQ ID NO: 158462 - DNA, 387 bp, synthetic construct; identical to SEQ ID NO: 158452
  misc_feature 1..387: note = Description of Artificial Sequence: Synthetic coding sequence
  source 1..387: mol_type = other DNA

SEQ ID NO: 158463 - DNA, 783 bp, synthetic construct; identical to SEQ ID NO: 158449
  misc_feature 1..783: note = Description of Artificial Sequence: Synthetic coding sequence
  source 1..783: mol_type = other DNA

SEQ ID NO: 158464 - DNA, 387 bp, synthetic construct; identical to SEQ ID NO: 158452
  misc_feature 1..387: note = Description of Artificial Sequence: Synthetic coding sequence
  source 1..387: mol_type = other DNA

SEQ ID NO: 158465 - DNA, 72 bp, synthetic construct; identical to SEQ ID NO: 158451
  misc_feature 1..72: note = Description of Artificial Sequence: Synthetic coding sequence
  source 1..72: mol_type = other DNA

SEQ ID NO: 158466 - DNA, 630 bp, synthetic construct; identical to SEQ ID NO: 158453
  misc_feature 1..630: note = Description of Artificial Sequence: Synthetic coding sequence
  source 1..630: mol_type = other DNA

SEQ ID NO: 158467 - DNA, 639 bp, synthetic construct
  misc_feature 1..639: note = Description of Artificial Sequence: Synthetic coding sequence
  source 1..639: mol_type = other DNA
atgaggcctgaggacaggatgttccacatccgggccgtcatcctgcgggccctgagcctggccttcctgctgagcctgcggggagctggggccatcaaggctgaccacgtgtccacctatgctgcctttgtgcagacccaccggcccaccggggagttcatgtttgaatttgatgaagatgagatgttctacgtggacctggacaagaaggagaccgtgtggcacctggaggagtttggccaggccttctcctttgaggtgaccgtcttccccaaggagcctgtggagctgggccagcccaacaccctcatctgccacatcgacaagttcttcccccctgtgctgaatgtgacctggctgtgcaatggagagctggtgacagaaggagtggccgagagcctcttcctgcccaggacagactacagcttccacaagttccactacctgacctttgtgcccagcgctgaggacttctatgactgccgggtggagcactggggcctggaccagcccctgctgaagcactgggaggcccaggagcccatccagatgcctgagaccacagagaccgtgctgtgtgccctgggcctggtgctgggcctggtgggcatcatcgtgggcaccgtgctgatcatctag

SEQ ID NO: 158468 - DNA, 639 bp, synthetic construct; identical to SEQ ID NO: 158467
  misc_feature 1..639: note = Description of Artificial Sequence: Synthetic coding sequence
  source 1..639: mol_type = other DNA

SEQ ID NO: 158469 - DNA, 387 bp, synthetic construct; identical to SEQ ID NO: 158452
  misc_feature 1..387: note = Description of Artificial Sequence: Synthetic coding sequence
  source 1..387: mol_type = other DNA

SEQ ID NO: 158470 - DNA, 639 bp, synthetic construct; identical to SEQ ID NO: 158467
  misc_feature 1..639: note = Description of Artificial Sequence: Synthetic coding sequence
  source 1..639: mol_type = other DNA

SEQ ID NO: 158471 - DNA, 630 bp, synthetic construct; identical to SEQ ID NO: 158453
  misc_feature 1..630: note = Description of Artificial Sequence: Synthetic coding sequence
  source 1..630: mol_type = other DNA

SEQ ID NO: 158472 - DNA, 72 bp, synthetic construct; identical to SEQ ID NO: 158451
  misc_feature 1..72: note = Description of Artificial Sequence: Synthetic coding sequence
  source 1..72: mol_type = other DNA

SEQ ID NO: 158473 - DNA, 639 bp, synthetic construct; identical to SEQ ID NO: 158467
  misc_feature 1..639: note = Description of Artificial Sequence: Synthetic coding sequence
  source 1..639: mol_type = other DNA

SEQ ID NO: 158474 - DNA, 630 bp, synthetic construct; identical to SEQ ID NO: 158453
  misc_feature 1..630: note = Description of Artificial Sequence: Synthetic coding sequence
  source 1..630: mol_type = other DNA

SEQ ID NO: 158475 - DNA, 387 bp, synthetic construct; identical to SEQ ID NO: 158452
  misc_feature 1..387: note = Description of Artificial Sequence: Synthetic coding sequence
  source 1..387: mol_type = other DNA

SEQ ID NO: 158476 - DNA, 783 bp, synthetic construct; identical to SEQ ID NO: 158449
  misc_feature 1..783: note = Description of Artificial Sequence: Synthetic coding sequence
  source 1..783: mol_type = other DNA

SEQ ID NO: 158477 - DNA, 639 bp, synthetic construct; identical to SEQ ID NO: 158467
  misc_feature 1..639: note = Description of Artificial Sequence: Synthetic coding sequence
  source 1..639: mol_type = other DNA

SEQ ID NO: 158478 - DNA, 72 bp, synthetic construct; identical to SEQ ID NO: 158451
  misc_feature 1..72: note = Description of Artificial Sequence: Synthetic coding sequence
  source 1..72: mol_type = other DNA

SEQ ID NO: 158479 - DNA, 639 bp, synthetic construct; identical to SEQ ID NO: 158467
  misc_feature 1..639: note = Description of Artificial Sequence: Synthetic coding sequence
  source 1..639: mol_type = other DNA

SEQ ID NO: 158480 - DNA, 72 bp, synthetic construct; identical to SEQ ID NO: 158451
  misc_feature 1..72: note = Description of Artificial Sequence: Synthetic coding sequence
  source 1..72: mol_type = other DNA

SEQ ID NO: 158481 - DNA, 639 bp, synthetic construct; identical to SEQ ID NO: 158467
  misc_feature 1..639: note = Description of Artificial Sequence: Synthetic coding sequence
  source 1..639: mol_type = other DNA

SEQ ID NO: 158482 - DNA, 387 bp, synthetic construct; identical to SEQ ID NO: 158452
  misc_feature 1..387: note = Description of Artificial Sequence: Synthetic coding sequence
  source 1..387: mol_type = other DNA

SEQ ID NO: 158483 - DNA, 630 bp, synthetic construct; identical to SEQ ID NO: 158453
  misc_feature 1..630: note = Description of Artificial Sequence: Synthetic coding sequence
  source 1..630: mol_type = other DNA

SEQ ID NO: 158484 - DNA, 783 bp, synthetic construct; identical to SEQ ID NO: 158449
  misc_feature 1..783: note = Description of Artificial Sequence: Synthetic coding sequence
  source 1..783: mol_type = other DNA

SEQ ID NO: 158485 - DNA, 387 bp, synthetic construct; identical to SEQ ID NO: 158452
  misc_feature 1..387: note = Description of Artificial Sequence: Synthetic coding sequence
  source 1..387: mol_type = other DNA

SEQ ID NO: 158486 - DNA, 630 bp, synthetic construct; identical to SEQ ID NO: 158453
  misc_feature 1..630: note = Description of Artificial Sequence: Synthetic coding sequence
  source 1..630: mol_type = other DNA

SEQ ID NO: 158487 - DNA, 630 bp, synthetic construct; identical to SEQ ID NO: 158453
  misc_feature 1..630: note = Description of Artificial Sequence: Synthetic coding sequence
  source 1..630: mol_type = other DNA

SEQ ID NO: 158488 - DNA, 783 bp, synthetic construct; identical to SEQ ID NO: 158449
  misc_feature 1..783: note = Description of Artificial Sequence: Synthetic coding sequence
  source 1..783: mol_type = other DNA

SEQ ID NO: 158489 - DNA, 639 bp, synthetic construct; identical to SEQ ID NO: 158467
  misc_feature 1..639: note = Description of Artificial Sequence: Synthetic coding sequence
  source 1..639: mol_type = other DNA

SEQ ID NO: 158490 - DNA, 783 bp, synthetic construct; identical to SEQ ID NO: 158449
  misc_feature 1..783: note = Description of Artificial Sequence: Synthetic coding sequence
  source 1..783: mol_type = other DNA

SEQ ID NO: 158491 - DNA, 783 bp, synthetic construct; identical to SEQ ID NO: 158449
  misc_feature 1..783: note = Description of Artificial Sequence: Synthetic coding sequence
  source 1..783: mol_type = other DNA

SEQ ID NO: 158492 - DNA, 783 bp, synthetic construct; identical to SEQ ID NO: 158449
  misc_feature 1..783: note = Description of Artificial Sequence: Synthetic coding sequence
  source 1..783: mol_type = other DNA

SEQ ID NO: 158493 - DNA, 783 bp, synthetic construct; identical to SEQ ID NO: 158449
  misc_feature 1..783: note = Description of Artificial Sequence: Synthetic coding sequence
  source 1..783: mol_type = other DNA

SEQ ID NO: 158494 - DNA, 783 bp, synthetic construct; identical to SEQ ID NO: 158449
  misc_feature 1..783: note = Description of Artificial Sequence: Synthetic coding sequence
  source 1..783: mol_type = other DNA

SEQ ID NO: 158495 - DNA, 783 bp, synthetic construct; identical to SEQ ID NO: 158449
  misc_feature 1..783: note = Description of Artificial Sequence: Synthetic coding sequence
  source 1..783: mol_type = other DNA

SEQ ID NO: 158496 - DNA, 777 bp, synthetic construct
  misc_feature 1..777: note = Description of Artificial Sequence: Synthetic coding sequence
  source 1..777: mol_type = other DNA
atgatggtgctgcaggtgtctgctgcccccaggacagtggccctgacagccctgctgatggtgctgctgacctctgtggtgcagggccgggccaccccagagaactacgtgtaccagctgcggcaggagtgctacgccttcaacggcacccagcgcttcctggagcgctacatctacaaccgggaggagtttgtgcgctttgacagtgatgtgggggagttccgggctgtgacagagctgggccgcccagatgaggactactggaacagccagaaggacctgctggaggagaagagagctgtgcctgacagagtgtgccgccacaactatgagctggatgaagctgtgaccctgcagaggagagtgcagcccaaggtgaatgtgagccccagcaagaagggccccctgcagcaccacaacctgctggtgtgccacgtgacagacttctacccaggcagcatccaggtgcgctggttcctgaatggccaggaggagacagctggggtggtgtccaccaacctgatcagaaatggagactggaccttccagatcctggtgatgctggagatgaccccccagcagggagatgtgtacatctgccaggtggagcacaccagcctggacagccctgtgacagtggagtggaaggcccagagcgacagcgcccggagcaagaccctgaccggggccggcggctttgtgctgggcctcatcatctgtggggtgggcatcttcatgcaccggcgcagcaagaaggtgcagaggggcagcgcctag

SEQ ID NO: 158497 - DNA, 687 bp, synthetic construct
  misc_feature 1..687: note = Description of Artificial Sequence: Synthetic coding sequence
  source 1..687: mol_type = other DNA
atgatggtgctgcaggtgtctgctgcccccaggacagtggccctgacagccctgctgatggtgctgctgacctctgtggtgcagggccgggccaccccagagaactacctgttccagggccggcaggagtgctacgccttcaacggcacccagcgcttcctggagcgctacatctacaaccgggaggagctggtgcgctttgacagtgatgtgggggagttccgggctgtgacagagctgggccggcctgaggccgagtactggaacagccagaaggacatcctggaggaggagagagctgtgcctgacaggatgtgccgccacaactatgagctgggcggccccatgaccctgcagaggcggggcagcatccaggtgcgctggttcctgaatggccaggaggagacagctggggtggtgtccaccaacctgatcagaaatggagactggaccttccagatcctggtgatgctggagatgaccccccagcagggagatgtgtacacctgccaggtggagcacaccagcctggacagccctgtgacagtggagtggaaggcccagagcgacagcgcccggagcaagaccctgaccggggccggcggctttgtgctgggcctcatcatctgtggggtgggcatcttcatgcaccggcgcagcaagaaggtgcagaggggcagcgcctag

SEQ ID NO: 158498 - DNA, 777 bp, synthetic construct
  misc_feature 1..777: note = Description of Artificial Sequence: Synthetic coding sequence
  source 1..777: mol_type = other DNA
atgatggtgctgcaggtgtctgctgcccccaggacagtggccctgacagccctgctgatggtgctgctgacctctgtggtgcagggccgggccaccccagagaactacctgttccagggccggcaggagtgctacgccttcaacggcacccagcgcttcctggagcgctacatctacaaccgggaggagctggtgcgctttgacagtgatgtgggggagttccgggctgtgacagagctgggccggcctgaggccgagtactggaacagccagaaggacatcctggaggaggagagagctgtgcctgacaggatgtgccgccacaactatgagctgggcggccccatgaccctgcagaggagagtgcagccccgggtgaatgtgagccccagcaagaagggccccctgcagcaccacaacctgctggtgtgccacgtgacagacttctacccaggcagcatccaggtgcgctggttcctgaatggccaggaggagacagctggggtggtgtccaccaacctgatcagaaatggagactggaccttccagatcctggtgatgctggagatgaccccccagcagggagatgtgtacacctgccaggtggagcacaccagcctggacagccctgtgacagtggagtggaaggcccagagcgacagcgcccggagcaagaccctgaccggggccggcggctttgtgctgggcctcatcatctgtggggtgggcatcttcatgcaccggcgcagcaagaaggtgcagaggggcagcgcctag

SEQ ID NO: 158499 - DNA, 690 bp, synthetic construct
  misc_feature 1..690: note = Description of Artificial Sequence: Synthetic coding sequence
  source 1..690: mol_type = other DNA
aagcaggcctggaggggcagcgccacccggctgggcccccagaacagcggccggcaggagtgctacgccttcaacggcacccagcgcttcctggagcgctacatctacaaccgggaggagctggtgcgctttgacagtgatgtgggggagttccgggctgtgacagagctgggccggcctgaggccgagtactggaacagccagaaggacatcctggaggaggagagagctgtgcctgacaggatgtgccgccacaactatgagctgggcggccccatgaccctgcagaggagagtgcagccccgggtgaatgtgagccccagcaagaagggccccctgcagcaccacaacctgctggtgtgccacgtgacagacttctacccaggcagcatccaggtgcgctggttcctgaatggccaggaggagacagctggggtggtgtccaccaacctgatcagaaatggagactggaccttccagatcctggtgatgctggagatgaccccccagcagggagatgtgtacacctgccaggtggagcacaccagcctggacagccctgtgacagtggagtggaaggcccagagcgacagcgcccggagcaagaccctgactggagctgggggctttgtgctgggcctcatcatctgtggggtgggcatcttcatgcacagaagaagcaagaagtag

SEQ ID NO: 158500 - DNA, 687 bp, synthetic construct
  misc_feature 1..687: note = Description of Artificial Sequence: Synthetic coding sequence
  source 1..687: mol_type = other DNA
atgatggtgctgcaggtgtctgctgcccccaggacagtggccctgacagccctgctgatggtgctgctgacctctgtggtgcagggccgggccaccccagagaactacctgttccagggccggcaggagtgctacgccttcaacggcacccagcgcttcctggagcgctacatctacaaccgggaggagtttgccaggtttgacagtgatgtgggggagttccgggctgtgacagagctgggccggcctgctgctgagtactggaacagccagaaggacatcctggaggagaagagagctgtgcctgacaggatgtgccgccacaactatgagctgggcggccccatgaccctgcagaggcggggcagcatccaggtgcgctggttcctgaatggccaggaggagacagctggggtggtgtccaccaacctgatcagaaatggagactggaccttccagatcctggtgatgctggagatgaccccccagcagggagatgtgtacacctgccaggtggagcacaccagcctggacagccctgtgacagtggagtggaaggcccagagcgacagcgcccggagcaagaccctgaccggggccggcggctttgtgctgggcctcatcatctgtggggtgggcatcttcatgcaccggcgcagcaagaaggtgcagaggggcagcgcctag

SEQ ID NO: 158501 - DNA, 687 bp, synthetic construct
  misc_feature 1..687: note = Description of Artificial Sequence: Synthetic coding sequence
  source 1..687: mol_type = other DNA
atgatggtgctgcaggtgtctgctgcccccaggacagtggccctgacagccctgctgatggtgctgctgacctctgtggtgcagggccgggccaccccagagaactacctgttccagggccggcaggagtgctacgccttcaacggcacccagcgcttcctggagcgctacatctacaaccgggaggagtttgtgcgctttgacagtgatgtgggggagttccgggctgtgacagagctgggccgcccagatgaggagtactggaacagccagaaggacatcctggaggagaagagagctgtgcctgacaggatgtgccgccacaactatgagctgggcggccccatgaccctgcagaggcggggcagcatccaggtgcgctggttcctgaatggccaggaggagacagctggggtggtgtccaccaacctgatcagaaatggagactggaccttccagatcctggtgatgctggagatgaccccccagcagggagatgtgtacacctgccaggtggagcacacctccatggacagccctgtgacagtggagtggaaggcccagagcgacagcgcccggagcaagaccctgaccggggccggcggctttgtgctgggcctcatcatctgtggggtgggcatcttcatgcaccggcgcagcaagaaggtgcagaggggcagcgcctag

SEQ ID NO: 158502 - DNA, 708 bp, synthetic construct
  misc_feature 1..708: note = Description of Artificial Sequence: Synthetic coding sequence
  source 1..708: mol_type = other DNA
tgaaactacctgttccagggccggcaggagtgctacgccttcaacggcacccagcgcttcctggagcgctacatctacaaccgggaggagtttgtgcgctttgacagtgatgtgggggagttccgggctgtgacagagctgggccgcccagatgaggagtactggaacagccagaaggacatcctggaggagaagagagctgtgcctgacaggatgtgccgccacaactatgagctgggcggccccatgaccctgcagaggagagtgcagccccgggtgaatgtgagccccagcaagaagggccccctgcagcaccacaacctgctggtgtgccacgtgacagacttctacccaggcagcatccaggtgcgctggttcctgaatggccaggaggagacagctggggtggtgtccaccaacctgatcagaaatggagactggaccttccagatcctggtgatgctggagatgaccccccagcagggagatgtgtacacctgccaggtggagcacacctccatggacagccctgtgacagtggagtggaaggcccagagcgacagcgcccggagcaagaccctgactggagctgggggctttgtgctgggcctcatcatctgtggggtgggcatcttcatgcacagaagaagcaagaagggggagaaggcctgccgcttcaatgaagacctgcacaagcagggcagctag

SEQ ID NO: 158503 - DNA, 777 bp, synthetic construct
  misc_feature 1..777: note = Description of Artificial Sequence: Synthetic coding sequence
  source 1..777: mol_type = other DNA
atgatggtgctgcaggtgtctgctgcccccaggacagtggccctgacagccctgctgatggtgctgctgacctctgtggtgcagggccgggccaccccagagaactacctgttccagggccggcaggagtgctacgccttcaacggcacccagcgcttcctggagcgctacatctacaaccgggaggagtttgtgcgctttgacagtgatgtgggggagttccgggctgtgacagagctgggccgcccagatgaggagtactggaacagccagaaggacatcctggaggagaagagagctgtgcctgacaggatgtgccgccacaactatgagctgggcggccccatgaccctgcagaggagagtgcagccccgggtgaatgtgagccccagcaagaagggccccctgcagcaccacaacctgctggtgtgccacgtgacagacttctacccaggcagcatccaggtgcgctggttcctgaatggccaggaggagacagctggggtggtgtccaccaacctgatcagaaatggagactggaccttccagatcctggtgatgctggagatgaccccccagcagggagatgtgtacacctgccaggtggagcacacctccatggacagccctgtgacagtggagtggaaggcccagagcgacagcgcccggagcaagaccctgaccggggccggcggctttgtgctgggcctcatcatctgtggggtgggcatcttcatgcaccggcgcagcaagaaggtgcagaggggcagcgcctag

SEQ ID NO: 158504 - DNA, 687 bp, synthetic construct; identical to SEQ ID NO: 158500
  misc_feature 1..687: note = Description of Artificial Sequence: Synthetic coding sequence
  source 1..687: mol_type = other DNA

SEQ ID NO: 158505 - DNA, 690 bp, synthetic construct
  misc_feature 1..690: note = Description of Artificial Sequence: Synthetic coding sequence
  source 1..690: mol_type = other DNA
aagcaggcctggaggggcagcgccacccggctgggcccccagaacagcggccggcaggagtgctacgccttcaacggcacccagcgcttcctggagcgctacatctacaaccgggaggagtttgtgcgctttgacagtgatgtgggggagttccgggctgtgacagagctgggccgcccagatgaggagtactggaacagccagaaggacatcctggaggaggagagagctgtgcctgacaggatgtgccgccacaactatgagctgggcggccccatgaccctgcagaggagagtgcagccccgggtgaatgtgagccccagcaagaagggccccctgcagcaccacaacctgctggtgtgccacgtgacagacttctacccaggcagcatccaggtgcgctggttcctgaatggccaggaggagacagctggggtggtgtccaccaacctgatcagaaatggagactggaccttccagatcctggtgatgctggagatgaccccccagcagggagatgtgtacacctgccaggtggagcacaccagcctggacagccctgtgacagtggagtggaaggcccagagcgacagcgcccggagcaagaccctgactggagctgggggctttgtgctgggcctcatcatctgtggggtgggcatcttcatgcacagaagaagcaagaagtag

SEQ ID NO: 158506 - DNA, 777 bp, synthetic construct
  misc_feature 1..777: note = Description of Artificial Sequence: Synthetic coding sequence
  source 1..777: mol_type = other DNA
atgatggtgctgcaggtgtctgctgcccccaggacagtggccctgacagccctgctgatggtgctgctgacctctgtggtgcagggccgggccaccccagagaactacctgttccagggccggcaggagtgctacgccttcaacggcacccagcgcttcctggagcgctacatctacaaccgggaggagtttgtgcgctttgacagtgatgtgggggagttccgggctgtgacagagctgggccgcccagatgaggagtactggaacagccagaaggacatcctggaggaggagagagctgtgcctgacaggatgtgccgccacaactatgagctgggcggccccatgaccctgcagaggagagtgcagccccgggtgaatgtgagccccagcaagaagggccccctgcagcaccacaacctgctggtgtgccacgtgacagacttctacccaggcagcatccaggtgcgctggttcctgaatggccaggaggagacagctggggtggtgtccaccaacctgatcagaaatggagactggaccttccagatcctggtgatgctggagatgaccccccagcagggagatgtgtacacctgccaggtggagcacaccagcctggacagccctgtgacagtggagtggaaggcccagagcgacagcgcccggagcaagaccctgaccggggccggcggctttgtgctgggcctcatcatctgtggggtgggcatcttcatgcaccggcgcagcaagaaggtgcagaggggcagcgcctag

SEQ ID NO: 158507 - DNA, 708 bp, synthetic construct
  misc_feature 1..708: note = Description of Artificial Sequence: Synthetic coding sequence
  source 1..708: mol_type = other DNA
tgaaactacctgttccagggccggcaggagtgctacgccttcaacggcacccagcgcttcctggagcgctacatctacaaccgggaggagtttgccaggtttgacagtgatgtgggggagttccgggctgtgacagagctgggccggcctgctgctgagtactggaacagccagaaggacatcctggaggagaagagagctgtgcctgacaggatgtgccgccacaactatgagctgggcggccccatgaccctgcagaggagagtgcagccccgggtgaatgtgagccccagcaagaagggccccctgcagcaccacaacctgctggtgtgccacgtgacagacttctacccaggcagcatccaggtgcgctggttcctgaatggccaggaggagacagctggggtggtgtccaccaacctgatcagaaatggagactggaccttccagatcctggtgatgctggagatgaccccccagcagggagatgtgtacacctgccaggtggagcacaccagcctggacagccctgtgacagtggagtggaaggcccagagcgacagcgcccggagcaagaccctgactggagctgggggctttgtgctgggcctcatcatctgtggggtgggcatcttcatgcacagaagaagcaagaagggggagaaggcctgccgcttcaatgaagacctgcacaagcagggcagctag

SEQ ID NO: 158508 - DNA, 690 bp, synthetic construct
  misc_feature 1..690: note = Description of Artificial Sequence: Synthetic coding sequence
  source 1..690: mol_type = other DNA
aagcaggcctggaggggcagcgccacccggctgggcccccagaacagcggccggcaggagtgctacgccttcaacggcacccagcgcttcctggagcgctacatctacaaccgggaggagtttgccaggtttgacagtgatgtgggggagttccgggctgtgacagagctgggccggcctgctgctgagtactggaacagccagaaggacatcctggaggagaagagagctgtgcctgacaggatgtgccgccacaactatgagctgggcggccccatgaccctgcagaggagagtgcagccccgggtgaatgtgagccccagcaagaagggccccctgcagcaccacaacctgctggtgtgccacgtgacagacttctacccaggcagcatccaggtgcgctggttcctgaatggccaggaggagacagctggggtggtgtccaccaacctgatcagaaatggagactggaccttccagatcctggtgatgctggagatgaccccccagcagggagatgtgtacacctgccaggtggagcacaccagcctggacagccctgtgacagtggagtggaaggcccagagcgacagcgcccggagcaagaccctgactggagctgggggctttgtgctgggcctcatcatctgtggggtgggcatcttcatgcacagaagaagcaagaagtag

SEQ ID NO: 158509 - DNA, 777 bp, synthetic construct
  misc_feature 1..777: note = Description of Artificial Sequence: Synthetic coding sequence
  source 1..777: mol_type = other DNA
atgatggtgctgcaggtgtctgctgcccccaggacagtggccctgacagccctgctgatggtgctgctgacctctgtggtgcagggccgggccaccccagagaactacctgttccagggccggcaggagtgctacgccttcaacggcacccagcgcttcctggagcgctacatctacaaccgggaggagtttgccaggtttgacagtgatgtgggggagttccgggctgtgacagagctgggccggcctgctgctgagtactggaacagccagaaggacatcctggaggagaagagagctgtgcctgacaggatgtgccgccacaactatgagctgggcggccccatgaccctgcagaggagagtgcagccccgggtgaatgtgagccccagcaagaagggccccctgcagcaccacaacctgctggtgtgccacgtgacagacttctacccaggcagcatccaggtgcgctggttcctgaatggccaggaggagacagctggggtggtgtccaccaacctgatcagaaatggagactggaccttccagatcctggtgatgctggagatgaccccccagcagggagatgtgtacacctgccaggtggagcacaccagcctggacagccctgtgacagtggagtggaaggcccagagcgacagcgcccggagcaagaccctgaccggggccggcggctttgtgctgggcctcatcatctgtggggtgggcatcttcatgcaccggcgcagcaagaaggtgcagaggggcagcgcctag

SEQ ID NO: 158510 - DNA, 249 bp, synthetic construct
  misc_feature 1..249: note = Description of Artificial Sequence: Synthetic coding sequence
  source 1..249: mol_type = other DNA
atgaccccccagcagggagatgtgtacacctgccaggtggagcacaccagcctggacagccctgtgacagtggagtggaaggcccagagcgacagcgcccggagcaagaccctgactggagctgggggccgggccggggcccaccacctgtggagcggccacctgcacgcccaggaggagcaggagagcagcacccgcatctgcatcaacagagtgcctgagctgacagagaagaccatcgtgccctag

SEQ ID NO: 158511 - DNA, 777 bp, synthetic construct; identical to SEQ ID NO: 158503
  misc_feature 1..777: note = Description of Artificial Sequence: Synthetic coding sequence
  source 1..777: mol_type = other DNA

SEQ ID NO: 158512 - DNA, 690 bp, synthetic construct; identical to SEQ ID NO: 158508
  misc_feature 1..690: note = Description of Artificial Sequence: Synthetic coding sequence
  source 1..690: mol_type = other DNA

SEQ ID NO: 158513 - DNA, 708 bp, synthetic construct
  misc_feature 1..708: note = Description of Artificial Sequence: Synthetic coding sequence
  source 1..708: mol_type = other DNA
tgaaactacctgttccagggccggcaggagtgctacgccttcaacggcacccagcgcttcctggagcgctacatctacaaccgggaggagctggtgcgctttgacagtgatgtgggggagttccgggctgtgacagagctgggccggcctgaggccgagtactggaacagccagaaggacatcctggaggaggagagagctgtgcctgacaggatgtgccgccacaactatgagctgggcggccccatgaccctgcagaggagagtgcagccccgggtgaatgtgagccccagcaagaagggccccctgcagcaccacaacctgctggtgtgccacgtgacagacttctacccaggcagcatccaggtgcgctggttcctgaatggccaggaggagacagctggggtggtgtccaccaacctgatcagaaatggagactggaccttccagatcctggtgatgctggagatgaccccccagcagggagatgtgtacacctgccaggtggagcacaccagcctggacagccctgtgacagtggagtggaaggcccagagcgacagcgcccggagcaagaccctgactggagctgggggctttgtgctgggcctcatcatctgtggggtgggcatcttcatgcacagaagaagcaagaagggggagaaggcctgccgcttcaatgaagacctgcacaagcagggcagctag

SEQ ID NO: 158514 - DNA, 777 bp, synthetic construct; identical to SEQ ID NO: 158509
  misc_feature 1..777: note = Description of Artificial Sequence: Synthetic coding sequence
  source 1..777: mol_type = other DNA

SEQ ID NO: 158515 - DNA, 708 bp, synthetic construct
  misc_feature 1..708: note = Description of Artificial Sequence: Synthetic coding sequence
  source 1..708: mol_type = other DNA
tgaaactacgtgtaccagctgcggcaggagtgctacgccttcaacggcacccagcgcttcctggagcgctacatctacaaccgggaggagtttgtgcgctttgacagtgatgtgggggagttccgggctgtgacagagctgggccgcccagatgaggactactggaacagccagaaggacctgctggaggagaagagagctgtgcctgacagagtgtgccgccacaactatgagctggatgaggccgtgaccctgcagaggagagtgcagcccaaggtgaatgtgagccccagcaagaagggccccctgcagcaccacaacctgctggtgtgccacgtgacagacttctacccaggcagcatccaggtgcgctggttcctgaatggccaggaggagacagctggggtggtgtccaccaacctgatcagaaatggagactggaccttccagatcctggtgatgctggagatgaccccccagcagggagatgtgtacatctgccaggtggagcacaccagcctggacagccctgtgacagtggagtggaaggcccagagcgacagcgcccggagcaagaccctgactggagctgggggctttgtgctgggcctcatcatctgtggggtgggcatcttcatgcacagaagaagcaagaagggggagaaggcctgcaagttcaatgaagacctgcacaagcagggcagctag

SEQ ID NO: 158516 - DNA, 690 bp, synthetic construct
  misc_feature 1..690: note = Description of Artificial Sequence: Synthetic coding sequence
  source 1..690: mol_type = other DNA
aagcaggcctggaggggcagcgccacccggctgggcccccagaacagcggccggcaggagtgctacgccttcaacggcacccagcgcttcctggagcgctacatctacaaccgggaggagtttgtgcgctttgacagtgatgtgggggagttccgggctgtgacagagctgggccgcccagatgaggagtactggaacagccagaaggacatcctggaggagaagagagctgtgcctgacaggatgtgccgccacaactatgagctgggcggccccatgaccctgcagaggagagtgcagccccgggtgaatgtgagccccagcaagaagggccccctgcagcaccacaacctgctggtgtgccacgtgacagacttctacccaggcagcatccaggtgcgctggttcctgaatggccaggaggagacagctggggtggtgtccaccaacctgatcagaaatggagactggaccttccagatcctggtgatgctggagatgaccccccagcagggagatgtgtacacctgccaggtggagcacacctccatggacagccctgtgacagtggagtggaaggcccagagcgacagcgcccggagcaagaccctgactggagctgggggctttgtgctgggcctcatcatctgtggggtgggcatcttcatgcacagaagaagcaagaagtag

SEQ ID NO: 158517 - DNA, 687 bp, synthetic construct
  misc_feature 1..687: note = Description of Artificial Sequence: Synthetic coding sequence
  source 1..687: mol_type = other DNA
atgatggtgctgcaggtgtctgctgcccccaggacagtggccctgacagccctgctgatggtgctgctgacctctgtggtgcagggccgggccaccccagagaactacgtgtaccagctgcggcaggagtgctacgccttcaacggcacccagcgcttcctggagcgctacatctacaaccgggaggagtttgtgcgctttgacagtgatgtgggggagttccgggctgtgacagagctgggccgcccagatgaggactactggaacagccagaaggacctgctggaggagaagagagctgtgcctgacagagtgtgccgccacaactatgagctggatgaagctgtgaccctgcagaggcggggcagcatccaggtgcgctggttcctgaatggccaggaggagacagctggggtggtgtccaccaacctgatcagaaatggagactggaccttccagatcctggtgatgctggagatgaccccccagcagggagatgtgtacatctgccaggtggagcacaccagcctggacagccctgtgacagtggagtggaaggcccagagcgacagcgcccggagcaagaccctgaccggggccggcggctttgtgctgggcctcatcatctgtggggtgggcatcttcatgcaccggcgcagcaagaaggtgcagaggggcagcgcctag

SEQ ID NO: 158518 - DNA, 687 bp, synthetic construct; identical to SEQ ID NO: 158501
  misc_feature 1..687: note = Description of Artificial Sequence: Synthetic coding sequence
  source 1..687: mol_type = other DNA

SEQ ID NO: 158519 - DNA, 687 bp, synthetic construct; identical to SEQ ID NO: 158500
  misc_feature 1..687: note = Description of Artificial Sequence: Synthetic coding sequence
  source 1..687: mol_type = other DNA

SEQ ID NO: 158520 - DNA, 690 bp, synthetic construct; identical to SEQ ID NO: 158516
  misc_feature 1..690: note = Description of Artificial Sequence: Synthetic coding sequence
  source 1..690: mol_type = other DNA

SEQ ID NO: 158521 - DNA, 708 bp, synthetic construct
  misc_feature 1..708: note = Description of Artificial Sequence: Synthetic coding sequence
  source 1..708: mol_type = other DNA
tgaaactacctgttccagggccggcaggagtgctacgccttcaacggcacccagcgcttcctggagcgctacatctacaaccgggaggagtttgtgcgctttgacagtgatgtgggggagttccgggctgtgacagagctgggccgcccagatgaggagtactggaacagccagaaggacatcctggaggaggagagagctgtgcctgacaggatgtgccgccacaactatgagctgggcggccccatgaccctgcagaggagagtgcagccccgggtgaatgtgagccccagcaagaagggccccctgcagcaccacaacctgctggtgtgccacgtgacagacttctacccaggcagcatccaggtgcgctggttcctgaatggccaggaggagacagctggggtggtgtccaccaacctgatcagaaatggagactggaccttccagatcctggtgatgctggagatgaccccccagcagggagatgtgtacacctgccaggtggagcacaccagcctggacagccctgtgacagtggagtggaaggcccagagcgacagcgcccggagcaagaccctgactggagctgggggctttgtgctgggcctcatcatctgtggggtgggcatcttcatgcacagaagaagcaagaagggggagaaggcctgccgcttcaatgaagacctgcacaagcagggcagctag

SEQ ID NO: 158522 - DNA, 708 bp, synthetic construct; identical to SEQ ID NO: 158507
  misc_feature 1..708: note = Description of Artificial Sequence: Synthetic coding sequence
  source 1..708: mol_type = other DNA

SEQ ID NO: 158523 - DNA, 687 bp, synthetic construct
  misc_feature 1..687: note = Description of Artificial Sequence: Synthetic coding sequence
  source 1..687: mol_type = other DNA
atgatggtgctgcaggtgtctgctgcccccaggacagtggccctgacagccctgctgatggtgctgctgacctctgtggtgcagggccgggccaccccagagaactacctgttccagggccggcaggagtgctacgccttcaacggcacccagcgcttcctggagcgctacatctacaaccgggaggagtttgtgcgctttgacagtgatgtgggggagttccgggctgtgacagagctgggccgcccagatgaggagtactggaacagccagaaggacatcctggaggaggagagagctgtgcctgacaggatgtgccgccacaactatgagctgggcggccccatgaccctgcagaggcggggcagcatccaggtgcgctggttcctgaatggccaggaggagacagctggggtggtgtccaccaacctgatcagaaatggagactggaccttccagatcctggtgatgctggagatgaccccccagcagggagatgtgtacacctgccaggtggagcacaccagcctggacagccctgtgacagtggagtggaaggcccagagcgacagcgcccggagcaagaccctgaccggggccggcggctttgtgctgggcctcatcatctgtggggtgggcatcttcatgcaccggcgcagcaagaaggtgcagaggggcagcgcctag

SEQ ID NO: 158524 - DNA, 690 bp, synthetic construct
  misc_feature 1..690: note = Description of Artificial Sequence: Synthetic coding sequence
  source 1..690: mol_type = other DNA
aagcaggcctggaggggcagcgccacccggctgggcccccagaacagcctgcggcaggagtgctacgccttcaacggcacccagcgcttcctggagcgctacatctacaaccgggaggagtttgtgcgctttgacagtgatgtgggggagttccgggctgtgacagagctgggccgcccagatgaggactactggaacagccagaaggacctgctggaggagaagagagctgtgcctgacagagtgtgccgccacaactatgagctggatgaggccgtgaccctgcagaggagagtgcagcccaaggtgaatgtgagccccagcaagaagggccccctgcagcaccacaacctgctggtgtgccacgtgacagacttctacccaggcagcatccaggtgcgctggttcctgaatggccaggaggagacagctggggtggtgtccaccaacctgatcagaaatggagactggaccttccagatcctggtgatgctggagatgaccccccagcagggagatgtgtacatctgccaggtggagcacaccagcctggacagccctgtgacagtggagtggaaggcccagagcgacagcgcccggagcaagaccctgactggagctgggggctttgtgctgggcctcatcatctgtggggtgggcatcttcatgcacagaagaagcaagaagtag

SEQ ID NO: 158525 - DNA, 777 bp, synthetic construct; identical to SEQ ID NO: 158509
  misc_feature 1..777: note = Description of Artificial Sequence: Synthetic coding sequence
  source 1..777: mol_type = other DNA

SEQ ID NO: 158526 - DNA, 708 bp, synthetic construct; identical to SEQ ID NO: 158502
  misc_feature 1..708: note = Description of Artificial Sequence: Synthetic coding sequence
  source 1..708: mol_type = other DNA

SEQ ID NO: 158527 - DNA, 690 bp, synthetic construct; identical to SEQ ID NO: 158508
  misc_feature 1..690: note = Description of Artificial Sequence: Synthetic coding sequence
  source 1..690: mol_type = other DNA

SEQ ID NO: 158528 - DNA, 708 bp, synthetic construct; identical to SEQ ID NO: 158507
  misc_feature 1..708: note = Description of Artificial Sequence: Synthetic coding sequence
  source 1..708: mol_type = other DNA

SEQ ID NO: 158529 - DNA, 372 bp, synthetic construct
  misc_feature 1..372: note = Description of Artificial Sequence: Synthetic coding sequence
  source 1..372: mol_type = other DNA
atgatggtgctgcaggtgtctgctgcccccaggacagtggccctgacagccctgctgatggtgctgctgacctctgtggtgcagggccgggccaccccagagaactacctgttccagggccggcaggagtgctacgccttcaacggcacccagcgcttcctggagcgctacatctacaaccgggaggagtttgccaggtttgacagtgatgtgggggagttccgggctgtgacagagctgggccggcctgctgctgagtactggaacagccagaaggacatcctggaggagaagagagctgtgcctgacaggatgtgccgccacaactatgagctgggcggccccatgaccctgcagaggagaggagagtag

SEQ ID NO: 158530 - DNA, 249 bp, synthetic construct; identical to SEQ ID NO: 158510
  misc_feature 1..249: note = Description of Artificial Sequence: Synthetic coding sequence
  source 1..249: mol_type = other DNA

SEQ ID NO: 158531 - DNA, 249 bp, synthetic construct; identical to SEQ ID NO: 158510
  misc_feature 1..249: note = Description of Artificial Sequence: Synthetic coding sequence
  source 1..249: mol_type = other DNA

SEQ ID NO: 158532 - DNA, 372 bp, synthetic construct
  misc_feature 1..372: note = Description of Artificial Sequence: Synthetic coding sequence
  source 1..372: mol_type = other DNA
atgatggtgctgcaggtgtctgctgcccccaggacagtggccctgacagccctgctgatggtgctgctgacctctgtggtgcagggccgggccaccccagagaactacctgttccagggccggcaggagtgctacgccttcaacggcacccagcgcttcctggagcgctacatctacaaccgggaggagctggtgcgctttgacagtgatgtgggggagttccgggctgtgacagagctgggccggcctgaggccgagtactggaacagccagaaggacatcctggaggaggagagagctgtgcctgacaggatgtgccgccacaactatgagctgggcggccccatgaccctgcagaggagaggagagtag

SEQ ID NO: 158533 - DNA, 372 bp, synthetic construct
  misc_feature 1..372: note = Description of Artificial Sequence: Synthetic coding sequence
  source 1..372: mol_type = other DNA
atgatggtgctgcaggtgtctgctgcccccaggacagtggccctgacagccctgctgatggtgctgctgacctctgtggtgcagggccgggccaccccagagaactacctgttccagggccggcaggagtgctacgccttcaacggcacccagcgcttcctggagcgctacatctacaaccgggaggagtttgtgcgctttgacagtgatgtgggggagttccgggctgtgacagagctgggccgcccagatgaggagtactggaacagccagaaggacatcctggaggagaagagagctgtgcctgacaggatgtgccgccacaactatgagctgggcggccccatgaccctgcagaggagaggagagtag

SEQ ID NO: 158534 - DNA, 372 bp, synthetic construct
  misc_feature 1..372: note = Description of Artificial Sequence: Synthetic coding sequence
  source 1..372: mol_type = other DNA
atgatggtgctgcaggtgtctgctgcccccaggacagtggccctgacagccctgctgatggtgctgctgacctctgtggtgcagggccgggccaccccagagaactacctgttccagggccggcaggagtgctacgccttcaacggcacccagcgcttcctggagcgctacatctacaaccgggaggagtttgtgcgctttgacagtgatgtgggggagttccgggctgtgacagagctgggccgcccagatgaggagtactggaacagccagaaggacatcctggaggaggagagagctgtgcctgacaggatgtgccgccacaactatgagctgggcggccccatgaccctgcagaggagaggagagtag

SEQ ID NO: 158535 - DNA, 750 bp, synthetic construct
  misc_feature 1..750: note = Description of Artificial Sequence: Synthetic coding sequence
  source 1..750: mol_type = other DNA
atggtgctgctgacctctgtggtgcagggccgggccaccccagaaaattatgtgtaccagctgcggcaggagtgctacgccttcaacggcacccagcgcttcctggagcgctacatctacaaccgggaggagtttgtgcgctttgacagtgatgtgggggagttccgggctgtgacagagctgggccgcccagatgaggactactggaacagccagaaggacctgctggaggagaagagagctgtgcctgacagagtgtgccgccacaactatgagctggatgaggccgtgaccctgcagaggagagtgcagcccaaggtgaatgtgagccccagcaagaagggccccctgcagcaccacaacctgctggtgtgccacgtgacagacttctacccaggcagcatccaggtgcgctggttcctgaatggccaggaggagacagctggggtggtgtccaccaacctgatcagaaatggagactggaccttccagatcctggtgatgctggagatgaccccccagcagggagatgtgtacatctgccaggtggagcacaccagcctggacagccctgtgacagtggagtggaaggcccagagcgacagcgcccggagcaagaccctgactggagctgggggctttgtgctgggcctcatcatctgtggggtgggcatcttcatgcacagaagaagcaagaagggggagaaggcctgcaagttcaatgaagacctgcacaagcagggcagctag

SEQ ID NO: 158536 - DNA, 249 bp, synthetic construct; identical to SEQ ID NO: 158510
  misc_feature 1..249: note = Description of Artificial Sequence: Synthetic coding sequence
  source 1..249: mol_type = other DNA

SEQ ID NO: 158537 - DNA, 372 bp, synthetic construct; identical to SEQ ID NO: 158529
  misc_feature 1..372: note = Description of Artificial Sequence: Synthetic coding sequence
  source 1..372: mol_type = other DNA

SEQ ID NO: 158538 - DNA, 372 bp, synthetic construct; identical to SEQ ID NO: 158529
  misc_feature 1..372: note = Description of Artificial Sequence: Synthetic coding sequence
  source 1..372: mol_type = other DNA

SEQ ID NO: 158539 - DNA, 198 bp, synthetic construct
  misc_feature 1..198: note = Description of Artificial Sequence: Synthetic coding sequence
  source 1..198: mol_type = other DNA
atggacagccctgtgacagtggagtggaaggcccagagcgacagcgcccggagcaagaccctgaccggggccggcggccgggccggggcccaccacctgtggagcggccacctgcacgcccaggaggagcaggagagcagcacccgcatctgcatcaacagagtgcctgagctgacagagaagaccatcgtgccctag

SEQ ID NO: 158540 - DNA, 381 bp, synthetic construct
  misc_feature 1..381: note = Description of Artificial Sequence: Synthetic coding sequence
  source 1..381: mol_type = other DNA
atgatggtgctgcaggtgtctgctgcccccaggacagtggccctgacagccctgctgatggtgctgctgacctctgtggtgcagggccgggccaccccagagaactacgtgtaccagctgcggcaggagtgctacgccttcaacggcacccagcgcttcctggagcgctacatctacaaccgggaggagtttgtgcgctttgacagtgatgtgggggagttccgggctgtgacagagctgggccgcccagatgaggactactggaacagccagaaggacctgctggaggagaagagagctgtgcctgacagagtgtgccgccacaactatgagctggatgaagctgtgaccctgcagaggcgggagcggggcaagaagtag

SEQ ID NO: 158541 - DNA, 249 bp, synthetic construct
  misc_feature 1..249: note = Description of Artificial Sequence: Synthetic coding sequence
  source 1..249: mol_type = other DNA
atgaccccccagcagggagatgtgtacatctgccaggtggagcacaccagcctggacagccctgtgacagtggagtggaaggcccagagcgacagcgcccggagcaagaccctgactggagctgggggccgggccggggcccaccacctgtggagcggccacctgcacgcccaggaggagcaggagagcagcacccgcatctgcatcaacagagtgcctgacctgacagagaagaccaacgtgccctag

SEQ ID NO: 158542 - DNA, 249 bp, synthetic construct; identical to SEQ ID NO: 158510
  misc_feature 1..249: note = Description of Artificial Sequence: Synthetic coding sequence
  source 1..249: mol_type = other DNA

SEQ ID NO: 158543 - DNA, 372 bp, synthetic construct; identical to SEQ ID NO: 158533
  misc_feature 1..372: note = Description of Artificial Sequence: Synthetic coding sequence
  source 1..372: mol_type = other DNA

SEQ ID NO: 158544 - DNA, 198 bp, synthetic construct; identical to SEQ ID NO: 158539
  misc_feature 1..198: note = Description of Artificial Sequence: Synthetic coding sequence
  source 1..198: mol_type = other DNA

SEQ ID NO: 158545 - DNA, 768 bp, synthetic construct
  misc_feature 1..768: note = Description of Artificial Sequence: Synthetic coding sequence
  source 1..768: mol_type = other DNA
atgatcctgaacaaggccctgctgctgggcgccctggccctgaccaccgtgatgagcccctgtggcggggaggacatcgtggccgaccacgtggccagctgtggggtgaacctgtaccagttctacggccccagcggccagtacacccatgaatttgatggagatgagcagttctacgtggacctggagaggaaggagacagcctggcgctggccagagttcagcaagtttggaggctttgacccccagggcgccctgaggaacatggctgtggccaagcacaacctgaacatcatgatcaagcgctacaacagcacagctgccaccaatgaggtgcctgaggtgaccgtcttcagcaagagccctgtgaccctgggccagcccaacaccctcatctgcctggtggacaacatcttcccccctgtggtgaacatcacctggctgagcaatggccagagcgtgacagaaggagtgtctgagaccagcttcctgagcaagagtgaccacagcttcttcaagatctcctacctgaccttcctgcccagcgcagatgagatctatgactgcaaggtggagcactggggcctggaccagcccctgctgaagcactgggagcctgagatcccagcccccatgtctgagctgacagagaccgtggtgtgtgccctgggcctgtctgtgggcctgatgggcatcgtggtgggcaccgtcttcatcatccagggcctgcggtctgtgggcgccagccgccaccagggccccctgtag

SEQ ID NO: 158546 - DNA, 768 bp, synthetic construct; identical to SEQ ID NO: 158545
  misc_feature 1..768: note = Description of Artificial Sequence: Synthetic coding sequence
  source 1..768: mol_type = other DNA

SEQ ID NO: 158547 - DNA, 765 bp, synthetic construct
  misc_feature 1..765: note = Description of Artificial Sequence: Synthetic coding sequence
  source 1..765: mol_type = other DNA
atgatcctgaacaaggccctgatgctgggcgccctggccctgaccaccgtgatgagcccctgtggcggggaggacatcgtggccgaccacgtggccagctatggagtgaacctgtaccagagctatggccccagcggccagtacacccatgaatttgatggagatgagcagttctacgtggacctgggcaggaaggagaccgtgtggtgcctgcctgtgctgcggcagttccgctttgacccccagtttgccctgaccaacattgctgtgctgaagcacaacctgaacagcctcatcaagaggagcaacagcacagctgccaccaatgaggtgcctgaggtgacagtgttcagcaagagccctgtgaccctgggccagcccaacatcctgatctgcctggtggacaacatcttcccccctgtggtgaacatcacctggctgagcaatggccacagcgtgacagagggcgtgtctgagaccagcttcctgagcaagagtgaccacagcttcttcaagatctcctacctgaccctgctgcccagcgctgaggagagctatgactgcaaggtggagcactggggcctggacaagcccctgctgaagcactgggagcctgagatcccagcccccatgtctgagctgacagaaacagtggtgtgtgccctgggcctgtctgtgggcctggtgggcatcgtggtgggcaccgtcttcatcatccggggcctgcggtctgtgggcgccagccgccaccagggccccctgtag

SEQ ID NO: 158548 - DNA, 768 bp, synthetic construct; identical to SEQ ID NO: 158545
  misc_feature 1..768: note = Description of Artificial Sequence: Synthetic coding sequence
  source 1..768: mol_type = other DNA

SEQ ID NO: 158549 - DNA, 768 bp, synthetic construct; identical to SEQ ID NO: 158545
  misc_feature 1..768: note = Description of Artificial Sequence: Synthetic coding sequence
  source 1..768: mol_type = other DNA

SEQ ID NO: 158550 - DNA, 765 bp, synthetic construct; identical to SEQ ID NO: 158547
  misc_feature 1..765: note = Description of Artificial Sequence: Synthetic coding sequence
  source 1..765: mol_type = other DNA

SEQ ID NO: 158551 - DNA, 765 bp, synthetic construct; identical to SEQ ID NO: 158547
  misc_feature 1..765: note = Description of Artificial Sequence: Synthetic coding sequence
  source 1..765: mol_type = other DNA

SEQ ID NO: 158552 - DNA, 75 bp, synthetic construct
  misc_feature 1..75: note = Description of Artificial Sequence: Synthetic coding sequence
  source 1..75: mol_type = other DNA
atgatcctgaacaaggccctgatgctgggcgccctggccctgaccaccgtgatgagcccctgtggcggggagtag

SEQ ID NO: 158553 - DNA, 765 bp, synthetic construct
  misc_feature 1..765: note = Description of Artificial Sequence: Synthetic coding sequence
  source 1..765: mol_type = other DNA
atgatcctgaacaaggccctgatgctgggcgccctggccctgaccaccgtgatgagcccctgtggcggggaggacatcgtggccgaccacgtggccagctatggagtgaacctgtaccagagctatggccccagcggccagttcacccatgaatttgatggagatgaggagttctacgtggacctggagaggaaggagaccgtgtggaagctgcccctcttccaccggctgcgctttgacccccagtttgccctgaccaacattgctgtgctgaagcacaacctgaacatcctgatcaagaggagcaacagcacagctgccaccaatgaggtgcctgaggtgacagtgttcagcaagagccctgtgaccctgggccagcccaacaccctcatctgcctggtggacaacatcttcccccctgtggtgaacatcacctggctgagcaatggccacagcgtgacagagggcgtgtctgagaccagcttcctgagcaagagtgaccacagcttcttcaagatctcctacctgaccttcctgcccagcgcagatgagatctatgactgcaaggtggagcactggggcctggatgagcccctgctgaagcactgggagcctgagatcccagcccccatgtctgagctgacagaaacagtggtgtgtgccctgggcctgtctgtgggcctggtgggcatcgtggtgggcaccgtgctgatcatccggggcctgcggtctgtgggcgccagccgccaccagggccccctgtag

SEQ ID NO: 158554 - DNA, 768 bp, synthetic construct
  misc_feature 1..768: note = Description of Artificial Sequence: Synthetic coding sequence
  source 1..768: mol_type = other DNA
atgatcctgaacaaggccctgatgctgggcgccctggccctgaccaccgtgatgagcccctgtggcggggaggacatcgtggccgaccacgtggccagctatggagtgaacctgtaccagagctatggccccagcggccagtacagccatgaatttgatggagatgaggagttctacgtggacctggagaggaaggagaccgtgtggcagctgcccctcttccgccgcttccgccgctttgacccccagtttgccctgaccaacattgctgtgctgaagcacaacctgaacatcgtcatcaagaggagcaacagcacagctgccaccaatgaggtgcctgaggtgaccgtcttcagcaagagccctgtgaccctgggccagcccaacaccctcatctgcctggtggacaacatcttcccccctgtggtgaacatcacctggctgagcaatggccacagcgtgacagaaggagtgtctgagaccagcttcctgagcaagagtgaccacagcttcttcaagatctcctacctgaccttcctgcccagcgcagatgagatctatgactgcaaggtggagcactggggcctggatgagcccctgctgaagcactgggagcctgagatccccacccccatgtctgagctgacagagaccgtggtgtgtgccctgggcctgtctgtgggcctggtgggcatcgtggtgggcaccgtgctgatcatccggggcctgcggtctgtgggcgccagccgccaccagggccccctgtag

SEQ ID NO: 158555 - DNA, 768 bp, synthetic construct
  misc_feature 1..768: note = Description of Artificial Sequence: Synthetic coding sequence
  source 1..768: mol_type = other DNA
atgatcctgaacaaggccctgatgctgggcgccctggccctgaccaccgtgatgagcccctgtggcggggaggacatcgtggccgaccacgtggccagctatggagtgaacctgtaccagagctatggccccagcggccagtacagccatgaatttgatggagatgaggagttctacgtggacctggagaggaaggagaccgtgtggcagctgcccctcttccgccgcttccgccgctttgacccccagtttgccctgaccaacattgctgtgctgaagcacaacctgaacatcgtcatcaagaggagcaacagcacagctgccaccaatgaggtgcctgaggtgaccgtcttcagcaagagccctgtgaccctgggccagcccaacaccctcatctgcctggtggacaacatcttcccccctgtggtgaacatcacctggctgagcaatggccacagcgtgacagaaggagtgtctgagaccagcttcctgagcaagagtgaccacagcttcttcaagatctcctacctgaccttcctgcccagtgatgatgagatctatgactgcaaggtggagcactggggcctggatgagcccctgctgaagcactgggagcctgagatccccacccccatgtctgagctgacagagaccgtggtgtgtgccctgggcctgtctgtgggcctggtgggcatcgtggtgggcaccgtgctgatcatccggggcctgcggtctgtgggcgccagccgccaccagggccccctgtag

SEQ ID NO: 158556 - DNA, 75 bp, synthetic construct
  misc_feature 1..75: note = Description of Artificial Sequence: Synthetic coding sequence
  source 1..75: mol_type = other DNA
atgatcctgaacaaggccctgctgctgggcgccctggccctgaccaccgtgatgagcccctgtggcggggagtag

SEQ ID NO: 158557 - DNA, 768 bp, synthetic construct; identical to SEQ ID NO: 158555
  misc_feature 1..768: note = Description of Artificial Sequence: Synthetic coding sequence
  source 1..768: mol_type = other DNA

SEQ ID NO: 158558 - DNA, 765 bp, synthetic construct; identical to SEQ ID NO: 158553
  misc_feature 1..765: note = Description of Artificial Sequence: Synthetic coding sequence
  source 1..765: mol_type = other DNA

SEQ ID NO: 158559 - DNA, 765 bp, synthetic construct; identical to SEQ ID NO: 158553
  misc_feature 1..765: note = Description of Artificial Sequence: Synthetic coding sequence
  source 1..765: mol_type = other DNA

SEQ ID NO: 158560 - DNA, 765 bp, synthetic construct; identical to SEQ ID NO: 158553
  misc_feature 1..765: note = Description of Artificial Sequence: Synthetic coding sequence
  source 1..765: mol_type = other DNA

SEQ ID NO: 158561 - DNA, 768 bp, synthetic construct; identical to SEQ ID NO: 158554
  misc_feature 1..768: note = Description of Artificial Sequence: Synthetic coding sequence
  source 1..768: mol_type = other DNA

SEQ ID NO: 158562 - DNA, 75 bp, synthetic construct; identical to SEQ ID NO: 158552
  misc_feature 1..75: note = Description of Artificial Sequence: Synthetic coding sequence
  source 1..75: mol_type = other DNA

SEQ ID NO: 158563 - DNA, 75 bp, synthetic construct; identical to SEQ ID NO: 158552
  misc_feature 1..75: note = Description of Artificial Sequence: Synthetic coding sequence
  source 1..75: mol_type = other DNA

SEQ ID NO: 158564 - DNA, 768 bp, synthetic construct; identical to SEQ ID NO: 158555
  misc_feature 1..768: note = Description of Artificial Sequence: Synthetic coding sequence
  source 1..768: mol_type = other DNA

SEQ ID NO: 158565 - DNA, 765 bp, synthetic construct; identical to SEQ ID NO: 158553
  misc_feature 1..765: note = Description of Artificial Sequence: Synthetic coding sequence
  source 1..765: mol_type = other DNA

SEQ ID NO: 158566 - DNA, 765 bp, synthetic construct; identical to SEQ ID NO: 158553
  misc_feature 1..765: note = Description of Artificial Sequence: Synthetic coding sequence
  source 1..765: mol_type = other DNA

SEQ ID NO: 158567 - DNA, 765 bp, synthetic construct; identical to SEQ ID NO: 158553
  misc_feature 1..765: note = Description of Artificial Sequence: Synthetic coding sequence
  source 1..765: mol_type = other DNA

SEQ ID NO: 158568 - DNA, 768 bp, synthetic construct; identical to SEQ ID NO: 158555
  misc_feature 1..768: note = Description of Artificial Sequence: Synthetic coding sequence
  source 1..768: mol_type = other DNA

SEQ ID NO: 158569 - DNA, 765 bp, synthetic construct; identical to SEQ ID NO: 158553
  misc_feature 1..765: note = Description of Artificial Sequence: Synthetic coding sequence
  source 1..765: mol_type = other DNA

SEQ ID NO: 158570 - DNA, 645 bp, synthetic construct
  misc_feature 1..645: note = Description of Artificial Sequence: Synthetic coding sequence
  source 1..645: mol_type = other DNA
atgatcctgaacaaggccctgctgctgggcgccctggccctgaccaccgtgatgagcccctgtggcggggaggacatcgtggccgaccacgtggccagctgtggggtgaacctgtaccagttctacggccccagcggccagtacacccatgaatttgatggagatgagcagttctacgtggacctggagaggaaggagacagcctggcgctggccagagttcagcaagtttggaggctttgacccccagggcgccctgaggaacatggctgtggccaagcacaacctgaacatcatgatcaagcgctacaacagcacagctgccaccaatgaggtgcctgaggtgaccgtcttcagcaagagccctgtgaccctgggccagcccaacaccctcatctgcctggtggacaacatcttcccccctgtggtgaacatcacctggctgagcaatggccagagcgtgacagaaggagtgtctgagaccagcttcctgagcaagagtgaccacagcttcttcaagatctcctacctgaccttcctgcccagcgcagatgagatctatgactgcaaggtggagcactggggcctggaccagcccctgctgaagcactggggcgccagccccagcactggagctgaggagtag

SEQ ID NO: 158571 - DNA, 576 bp, synthetic construct
  misc_feature 1..576: note = Description of Artificial Sequence: Synthetic coding sequence
  source 1..576: mol_type = other DNA
atgagcccctgtggaggagaagatattgtggccgaccacgtggccagctatggagtgaacctgtaccagagctatggccccagcggccagtacagccatgaatttgatggagatgaggagttctacgtggacctggagaggaaggagaccgtgtggcagctgcccctcttccgccgcttcagaagatttgacccccagtttgccctgaccaacattgctgtgctgaagcacaacctgaacatcgtcatcaagaggagcaacagcacagctgccaccaatgaggtgcctgaggtgacagtgttcagcaagagccctgtgaccctgggccagcccaacaccctcatctgcctggtggacaacatcttcccccctgtggtgaacatcacctggctgagcaatggccacagcgtgacagagggcgtgtctgagaccagcttcctgagcaagagtgaccacagcttcttcaagatctcctacctgaccttcctgcccagcgcagatgagatctatgactgcaaggtggagcactggggcctggatgagcccctgctgaagcactggggcctgctgcactag

SEQ ID NO: 158572 - DNA, 441 bp, synthetic construct
  misc_feature 1..441: note = Description of Artificial Sequence: Synthetic coding sequence
  source 1..441: mol_type = other DNA
atgatcctgaacaaggccctgatgctgggcgccctggccctgaccaccgtgatgagcccctgtggcggggaggacatcgtggccgaccacgtggccagctatggagtgaacctgtaccagagctatggccccagcggccagtacacccatgaatttgatggagatgagcagttctacgtggacctgggcaggaaggagaccgtgtggtgcctgcctgtgctgcggcagttccgctttgacccccagtttgccctgaccaacatgtgcatcgccatctaccgcagccggcgggtggacctgctgcatgacctggccctcttcagcggccccatctaccacatccccttcctgctgcagatgttcctgctgagccccctgctgtgggacctgaactgctacatctgcagcgagctgaccaatgcctttgagctgttcccctag

SEQ ID NO: 158573 - DNA, 762 bp, synthetic construct
  misc_feature 1..762: note = Description of Artificial Sequence: Synthetic coding sequence
  source 1..762: mol_type = other DNA
ggctgcctgggcaagaggatgatcctgaacaaggccctgatgctgggcgccctggccctgaccaccgtgatgagcccctgtggcggggaggacatcgtggccgaccacgtggccagctatggagtgaacctgtaccagagctatggccccagcggccagtacacccatgaatttgatggagatgagcagttctacgtggacctgggcaggaaggagaccgtgtggtgcctgcctgtgctgcggcagttccgctttgacccccagtttgccctgaccaacattgctgtgctgaagcacaacctgaacagcctcatcaagaggagcaacagcacagctgccaccaatgaggtgcctgaggtgacagtgttcagcaagagccctgtgaccctgggccagcccaacatcctgatctgcctggtggacaacatcttcccccctgtggtgaacatcacctggctgagcaatggccacagcgtgacagagggcgtgtctgagaccagcttcctgagcaagagtgaccacagcttcttcaagatctcctacctgaccctgctgcccagcgctgaggagagctatgactgcaaggtggagcactggggcctggacaagcccctgctgaagcactggggcaaggatgagttccaccacttcctgatgctgagctgcctgagcagcagcgagctgcctgccttctacagctacatccccaagctggtgttccacacctcctgggtgtccttcttcctgatcttcttcttctag

SEQ ID NO: 158574 - DNA, 603 bp, synthetic construct
  misc_feature 1..603: note = Description of Artificial Sequence: Synthetic coding sequence
  source 1..603: mol_type = other DNA
atgagcccctgtggaggagaagatattgtggccgaccacgtggccagctatggagtgaacctgtaccagagctatggccccagcggccagtacagccatgaatttgatggagatgaggagttctacgtggacctggagaggaaggagaccgtgtggcagctgcccctcttccgccgcttcagaagatttgacccccagtttgccctgaccaacattgctgtgctgaagcacaacctgaacatcgtcatcaagaggagcaacagcacagctgccaccaatgaggtgcctgaggtgacagtgttcagcaagagccctgtgaccctgggccagcccaacaccctcatctgcctggtggacaacatcttcccccctgtggtgaacatcacctggctgagcaatggccacagcgtgacagagggcgtgtctgagaccagcttcctgagcaagagtgaccacagcttcttcaagatctcctacctgaccttcctgcccagcgcagatgagatctatgactgcaaggtggagcactggggcctggatgagcccctgctgaagcactgggagagccagagccgggagagcgaggagagcaccaagagctag

SEQ ID NO: 158575 - DNA, 582 bp, synthetic construct
  misc_feature 1..582: note = Description of Artificial Sequence: Synthetic coding sequence
  source 1..582: mol_type = other DNA
atgagcccctgtggaggagaagatattgtggccgaccacgtggccagctatggagtgaacctgtaccagagctatggccccagcggccagtacacccatgaatttgatggagatgagcagttctacgtggacctgggcaggaaggagaccgtgtggtgcctgcctgtgctgcggcagttccgctttgacccccagtttgccctgaccaacattgctgtgctgaagcacaacctgaacagcctcatcaagaggagcaacagcacagctgccaccaatgaggtgcctgaggtgaccgtcttcagcaagagccctgtgaccctgggccagcccaacatcctgatctgcctggtggacaacatcttcccccctgtggtgaacatcacctggctgagcaatggccacagcgtgacagaaggagtgtctgagaccagcttcctgagcaagagtgaccacagcttcttcaagatctcctacctgaccctgctgcccagcgctgaggagagctatgactgcaaggtggagcactggggcctggacaagcccctgctgaagcactgggtgcacggcttcctgtccttctag

SEQ ID NO: 158576 - DNA, 606 bp, synthetic construct
  misc_feature 1..606: note = Description of Artificial Sequence: Synthetic coding sequence
  source 1..606: mol_type = other DNA
atgagcccctgtggaggagaagatattgtggccgaccacgtggccagctatggagtgaacctgtaccagagctatggccccagcggccagtacagccatgaatttgatggagatgaggagttctacgtggacctggagaggaaggagaccgtgtggcagctgcccctcttccgccgcttcagaagatttgacccccagtttgccctgaccaacattgctgtgctgaagcacaacctgaacatcgtcatcaagaggagcaacagcacagctgccaccaatgaggtgcctgaggtgacagtgttcagcaagagccctgtgaccctgggccagcccaacaccctcatctgcctggtggacaacatcttcccccctgtggtgaacatcacctggctgagcaatggccacagcgtgacagagggcgtgtctgagaccagcttcctgagcaagagtgaccacagcttcttcaagatctcctacctgaccttcctgcccagcgcagatgagatctatgactgcaaggtggagcactggggcctggatgagcccctgctgaagcactggggcatccaggccgaggagggccagaggaggaagaagctgggctag

SEQ ID NO: 158577 - DNA, 258 bp, synthetic construct
  misc_feature 1..258: note = Description of Artificial Sequence: Synthetic coding sequence
  source 1..258: mol_type = other DNA
aacaccctcatctgcctggtggacaacatcttcccccctgtggtgaacatcacctggctgagcaatggccacagcgtgacagaaggagtgtctgagaccagcttcctgagcaagagtgaccacagcttcttcaagatctcctacctgaccttcctgcccagcgcagatgagatctatgactgcaaggtggagcactggggcctggatgagcccctgctgaagcactggggcaaggacttcatgtccttcttctactag

SEQ ID NO: 158578 - DNA, 390 bp, synthetic construct
  misc_feature 1..390: note = Description of Artificial Sequence: Synthetic coding sequence
  source 1..390: mol_type = other DNA
ggctgcctgggcaagaggatgatcctgaacaaggccctgatgctgggcgccctggccctgaccaccgtgatgagcccctgtggcggggaggacatcgtggccgaccacgtggccagctatggagtgaacctgtaccagagctatggccccagcggccagtacagccatgaatttgatggagatgaggagttctacgtggacctggagaggaaggagaccgtgtggcagctgcccctcttccgccgcttccgccgctttgacccccagtttgccctgaccaacattgctgtgctgaagcacaacctgaacatcgtcatcaagaggagcaacagcacagctgccaccaatgaggtgcctgaggtgaccgtcttcagcaagagccctgtgtag

SEQ ID NO: 158579 - DNA, 768 bp, synthetic construct
  misc_feature 1..768: note = Description of Artificial Sequence: Synthetic coding sequence
  source 1..768: mol_type = other DNA
atgatcctgaacaaggccctgctgctgggcgccctggccctgacagctgtgatgagcccctgtggcggggaggacatcgtggccgaccacgtggccagctatggagtgaacttctaccagagccacggccccagcggccagtacacccatgaatttgatggagatgaggagttctacgtggacctggagaccaaggagaccgtgtggcagctgcccatgttcagcaagttcatcagctttgacccccagagcgccctgaggaacatggctgtgggcaagcacaccctggagttcatgatgaggcagagcaacagcacagctgccaccaatgaggtgcctgaggtgaccgtcttcagcaagtttcctgtgaccctgggccagcccaacaccctcatctgcctggtggacaacatcttcccccctgtggtgaacatcacctggctgagcaatggccacagcgtgacagaaggagtgtctgagaccagcttcctgagcaagagtgaccacagcttcttcaagatctcctacctgaccttcctgcccagcgcagatgagatctatgactgcaaggtggagcactggggcctggatgagcccctgctgaagcactgggagcctgagatcccagcccccatgtctgagctgacagagaccctggtgtgtgccctgggcctgtctgtgggcctgatgggcatcgtggtgggcaccgtcttcatcatccagggcctgcggtctgtggatgccagccgccaccagggcctgctgtag

SEQ ID NO: 158580 - DNA, 768 bp, synthetic construct
  misc_feature 1..768: note = Description of Artificial Sequence: Synthetic coding sequence
  source 1..768: mol_type = other DNA
atgatcctgaacaaggccctgctgctgggcgccctggccctgacagctgtgatgagcccctgtggcggggaggacatcgtggccgaccacgtggccagctatggagtgaacttctaccagagccacggccccagcggccagtacacccatgaatttgatggagatgaggagttctacgtggacctggagaccaaggagaccgtgtggcagctgcccatgttcagcaagttcatcagctttgacccccagagcgccctgaggaacatggctgtgggcaagcacaccctggagttcatgatgaggcagagcaacagcacagctgccaccaatgaggtgcctgaggtgaccgtcttcagcaagtttcctgtgaccctgggccagcccaacaccctcatctgcctggtggacaacatcttcccccctgtggtgaacatcacctggctgagcaatggccacagcgtgacagaaggagtgtctgagaccagcttcctgagcaagagtgaccacagcttcttcaagatctcctacctgaccttcctgcccagcgcagatgagatctatgactgcaaggtggagcactggggcctggatgagcccctgctgaagcactgggagcctgagatcccagcccccatgtctgagctgacagagaccctggtgtgtgccctgggcctgtctgtgggcctgatgggcatcgtggtgggcaccgtcttcatcatccagggcctgcggtctgtgggcgccagccgccaccagggcctgctgtag

SEQ ID NO: 158581 - DNA, 768 bp, synthetic construct
  misc_feature 1..768: note = Description of Artificial Sequence: Synthetic coding sequence
  source 1..768: mol_type = other DNA
atgatcctgaacaaggccctgctgctgggcgccctggccctgacagctgtgatgagcccctgtggcggggaggacatcgtggccgaccacgtggccagctatggagtgaacttctaccagagccacggccccagcggccagtacacccatgaatttgatggagatgaggagttctacgtggacctggagaccaaggagaccgtgtggcagctgcccatgttcagcaagttcatcagctttgacccccagagcgccctgaggaacatggctgtgggcaagcacaccctggagttcatgatgggccagagcaacagcacagctgccaccaatgaggtgcctgaggtgaccgtcttcagcaagtttcctgtgaccctgggccagcccaacaccctcatctgcctggtggacaacatcttcccccctgtggtgaacatcacctggctgagcaatggccacagcgtgacagaaggagtgtctgagaccagcttcctgagcaagagtgaccacagcttcttcaagatctcctacctgaccttcctgcccagcgcagatgagatctatgactgcaaggtggagcactggggcctggatgagcccctgctgaagcactgggagcctgagatcccagcccccatgtctgagctgacagagaccctggtgtgtgccctgggcctgtctgtgggcctgatgggcatcgtggtgggcaccgtcttcatcatccagggcctgcggtctgtgggcgccagccgccaccagggcctgctgtag

SEQ ID NO: 158582 - DNA, 768 bp, synthetic construct; identical to SEQ ID NO: 158580
  misc_feature 1..768: note = Description of Artificial Sequence: Synthetic coding sequence
  source 1..768: mol_type = other DNA

SEQ ID NO: 158583 - DNA, 768 bp, synthetic construct
  misc_feature 1..768: note = Description of Artificial Sequence: Synthetic coding sequence
  source 1..768: mol_type = other DNA
atgatcctgaacaaggccctgctgctgggcgccctggccctgacagctgtgatgagcccctgtggcggggaggacatcgtggccgaccacgtggccagctatggagtgaacttctaccagagccacggccccagcggccagtacacccatgaatttgatggagatgaggagttctacgtggacctggagaccaaggagaccgtgtggcagctgcccatgttcagcaagttcatcagctttgacccccagagcgccctgaggaacatggctgtgggcaagcacaccctggagttcatgatgaggcagagcaacagcacagctgccaccaatgaggtgcctgaggtgaccgtcttcagcaagtttcctgtgaccctgggccagcccaacaccctcatctgcctggtggacaacatcttcccccctgtggtgaacatcacctggctgagcaatggccacagcgtgacagaaggagtgtctgagaccagcttcctgagcaagagtgaccacagcttcttcaagatctcctacctgaccttcctgcccagcgcagatgagatctatgactgcaaggtggagcactggggcctggatgagcccctgctgaagcactgggagcctgagatcccagcccccatgtctgagctgacagagaccctggtgtgtgccctgggcctgtctgctggcctgatgggcatcgtggtgggcaccgtcttcatcatccagggcctgcggtctgtgggcgccagccgccaccagggcctgctgtag

SEQ ID NO: 158584 - DNA, 768 bp, synthetic construct; identical to SEQ ID NO: 158580
  misc_feature 1..768: note = Description of Artificial Sequence: Synthetic coding sequence
  source 1..768: mol_type = other DNA

SEQ ID NO: 158585 - DNA, 768 bp, synthetic construct; identical to SEQ ID NO: 158580
  misc_feature 1..768: note = Description of Artificial Sequence: Synthetic coding sequence
  source 1..768: mol_type = other DNA

SEQ ID NO: 158586 - DNA, 768 bp, synthetic construct; identical to SEQ ID NO: 158583
  misc_feature 1..768: note = Description of Artificial Sequence: Synthetic coding sequence
  source 1..768: mol_type = other DNA

SEQ ID NO: 158587 - DNA, 768 bp, synthetic construct; identical to SEQ ID NO: 158580
  misc_feature 1..768: note = Description of Artificial Sequence: Synthetic coding sequence
  source 1..768: mol_type = other DNA

SEQ ID NO: 158588 - DNA, 249 bp, synthetic construct
  misc_feature 1..249: note = Description of Artificial Sequence: Synthetic coding sequence
  source 1..249: mol_type = other DNA
gaccacgtggccagctatggagtgaacttctaccagagccacggccccagcggccagtacacccatgaatttgatggagatgaggagttctacgtggacctggagaccaaggagaccgtgtggcagctgcccatgttcagcaagttcatcagctttgacccccagagcgccctgaggaacatggctgtgggcaagcacaccctggagttcatgatgaggcagagcaacagcacagctgccaccaactag

SEQ ID NO: 158589 - DNA, 768 bp, synthetic construct; identical to SEQ ID NO: 158580
  misc_feature 1..768: note = Description of Artificial Sequence: Synthetic coding sequence
  source 1..768: mol_type = other DNA

SEQ ID NO: 158590 - DNA, 84 bp, synthetic construct
  misc_feature 1..84: note = Description of Artificial Sequence: Synthetic coding sequence
  source 1..84: mol_type = other DNA
atgatcctgaacaaggccctgctgctgggcgccctggccctgacagctgtgatgagcccctgtggcggggaggacatcgtgtag

SEQ ID NO: 158591 - DNA, 810 bp, synthetic construct
  misc_feature 1..810: note = Description of Artificial Sequence: Synthetic coding sequence
  source 1..810: mol_type = other DNA
atgtcctggaagaaggccctgcgcatccctggggacctgcgggtggccaccgtgaccctgatgctggccatgctgagcagcctgctggccgagggccgggacagcccagaagattttgtgttccagttcaagggcatgtgctacttcaccaatggaacagagcgggtgcggctggtgacccgctacatctacaaccgggaggagtatgccaggtttgacagtgatgtgggcgtgtacagagctgtgaccccccagggccgcccagatgctgagtactggaacagccagaaggaggtgctggagggcaccagggctgagctggacacagtgtgccgccacaactatgaggtggccttccggggcatcctgcagaggagagtggagcccaccgtgaccatcagccccagcaggacagaggccctgaaccaccacaacctgctggtgtgcagcgtgacagacttctacccaggccagatcaaggtgcgctggttcagaaatgaccaggaggagacagctggggtggtgtccacccccctcatcagaaatggagactggaccttccagatcctggtgatgctggagatgaccccccagagaggagatgtgtacacctgccacgtggagcaccccagcctgcagagccccatcaccgtggagtggagggcccagagcgagagcgcccagagcaagatgctgtctggagtgggcggctttgtgctgggcctcatcttcctgggcctgggcctcatcatccggcagaggagccagaagggcccccagggccccccacctgctggcctgctgcactag

SEQ ID NO: 158592 - DNA, 786 bp, synthetic construct
  misc_feature 1..786: note = Description of Artificial Sequence: Synthetic coding sequence
  source 1..786: mol_type = other DNA
atgtcctggaagaaggccctgcgcatccctgggggcctgcgggccgccaccgtgaccctgatgctgtccatgctgagcacccctgtggccgagggccgggacagcccagaagattttgtgtaccagttcaagggcatgtgctacttcaccaatggaacagagcgggtgcggctggtgagccgcagcatctacaaccgggaggagatcgtgcgctttgacagtgatgtgggggagttccgggctgtgaccctgctgggcctgcctgctgctgagtactggaacagccagaaggacatcctggagaggaagagagctgctgtggacagagtgtgccgccacaactaccagctggagctgcggaccaccctgcagaggagagtggagcccaccgtgaccatcagccccagcaggacagaggccctgaaccaccacaacctgctggtgtgcagcgtgacagacttctacccagcccagatcaaggtgcgctggttcagaaatgaccaggaggagacagctggggtggtgtccacccccctcatcagaaatggagactggaccttccagatcctggtgatgctggagatgaccccccagagaggagatgtgtacacctgccacgtggagcaccccagcctgcagagccccatcaccgtggagtggagggcccagagcgagagcgcccagagcaagatgctgtctggaattggaggctttgtgctgggcctcatcttcctgggcctgggcctcatcatccaccacaggagccagaagggcctgctgcactag

SEQ ID NO: 158593 - DNA, 786 bp, synthetic construct; identical to SEQ ID NO: 158592
  misc_feature 1..786: note = Description of Artificial Sequence: Synthetic coding sequence
  source 1..786: mol_type = other DNA

SEQ ID NO: 158594 - DNA, 810 bp, synthetic construct
  misc_feature 1..810: note = Description of Artificial Sequence: Synthetic coding sequence
  source 1..810: mol_type = other DNA
atgtcctggaagaaggccctgcgcatccctgggggcctgcgggccgccaccgtgaccctgatgctggccatgctgagcacccctgtggccgagggccgggacagcccagaagattttgtgtaccagttcaaggccatgtgctacttcaccaatggaacagagcgggtgcgctacgtgacccgctacatctacaaccgggaggagtatgccaggtttgacagtgatgtggaggtgtacagagctgtgacccccctgggccccccagatgctgagtactggaacagccagaaggaggtgctggagaggaccagggctgagctggacacagtgtgccgccacaactaccagctggagctgcggaccaccctgcagaggagagtggagcccaccgtgaccatcagccccagcaggacagaggccctgaaccaccacaacctgctggtgtgcagcgtgacagacttctacccagcccagatcaaggtgcgctggttcagaaatgaccaggaggagaccaccggggtggtgtccacccccctcatcagaaatggagactggaccttccagatcctggtgatgctggagatgaccccccagcacggagatgtgtacacctgccacgtggagcaccccagcctgcagaaccccatcaccgtggagtggagggcccagagcgagagcgcccagagcaagatgctgtctggaattggaggctttgtgctgggcctcatcttcctgggcctgggcctcatcatccaccacaggagccagaagggcccccagggccccccacctgctggcctgctgcactag

SEQ ID NO: 158595 - DNA, 810 bp, synthetic construct
  misc_feature 1..810: note = Description of Artificial Sequence: Synthetic coding sequence
  source 1..810: mol_type = other DNA
atgtcctggaagaaggccctgcgcatccctgggggcctgcgggtggccaccgtgaccctgatgctggccatgctgagcacccctgtggccgagggccgggacagcccagaagattttgtgtaccagttcaagggcatgtgctacttcaccaatggaacagagcgggtgcggctggtgacccgctacatctacaaccgggaggagtatgccaggtttgacagtgatgtgggcgtgtacagagctgtgacccccctgggccccccagatgctgagtactggaacagccagaaggaggtgctggagaggaccagggctgagctggacacagtgtgccgccacaactaccagctggagctgcggaccaccctgcagaggagagtggagcccaccgtgaccatcagccccagcaggacagaggccctgaaccaccacaacctgctggtgtgcagcgtgacagacttctacccagcccagatcaaggtgcgctggttcagaaatgaccaggaggagaccaccggggtggtgtccacccccctcatcagaaatggagactggaccttccagatcctggtgatgctggagatgaccccccagagaggagatgtgtacacctgccacgtggagcaccccagcctgcagaaccccatcatcgtggagtggagggcccagagcgagagcgcccagagcaagatgctgtctggaattggaggctttgtgctgggcctcatcttcctgggcctgggcctcatcatccaccacaggagccagaagggcccccagggccccccacctgctggcctgctgcactag

SEQ ID NO: 158596 - DNA, 675 bp, synthetic construct
  misc_feature 1..675: note = Description of Artificial Sequence: Synthetic coding sequence
  source 1..675: mol_type = other DNA
atgtcctggaagaaggccctgcgcatccctggggacctgcgggtggccaccgtgaccctgatgctggccatgctgagcagcctgctggccgagggccgggacagcccagaagattttgtgttccagttcaagggcatgtgctacttcaccaatggaacagagcgggtgcggctggtgacccgctacatctacaaccgggaggagtatgccaggtttgacagtgatgtgggcgtgtacagagctgtgaccccccagggccgcccagatgctgagtactggaacagccagaaggaggtgctggagggcaccagggctgagctggacacagtgtgccgccacaactatgaggtggccttccggggcatcctgcagaggagagtggagcccaccgtgaccatcagccccagcaggacagaggccctgaaccaccacaacctgctggtgtgcagcgtgacagacttctacccaggccagatcaaggtgcgctggttcagaaatgaccaggaggagacagctggggtggtgtccacccccctcatcagaaatggagactggaccttccagatcctggtgatgctggagatgaccccccagagaggagatgtgtacacctgccacgtggagcaccccagcctgcagagccccatcaccgtggagtggaggctgctgcactag

SEQ ID NO: 158597 - DNA, 786 bp, synthetic construct
  misc_feature 1..786: note = Description of Artificial Sequence: Synthetic coding sequence
  source 1..786: mol_type = other DNA
atgtcctggaagaaggccctgcgcatccctggggacctgcgggtggccaccgtgaccctgatgctggccatgctgagcagcctgctggccgagggccgggacagcccagaagattttgtgttccagttcaagggcatgtgctacttcaccaatggaacagagcgggtgcggctggtgacccgctacatctacaaccgggaggagtatgccaggtttgacagtgatgtgggcgtgtacagagctgtgaccccccagggccgcccagatgctgagtactggaacagccagaaggaggtgctggagggcaccagggctgagctggacacagtgtgccgccacaactatgaggtggccttccggggcatcctgcagaggagagtggagcccaccgtgaccatcagccccagcaggacagaggccctgaaccaccacaacctgctggtgtgcagcgtgacagacttctacccaggccagatcaaggtgcgctggttcagaaatgaccaggaggagacagctggggtggtgtccacccccctcatcagaaatggagactggaccttccagatcctggtgatgctggagatgaccccccagagaggagatgtgtacacctgccacgtggagcaccccagcctgcagagccccatcaccgtggagtggagggcccagagcgagagcgcccagagcaagatgctgtctggagtgggcggctttgtgctgggcctcatcttcctgggcctgggcctcatcatccggcagaggagccagaagggcctgctgcactag

SEQ ID NO: 158598 - DNA, 786 bp, synthetic construct
  misc_feature 1..786: note = Description of Artificial Sequence: Synthetic coding sequence
  source 1..786: mol_type = other DNA
atgtcctggaagaaggccctgcgcatccctgggggcctgcgggccgccaccgtgaccctgatgctggccatgctgagcacccctgtggccgagggccgggacagcccagaagattttgtgtaccagttcaaggccatgtgctacttcaccaatggaacagagcgggtgcgctacgtgacccgctacatctacaaccgggaggagtatgccaggtttgacagtgatgtggaggtgtacagagctgtgacccccctgggccccccagatgctgagtactggaacagccagaaggaggtgctggagaggaccagggctgagctggacacagtgtgccgccacaactaccagctggagctgcggaccaccctgcagaggagagtggagcccaccgtgaccatcagccccagcaggacagaggccctgaaccaccacaacctgctggtgtgcagcgtgacagacttctacccagcccagatcaaggtgcgctggttcagaaatgaccaggaggagaccaccggggtggtgtccacccccctcatcagaaatggagactggaccttccagatcctggtgatgctggagatgaccccccagcacggagatgtgtacacctgccacgtggagcaccccagcctgcagaaccccatcaccgtggagtggagggcccagagcgagagcgcccagagcaagatgctgtctggaattggaggctttgtgctgggcctcatcttcctgggcctgggcctcatcatccaccacaggagccagaagggcctgctgcactag

SEQ ID NO: 158599 - DNA, 675 bp, synthetic construct
  misc_feature 1..675: note = Description of Artificial Sequence: Synthetic coding sequence
  source 1..675: mol_type = other DNA
atgtcctggaagaaggccctgcgcatccctgggggcctgcgggccgccaccgtgaccctgatgctgtccatgctgagcacccctgtggccgagggccgggacagcccagaagattttgtgtaccagttcaagggcatgtgctacttcaccaatggaacagagcgggtgcggctggtgagccgcagcatctacaaccgggaggagatcgtgcgctttgacagtgatgtgggggagttccgggctgtgaccctgctgggcctgcctgctgctgagtactggaacagccagaaggacatcctggagaggaagagagctgctgtggacagagtgtgccgccacaactaccagctggagctgcggaccaccctgcagaggagagtggagcccaccgtgaccatcagccccagcaggacagaggccctgaaccaccacaacctgctggtgtgcagcgtgacagacttctacccagcccagatcaaggtgcgctggttcagaaatgaccaggaggagacagctggggtggtgtccacccccctcatcagaaatggagactggaccttccagatcctggtgatgctggagatgaccccccagagaggagatgtgtacacctgccacgtggagcaccccagcctgcagagccccatcaccgtggagtggaggctgctgcactag

SEQ ID NO: 158600 - DNA, 786 bp, synthetic construct; identical to SEQ ID NO: 158598
  misc_feature 1..786: note = Description of Artificial Sequence: Synthetic coding sequence
  source 1..786: mol_type = other DNA

SEQ ID NO: 158601 - DNA, 786 bp, synthetic construct
  misc_feature 1..786: note = Description of Artificial Sequence: Synthetic coding sequence
  source 1..786: mol_type = other DNA
atgtcctggaagaaggccctgcgcatccctgggggcctgcgggtggccaccgtgaccctgatgctggccatgctgagcacccctgtggccgagggccgggacagcccagaagattttgtgtaccagttcaagggcatgtgctacttcaccaatggaacagagcgggtgcggggcgtgacccgctacatctacaaccgggaggagtatgccaggtttgacagtgatgtgggcgtgtacagagctgtgacccccctgggccccccagctgctgagtactggaacagccagaaggaggtgctggagaggaccagggctgagctggacacagtgtgccgccacaactaccagctggagctgcggaccaccctgcagaggagagtggagcccaccgtgaccatcagccccagcaggacagaggccctgaaccaccacaacctgctggtgtgcagcgtgacagacttctacccagcccagatcaaggtgcgctggttcagaaatgaccaggaggagaccaccggggtggtgtccacccccctcatcagaaatggagactggaccttccagatcctggtgatgctggagatgaccccccagagaggagatgtgtacacctgccacgtggagcaccccagcctgcagaaccccatcatcgtggagtggagggcccagagcgagagcgcccagagcaagatgctgtctggaattggaggctttgtgctgggcctcatcttcctgggcctgggcctcatcatccaccacaggagccagaagggcctgctgcactag

SEQ ID NO: 158602 - DNA, 675 bp, synthetic construct
  misc_feature 1..675: note = Description of Artificial Sequence: Synthetic coding sequence
  source 1..675: mol_type = other DNA
atgtcctggaagaaggccctgcgcatccctgggggcctgcgggccgccaccgtgaccctgatgctgtccatgctgagcacccctgtggccgagggccgggacagcccagaagattttgtgtaccagttcaagggcatgtgctacttcaccaatggaacagagcgggtgcggctggtgagccgcagcatctacaaccgggaggagatcgtgcgctttgacagtgatgtgggggagttccgggctgtgaccctgctgggcctgcctgctgctgagtactggaacagccagaaggacatcctggagaggaagagagctgctgtggacagagtgtgccgccacaactaccagctggagctgcggaccaccctgcagaggagagtggagcccaccgtgaccatcagccccagcaggacagaggccctgaaccaccacaacctgctggtgtgcagcgtgacagacttctacccagcccagatcaaggtgcgctggttcagaaatggccaggaggagacagctggggtggtgtccacccccctcatcagaaatggagactggaccttccagatcctggtgatgctggagatgaccccccagagaggagatgtgtacacctgccacgtggagcaccccagcctgcagagccccatcaccgtggagtggaggctgctgcactag

SEQ ID NO: 158603 - DNA, 786 bp, synthetic construct
  misc_feature 1..786: note = Description of Artificial Sequence: Synthetic coding sequence
  source 1..786: mol_type = other DNA
atgtcctggaagaaggccctgcgcatccctgggggcctgcgggtggccaccgtgaccctgatgctggccatgctgagcacccctgtggccgagggccgggacagcccagaagattttgtgtaccagttcaagggcatgtgctacttcaccaatggaacagagcgggtgcggctggtgacccgctacatctacaaccgggaggagtatgccaggtttgacagtgatgtgggcgtgtacagagctgtgacccccctgggccccccagatgctgagtactggaacagccagaaggaggtgctggagaggaccagggctgagctggacacagtgtgccgccacaactaccagctggagctgcggaccaccctgcagaggagagtggagcccaccgtgaccatcagccccagcaggacagaggccctgaaccaccacaacctgctggtgtgcagcgtgacagacttctacccagcccagatcaaggtgcgctggttcagaaatgaccaggaggagaccaccggggtggtgtccacccccctcatcagaaatggagactggaccttccagatcctggtgatgctggagatgaccccccagagaggagatgtgtacacctgccacgtggagcaccccagcctgcagaaccccatcatcgtggagtggagggcccagagcgagagcgcccagagcaagatgctgtctggaattggaggctttgtgctgggcctcatcttcctgggcctgggcctcatcatccaccacaggagccagaagggcctgctgcactag

SEQ ID NO: 158604 - DNA, 786 bp, synthetic construct
  misc_feature 1..786: note = Description of Artificial Sequence: Synthetic coding sequence
  source 1..786: mol_type = other DNA
atgtcctggaagaaggccctgcgcatccctgggggcctgcgggccgccaccgtgaccctgatgctgtccatgctgagcacccctgtggccgagggccgggacagcccagaagattttgtgtaccagttcaagggcatgtgctacttcaccaatggaacagagcgggtgcggctggtgagccgcagcatctacaaccgggaggagatcgtgcgctttgacagtgatgtgggggagttccgggctgtgaccctgctgggcctgcctgctgctgagtactggaacagccagaaggacatcctggagaggaagagagctgctgtggacagagtgtgccgccacaactaccagctggagctgcggaccaccctgcagaggagagtggagcccaccgtgaccatcagccccagcaggacagaggccctgaaccaccacaacctgctggtgtgcagcgtgacagacttctacccagcccagatcaaggtgcgctggttcagaaatggccaggaggagacagctggggtggtgtccacccccctcatcagaaatggagactggaccttccagatcctggtgatgctggagatgaccccccagagaggagatgtgtacacctgccacgtggagcaccccagcctgcagagccccatcaccgtggagtggagggcccagagcgagagcgcccagagcaagatgctgtctggaattggaggctttgtgctgggcctcatcttcctgggcctgggcctcatcatccaccacaggagccagaagggcctgctgcactag

SEQ ID NO: 158605 - DNA, 810 bp, synthetic construct
  misc_feature 1..810: note = Description of Artificial Sequence: Synthetic coding sequence
  source 1..810: mol_type = other DNA
atgtcctggaagaaggccctgcgcatccctgggggcctgcgggccgccaccgtgaccctgatgctgtccatgctgagcacccctgtggccgagggccgggacagcccagaagattttgtgtaccagttcaagggcatgtgctacttcaccaatggaacagagcgggtgcggctggtgagccgcagcatctacaaccgggaggagatcgtgcgctttgacagtgatgtgggggagttccgggctgtgaccctgctgggcctgcctgctgctgagtactggaacagccagaaggacatcctggagaggaagagagctgctgtggacagagtgtgccgccacaactaccagctggagctgcggaccaccctgcagaggagagtggagcccaccgtgaccatcagccccagcaggacagaggccctgaaccaccacaacctgctggtgtgcagcgtgacagacttctacccagcccagatcaaggtgcgctggttcagaaatggccaggaggagacagctggggtggtgtccacccccctcatcagaaatggagactggaccttccagatcctggtgatgctggagatgaccccccagagaggagatgtgtacacctgccacgtggagcaccccagcctgcagagccccatcaccgtggagtggagggcccagagcgagagcgcccagagcaagatgctgtctggaattggaggctttgtgctgggcctcatcttcctgggcctgggcctcatcatccaccacaggagccagaagggcccccagggccccccacctgctggcctgctgcactag

SEQ ID NO: 158606 - DNA, 786 bp, synthetic construct; identical to SEQ ID NO: 158603
  misc_feature 1..786: note = Description of Artificial Sequence: Synthetic coding sequence
  source 1..786: mol_type = other DNA

SEQ ID NO: 158607 - DNA, 675 bp, synthetic construct
  misc_feature 1..675: note = Description of Artificial Sequence: Synthetic coding sequence
  source 1..675: mol_type = other DNA
atgtcctggaagaaggccctgcgcatccctgggggcctgcgggccgccaccgtgaccctgatgctggccatgctgagcacccctgtggccgagggccgggacagcccagaagattttgtgtaccagttcaaggccatgtgctacttcaccaatggaacagagcgggtgcgctacgtgacccgctacatctacaaccgggaggagtatgccaggtttgacagtgatgtggaggtgtacagagctgtgacccccctgggccccccagatgctgagtactggaacagccagaaggaggtgctggagaggaccagggctgagctggacacagtgtgccgccacaactaccagctggagctgcggaccaccctgcagaggagagtggagcccaccgtgaccatcagccccagcaggacagaggccctgaaccaccacaacctgctggtgtgcagcgtgacagacttctacccagcccagatcaaggtgcgctggttcagaaatgaccaggaggagaccaccggggtggtgtccacccccctcatcagaaatggagactggaccttccagatcctggtgatgctggagatgaccccccagcacggagatgtgtacacctgccacgtggagcaccccagcctgcagaaccccatcaccgtggagtggaggctgctgcactag

SEQ ID NO: 158608 - DNA, 786 bp, synthetic construct; identical to SEQ ID NO: 158604
  misc_feature 1..786: note = Description of Artificial Sequence: Synthetic coding sequence
  source 1..786: mol_type = other DNA

SEQ ID NO: 158609 - DNA, 405 bp, synthetic construct
  misc_feature 1..405: note = Description of Artificial Sequence: Synthetic coding sequence
  source 1..405: mol_type = other DNA
atgtcctggaagaaggccctgcgcatccctgggggcctgcgggccgccaccgtgaccctgatgctgtccatgctgagcacccctgtggccgagggccgggacagccctgtggagcccaccgtgaccatcagccccagcaggacagaggccctgaaccaccacaacctgctggtgtgcagcgtgacagacttctacccagcccagatcaaggtgcgctggttcagaaatggccaggaggagacagctggggtggtgtccacccccctcatcagaaatggagactggaccttccagatcctggtgatgctggagatgaccccccagagaggagatgtgtacacctgccacgtggagcaccccagcctgcagagccccatcaccgtggagtggaggctgctgcactag

SEQ ID NO: 158610 - DNA, 405 bp, synthetic construct
  misc_feature 1..405: note = Description of Artificial Sequence: Synthetic coding sequence
  source 1..405: mol_type = other DNA
atgtcctggaagaaggccctgcgcatccctgggggcctgcgggtggccaccgtgaccctgatgctggccatgctgagcacccctgtggccgagggccgggacagccctgtggagcccaccgtgaccatcagccccagcaggacagaggccctgaaccaccacaacctgctggtgtgcagcgtgacagacttctacccagcccagatcaaggtgcgctggttcagaaatgaccaggaggagaccaccggggtggtgtccacccccctcatcagaaatggagactggaccttccagatcctggtgatgctggagatgaccccccagagaggagatgtgtacacctgccacgtggagcaccccagcctgcagaaccccatcatcgtggagtggaggctgctgcactag

SEQ ID NO: 158611 - DNA, 435 bp, synthetic construct
  misc_feature 1..435: note = Description of Artificial Sequence: Synthetic coding sequence
  source 1..435: mol_type = other DNA
atgtcctggaagaaggccctgcgcatccctgggggcctgcgggtggccaccgtgacccccctgggccccccagatgctgagtactggaacagccagaaggaggtgctggagaggaccagggctgagctggacacagtgtgccgccacaactaccagctggagctgcggaccaccctgcagaggagagtggagcccaccgtgaccatcagccccagcaggacagaggccctgaaccaccacaacctgctggtgtgcagcgtgacagacttctacccagcccagatcaaggtgcgctggttcagaaatgaccaggaggagaccaccggggtggtgtccacccccctcatcagaaatggagactggaccttccagatcctggtgatgctggagatgaccccccagagaggagatgtgtacacctgccacgtggagtag

SEQ ID NO: 158612 - DNA, 405 bp, synthetic construct
  misc_feature 1..405: note = Description of Artificial Sequence: Synthetic coding sequence
  source 1..405: mol_type = other DNA
atgtcctggaagaaggccctgcgcatccctgggggcctgcgggccgccaccgtgaccctgatgctggccatgctgagcacccctgtggccgagggccgggacagccctgtggagcccaccgtgaccatcagccccagcaggacagaggccctgaaccaccacaacctgctggtgtgcagcgtgacagacttctacccagcccagatcaaggtgcgctggttcagaaatgaccaggaggagaccaccggggtggtgtccacccccctcatcagaaatggagactggaccttccagatcctggtgatgctggagatgaccccccagcacggagatgtgtacacctgccacgtggagcaccccagcctgcagaaccccatcaccgtggagtggaggctgctgcactag

SEQ ID NO: 158613 - DNA, 786 bp, synthetic construct; identical to SEQ ID NO: 158597
  misc_feature 1..786: note = Description of Artificial Sequence: Synthetic coding sequence
  source 1..786: mol_type = other DNA

SEQ ID NO: 158614 - DNA, 675 bp, synthetic construct
  misc_feature 1..675: note = Description of Artificial Sequence: Synthetic coding sequence
  source 1..675: mol_type = other DNA
atgtcctggaagaaggccctgcgcatccctgggggcctgcgggtggccaccgtgaccctgatgctggccatgctgagcacccctgtggccgagggccgggacagcccagaagattttgtgtaccagttcaagggcatgtgctacttcaccaatggaacagagcgggtgcggctggtgacccgctacatctacaaccgggaggagtatgccaggtttgacagtgatgtgggcgtgtacagagctgtgacccccctgggccccccagatgctgagtactggaacagccagaaggaggtgctggagaggaccagggctgagctggacacagtgtgccgccacaactaccagctggagctgcggaccaccctgcagaggagagtggagcccaccgtgaccatcagccccagcaggacagaggccctgaaccaccacaacctgctggtgtgcagcgtgacagacttctacccagcccagatcaaggtgcgctggttcagaaatgaccaggaggagaccaccggggtggtgtccacccccctcatcagaaatggagactggaccttccagatcctggtgatgctggagatgaccccccagagaggagatgtgtacacctgccacgtggagcaccccagcctgcagaaccccatcatcgtggagtggaggctgctgcactag

SEQ ID NO: 158615 - DNA, 435 bp, synthetic construct
  misc_feature 1..435: note = Description of Artificial Sequence: Synthetic coding sequence
  source 1..435: mol_type = other DNA
atgtcctggaagaaggccctgcgcatccctggggacctgcgggtggccaccgtgaccccccagggccgcccagatgctgagtactggaacagccagaaggaggtgctggagggcaccagggctgagctggacacagtgtgccgccacaactatgaggtggccttccggggcatcctgcagaggagagtggagcccaccgtgaccatcagccccagcaggacagaggccctgaaccaccacaacctgctggtgtgcagcgtgacagacttctacccaggccagatcaaggtgcgctggttcagaaatgaccaggaggagacagctggggtggtgtccacccccctcatcagaaatggagactggaccttccagatcctggtgatgctggagatgaccccccagagaggagatgtgtacacctgccacgtggagtag

SEQ ID NO: 158616 - DNA, 435 bp, synthetic construct
  misc_feature 1..435: note = Description of Artificial Sequence: Synthetic coding sequence
  source 1..435: mol_type = other DNA
atgtcctggaagaaggccctgcgcatccctgggggcctgcgggccgccaccgtgaccctgctgggcctgcctgctgctgagtactggaacagccagaaggacatcctggagaggaagagagctgctgtggacagagtgtgccgccacaactaccagctggagctgcggaccaccctgcagaggagagtggagcccaccgtgaccatcagccccagcaggacagaggccctgaaccaccacaacctgctggtgtgcagcgtgacagacttctacccagcccagatcaaggtgcgctggttcagaaatggccaggaggagacagctggggtggtgtccacccccctcatcagaaatggagactggaccttccagatcctggtgatgctggagatgaccccccagagaggagatgtgtacacctgccacgtggagtag

SEQ ID NO: 158617 - DNA, 435 bp, synthetic construct
  misc_feature 1..435: note = Description of Artificial Sequence: Synthetic coding sequence
  source 1..435: mol_type = other DNA
atgtcctggaagaaggccctgcgcatccctgggggcctgcgggccgccaccgtgacccccctgggccccccagatgctgagtactggaacagccagaaggaggtgctggagaggaccagggctgagctggacacagtgtgccgccacaactaccagctggagctgcggaccaccctgcagaggagagtggagcccaccgtgaccatcagccccagcaggacagaggccctgaaccaccacaacctgctggtgtgcagcgtgacagacttctacccagcccagatcaaggtgcgctggttcagaaatgaccaggaggagaccaccggggtggtgtccacccccctcatcagaaatggagactggaccttccagatcctggtgatgctggagatgaccccccagcacggagatgtgtacacctgccacgtggagtag

SEQ ID NO: 158618 - DNA, 411 bp, synthetic construct
  misc_feature 1..411: note = Description of Artificial Sequence: Synthetic coding sequence
  source 1..411: mol_type = other DNA
atgtcctggaagaaggccctgcgcatccctgggggcctgcgggccgccaccgtgaccctgatgctgtccatgctgagcacccctgtggccgagggccgggacagcccagaagattttgtgtaccagttcaagggcatgtgctacttcaccaatggaacagagcgggtgcggctggtgagccgcagcatctacaaccgggaggagatcgtgcgctttgacagtgatgtgggggagttccgggctgtgaccctgctgggcctgcctgctgctgagtactggaacagccagaaggacatcctggagaggaagagagctgctgtggacagagtgtgccgccacaactaccagctggagctgcggaccaccctgcagaggcggggcatggtgacaggccccagccgctcctggtag

SEQ ID NO: 158619 - DNA, 411 bp, synthetic construct
  misc_feature 1..411: note = Description of Artificial Sequence: Synthetic coding sequence
  source 1..411: mol_type = other DNA
atgtcctggaagaaggccctgcgcatccctgggggcctgcgggccgccaccgtgaccctgatgctggccatgctgagcacccctgtggccgagggccgggacagcccagaagattttgtgtaccagttcaaggccatgtgctacttcaccaatggaacagagcgggtgcgctacgtgacccgctacatctacaaccgggaggagtatgccaggtttgacagtgatgtggaggtgtacagagctgtgacccccctgggccccccagatgctgagtactggaacagccagaaggaggtgctggagaggaccagggctgagctggacacagtgtgccgccacaactaccagctggagctgcggaccaccctgcagaggcggggcaccgtgacaggccccagccgctcctggtag

SEQ ID NO: 158620 - DNA, 411 bp, synthetic construct
  misc_feature 1..411: note = Description of Artificial Sequence: Synthetic coding sequence
  source 1..411: mol_type = other DNA
atgtcctggaagaaggccctgcgcatccctggggacctgcgggtggccaccgtgaccctgatgctggccatgctgagcagcctgctggccgagggccgggacagcccagaagattttgtgttccagttcaagggcatgtgctacttcaccaatggaacagagcgggtgcggctggtgacccgctacatctacaaccgggaggagtatgccaggtttgacagtgatgtgggcgtgtacagagctgtgaccccccagggccgcccagatgctgagtactggaacagccagaaggaggtgctggagggcaccagggctgagctggacacagtgtgccgccacaactatgaggtggccttccggggcatcctgcagaggcggggcatggtgacaggcctgagccgctcctggtag

SEQ ID NO: 158621 - DNA, 717 bp, synthetic construct
  misc_feature 1..717: note = Description of Artificial Sequence: Synthetic coding sequence
  source 1..717: mol_type = other DNA
atgctgagcacccctgtggccgagggccgggacagccctgaggactttgtgtaccagttcaagggcatgtgctacttcaccaacggcacagagcgggtgcggctggtgagccgcagcatctacaaccgggaggagatcgtgcgctttgacagtgatgtgggggagttccgggctgtgaccctgctgggcctgcctgctgctgagtactggaacagccagaaggacatcctggagaggaagagagctgctgtggacagagtgtgccgccacaactaccagctggagctgcggaccaccctgcagaggagagtggagcccaccgtgaccatcagccccagcaggacagaggccctgaaccaccacaacctgctggtgtgcagcgtgacagacttctacccagcccagatcaaggtgcgctggttcagaaatggccaggaggagacagctggggtggtgtccacccccctcatcagaaatggagactggaccttccagatcctggtgatgctggagatgaccccccagagaggagatgtgtacacctgccacgtggagcaccccagcctgcagagccccatcaccgtggagtggagggcccagagcgagagcgcccagagcaagatgctgagcggcatcggcggctttgtgctgggcctcatcttcctgggcctgggcctcatcatccaccacaggagccagaagggcctgctgcactag

SEQ ID NO: 158622 - DNA, 543 bp, synthetic construct
  misc_feature 1..543: note = Description of Artificial Sequence: Synthetic coding sequence
  source 1..543: mol_type = other DNA
atgtgctacttcaccaacggcacagagcgggtgcggggcgtgacccgctacatctacaaccgggaggagtatgccaggtttgacagtgatgtgggcgtgtacagagctgtgacccccctgggccccccagctgctgagtactggaacagccagaaggaggtgctggagaggaccagggctgagctggacacagtgtgccgccacaactaccagctggagctgcggaccaccctgcagaggagagtggagcccaccgtgaccatcagccccagcaggacagaggccctgaaccaccacaacctgctggtgtgcagcgtgacagacttctacccagcccagatcaaggtgcgctggttcagaaatgaccaggaggagaccactggagtggtgtccacccccctcatcagaaatggagactggaccttccagatcctggtgatgctggagatgaccccccagagaggagatgtgtacacctgccacgtggagcaccccagcctgcagaaccccatcatcgtggagtggaggatggatgagttctag

SEQ ID NO: 158623 - DNA, 717 bp, synthetic construct
  misc_feature 1..717: note = Description of Artificial Sequence: Synthetic coding sequence
  source 1..717: mol_type = other DNA
atgctgagcacccctgtggccgagggccgggacagccctgaggactttgtgtaccagttcaagggcatgtgctacttcaccaacggcacagagcgggtgcggctggtgagccgcagcatctacaaccgggaggagatcgtgcgctttgacagtgatgtgggggagttccgggctgtgaccctgctgggcctgcctgctgctgagtactggaacagccagaaggacatcctggagaggaagagagctgctgtggacagagtgtgccgccacaactaccagctggagctgcggaccaccctgcagaggagagtggagcccaccgtgaccatcagccccagcaggacagaggccctgaaccaccacaacctgctggtgtgcagcgtgacagacttctacccagcccagatcaaggtgcgctggttcagaaatgaccaggaggagacagctggggtggtgtccacccccctcatcagaaatggagactggaccttccagatcctggtgatgctggagatgaccccccagagaggagatgtgtacacctgccacgtggagcaccccagcctgcagagccccatcaccgtggagtggagggcccagagcgagagcgcccagagcaagatgctgagcggcatcggcggctttgtgctgggcctcatcttcctgggcctgggcctcatcatccaccacaggagccagaagggcctgctgcactag

SEQ ID NO: 158624 - DNA, 744 bp, synthetic construct
  misc_feature 1..744: note = Description of Artificial Sequence: Synthetic coding sequence
  source 1..744: mol_type = other DNA
atgctgagcacccctgtggccgagggccgggacagccctgaggactttgtgtaccagttcaagggcatgtgctacttcaccaacggcacagagcgggtgcggggcgtgacccgctacatctacaaccgggaggagtatgccaggtttgacagtgatgtgggcgtgtacagagctgtgacccccctgggccccccagctgctgagtactggaacagccagaaggaggtgctggagaggaccagggctgagctggacacagtgtgccgccacaactaccagctggagctgcggaccaccctgcagaggagagtggagcccaccgtgaccatcagccccagcaggacagaggccctgaaccaccacaacctgctggtgtgcagcgtgacagacttctacccagcccagatcaaggtgcgctggttcagaaatgaccaggaggagaccactggagtggtgtccacccccctcatcagaaatggagactggaccttccagatcctggtgatgctggagatgaccccccagagaggagatgtgtacacctgccacgtggagcaccccagcctgcagaaccccatcatcgtggagtggagggcccagagcgagagcgcccagagcaagatgctgagcggcatcggcggctttgtgctgggcctcatcttcctgggcctgggcctcatcatccaccacaggagccagaaggccctgccccagggccccccacctgctggggacatctcctag

SEQ ID NO: 158625 - DNA, 717 bp, synthetic construct; identical to SEQ ID NO: 158623
  misc_feature 1..717: note = Description of Artificial Sequence: Synthetic coding sequence
  source 1..717: mol_type = other DNA

SEQ ID NO: 158626 - DNA, 801 bp, synthetic construct
  misc_feature 1..801: note = Description of Artificial Sequence: Synthetic coding sequence
  source 1..801: mol_type = other DNA
atggtgtgcctgcggctgcccggcggcagctgcatggctgtgctgactgtgaccctgatggtgctgagcagccccctggccctggccggggacacccggccccgcttcctggagtacagcaccagcgagtgccacttcttcaacggcacagagcgggtgcgctacctggaccgctacttccacaaccaggaggagaatgtgcgctttgacagtgatgtgggggagttccgggctgtgacagagctgggccgcccagatgctgagtactggaacagccagaaggacctgctggagcagaagaggggccgggtggacaactactgccgccacaactacggcgtggtggagagcttcaccgtgcagaggagagtgcaccccaaggtgacagtgtaccccagcaagacccagcccctgcagcaccacaacctgctggtgtgcagcgtgtctggcttctacccaggcagcattgaggtgcgctggttcagaaatggccaggaggagaagacaggagtggtgtccacaggcctcatccacaatggagactggaccttccagaccctggtgatgctggagaccgtgcccaggtctggagaggtgtacacctgccaggtggagcaccccagcgtgaccagccccctgactgtggagtggagggcccggtctgagagcgcccagagcaagatgctgagcggcgtgggcggctttgtgctgggcctgctcttcctgggcgccggcctcttcatctacttcaggaaccagaagggccacagcggcctgcagccccggggcttcctgtcctag

SEQ ID NO: 158627 - DNA, 801 bp, synthetic construct
  misc_feature 1..801: note = Description of Artificial Sequence: Synthetic coding sequence
  source 1..801: mol_type = other DNA
atggtgtgcctgaagctgcccggcggcagctgcatgacagccctgactgtgaccctgatggtgctgagcagccccctggccctgagcggggacacccggccccgcttcctgtggcagcccaagcgggagtgccacttcttcaacggcacagagcgggtgcgcttcctggaccgctacttctacaaccaggaggagagcgtgcgctttgacagtgatgtgggggagttccgggctgtgacagagctgggccgcccagatgctgagtactggaacagccagaaggacatcctggagcaggcccgggctgctgtggacacctactgccgccacaactacggcgtggtggagagcttcaccgtgcagaggagagtgcagcccaaggtgacagtgtaccccagcaagacccagcccctgcagcaccacaacctgctggtgtgcagcgtgtctggcttctacccaggcagcattgaggtgcgctggttcctgaatggccaggaggagaaggccggcatggtgtccacaggcctcatccagaatggagactggaccttccagaccctggtgatgctggagaccgtgcccaggtctggagaggtgtacacctgccaggtggagcaccccagcgtgaccagccccctgactgtggagtggagggcccggtctgagagcgcccagagcaagatgctgagcggcgtgggcggctttgtgctgggcctgctcttcctgggcgccggcctcttcatctacttcaggaaccagaagggccacagcggcctgcagcccaccggcttcctgtcctag

SEQ ID NO: 158628 - DNA, 801 bp, synthetic construct; identical to SEQ ID NO: 158626
  misc_feature 1..801: note = Description of Artificial Sequence: Synthetic coding sequence
  source 1..801: mol_type = other DNA

SEQ ID NO: 158629 - DNA, 753 bp, synthetic construct
  misc_feature 1..753: note = Description of Artificial Sequence: Synthetic coding sequence
  source 1..753: mol_type = other DNA
ctgctgaagctgacccgggacttcccccagagacatgagaagtaccagagctgggccggcaccttccacctgtgcctgaagaagaacaagtacccagacagccgcagcaccttcatcaagcacgccggcagctacctgaagagaggagagttcctgagcatccacacagccatcacctgcttcttcctgcagatcagcgcccgcttcctggagcaggtgaagcatgagtgccacttcttcaatggaacagagcgggtgcgcttcctggaccgctacttctaccaccaggaggagtatgtgcgctttgacagtgatgtgggggagtacagagctgtgacagagctgggccgcccagatgctgagtactggaacagccagaaggacctgctggagcagaggagagctgaggtggacacctactgccgccacaactatggagtggtggagagcttcaccgtgcagaggagagtgtacccagaggtgacagtgtacccagccaagacccagcccctgcagcaccacaacctgctggtgtgcagcgtgaatggcttctacccaggcagcattgaggtgcgctggttcagaaatggccaggaggagaagacaggagtggtgtccacaggcctcatccagaatggagactggaccttccagaccctggtgatgctggagaccgtgcccaggtctggagaggtgtacacctgccaggtggagcaccccagcctgaccagccccctgactgtggagtggtag

SEQ ID NO: 158630 - DNA, 756 bp, synthetic construct
  misc_feature 1..756: note = Description of Artificial Sequence: Synthetic coding sequence
  source 1..756: mol_type = other DNA
tgactgctgaagctgacccgggacttcccccagagacatgagaagtaccagagctgggccggcaccttccacctgtgcctgaagaagaacaagtacccagacagccgcagcaccttcatcaagcatgctggcagctacctgaagagaggagagttcctggccatccacacagccatcacctgcttcttccggcagatcagcgcccgcttcctggagtacagcaccagcgagtgccacttcttcaacggcacagagcgggtgcgctacctggaccgctacttccacaaccaggaggagaatgtgcgctttgacagtgatgtgggggagttccgggctgtgacagagctgggccgcccagatgctgagtactggaacagccagaaggacctgctggagcagaagaggggccgggtggacaactactgccgccacaactacggcgtggtggagagcttcaccgtgcagaggagagtgcaccccaaggtgacagtgtaccccagcaagacccagcccctgcagcaccacaacctgctggtgtgcagcgtgtctggcttctacccaggcagcattgaggtgcgctggttcagaaatggccaggaggagaagacaggagtggtgtccacaggcctcatccacaatggagactggaccttccagaccctggtgatgctggagaccgtgcccaggtctggagaggtgtacacctgccaggtggagcaccccagcgtgaccagccccctgactgtggagtggtag

SEQ ID NO: 158631 - DNA, 801 bp, synthetic construct
  misc_feature 1..801: note = Description of Artificial Sequence: Synthetic coding sequence
  source 1..801: mol_type = other DNA
atggtgtgcctgaagtttcctgggggcagctgcatggccgccctgactgtgaccctgatggtgctgagcagccccctggccctggccggggacacccggccccgcttcctggagcaggtgaagcatgagtgccacttcttcaacggcacagagcgggtgcgcttcctggaccgctacttctaccaccaggaggagtatgtgcgctttgacagtgatgtgggggagtacagagctgtgacagagctgggccgcccagatgctgagtactggaacagccagaaggacctgctggagcagaggagagctgaggtggacacctactgccgccacaactacggcgtggtggagagcttcaccgtgcagaggagagtgtacccagaggtgacagtgtacccagccaagacccagcccctgcagcaccacaacctgctggtgtgcagcgtgaatggcttctacccaggcagcattgaggtgcgctggttcagaaatggccaggaggagaagacaggagtggtgtccacaggcctcatccagaatggagactggaccttccagaccctggtgatgctggagaccgtgcccaggtctggagaggtgtacacctgccaggtggagcaccccagcctgaccagccccctgactgtggagtggagggcccggtctgagagcgcccagagcaagatgctgagcggcgtgggcggctttgtgctgggcctgctcttcctgggcgccggcctcttcatctacttcaggaaccagaagggccacagcggcctgcagcccaccggcttcctgtcctag

SEQ ID NO: 158632 - DNA, 756 bp, synthetic construct; identical to SEQ ID NO: 158630
  misc_feature 1..756: note = Description of Artificial Sequence: Synthetic coding sequence
  source 1..756: mol_type = other DNA

SEQ ID NO: 158633 - DNA, 753 bp, synthetic construct
  misc_feature 1..753: note = Description of Artificial Sequence: Synthetic coding sequence
  source 1..753: mol_type = other DNA
tgactgctgaagctgacccgggacttcccccagagacatgagaagtaccagagctgggccggcaccttccacctgtgcctgaagaagaacaagtacccagacagccgcagcaccttcatcaagcatgctggcagctacctgaagagaggagagttcctgagcatccacacagccatcacctgcttcttcctgcagatcagcgcccgcttcctgtggcagggcaagtacaagtgccacttcttcaacggcacagagcgggtgcagttcctggagcggctcttctacaaccaggaggagtttgtgcgctttgacagtgatgtgggggagtacagagctgtgacagagctgggccggcctgtggccgagagctggaacagccagaaggacatcctggaggaccggcggggccaggtggacacagtgtgccgccacaactacggcgtgggggagagcttcaccgtgcagaggagagtgcaccctgaggtgacagtgtacccagccaagacccagcccctgcagcaccacaacctgctggtgtgcagcgtgtctggcttctacccaggcagcattgaggtgcgctggttcagaaatggccaggaggagaaggccggcgtggtgtccacaggcctcatccagaatggagactggaccttccagaccctggtgatgctggagaccgtgcccaggtctggagaggtgtacacctgccaggtggagcaccccagcgtgatgagccccctgactgtggagtag

SEQ ID NO: 158634 - DNA, 801 bp, synthetic construct
  misc_feature 1..801: note = Description of Artificial Sequence: Synthetic coding sequence
  source 1..801: mol_type = other DNA
atggtgtgcctgaagctgcccggcggcagctgcatggccgccctgactgtgaccctgatggtgctgagcagccccctggccctggccggggacacccagccccgcttcctgtggcagggcaagtacaagtgccacttcttcaacggcacagagcgggtgcagttcctggagcggctcttctacaaccaggaggagtttgtgcgctttgacagtgatgtgggggagtacagagctgtgacagagctgggccggcctgtggccgagagctggaacagccagaaggacatcctggaggaccggcggggccaggtggacacagtgtgccgccacaactacggcgtgggggagagcttcaccgtgcagaggagagtgcaccctgaggtgacagtgtacccagccaagacccagcccctgcagcaccacaacctgctggtgtgcagcgtgtctggcttctacccaggcagcattgaggtgcgctggttcagaaatggccaggaggagaaggccggcgtggtgtccacaggcctcatccagaatggagactggaccttccagaccctggtgatgctggagaccgtgcccaggtctggagaggtgtacacctgccaggtggagcaccccagcgtgatgagccccctgactgtggagtggagggcccggtctgagagcgcccagagcaagatgctgagcggcgtgggcggctttgtgctgggcctgctcttcctgggcgccggcctcttcatctacttcaggaaccagaagggccacagcggcctgcagcccaccggcttcctgtcctag

SEQ ID NO: 158635 - DNA, 801 bp, synthetic construct; identical to SEQ ID NO: 158634
  misc_feature 1..801: note = Description of Artificial Sequence: Synthetic coding sequence
  source 1..801: mol_type = other DNA
